United States Patent Application Publication US 2007/0067865 A1 - sequence listing, part 13

SEQ ID NO: 76479 - DNA, 209 bp, Glycine max
gacaaaaatgcacttttagtcttttgtgtttatattttgtttaggtttgatcttttaaaaaaatcaatttagttttatgtcttttatggtcatttccaaacatttgatttgtcggttatgggtcacacttttgaatcttattttttattaatttgatatgtaaaacttgtgtcattaacttttcttgcataaatattataaaagtagcc

SEQ ID NO: 76480 - DNA, 402 bp, Glycine max
gtccatatttgtatgcaatggtgcatgatagttcagtgtctacgaatacgaggtgattttgtcattggtgtcaagttgacaaccataaacaatatgtgtgcatatgggctcaatcctggtatttcaggttctcgtcttttgggcaccattcctcagtccatttcacagcaaactgtttggaatcaaatggcaacagtgagaacaccattgaattttgattctagcaagcagagcttttgtcagttttctattgaccttctcggtggaggaatcttagtggacaaaactggagattggatcacacttatacaaaattctccaattagtaacttgttgagagttgctgcttggaagaaaggctgtttaatggtcaagattgtgatgtctgggaatgcagcagtc

SEQ ID NO: 76481 - DNA, 398 bp, Glycine max
ctggactccaaccaggaatcacttccactggactgctgccaaccactgggttgacttccacctaccaaacatccaccctcggaatgaacgatctcaatcgaaacggaatcccagacaatctcgaaagacaaggacttgcaggacagggcttcaccactggaacaactctgccatccagccaattccaaggattctccatcttaagcgatctgaatggaaatggaatccctgacaatcttgagagacgatctaatctcactggaggtctcaacgacctcaaccgaaacggaatccctgataatctcgagagacaattcggacagactggatttgtaggacagcagccgctcactggattgacttcattgaacgacagaaatggcaacggaatccctgac

SEQ ID NO: 76482 - DNA, 411 bp, Glycine max
gtccatttcacagcaaactgtttggaatcaaatggcaacagtgagaacaccattgaattttgattctagcaagcagagcttttgtcagttttctattgaccttctcggtggaggaatcttagtggacaaaactggagattggatcacacttatacaaaattctccaattagtaacttattgagagttgctgcttggaagaaaggctgtttaatggtcaagattgtgatgtctgggaatgcagcagtcaaaaggagtgattgggcctcattggtacaagtgttttttaacaaacagcaacagtacagagcattttgatgcatgtaagtggacaaaatcagaaccacattcctgggaattgatcttcccaatagaggtatgtggtcctaataatggttttgaaatgtggagtt

SEQ ID NO: 76483 - DNA, 401 bp, Glycine max
ttgtcattggtgtcaagttgacaaccataaacaatatgtgtgcatatgggctcaatcctggtatttcaggttctcgtcttttgggcaccattcctcagtccatttcacagcaaactgtttggaatcaaatggcaacagtgagaacaccattgaattttgattctagcaagcagagcttttgtcagttttctattgaccttctcggtggaggaatcttagtggacaaaactggagattggatcacacttatacaaaattctccaattagtaacttgttgagagttgctgcttggaagaaaggctgtttaatggtcaagattgtgatgtctgggaatgcagcagtcaaaaggagtgattgggcctcattggtacaagtgtttttaacaaacagcaacagtaca

SEQ ID NO: 76484 - DNA, 279 bp, Glycine max
ggttgtggctctttaaatagcatgtggaaggaggacttacaaagacgggggggttcttgtgcctctcgtgaactgaatttttaaattgtacgtggaagggaaagttctggatgctgttgatgagagattaaacatggagtttgttgttgatgaaatgacaagcttgattggtgtaaggttgtggtgtactaaccctaacaacaaggaaaggcccacctctacacaagttataaaagttcttcaacttgtagcgccattagccacgctttcacttgatat

SEQ ID NO: 76485 - DNA, 390 bp, Glycine max
ggttttgatattctcttgggaatctctcaagattatgaaattgctggtaatgctcttatgccagcttttactgttccacaggctactgccagatcttctgaaaatgcggaatcctctgcatgatctggaatttgtgttttctttctcttgttcgtttgtttaattcaataaaggaaattaggcatgaccctcttgatgagtatgctctgtctatttgaaaatttccacacgtgttttaattgtcgtaatgatgtgtgaagtgtgcgttctttttaaatgtaaaaaatgagttatttttttataaaaattattgttttttataatgataattgttttataaaatagaatatatttttttctatagcatgttttttctcttatttttttttt

SEQ ID NO: 76486 - DNA, 214 bp, Glycine max
  unsure (1)..(214): unsure at all n locations
ctangacggcgcacgcacgcgagcgtaagcttcgaattcagctcgacataangacttaatttgagatgtgaataaagcgaacaaggtgggtgtaatctgagtgaactgatcggcaaacacaacccatatgaagataatcgtggggctcgaggaacctgatatcattaacgaagtgaaggcaaaacacaacatcaaaatttcgtttctgaaccag

SEQ ID NO: 76487 - DNA, 405 bp, Glycine max
gccagttctgatatttacaccatctgctctcaagactgtgaattgtggagtgctgcttgcacaaaagcaatgactatgtcatttaatccaaacccgtgttctgatgcatggagtttggaatttctgaagcgtactggatttcattgcgatatcatttgtgtcactggatggactgccaccccaatgcaggatgttcaggttacaattgattggtttatttcctctcaggaatgtgttcccaggacctattgtgttttaaatccacaaaatccttttgtgttaaataggtggatgggaaaattgactttcccccatggcacttcccgaagtgttaagagaatgcctctttctatagggggaggagctggtgcaaagaatgctattttcatgaatatgccaaaagct

SEQ ID NO: 76488 - DNA, 387 bp, Glycine max
tgataacttaattagtgttcatgaatatgtcaagccttactttagtggttctaaatcgaaaagctttctagctagtcataacatcaccattactgatggtattgacaaaactagtgcaactttgcaatttagaaagatagcagattgtgattttctcaagagaaactttaagcagatgtctaatgttttgtgggtggctcctgaagacaaggcgagtttatggtcacaacttcattatgtgtcgtgtaataatctggaaatgcaagaagcttatctcgtcaatctcgtaaatgtgttacgacgaattgtatttgcacattccataagaagctcgttaattgagaaggaaagctctctctcggattgaatggctgcaaaaagctgatg

SEQ ID NO: 76489 - DNA, 379 bp, Glycine max
cttttgtcagttttctattgaccttctcggtggaggaatcttgggggagaaaactggagattggatcacacttatacaaaattctccaattagtaacttattgagagttgctgcttggaagaaaggctgtttaatggtcaagattgtgatgtctgggaatgcagcagtcaaaaggagtgattgggcctcattggtacaagtgtttttaacaaacagcaacagtacaaagcattttgatgcatgtaagtggacaaaatcagaaccacattcctgggaattgatcttcccaatagaggtatgtggtcctaataatggttttgaaatgtggagatttgagtgggcaaaataaacttcatggcatttgagtttgcttattgac

SEQ ID NO: 76490 - DNA, 402 bp, Glycine max
caggtgcgtcctgcaacaactctgttggctgatgggtgtccatatttgggtgcaatggtgcatgatagttcagtgtctacaataccaggtgattttgtcattggtgtcaagttgacaaccataaacaatatgtgtgcatatgggctcaatcctggtatttcaggttctcgtcttttgggcaccattcctcggtccatttcacagcaaactgtttggaatcaaatggcaacagtgagaacaccattgaattttgattctagcaagcagagcttttgtcagttttctattgaccttctcggtggaggaatcttagtggacaaaactggagattggatcacacttatacaaaattctccaattagtaacttattgagagttgctgcttggaagaaaggctgttta

SEQ ID NO: 76491 - DNA, 69 bp, Glycine max
ccccatcttcctgagcgactaacaacaattgccaacatgacgtgcgagaacactgacattgtcgacgag

SEQ ID NO: 76492 - DNA, 432 bp, Glycine max
gaaaaaggccggactcctaacatgacacaccaaccgcactgattatgataagaaaatgacaacacgccataccaaggtcttccagctcatgcaacaatacagcacaagaacacggcccaggcacccgaaaaagaaaaagacacgccacaaccagcctcacacgtgactgggccagaacacagcgacattgaagactgacaagaaccatatgactctactagccagcctagacaccatctataacaagaatgggacagcagccacaagcacgagtgacacaacgaacgaatgtgcagcaaatcaaactcagcgaaggcgtgccaccacaacaacctccgcacaatgatgtgcaagaagacccctggaaagtgcagcaacaactcaaaaggacaagggaacggagccacacgaaagagcaaaacacagatgcgc

SEQ ID NO: 76493 - DNA, 251 bp, Glycine max
cctcattttcctattcgtttcacaacaacaaccatcaacacggcgggggccacttaccttaatcccgatactcccatatctcccattttctctataaacccgcacaacaatatgcaaaatcaccttcaccatctcactccacctcacgttcttacaaacaaatatatccttctttacaccactacttcgcctactcttcacgccaattccctctacctctatctccagcacccaacccacaaccttaacaa

SEQ ID NO: 76494 - DNA, 305 bp, Glycine max
ttttacaagcgtaattttttgcttaataacgttatgtgatcggtgatgctattattactggtatgtttgagtcattcttttttttagttttaagaaaaaaattgtacaacaatttattttaatactttttaaatatttttattatgttttattattttttatattgcataattttataatggaacatcgtaaaatagaataataaacttattttatctatttctaacttacaatagtttctaaaattttaaaactgaaactcaaccctcaaaattaaaactaggtttaattttgaattatttcaa

SEQ ID NO: 76495 - DNA, 400 bp, Glycine max
gacaaaactagtgcaactttgcaatttagaaagttagcagatggtgattttctcaagagaaactttaagcagatgtctaatgttttgtgggtggctcctgaggacaaggcgagtttatggtcacaacttcattatgtttcgtgtaataatctggaaatgcaagaagcttatcttgtcaatctcgtaaatgtgttacgagaattgtatttgcacagtccagaggaagctcgccaattgagaaggaaagctctctctcgtattgaatggctgcaaaaagctgatgtgcctaccatagcacagattgaagagttccattcgatgcagaggatgatgaatgctcctgattcaaatgataatattgatttactgttgagcattgatttgttgggtttacaaggag

SEQ ID NO: 76496 - DNA, 412 bp, Glycine max
gcatttggaaatttggctgatgataccatcaattttgaggcttttccccacaagctggtgcagtttggagagattcaggaaaaagttgtattgaaattttcacaagaggaatttcttacagcttggtcaactcaggtgcgtcctgcaacaactctgttggctgatgggtgtccatatttgtatgcaatggtgcatgatagttcagtgtctacaataccaggtgattttgtcattggtgtcaagttgacaaccataaacaatatgtgtgcatatgggctcaatcctggtatttcaggttctcgtcttttgggcaccattcctcagtccatttcacagcaaactgtttggaatcaaatggcaacagtgagaacaccattgaattttgattctagcaagcagagcttttgtcagt

SEQ ID NO: 76497 - DNA, 328 bp, Glycine max
taaccctaaatttttcatttcattacctaacaaaaacaatacgggacggggttttaaatatagtattttcccccctctactaacaaccaagatatcctcgaacaaacttctacccttaccctccttccttgccaattttaacaatttttgctcgaataaacaccccccctcctcattttcattcctttgttcttaataaaaaagaaatcccttttcaaatctccaaaacttacaatcccaaaatttcatgttacacatctttgcaacacaattttttatcataatcccattacatcttgttctcctaaaatacccaatccaaaataaa

SEQ ID NO: 76498 - DNA, 305 bp, Glycine max
  unsure (1)..(305): unsure at all n locations
ctcatttcttattttaatcactgagtaaggncaatggtgtgcgttgtttttattatgctattttccatattcacattaccaatcattttattatcatgatctcacaaattataaacagactctcttaaggaaatgaaaaatttattcgtataatgacgcacctacttatgacttaatgttcaattatggcaatattttttaaagacttctaaatactttaatatctaatccattttgcatttcctctaactatttttttcaataacatcatcattcctattcatattatatatatttattaaaaa

SEQ ID NO: 76499 - DNA, 393 bp, Glycine max
cacgcgaacgggggctgcgtaatctccgaattcaaatctagcgctcatgtatgtttgacctcagtgaggatcctggggttgaggtgcgatttttcttcaacgaagcactacaagcaattgatcatgtcatgatgtcttgctaggcagaaatggttccacacgcatttaggttgaagacgtcagaagagatgctaatatttccaactaccataaataatactgcatagttatgtttagtgcttttcagtcattgaccattgatgtgatttagtttccattatatgctaatttccatatattatgtgttttttcctgattgtatttttcgtacatttttttttgatccttggtgtaatattctgctatgcaatgaatttgcacattttaattatt

SEQ ID NO: 76500 - DNA, 408 bp, Glycine max
atttggctgatgataccatcaattttgaggcttttccccacaagctggtgcggtttggagagattcaggaaaaagttgtattgaaattttcacaagaggaatttcttacagcttggtcaactcaggtgcgtcctgcaacaactctgttggctgatgggtgtccatatttgtatgcaatggtgcatgatagttcagtgtctacaataccaggtgattttgtcattggtgtcaagttgacaaccataaacaatatgtgtgcatatgggctcaatcctggtatttcaggttctcgtcttttgggcaccattcctcagtccatttcacagcaaactgtttggaatcaaatggcaacagtgagaacaccattgaattttgattctagcaagcagagcttttgtcagttttcta

SEQ ID NO: 76501 - DNA, 150 bp, Glycine max
gctgaacttacaatatgtaaatattttgttggagatctaatgtggtaaggtttttagatgacaagtccctacaataaatgttctcaccctttctttataccaaattcaaacaccgcttttgataccaccaaattttaagcttttccccac

SEQ ID NO: 76502 - DNA, 70 bp, Glycine max
cacgcgtacgtaagctcggaattcggctcgtgaaaaaactaactttttactatattccaaaaaccaaaat

SEQ ID NO: 76503 - DNA, 398 bp, Glycine max
tgcaattgaagttgaagtcttgcccttctctcttcaacgccaagcacaagacatcatcatccatggctgcctccgtctccactgtcggagctgtcaacagagctcttttgaacctgaatgggtctggacctggggtttcagctcccagttcatccttctttgggagcagcttgaagaaggttattggctcaagggtccccaacacaaagatttcctctggaagcttcaagattgttgctgtggaagagaagaaagagattgaagagacccaacagaccgacaaggacagatggaagggtcttgcctatgatatcttaaacgaccaacaggacatcacaagaggaaagggtttggttgactcccttttccaagctccacaggatgctggaactcactat

SEQ ID NO: 76504 - DNA, 399 bp, Glycine max
gtcatttaatccaaacccgtgttctgatgcatggagtgtggaatttctgaagcgtactggatttcattgccatatcatttgtgtcactggatggactgccaccccaatgcaggatgttcaggttacaattgattggtttatttcctctcaggaatgtgttcccaggacctattgtgttttaaatccacaaaatccttttgtgttaaataggtggatgggaaaattgactttcccccagggcacttcccgaagtgttaagagaatgcctctttctatagggggaggagctggtgcaaagaatgctattctcatgaatatgccaaatgctgttctttcaatgtggagatattttgttggagatctcgtctttgaagtttctaagatgacttctccctacat

SEQ ID NO: 76505 - DNA, 375 bp, Glycine max
ctgggaatgcagtagtcaaaaggagtgattgggcctcattggtgcaagtgtttttaacaaacagcaacagtacagagcattttgatgcatgtaagtggacaaaatcagaaccacattcctgggaattgatcttcccaatagaggtatgtggtcctaataatggttttgaaatgtggagttctgagtgggcaaatcaaacttcatggcatttgagttttcttattgacaatcccaaacagtctacagtttttgatattctcttgggaatctctcaagattttgaaattgctggtaatactcttatgccagctttttctgttccacaggctactgccagatcttctgaaaatgcggaatcctctgcatgatctggaa

SEQ ID NO: 76506 - DNA, 236 bp, Glycine max
acaaggcagaaagcaagctcatcctagagttttaaaaatggcagcagcctcctccatggctctctcttccccatccttggctggcaaggccgtgaagctgggcccatcagcccccgaagtcggaagggtcagcatgaggaaaaccgtaaccaagcaggcctcttccggaagccaatgttccggccaaaacggcgtcaagtacttgggcccattctttggcaagcccccgtcctacc

SEQ ID NO: 76507 - DNA, 152 bp, Glycine max
aggatgcccatctctatcccttccttttgtctcaaacacatattctttctgagaggtatggaattctttctaaatctagcatggacctcaaaaccacactgacggaggaggtcgaaacaatggcactgtcatgattggtgctaacgtgacca

SEQ ID NO: 76508 - DNA, 61 bp, Glycine max
gaccggcttgctgtggaacctggtcaacatctgcttgtgggtgtgcggctactacctcgct

SEQ ID NO: 76509 - DNA, 392 bp, Glycine max
gaaagctctctctcgtattgaatggctgcaaaaagctgatgtgcctaccatagcacagattgaagagttccattcgatgcagaggatgatgaatgctcctgattcaaatgataatattgatttactgttgagcattgatttgttgggtttacaaggagcaggtaaagcttttccaaacaaaattgtttttgatgataagcttgtgttggctaacacacaagaattctttgatggaaattttccagtggattcttggttaccaatttttgtgaattgtctttatcctgtaagtcaattaccttcagaagctgtcgttgtaaatgttacatgtggtagtggacgtggtggtttacccaccactgcttggattagttctgcagttaacaatcgct

SEQ ID NO: 76510 - DNA, 398 bp, Glycine max
attatccaaaacgccccagtgccttacgctactgctttttgtgtgacagccatatcattaaatattaattaccagagtcaaaagaaaacaatgagtatgcatgtacggtgggtggctattattaattaagaccaaaaccatccaaattctttgcttgtacacctgaaccctaatgaccactttcacacactccattttccaccatgaccttctttttcttttctatttctttctcctcacggaatttccgccgcaggccaccgcgcagcctccgaacacgctgacgccgccgccgcagcaggaccgctttacgaggctgaagttcgacaaatccatggccatcgttctgctgatcctggtggtgggttcttcatcctagggttccctctcgtgtacac

SEQ ID NO: 76511 - DNA, 362 bp, Glycine max
caagctggtgcagtttggagagattcaggaaaaagttgtgtgtgaaattttcacaagaggaatttcttacagcttggtcaactcaggtgcgtcctgcaacaactctgttggctgatgggtgtccatatttgtatgcaatggtgcatgatagttcagtgtctacaataccaggtgattttgtcattggtgtcaagttgacaaccataaacaatatgtgtgcatatgggctcaatcctggtatttcaggttctcgtcttttgggcaccattcctcagtccatttcacagcaaactgtttggaatcaaatggcaacagtgagaacaccattgaattttgattctagcaagcagagcttttgtcag

SEQ ID NO: 76512 - DNA, 68 bp, Glycine max
aaaaaaaaaaaaaaaaaaaaaaaaaaaaaaaaaaaaaaaaaagaggaaaaaaaaaaaaaaaggggggg

SEQ ID NO: 76513 - DNA, 406 bp, Glycine max
gtacagtctctttcttcatagcatttggaaatttggctgatgataccatcaattttgaggcttttccccacaagctggtgcagtttggagagattcaggaaaaagttgtattgaaattttcacaagaggaatttcttacagcttggtcaactcaggtgcgtcctgcaacaactctgttggctgatgggtgtccatatttgtatgcaatggtgcatgatagttcagtgtctacaataccaggtgattttgtcattggtgtcaagttgacaaccataaacaatatgtgtgcatatgggctcaatcctggtatttcaggttctcgtcttttgggcaccattcctcagtccatttcacagcaaactgtttggaatcaaatggcaacagtgagaacaccattgaattttga

SEQ ID NO: 76514 - DNA, 399 bp, Glycine max
gatgaatgctcctgattcaaatgataatattgatttggtggtgagcattgatttgttgggtttacaaggagcaggtaaagcttttccaaacaaaattgtttttgatgataagcttgtgttggctaacacacaagaattctttgatggaaattttccagtggattcttggttaccaatttttgtgaattgtctttatcctgtaagtcaattaccttcagaagctgtcgttgtaaatgttacatgtggtagtggacgtggtggtttacccaccactgcttggattagttctgcagttaacaatcgctcctcagatatcaacaaaaggattcgcacagcacttgggaaaggtaagaaaattgtttttcttactagagttgatccttttccagtagctttact

SEQ ID NO: 76515 - DNA, 398 bp, Glycine max
caccatttctcagtccatttcacagcaaactgtttggggtcaaatggcaacagtgagaacaccattgaattttgattctagcaagcagagcttttgtcagttttctattgaccttctcggtggaggaatcttagtggacaaaactggagattggatcacacttatacaaaattctccaattagtaacttgttgagagttgctgcttggaagaaaggctgtttaatggtcaagattgtgatgtctgggaatgcagcagtcaaaaggagtgattgggcctcattggtacaagtgtttttaacaaacagcaacagtacagagcattttgatgcatgtaagtggacaaaatcagaaccacattcctgggaattgatctttccaatagaggtatgtggtccta

SEQ ID NO: 76516 - DNA, 400 bp, Glycine max
ctcgagccgctcaagagaaactttaagcagatgtctaatgttttgtgggtggctcctgaggacaaggcgagtttatggtcacaacttcattatgtttcgtgtaataatctggaaatgcaagaagcttatcttgtcaatctcgtaaatgtgttacgagaattgtatttgcacagtccagaggaagctcgccaattgagaaggaaagctctctctcgtattgaatggctgcaaaaagctgatgtgcctaccatagcacagattgaagagttccattcgatgcagaggatgatgaatgctcctgattcaaatgataatattgatttactgttgagcattgatttgttgggtttacaaggagcaggtaaagctttttcaaacaaaattgtttttgatgataagc

SEQ ID NO: 76517 - DNA, 402 bp, Glycine max
ctggtgcaaagaatgctattctcatgaatatgccaaaggctggtctttcaatgtggagatattttgttggagatctcgtctttgaagtttctaagatgacttctccctacattaaatgtacagtctctttcttcatagcatttggaaatttggctgatgataccatcaattttgaggcttttccccacaagctggtgcagtttggagagattcaggaaaaagttgtattgaaattttcacaagaggaatttcttacagtttggtcaactcaggtgcgtcctgcaacaactctgttggctgatgggtgtccatatttgtatgcaatggtgcatgatagttcagtgtctacaataccaggtgattttgtcattggtgtcaagttgacaaccataaacaatatgt

SEQ ID NO: 76518 - DNA, 179 bp, Glycine max
atgagatgctcattagatatagctatgaaaaattactgcgccaggctaaagctccaagtatgtttttacaatccttcaaaaattttgtttctttgtgtgtgtatggtgatgataacttaattagtgttcatgaatatgtcaagccttactttagtggttctaaattgaaaagcttttta

SEQ ID NO: 76519 - DNA, 316 bp, Glycine max
aagagcttcaatggcggtttctctctctgttactcctcttggggtctccaattcttcgtcttctctatcttccaagccaaagtttccatctttgggctttctctctggcaccaacaccttgggggttaatggcccaaaacctttgacctcaacacctgtggttcattttgctccaaaaccgtgggatttttaacctgatcccttaaacccacctccaaaaacctttgttgatgactctgaccccaccacctttgaggttggtgacctggggactcctagcccttcggcaattaccattgtgtggcaattcaaatcc

SEQ ID NO: 76520 - DNA, 388 bp, Glycine max
ctcgagccgaatcggctcgaggtagatttccatgacatgggagttataatgttataatatgaatggcaaatagatactattgagaagggaaaaaaaaaaaaaaaaaaaaaaaaaaaaaaaaaaaaaaaaaaaaaaaaaaaaaaaaaaaaaaaaaaaaaaaaaaaaaaaaaaaaaaaaaaaaaaaaaaaaaaaaaaaaaaaaaaaaaaaaaaaaggggggggcccccccataataacctcttccccccggaaaaaaattccgacccgttccctgtaggcgaccaacttttcctttaagagagcctatttaaacctgggcgaaataagggacaaaactgttccctggggaaaaatgttaccctttcaaaattccccaaaataaacaaccc

SEQ ID NO: 76521 - DNA, 405 bp, Glycine max
gttcagtgtctacaataccaggtgattttgtcattggtgtggagttgacaaccataaacaatatgtgtgcatatgggctcaatcctggtatttcaggttctcgtcttttgggcaccattcctcagtccatttcacagcaaactgtttggaatcaaatggcaacagtgagaacaccattgaattttgattctagcaagcagagcttttgtcagttttctattgaccttctcggtggaggaatcttagtggacaaaactggagattggatcacacttatacaaaattctccaattagtaacttgttgagagttgctgcttggaagaaaggctgtttaatggtcaagattgtgatgtctgggaatgcaacagtcaaaaggagtgattgggcctcattggtacaagtgt

SEQ ID NO: 76522 - DNA, 385 bp, Glycine max
caactcaggtgcgtcctgcaacaactctgttggctgatgggtgtccatatttgtatgcaatggtgcatgatagttcagtgtctacaataccaggtgattttgtcattggtgtcaagttgacaaccataaacaatatgtgtgcatatgggctcaatcctggtatttcaggttctcgtcttttgggcaccattcctcagtccatttcacagcaaactgtttggaatcaaatggcaacagtgagaacaccattgaattttgattctagcaagcagagcttttgtcagttttctattgaccttctcggtggaggaatcttagtggacaaaactggagattggatcacacttatacaaaattctccaattagtaacttgttgagagttgc

SEQ ID NO: 76523 - DNA, 310 bp, Glycine max
gagtggtgcttttttacattcttcaaaaaattttcctgaaaagggggatcattaataacccaaactgatttatgccagattgagacaaataatatatccttaatacactcagattgacgctctagattaaccaacaatctataaagtgcactattccgcatattcaactacttttcggtactgactttaaaccgtaaatttaaaatgttaaaaaaaagtattcaagagctcttctaacacaaaaacgtatttttacttccctgagactttttattcatcttagttcattatctaatttgtttaattatta

SEQ ID NO: 76524 - DNA, 394 bp, Glycine max
caatttttatggcttttccccacaagctggtgcagtttggagagattcaggaaaaagttgtattgaaattttcacaagaggaatttcttacagcttggtcaactcaggtgcgtcctgcaacaactctgttggctgatgggtgtccatatttgtatgcaatggtgcatgatagttcagtgtctacaataccaggtgattttgtcattggtgtcaagttgacaaccataaacaatatgtgtgcatatgggctcaatcctggtatttcaggttctcgtcttttgggcaccattcctcagtccatttcacagcaaactgtttggaatcaaatggcaacagtgagaacaccattgaattttgattctagcaagcagagcttttgtcagttttctattga

SEQ ID NO: 76525 - DNA, 398 bp, Glycine max
gggaattgatcttcccaatagaggtatgtggtcctaataatggttttgaaatgtggagttctgagtgggcaaatcaaacttcatggcatttgagtttccttattgacaatcccaaacagtctacagtttttgatattctcttgggaatctctcaagattttgaaattgctggtaatactcttatgccagctttttctgttccacaggctactgccagatcttctgaaaatgcggaatcctctgcatgatctggaatttgtgttttctttcgcttgttcgtttgtttaattcaataaaggaaattaggcatgaccctcttgttgagtatgctctgcctatttgaaaatttccacacctcttttaattgtcgtaatgatgtgtgaagtgtgtgttatttt

SEQ ID NO: 76526 - DNA, 406 bp, Glycine max
cgaaagtcaaatgcataaggtcatgtttgatgataaagagaacatctcatttattgatggcctcctagataaacaaccagtgttcaggtttccttgtcttcagaatgttgatgaaaatttaaagaagaataaggctgtaaaaatcgccaaaccacagaagcctacaaatgcaagtgtccgagctggtgattggatctgcctggtctgcaacaacttgaacttctcttttaggaatgaatgtaatcgctgtagagctcaaacaaggaagcaaaactacattcagagtctcctcttgatttcggatagtcccaaaactgaagctagttctcctaaaagactggccctcaaggatctgaccaatcagatggctcctccaaacaattctaaccctttgggaatgctagtc

SEQ ID NO: 76527 - DNA, 366 bp, Glycine max
atttgggttttgtggttgatgaggttgagattgaaatggagggtgatgatggcgatgggaattcggtggcgtcagggttcactaatgccgttgaggaggaagaagaggaggaggaggaggatgccggggaagaggcgctgaggtacctcgaatgggagattctcttggcggttaacaattcggagaggaatgtgaatggtgtgttggagcacgagggcaatgctgttggtggtgctgatttcttaacaattcaggatggttatgtgtatgccgcagagtatgatgtttcgttcgggcagtttcttgagaatgagagtgccttgaaaggaagccctccggctgctaagagtgttgtggagagtctcc

SEQ ID NO: 76528 - DNA, 256 bp, Glycine max
gggaatctctcaagattttgaaattgctggtaatacggttatgccagctttttctgttccacaggctactgccagatcttctgaaaatgcggaatcctctgcatgatctggaatttgtgttttctttcgcttgttcgtttgtttaattcaataaaggaaattaggcatgaccctcttgttgagtatgctctgcctatttgaaaatttccacacctcttttaattgtcgtaatgatgtgtgaagtgtgtgttatttt

SEQ ID NO: 76529 - DNA, 409 bp, Glycine max
attgtgattttctcaagagaaactttaagcagatgtctaatgttttgtgggtggctcctgaggacaaggcgagtttatggtcacaacttcattatgtttcgtgtaataatctggaaatgcaagaagcttatcttgtcaatctcgtaaatgtgttacgagaattgtatttgcacagtccagaggaagctcgccaattgagaaggaaagctctctctcgtattgaatggctgcaaaaagctgatgtgcctaccatagcacagattgaagagttccattcgatgcagaggatgatgaatgctcctgattcaaatgataatattgatttactgttgagcattgatttgttgggtttacaaggagcaggtaaagcttttccaaacaaaattgtttttgatgataagcttgtgtt

SEQ ID NO: 76530 - DNA, 383 bp, Glycine max
cggctcgagcctcagtccatttcacagcaaactgtttggaagcaaatggcaacagtgagaacaccattgaattttgattctagcaagcagagcttttgtcagttttctattgaccttctcggtggaggaatcttagtggacaaaactggagattggatcacacttatacaaaattctccaattagtaacttgttgagagttgctgcttggaagaaaggctgtttaatggtcaagattgtgatgtctgggaatgcagcagtcaaaaggagtgattgggcctcattggtacaagtgtttttaacaaacagcaacagtacagagcattttgatgcatgtaagtggacaaaatcagaaccacattcctgggaattgatcttcccaat

SEQ ID NO: 76531 - DNA, 398 bp, Glycine max
caaatatgatataattggtgctggttcacattcttcagaggattttcctgaaaaggaagatcaagaaaaacccaaaaagattgatgccagattgagacaaagaatagatcctcaatacaatgaggttcaggctcagatggaaacaaatttgtttaaattgtctcttgatgatgttgaaactcctaaaggttccatgttggatctgaaaatttctcaatctaaaattgcacttcccaagaacacagttggaggaaccattctgcgtagtgatctattggcaaattttttgacagagggcaattttagagcaagtgttgatttgcagcgcactcatcgtattagaggaatgattaaaatggtggccacagttggtattcctgagaatacaggtatatcat

SEQ ID NO: 76532 - DNA, 374 bp, Glycine max
cgagcttcggctggatccacgggcttcgcttctcgggcgtcgacctcgaccgcttccccaacctgaaggcgtggtgggagcgcatcaacgagcggcctgcggtacaagctggtctggccattccttccaagcctggcattggcaacgatggatacctgcagaagctgagcgaggacaaggagttcgctgcgaaagagaaggagatcgccgaccagattcagaaggccaaagaacagtatggttacaagtactcctcgccgtgagcgatggacgttcggatgagggatgccgagctggcgtcaacgtgacgcccggcagcggcttcttggtggaagcataataaagctcacaataatttatagaaatttatcttc

SEQ ID NO: 76533 - DNA, 403 bp, Glycine max
gtgtttttaacaaacagcaacagtacagagcattttggggcatgtaagtggacaaaatcagaaccacattcctgggaattgatcttcccaatagaggtatgtggtcctaataatggttttgaaatgtggagttctgagtgggcaaatcaaacttcatggcatttgagtttccttattgacaatcccaaacagtctacagtttttgatattctcttgggaatctctcaagattttgaaattgctggtaatactcttatgccagctttttctgttccacaggctactgccagatcttctgaaaatgcggaatcctctgcatgatctggaatttgtgttttctttcgcttgttcgtttgtttaattcaataaaggaaattaagcatgaccctcttgttgagtatgc

SEQ ID NO: 76534 - DNA, 380 bp, Glycine max
gtcggtaacgcgggcggtatcatcagctcgttcctgtgccggtcgacccaggcgccgcgatactaccaaggccacggtgtcaacgttgcgtactgcttcatgacggtctgcctcgctggcttcatgacgttttacctcgagcaccagaacaagaagaaggccgagctgcgcgagtcgcgcacgtggacggccgaggagcggagcgagatctctgaacgccaagccgacagctcgccgttctttgtctacacgctttaaaatggcggggtgtgggctggcagggctggcgatggggcgtgtgaagggctcattggtttagatggcagtgaaaatgacaacacatactttgtatattgttttgatgcaaatgtgaagtgatg

SEQ ID NO: 76535 - DNA, 408 bp, Glycine max
gtattttggaaggatgtcttacgttgctcataacgttaatcagccccaagagaaagatttgttggagggaaatttttcctttgatattaaatctcgctctagattggaaaaagtttcctctacaaaagcacaatttgttagtggaaaaaccttcaaatatgatataattggtgctggttcacattcttcagaagattttcctgaaaaggaagatcaagaaaaacccaaaaagattgatgccagattgagacaaagaatagatcctcaatacaatgaggttcaggctcagatggaaacaaatttgtttaaattgtctcttgatgatgttgaaactcctaaaggttccatgttggatctgaaaatttctcaatctaaaattgcacttcccaagaacacagttggaggaac

SEQ ID NO: 76536 - DNA, 404 bp, Glycine max
gtgagaacaccattgaattttgattctagcaagcagagctggggtcagttttctattgaccttctcggtggaggaatcttagtggacaaaactggagattggatcacacttatacaaaattctccaattagtaacttgttgagagttgctgcttggaagaaaggctgtttaatggtcaagattgtgatgtctgggaatgcagcagtcaaaaggagtgattgggcctcattggtacaagtgtttttaacaaacagcaacagtacagagcattttgatgcatgtaagtggacaaaatcagaaccacattcctgggaattgatcttcccaatagaggtatgtggtcctaataatggttttgaaatgtggagttctgagtgggcaaatcaaacttcatggcatttgag

SEQ ID NO: 76537 - DNA, 408 bp, Glycine max
tgcaattgaagttgaagtcttgcccttctctcttcaggtccaaacacaagacatcatcatccatggctgcctccgtctccactgtcggagctgtcaacagagctcttttgaacctgaatggggtctggacctggggtttcagctcccagttcatccttctttgggagcagcttgaagaaggttattggctcaagggtccccaacacaaagatttcctctggaagcttcaagattgttgctgtagaagagaagaaagagattgaagagacccagcagaccgacaaggacagatggaagggtcttgcctatgatatctcagacgaccaacaggacatcacaagaggaaagggtttggttgactcccttttccaagctccacaggatgctggaactcactatgctgtcatg

SEQ ID NO: 76538 - DNA, 320 bp, Glycine max
  unsure (1)..(320): unsure at all n locations
atttgttggggtttaaaaaattttgggataattataagagaaataaataaatttttatattttatttaaatttatttatataaaatattataattatatattataaaaaatattataaataattttattatttaaaataaatataaataatatatttttttttttttnnaaaaaaaaaaaaaaaaaaaaaaaaaananttatttatttttatatttaaaaaaaaaaaaaaaaaaatttaaaaaaaaaaaaaaaaaaaaaaaaaaattttaattttaataaaaaaaaaaaaaaaaaaaaaaaaanaaaaaaaatntnttat

SEQ ID NO: 76539 - DNA, 405 bp, Glycine max
ctcgtaaatgtgttacgagaattgtatttgcacagtccagaggaagctcgccaattgagaaggaaagctctctctcgtattgaatggctgcaaaaagctgatgtgcctaccatagcacagattgaagagttccattcgatgcagaggatgatgaatgctcctgattcaaatgataatattgatttactgttgagcattgatttgttgggtttacaaggagcaggtaaagcttttccaaacaaaattgtttttgatgataagcttgtgttggctaacacacaagaattctttgatggaaattttccagtggattcttggttaccaatttttgtgaattgtctttatcctgtaagtcaattaccttcagaagctgtcgttgtaaatgttacatgtggtagtggacgt

SEQ ID NO: 76540 - DNA, 355 bp, Glycine max
gcggaattctctgcatgatctggaatttgtgttttcgttcgcttgttcgtttgtttaattcaataaaggaaattaggcatgaccctcttgttgagtatgctctgcctatttgaaaatttccacacctcttttaattgtcgtaatgatgtgtgaagtgtgtgttattttaaaaaaaaaaaaaaaaaaaaaaaaaaaaataataatttaataaaaaattatttaaaaaaatttataaatattataaaaagattatttaaaaaaaaaaaattttaattagaatattataaaaggggggtccccactttttaagtttcgtcccccgggaatattcgtcttcctcaaaagatgttccttc

SEQ ID NO: 76541 - DNA, 405 bp, Glycine max
ctcgagccgattcggctcgagctggatttcattgcgatatcgtttgtgtcactggatggactgccaccccaatgcaggatgttcaggttacaattgattggtttatttcctctcaggaatgtgttcccaggacctattgtgttttaaatccacaaaatccttttgtgttaaataggtggatgggaaaattgactttcccccagggcacttcccgaagtgttaagagaatgcctctttctatagggggaggagctggtgcaaagaatgctattctcatgaatatgccaaatgctgttctttcaatgtggagatattttgttggagatctcgtctttgaagtttctaagatgacctctccctacattaaatgtacagtctctttcttcatagcatttggaaatttgg

SEQ ID NO: 76542 - DNA, 399 bp, Glycine max
ctgagtcttgcaattgaagttgaagtcttgcccttctctcttcaactccaaacacaagacatcatcatccatggctgcctccgtctccactgtcggagctgtcaacagagctcttttgaacctgaatgggtctggacctggggtttcagctcccagttcatccttctttgggagcagcttgaagaaggttattggctcaagggtccccaacacaaagatttcctctggaagcttcaagattgttgctgtagaagagaagaaagagattgaagagacccagcagaccgacaaggacagatggaagggtcttgcctatgatatctcagacgaccaacaggacatcacaagaagaaagggtttggttgactcccttttccaagctccacaggatgctggaac

SEQ ID NO: 76543 - DNA, 408 bp, Glycine max
gaaagatttgttggagggaaatttttcctttgatattgaatgtcgctctagattggaaaaagtttcctctacaaaagcacaatttgttagtggaaaaaccttcaaatatgatataattggtgctggttcacattcttcagaagattttcctgaaaaggaagatcaagaaaaacccaaaaagattgatgccagattgagacaaagaatagatcctcaatacaatgaggttcaggctcagatggaaacaaatttgtttaaattgtctcttgatgatgttgaaactactaaaggttccatgttggatctgaaaatttctcaatctaaaattgcacttcccaagaacacagttggaggaaccattctgcgtagtgatctattggcaaattttttgacagagggcaattttag

SEQ ID NO: 76544 - DNA, 82 bp, Glycine max
cttttaatttattaatactttcactcaattaaggaggggtgtggataataagaacgtattggattgatctttaaccaatatc

SEQ ID NO: 76545 - DNA, 393 bp, Glycine max
  unsure (1)..(393): unsure at all n locations
aaggaaagctctctctcgtattgaatggctgcaaaaagctgatgtgcctaccatagcacagattgaagagttccattcgatgcagaggatgatgaatgctcctgattcaaatgataatattgatttactgttgagcattgatttgttgggtttacaaggagcaggtaaagcttttccaaacaaaattgtttttgatgataagcttgtgttggctaacacacaagaattctttgatggaaattttccagtggattcttggttaccaatttttgtgaattgtctttatcctgtaagtcaattaccttcagaagctgtcgttgtaaatgttacatgtggtagtggacgntgtgttacccaccactgcttggattagttctgcagttaacaatcgct

SEQ ID NO: 76546 - DNA, 384 bp, Glycine max
ctcaggaatgtgttcccaggacctattgtgttttaaatccacaaaatccttttgtgttaaataggtggatgggaaaattgactttcccccagggcacttcccgaagtgttaagagaatgcctctttctatagggggaggagctggtgcaaagaatgctattctcatgaatatgccaaatgctgttctttcaatgtggagatattttgttggagatctcgtctttgaagtttctaagatgacttctccctacattaaatgtacagtctctttcttcatagcatttggaaatttggctgatgataccatcaattttgaggcttttccccacaagctggtgcagtttggagagattcaggaaaaagttgtattgaaattttcacaag

SEQ ID NO: 76547 - DNA, 387 bp, Glycine max
agcttatcttgtcaatctcgtaaatgtgttacgagaattgtgtttgcacagtccagaggaagctcgccaattgagaaggaaagctctctctcgtattgaatggctgcaaaaagctgatgtgcctaccatagcacagattgaagagttccattcgatgcagaggatgatgaatgctcctgattcaaatgataatattgatttactgttgagcattgatttgttgggtttacaaggagcaggtaaagcttttccaaacaaaattgtttttgatgataagcttgtgttggctaacacacaagaattctttgatggaaattttccagtggattcttggttaccaatttttgtgaattgtctttatcctgtaagtcaattaccttcagaagc

SEQ ID NO: 76548 - DNA, 333 bp, Glycine max
agccagcgacttaacatcacataaaacaaacaagacaataaatgtaaagtgtgctaacaatcttgagcctctgggtagatttatctctcttgtttcgtatagttgatcaagatctattaccaatttcagtcgcttggtgttgacatctatgaagattccccccacccctcgttttctcagtagtttgaactcacagcatacaggaaaggaaaccctttatggttataactgagaataactctgttgactgcatctatgttttgactagaaaaacttactcgagaattcagattggttatgtacgaaagtttgtgtaaataacattattcgctt

SEQ ID NO: 76549 - DNA, 400 bp, Glycine max
tctaaattgaaaagctttctagctagtcataacatcaccattactgatggtattgacaaaactagtgcaactttgcaatttagaaagttagcagattgtgattttctcaagagaaactttaagcagatgtctaatgttttgtgggtggctcctgaggacaaggcgagtttatggtcacaacttcattatgtttcgtgtaataatctggaaatgcaagaagcttatcttgtcaatctcgtaaatgtgttacgagaattgtatttgcacagtccagaggaagctcgccaattgagaaggaaagctctctctcgtattgaatggctgcaaaaagctgatgtgcctaccatagcacagattgaagagttccattcgatgcagaggatgatgaatgctcctgatt

SEQ ID NO: 76550 - DNA, 388 bp, Glycine max
  unsure (1)..(388): unsure at all n locations
atttaatccaaacccgtgttctgatgcatggagtttggaattggtgaagcgtactggatttcattgcgatatcatttgtgtcactggatggactgccaccccaatgcaggatgttcaggttacaattgattggtttatttcctctcaggaatgtgttcccaggacctattgtgttttaaatccacaaaatccttttgtgttaaataggtggatgggaaaattgactttcccccagggcacttcccgaagtgttaagagaatgcctctttctatagggggaggagctggtgcaaagaatgctattctcatgaatatgccaaatgctgttctttcaatgtggagatantttgttggagatctcgtctttgaagtttctaagatgacttct

SEQ ID NO: 76551 - DNA, 155 bp, Glycine max
ttggtttatatcgaaacacactcatcgcacgagctcatgcatatgtcaccaccctacctgcctattgaactgcaggacctgtctgctgaactcgccttcctagagttatcacatgacacctgtacaaacccgctcaagctttctaagttacaagc

SEQ ID NO: 76552 - DNA, 395 bp, Glycine max
gttttctattgaccttctcggtggaggaatcttagtggacaaaactggagattggatcacacttatacaaaattctccaattagtaacttgttgagagttgctgcttggaagaaaggctgtttaatggtcaagattgtgatgtctgggaatgcagcagtcaaaaggagtgattgggcctcattggtacaagtgtttttaacaaacagcaacagtacagagcattttgatgcatgtaagtggacaaaatcagaaccacattcctgggaattgatcttcccaatagaggtatgtggtcctaataatggttttgaaatgtggagttctgagtgggcaaatcaaacttcatggcatttgagtttccttattgacaatcccaaacagtctacagtttttg

SEQ ID NO: 76553 - DNA, 333 bp, Glycine max
attacccatactttctgccagtaaaaatgtttaggggggaacggtattcttatagacaaccatcattaaccaactatattttgtgtaccgttccaagattaattctctagtctattgcactgtacacaagactttcatgctctagaaccatccatgattggggcacccccttatccaatggcctcttctttacaaatattacctgaatgggataactgttccgtgtgccaaatgcttcgcacagtgcccaataagtgattgccacgcaatttgtatgcttgaggtgcctacatgaataataacattggccctttttgagagaatgtgaataac

SEQ ID NO: 76554 - DNA, 403 bp, Glycine max
catgcacacgtacgtaatctcggaattcggctccaggaattataatggcttgtctgcctttacccaaccatggggggtctgcaaccttgcaaactatatggccttttctttgacaaaaaattctgctctgctcttcctaaccacgtggtgctggttggtctacacttaccttcagcatgtaaggtgcatatactattttactaaatattgtaccaatgtcctgtattgcaccctactgcttgtgaattgttctacataatcctattcttttccatatacttgaatgctatgattgtgcttattacttgttaatgataaaacttttatttttctactctctcttacaagtcaaaaaaaaacattatatttttgcgcccgccttcttttgttttttttttccccg

SEQ ID NO: 76555 - DNA, 389 bp, Glycine max
ctgatgggtgttcatatttgtatgcaatggtgcatgatagttgagtgtctacaataccaggtgattttgtcattggtgtcaagttgacaaccataaacaatatgtgtgcatatgggctcaatcctggtatttcaggttctcgtcttttgggcaccattcctcagtccatttcacagcaaactgtttggaatcaaatggcaacagtgagaacaccattgaattttgattctagcaagcagagcttttgtcagttttctattgaccttctcggtggaggaatcttagtggacaaaactggagattggatcacacttatacaaaattctccaattagtaacttattgagagttgctgcttggaagaaaggctgtttaatggtcaagattgtg

SEQ ID NO: 76556 - DNA, 401 bp, Glycine max
tttccccacaagctggtgcagtttggagagattcaggaaaaaggtgtattgaaattttcacaagaggaatttcttacagcttggtcaactcaggtgcgtcctgcaacaactctgttggctgatgggtgtccatatttgtatgcaatggtgcatgatagttcagtgtctacaataccaggtgattttgtcattggtgtcaagttgacaaccataaacaatatgtgtgcatatgggctcaatcctggtatttcaggttctcgtcttttgggcaccattcctcagtccatttcacagcaaactgtttggaatcaaatggcaacagtgagaacaccattgaattttgattctagcaagcagagcttttgtcagttttctattgaccttctcggtggaggaatctt

SEQ ID NO: 76557 - DNA, 396 bp, Glycine max
attagtaacttgttgagagttgctgcttggaagaggggctggggaatggtcaagattgtgatgtctgggaatgcagcaatcaaaaggagtgattgggcctcattggtacaagtgtttttaacaaacagcaacagtacagagcattttgatgcatgtaagtggacaaaatcagaaccacattcctgggaattgatcttcccaatagaggtatgtggtcctaataatggttttgaaatgtggagttctgagtgggcaaatcaaacttcatggcatttgagtttccttattgacaatcccaaacagtctacagtttttgatattctcttgggaatctctcaagattttgaaattgctggtaatactcttatgccagctttttctgttccacaggctact

SEQ ID NO: 76558 - DNA, 180 bp, Glycine max
aaatgttacatgttgaaatttacgtggtggaagaggggccgctgatcggattaaatccccaccccacaatctctcctaaaatatcagcgtgaggcttctcacagggctcaggaccggttagaaaactgcatctgttaatagcgtttatcctcatgcaacaacacaacaacctaatctttt

SEQ ID NO: 76559 - DNA, 295 bp, Glycine max
  unsure (1)..(295): unsure at all n locations
ctctctcattgcgtgcaccaccccaaaaaaaaatatacatatagatatgtacataaaaaaaacaacccccccccccccaannnnnnnntntanngggncgcagttggtgacggcgcaacacagcctggaaattggattggtctataaaaccccttcgggggctctccactttgacgggcaggggaatttttcatgggaggaaggaaaaagtttggggctcatgtgagccggattttgggtgaggaaagagcaaggtgaagaacaccttatctcatggctttcacttgggaaaggg

SEQ ID NO: 76560 - DNA, 379 bp, Glycine max
gacaaccataaacaatatgtgtgcatatgggctcaatcctggtgtttcaggttctcgtcttttgggcaccattcctcagtccatttcacagcaaactgtttggaatcaaatggcaacagtgagaacaccattgaattttgattctagcaagcagagcttttgtcagttttctattgaccttctcggtggaggaatcttagtggacaaaactggagattggatcacacttatacaaaattctccaattagtaacttattgagagttgctgcttggaagaaaggctgtttaatggtcaagattgtgatgtctgggaatgcagcagtcaaaaggagtgattgggcctcattggtacaagtgtttttacaaacagcaacagta

SEQ ID NO: 76561 - DNA, 389 bp, Glycine max
tggagagattcaggaaaaagttgtattgaaattttcacaagaggaatttcttacagcttggtcaactcaggtgcgtcctgcaacaactctgttggctgatgggtgtccatatttgtatgcaatggtgcatgatagttcagtgtctacaataccaggtgattttgtcattggtgtcaagttgacaaccataaacaatatgtgtgcatatgggctcaatcctggtatttcaggttctcgtcttttgggcaccattcctcagtccatttcacagcaaactgtttggaatcaaatggcaacagtgagaacaccattgaattttgattctagcaagcagagcttttgtcagttttctattgaccttctccgtggaggaatcttagtggacaaaa

SEQ ID NO: 76562 - DNA, 383 bp, Glycine max
atctgctctcaagactgtgaattgtggaatcctgctggcacaaaagcaatgactatgtcatttaatccaaacccgtgttctgatgcatggagtttggaatttctgaagcgtactggatttcattgcgatatcatttgtgtcactggatggactgccaccccaatgcaggatgttcaggttacaattgattggtttatttcctctcaggaatgtgttcccaggacctattgtgttttaaatccacaaaatccttttgtgttaaataggtggatgggaaaattgactttcccccagggcacttcccgaagtgttaagagaatgcctctttctatagggggaggagctggtgcaaagaatgctattctcatgaatatgccaaatgc

SEQ ID NO: 76563 - DNA, 389 bp, Glycine max
atttggaaatttggctgatgataccatcaattttgagggtttgccccacaagctggtgcagtttggagagattcaggaaaaagttgtattgaaattttcacaagaggaatttcttacagcttggtcaactcaggtgcgtcctgcaacaactctgttggctgatgggtgtccatatttgtatgcaatggtgcatgatagttcagtgtctacaataccaggtgattttgtcattggtgtcaagttgacaaccataaacaatatgtgtgcatatgggctcaatcctggtatttcaggttctcgtcttttgggcaccattcctcagtccatttcacagcaaactgtttggaatcaaatggcaacagtgagaacaccattgaattttgattcta

SEQ ID NO: 76564 - DNA, 397 bp, Glycine max
cttgttgagagttgctgcttggaagaaaggctgtttaatggtgaagattgtgatgtctgggaatgcagcagtcaaaaggagtgattgggcctcattggtacaagtgtttttaacaaacagcaacagtacagagcattttgatgcatgtaagtggacaaaatcagaaccacattcctgggaattgatcttcccaatagaggtatgtggtcctaataatggttttgaaatgtggagttctgagtgggcaaatcaaacttcatggcatttgagtttccttattgacaatcccaaacagtctacagtttttgatattctcttgggaatctctcaagattttgaaattgctggtaatactcttatgccagctttttctgttccacaggctactgccagatct

SEQ ID NO: 76565 - DNA, 348 bp, Glycine max
  unsure (1)..(348): unsure at all n locations
gcattttgatgcatgtaagtggacaaaatcagaaccacattcgtgggaattgatcttcccaatagaggtatgtggtcctaataatggttttgaaatgtggagttctgagtgggcaaatcaaacttcatggcatttgagtttccttattgacaatcccaaacagtctacagtttttgatattctcttgggaatctctcaagattttgaaattgctggtaatactcttatgccagctttttctgttccacaggctactgccagatcttctgaaaatgcggaatcctctgcatgatctggaaattgngttttctttcgcttgttcgtttgtttaattcaataaaggaaatt

SEQ ID NO: 76566 - DNA, 337 bp, Glycine max
  unsure (1)..(337): unsure at all n locations
atccttcaaaaattntgtttctttgtgtgtgtatggggaagatgacttaattaggggtcatgaatatgtcaagccttactttaatggttctaaattgaaaagctttctagctagtcataacatcaccattactgatggtattgacaaaactagtgcaactttgcaatttagaaaggtagcagattgtgaatttctcaagagaaactttaagcagatgtctaatgtgttgtgggtggctcctgaggacaaagcgagtttatggtcacaacttcattatgtgtcgcgtgataatctggaaatgcgcgaagcttatcttgtcaatctcgtaaatgtgtta

SEQ ID NO: 76567 - DNA, 386 bp, Glycine max
caagttgacaaccataaacaatatgtgtgcatatgggctcaagcctggtatttcaggttctcgtcttttgggcaccattcctcagtccatttcacagcaaactgtttggaatcaaatggcaacagtgagaacaccattgaattttgattctagcaagcagagcttttgtcagttttctattgaccttctcggtggaggaatcttagtggacaaaactggagattggatcacacttatacaaaattctccaattagtaacttattgagagttgctgcttggaagaaaagcttgttaatggtcaagattgggatgtctgggaatgcagcagtcaaaaggagtgattgggccttattggtacaagtgtttttaacaaacagcaacagta

SEQ ID NO: 76568 - DNA, 387 bp, Glycine max
gtccatatttgtatgcaatggtgcatgatagttcaggggctacaataccaggtgattttgtcattggtgtcaagttgacaaccataaacaatatgtgtgcatatgggctcaatcctggtatttcaggttctcgtcttttgggcaccattcctcagtccatttcacagcaaactgtttggaatcaaatggcaacagtgagaacaccattgaattttgattctagcaagcagagcttttgtcagttttctattgaccttctcggtggaggaatcttagtggacaaaactggagattggatcacacttatacaaaattctccaattagtaacttgttgagagttgctgcttggaagaaaggctgtttaatggtcaagattgtgatgtctg

SEQ ID NO: 76569 - DNA, 385 bp, Glycine max
gataacttaattagtgttcatgaatatgtcaagccttactttagtggttctaaattgaaaagctttctagctagtcataacatcaccattactgatggtattgacaaaactagtgcaactttgcaatttagaaagttagcagattgtgattttctcaagagaaactttaagcagatgtctaatgttttgtgggtggctcctgaggacaaggcgagtttatggtcacaacttcattatgtttcgtgtaataatctggaaatgcaagaagcttatcttgtcaatctcgtaaatgtgttacgagaattgtatttgcacagtccagaggaagctcgccaattgagaaagaaagctctctctcgtattgaatggctgcaaaaagctgatg

SEQ ID NO: 76570 - DNA, 301 bp, Glycine max
acgtcgcactgcacgcatacttaagctcggaattcggctcaagcccatttcgatttgcgatataattcagagagagagggggcgagtgtctctaactctgcatctttgattcgatcattccaatcttcacttttcctatgtatccatccatccgctaagggcagcgctctattctttcgcctatcggctactaccccatgttccttccatttcccatcgagccaagtttcttcccatgcgctacgagcggacacactcctcttaatgccaaattgtttctttactgttacacatttacttg

SEQ ID NO: 76571 - DNA, 354 bp, Glycine max
ctgagagtcagctgttgcgtcctaaagagatttggggcgcgtgggaaaccctacttaggtacgattaaccccactcccttaaccacatgcaaaacaccatattccgaaggtagcaggacagcgctgcagtgaagacaaatgacaatgactactctcaggacatgatatctgacatgtccaagtacatcgctagaaacacgcgtgtttagaagtctgtcaagcttgaccattgatacatctttcataaactcacatgtatgaaatcaaaaatcatcagcacttatcccaatgcgcttactgaagactcaacgagcgaagtgattgatatgacaccggatcttgaaatgcccaagc

SEQ ID NO: 76572 - DNA, 394 bp, Glycine max
cacaacttcattatgtttcgtgtaataatctggaaatgcaagaggcttatcttgtcaatctcgtaaatgtgttacgagaattgtatttgcacagtccagaggaagctcgccaattgagaaggaaagctctctctcgtattgaatggctgcaaaaagctgatgtgcctaccatagcacagattgaagagttccattcaatgcagaggatgatgaatgctcctgattcaaatgataatattgatttactgttgagcattgatttgttgggtttacaaggagcaggtaaagcttttccaaacaaaattgtttttgatgataagcttgtgttggctaacacacaagaattctttgatggaaattttccagtggattcttggttaccaatttttgtgaa

SEQ ID NO: 76573 - DNA, 389 bp, Glycine max
ctgcaaaaagctgatgtgcctaccatagcacagattgaagagtgccattcgatgcagaggatgatgaatgctcctgattcaaatgataatattgatttactgttgagcattgatttgttgggtttacaaggagcaggtaaagcttttccaaacaaaattgtttttgatgataagcttgtgttggctaacacacaagaattctttgatggaaattttccagtggattcttggttaccaatttttgtgaattgtctttatcctgtaagtcaattaccttcagaagctgtcgttgtaaatgttacatgtggtagtggaccgtgtggtttacccaccactgcttggattagttctgcagttaacaatcgctcctcagatatcaacaaaaggat

SEQ ID NO: 76574 - DNA, 402 bp, Glycine max
gtgagaacaccattgaattttgattctagcaagcagagcttttgtcagttttctattgaccttctcggtggaggaatcttagtggacaaaactggagattggatcacacttatacaaaattctccaattagtaacttattgagagttgctgcttggaagaaaggctgtttaatggtcaagattgtgatgtctgggaatgcagcagtcaaaaggagtgattgggcctcattggtacaagtgtttttaacaaacagcaacagtacagagcattttgatgcatgtaagtggacaaaatcagaaccacattcctgggaattgatcttcccaatagaagtatgtggtcctaataatggttttgaaatgtggagttctgagtgggcaaatcaaacttcatggcatttg

SEQ ID NO: 76575 - DNA, 279 bp, Glycine max
ggcgtgtggaattcagtggacaatgttgcgagtagcgttgaaccgattggcgttgccgagagtgtcggcaggtagtgtagtgtttgagcagcgcacagtgagcggagcggtgcgttatgcgtcgtcgtctagtatggtgcggttcactcgcgaccacgagtgggtcaagctcgactcggccaactccaacatcggcatcgtcggagtgtcagactatgcgcagaaggctttaggagacgtcgtttacgtcgatttgccgagcgtcggacgcaagctgag

SEQ ID NO: 76576 - DNA, 397 bp, Glycine max
gtttggaatcaaatggcaacagtgagaacaccattgaattttgattctagcaagcagagcttttgtcagttttctattgaccttctcggtggaggaatcttagtggacaaaactggagattggatcacacttaatccaaaattctccaattagtaccttgttgaaagttgctgcttggaagaaaggctgtttaatggtcaagattgtgatgtctgggaatgcagcagtcaaaaggagtgattgggcctcattggtacaagtgtttttaacaaacagcaacagtacagagcattttgatgcatgtaagtggacaaaatcagaaccacattcctgggaattgatctttccaatagaggtatgtggtcctaataatggttttgaaatgtggagttctgag

SEQ ID NO: 76577 - DNA, 293 bp, Glycine max
cttggtcatgggagtggcacctgttaaggctcaatttgagggtgctgaaatgggtgtgcccgctgagaacgatggctgcaaatgtggaccaaactgctcctgcaacccctgcacttgcaagtgaggtgttgggagagcaagcttcaagcagagatagcccttaattaggaataatgataaactattaatgtgtagctaaaaacttatgtattatttctgtgatggatttcgtgcactctggtgttttgtgtttaacaaacatccttacacaaaagtgggcatgacttgtcttt

SEQ ID NO: 76578 - DNA, 236 bp, Glycine max
gctcattagatatagctatgaaaaattactgcgccaggctaaagctccaagtatgtttttacaatccttcaaaaattttgtttctttgtgtgtgtatggtgatgataacttaattagtgttcatgaatatgtcaagccttactttagtggttctaaattgaaaagctttctagctagtcataatatcaccattactgatggtattgacaaaactagtgcaactttgcaatttaaaa

SEQ ID NO: 76579 - DNA, 250 bp, Glycine max
ttagatggtttgattaccaagcaagttatgagcaagatggcggaaatgataaacagtctttgtggtggtgatgaaaaaattgattccgtgaaaggacgcacctgctgttggcttgttgttcaaggatggcaatttgtaagaaagatgtttggagaggtgaatgtggaatcccttctggatttccgctcacagttatttgcaatagcatttttaatgagatgctcattagatatagctatgaaaaattact

SEQ ID NO: 76580 - DNA, 370 bp, Glycine max
  unsure (1)..(370): unsure at all n locations
ctcgagccgaatcggctcgagcaatttaccagctatacttgttccttttgaaggttagaagtgctacaatacaaacaatggcagctactcaggaagatgtgaagcttttgggtattgtgggaagcccatttgtgtgcagggtccagattgcccttaagttgaagggagttgaatacaaatttttggaagaaaatttgggcaacaagagtgatttgcttctcaaatacaaccctgttcacaagaaggttccagtgtttgttcacaatgagcagcccatagcagagtctcttgtgattgatgaatacattgatgagacatggaagaacaaccccatcttaccttctgatccttaccaaagagcctnggctcg

SEQ ID NO: 76581 - DNA, 190 bp, Glycine max
gtacgtaagctcggaattcgctcgaggtaagaaagatgtttggagagttgaatgtggaatcccttctggatttccgctcacaggtatttgcaatagcatttttaatgagatgctcattagatatagctatgaaaaattactgcgccaggctaaagctccaagtatgtttttacaatccttcaaaaatttt

SEQ ID NO: 76582 - DNA, 352 bp, Glycine max
ctcgagccgcgtctttgaagtttctaagatgacttctccctacattaaatgtacagtctctttcttcatagcatttggaaatttggctgatgataccatcaattttgaggcttttccccacaagctggtgcagtttggagagattcaggaaaaagttgtattgaaattttcacaagaggaatttcttacagcttggtcaactcaggtgcgtcctgcaacaactctgttggctgatgggtgtccatatttgtatgcaatggtgcatgatagttcagtgtctacaataccaagtgattttgtcattggtgtcaaagtgacaaccataaacaatatgtgtgcatatgggctcaat

SEQ ID NO: 76583 - DNA, 321 bp, Glycine max
  unsure (1)..(321): unsure at all n locations
agaagagctatgacgtcgcctcccaccctaaatctggaaattggtctcggggaaggatcagaattcaagtaaatctaagaagaaatggttggggaggcaaaaatttgagacttcagtctcatactcagaagctggtaaagcaccaccaccaccacctcctattcctccaccaggaggagattaaattaactgatattgaacatgaaatcagtcatgatcacgatcaagttgttgaagttgcaactgccatggatgctgaggaactngatccttctgttcaaatagaacctgttagggttgaagctgccctaattgctcatt

SEQ ID NO: 76584 - DNA, 241 bp, Glycine max
aaatttttcctttgatattaaatctcgctctagattggaaaaagtttcctctacaaaagcacaatttgttagtggaaaaaccttcaaatatgatataattggtgctggttcacattcttcagaagattttcctgaaaaggaagatcaagaaaaacccaaaaagattgatgccagattgagacaaagaatagatcctcaatacaatgaggttcaggctcagatcgaaacaaatttgtttaaa

SEQ ID NO: 76585 - DNA, 362 bp, Glycine max
aacactcataacacaaagcacaaagcaaagctcatccttgagttaaaaaatggcagcagcttcttccatggctctctcatccccatccttggctggcaaggccgtgaagctgggcccatcagccccagaagtgggaagggtgagcatgaggaagaccgtcaccaagcaggtctcctcaggaagcccatggtacggcccagaccgagtcaagtacttgggcccattctctggcgagcccccgtcctacctaaccggtgagttcccaggcgactacggctgggacactgctgggctttccgcagacccagaaaccttcgccaagaaccgtgaactcgaagtgatccactccaggtgggccatgc

SEQ ID NO: 76586 - DNA, 275 bp, Glycine max
gtcacaacttcattatgtttcgtgtaataatctggaaatgcaagaagcttatcttgtcaatctcgtaaatgtgttacgagaattgtatttgcacagtccagaggaagctcgccaattgagaaggaaagctctctctcgtattgaatggctgcaaaaagctgatgtgcctaccatagcacagattgaagagttccattcgatgcaaaggatgatgaatgctcctgattcaaatgataatattgatttacttgtgagcattgatttgttgggtttac

SEQ ID NO: 76587 - DNA, 320 bp, Glycine max
atgataacttaattagtgttcatgaatatgtcaagccttactttagtggttctaaattgaaaagctttctagctagtcataacatcaccattactgatggtattgacaaaactagtgcaactttgcaatttagaaagttagcagattgtgattttctcaagagaaactttaagcagatgtctaatgttttgtgggtggctcctgaggacaaggcgagtttatggtcacaacttcattatgtttcgtgtaataatctggaaatgcaagaagcttatcttgtcaatctcgtaaatgtgttacgagaattgtatttgcacagt

SEQ ID NO: 76588 - DNA, 344 bp, Glycine max
ggtgtttttaacaaacagcagcagttcagagcattttgatgcatgtaagtggacaaaatcagaaccacattcctgggaatggatcttcccaatagaggtatgtggtcctaataatggtttcgaaatgtggagttctgagtgggcaaatcaaacttcatggcatttgagtttccttattgacaatcccaaacagtctacagtttttgatattctcttgggaatctctcaagattttgaaattgctggtaatactcttatgccagctttttctgttccacaggctactgccagatcttctgaaaatgcggaatcctctgcatgatctggaatttgtgttttctttc

SEQ ID NO: 76589 - DNA, 465 bp, Glycine max
gtctactgaggactcctcatctgttggggtgatatggcatttagaatggaagggaaaaccttttccctttagcaaagggtgcagtttttatcgtctagaggtgatcaatggcaaaaggcaaataacatatgggcgcgactgtgttgaacctgcaatcaagcctggggatgcgactttggcagcgatcaggagtgtaacatggctactgcagcaatttcctcagttggcaaactggttatagtgaaagattctacattattttggaagcgcataatgtgcctccttttgcccttacaaaattagtctttaaaatttgatcgtagttggattgtataacataaaactattgcacggcaggtgaaaagtgtgtgtgtgtatatacaagatatgggacatatgtgtcaggatgaattgacattatagctgtcaaatttttaccactattataatagcttttgtttgaag

SEQ ID NO: 76590 - DNA, 172 bp, Glycine max
tatatataacctggaggggcctaatggggttgggacctattggtgtccaggtgccttttttgtgggcccccatttcctatggtccggttccctaacacaagtgccaatggttattaaggaaccggtggccttgcattttggacaattgtggggaatggcctaaaattggcat

SEQ ID NO: 76591 - DNA, 471 bp, Glycine max
  unsure (1)..(471): unsure at all n locations
gtatggtgatgataacttaattagtgttcatgaatatgtcaagccttactttagtggttctaaattgaaaagctttctagctagtcataacatcaccattactgatggtattgacaaaactagtgcaactttgcaatttagaaagttagcagattgtgattttctcaagagaaactttaagcagatgtctaatgttttgtgggtggctcctgaggacaaggcgagtttatggtcacaacttcattatgtttcgtgtaataatctggaaatgcaagaagcttatcttgtcaatctcgtaaatgtgttacgagaattgtatttgcacagtccagaggaagctcgccaatngagaaaggaagctctctctcgtattgaatggcttgcaaaagctgatgtgcctaccatagcacagattgaagagttncattcgatgcaaaggatgatgaatgctcctgattcaaatgataatat

SEQ ID NO: 76592 - DNA, 337 bp, Glycine max
tccgacgatgcatgcacgcgttaagctcggaattcggctcgtgttgcgaatctctcaagattttgaaattgctggtaatactcttatgccagctttttctgttccacaggctactgtcagatcttctgaaaatgccgaatcctctgcgtgatctggaatttgtgttttctttcgcttgttcgtttgtttaattcaataaaggaaattaggcatgaccctcttgttgagtatgctctgcctatttgaaaatttccacacctcttttaattatcgtaatgatgtgtgaagtgtgtgttattcttaaaaaaaaaaaagctagttcgactggaaaattttt

SEQ ID NO: 76593 - DNA, 331 bp, Glycine max
ggcaaatcaaacttcatggcatttgagtttccttattgacaatcccaaacagtctacagtttttgatattctcttgggaatctctcaagattttgaaattgctggtaatactcttatgccagctttttctgttccacaggctactgccagatcttctgaaaatgcggaatcctctgcatgatctggaatttgtgttttctttcgcttgttcgtttgtttaattcaataaaggaaattaggcatgaccctcttgttgagtatgctctgcctatttgaaaatttccacacctcttttaattgtcgtaatgatgtgtgaagtgtgtgttatttt

SEQ ID NO: 76594 - DNA, 374 bp, Glycine max
caaaacactcataacacaaagcacaaagcaaagctcatccttgagttaaaaaatggcagcagcttcttccatggctctctcatccccatccttggctggcaaggccgtgaagctgggcccatcagccccagaagtgggaagggtgagcatgaggaagaccgtcaccaagcaggtctcctcaggaagcccatggtacggcccagaccgagtcaagtacttgggcccattctctggcgagcccccgtcctacctaaccggtgagttcccaggcgactacggctgggacactgctgggctttccgcagacccagaaaccttcgccaagaaccgtgaactcgaagtgatccactccaggtgggccatgctcggagccc

SEQ ID NO: 76595 - DNA, 344 bp, Glycine max
gaaaagctttctagctagtcataacatcaccattactgatggtattgacaaaactagtgcaactttgcaatttagaaagttagcagattgtgattttctcaagagaaactttaagcagatgtctaatgttttgtgggtggctcctgaggacaaggcgagtttatggtcacaacttcattatgtttcgtgtaataatctggaaatgcaagaagcttatcttgtcaacctcgtaaatgtgttacgagaattgtatctgcacagtccagaggaagctcgccaattgagaaggaaagctctctctcgtattgaatggctgcaaaaagctgatgtgcctaccatatcac

SEQ ID NO: 76596 - DNA, 374 bp, Glycine max
ggtgtccatatttgtatgcaatggtgcatgatagttcagtgtctacaataccaggtgattttgtcattggtgtcaagttgacaaccataaacaatatgtgtgcatatgggctcaatcctggtatttcaggttctcgtcttttgggcaccattcctcagtccatttcacagcaaactgtttggaatcaaatggcaacagtgagaacaccattgaattttgattctagcaagcagagcttttgtcagttttctattgaccttctcggtggaggaatcttagtggacaaaactggagattggatcacacttatacaaaattctccaattagtaacttgttgagagttgctgcttgaaagaaaggctgtttaatggtc

SEQ ID NO: 76597 - DNA, 385 bp, Glycine max
gagcacttccttaattagttttttctttaattgcttgattttcttgtgtaattgatcggaaatggcaccacaagcagattttggaaaatttgggtttgaaatagaaaagctctttggcaggcaaaagagttttggcaatggcaacgctccagccactcatcaaaatctctgccaatacaaattttatccaacgtatggtgctaccaaggtggttcacatgcatgtagaagatgtcaagtgcaatgaagctgcttcaagattcatatcagaaaagagaacggagcttcagatgaaaggtttgtttgggcagtgattattaataatttaatattgtagttctactgagaaatattcagcagttttttttttttttcctttttattat

SEQ ID NO: 76598 - DNA, 227 bp, Glycine max
tgaacaatgtgtgtttttcggccgtgggaaaaacaccacgggccttatgtatcaggtgcactatctaggcctaagttaaaaggttgtaggcaagtgcttaagaataaaacggattggcctaataaagtaaacggagccaactagtccccaatcttgtgaagcttaagcatcctctttgcaagtttgagaccaacaactcgatgcaactgtaacagctgatcatggac

SEQ ID NO: 76599 - DNA, 233 bp, Glycine max
  unsure (1)..(233): unsure at all n locations
gaactgtaagagtctcaaatatctggttgatgagtgtccttttgcatttgtgaactagtatgtagtattttattcacttaaataaagcgcattactatgtgcaatgagtgtgtttaaattttaaaaaaaaaaaaaaaaaaaaaaaaaaaaaaaaaaaaaaaaaaaaaaaaaaaaaaaaaaaacaaaaaaaaaagaaaaaaaaaaaaaaannnntttaaaaaaaattataaaaa

SEQ ID NO: 76600 - DNA, 75 bp, Glycine max
ataagatagtaacaggcgaactgatttcgttatcagaccaagaattgtgggatcgtgatcctggttttaaccaag

SEQ ID NO: 76601 - DNA, 325 bp, Glycine max
gcaaaaagctgatgtgcctaccatagcacagattgaagagttccattcgatgcagaggatgatgaatgctcctgattcaaatgataatattgatttactgttgagcattgatttgttgggtttacaaggagcaggtaaagcttttccaaacaaaattgtttttgatgataagcttgtgttggctaacacacaagaattctttgatggaaattttccagtggattcttggttaccaatttttgtgaattgtctttatcctgtaagtcaattaccttcagaagctgtcgttgtaaatgttacatgtggtaatggaacgtggtggttt

SEQ ID NO: 76602 - DNA, 350 bp, Glycine max
gtcacaacttcattatgtttcgtgtaataatctggaaatgcaagaagcttatcttgtcaatctcgtaaatgtgttacgagaattgtatttgcacagtccagaggaagctcgccaattgagaaggaaagctctctctcgtattgaatggctgcaaaaagctgatgtgcctaccatagcacagattgaagagctccattcgatgcataggatgatgaatgctcctgattcaaatgataatattgatttactgctgagcattgatttgtagggtctacaaggagcatgtaaagctttttcaaacaaaattgcttttgatgataagcttgtgttggctaacacacaataattct

SEQ ID NO: 76603 - DNA, 372 bp, Glycine max
gagcttgacgtcgcatgccccccttccttaacctcggaattcggttcgaggtgtttttaacaaacagcaacagtacagagcattttgatgcatgtaagtggacaaaatcagaaccacattcctgggaattgatcttcccaatagaggtatgtggtcctaataatgggtttgaaatgtggagttctgagtgggcaaatcaaacttcatggcatttgagtttccttattgacaatcccaaacagtctacagtttttgatattctcttgggaatctctcaagattttgaaattgctggtaatactcttatgccagctttttctgttccacaggctactgccagatcttctgaaaatgcggaatcctctgcatgat

SEQ ID NO: 76604 - DNA, 346 bp, Glycine max
acggctagcacactgatgaaacttaaccagacccactaaccctcttcacgtaccttgatctataacaagatcaacttcgttgcttcatacaagaaacattggtcaaccattctctcttgtgggctactcactaggaggattggttgcattgtattttgcggcaaacaaccctcatttagtgaaaggtgtggcattgcttaatgcaacacctttttggaggtttctgccaaatcccataaaaagtgcaagactagcgaaaatattttcatgggccggaacattccccctaccttcaagtataaagagacttacagagttattgtgggagaaaattagtgatcctaaa

SEQ ID NO: 76605 - DNA, 358 bp, Glycine max
gcttgtcggacatgcccccttccgtaggctcggaattcgcgctcgaggttaaggagggctagtttgcccatgaaagctcgagaattggctttttaaaccaacatggaaaattgtagcatgtttttcattatcttgatcgcattggagatactctttgcatgcatctgaggttgtagattctacttatccgcatataatgtccaaagattgcaaccgttacattttagccgcacacattatccatgtagatattctttgcatagatattgagatttaaagaatagttaattttttcacttgattgatttattataaatgcaggtgaatattctgcttcaaggtagaatatctgggtgat

SEQ ID NO: 76606 - DNA, 101 bp, Glycine max
agcttgtcgtccatgcccccctcctaagcttggaatttgggttggggattgtttttcctctttttccttgcccttaattcgtaggtcctggcgcgagggag

SEQ ID NO: 76607 - DNA, 284 bp, Glycine max
gacgaatccgatatgggtcgtcaagaccagactacagctctctgcgaggaagaagcatatatctcccacattctactccgctacaccctctaaatccccccttcccggtccgattgccgcttctgccgctgccttgtcaaaagctggaccatcagcgacggccgtacctgcgcaagcgccaaccaaagccgctgcgaacgctataagcacgacattggatatagttcggaatgaggggttcaggggtctgtatagaagcatgtcggcgagttatctgggtgtct

SEQ ID NO: 76608 - DNA, 255 bp, Glycine max
gaaaaacccaaaaagattgataccagattgagacaaagaatagatcctcaatacaatgaggttcaggctcagatggaaacaaatttgtttaaattgtctcttgatgatgttgaaactcctaaaggttccatgttggatcttaaaatttctcaatctaaaattgcactttccaaaaacacagttggaggaaccattctgcgttgtgatctattggcaaattttttgacagagggcaattttagagcaagtgtttat

SEQ ID NO: 76609 - DNA, 322 bp, Glycine max
gtttaatggtcaagattgtgatgtctgggaatgcagcagtcaaaaggagtgattgggcctcattggtacaagtgtttttaacaaacagcaacagtacagagcattttgatgcatgtaagtggacaaaatcagaaccacattcctgggaattgatcttcccaatagaggtatgtggtcctaataatggttttgaaatgtggagttctgagtgggcaaatcaaacttcatggcatttgagtttccttattgacaatcccaaacagtctacagtttttgatattctcttgggaatctctcaagattttgaaattgctggtaatac

SEQ ID NO: 76610 - DNA, 238 bp, Glycine max
gaaaatggtttttcttactagagttgatccttttccagtagctttactggctgttctttttggcgttaagaatgaaattctgagttctaacgccactaatcctatgctgacgcgacttcttgagaactgtaagagtctcaaatatctggttgatgagtgtccttttgcatttgtgaactagtatgtagtattttattcacttaaataaagcgcattactatgtgcaatgagtgtgttt

SEQ ID NO: 76611 - DNA, 308 bp, Glycine max
gatagatagatcacatatgcacgtagacagcgcagaaatgatcatgaagcacgtgtgcaccccaaaattctctctcacagctgcaggtatactacagctaccatatcatttcatttcattaactaacatatataaatgacgaattatctccttttctctagttacttcactactctctcctaactacctgaagccacattttatactagatgagacaccacgatgacaaaaccatgcacagagcaaaccaagtttaaatgtaactgaataaggaactacaagtgatacatgatctgaaatatattatt

SEQ ID NO: 76612 - DNA, 269 bp, Glycine max
gagaagagctatgacatgcactccaccctaacctaggattgcggttcgaggttttctagagagagaaagagagaaaaggttcagaagaatcagataggttagatttatatttatatacataaagaatagatacacttggagttggagttacacattattctctctctcactcacactcagagtggtagctagacaacaaccagagagagagagagagagattgaggatctcgaagaggaagaaaaccgaacggaagaagtgttggggtc

SEQ ID NO: 76613 - DNA, 173 bp, Glycine max
tacgctcgcaatgcgtctcgcgcttgccatttttctctaaattcaataaatttctaaaaaaaaaacgaggcaaatgaggtgaaaataacaaaaaaaaaagccaagccctatttgggatgagtgacccagaattcacttctttaaatggcgctcaaaatttgattccaaacaac

SEQ ID NO: 76614 - DNA, 69 bp, Glycine max
gtccgtaagctcggatttcggctcgagctcgagccgaatctgttcgtgaaaaaaaaaaaaaaacaaaaa

SEQ ID NO: 76615 - DNA, 192 bp, Glycine max
tgggaatgcagcatcaaaagggtgattggcctatggtcagtgtttaacaaaccacagcaagctttgtgcatgtagtggcaaaatagaccacttctggatgtttcaataagttgggtctataggttgaagtgggttggggcaataaactcatgattggttctatgcatccaagctcagtttgtttttggattt

SEQ ID NO: 76616 - DNA, 284 bp, Glycine max
tgagtcttcttgatccttctttttctccttgaactcaaacatggcagatgaggtggttctgctagatttctggccaagtccatttgggatgagggtcaggattgcacttgctgaaaagggtatcaaatatgagtacaaagaagaggacttgaggaacaagagtcctcttctcctacaaatgaaccctgttcacaagaagattccggttctcatccacaatggcaaacccatttgtgaatccctcattgctgctcagtacattgaagaagttttgaatgacaaaa

SEQ ID NO: 76617 - DNA, 220 bp, Glycine max
aaaaaaaaaaaaaaaaaaaaaaaaaaaaaaaaaaaaaaaaaaaaaaaaaaaaaaaaaaaaaaaaaaaaaaaaaaaaaaaaaaaaaaaaaaaaaaaaaaaaaaaaaaaaaaaaaaaaaaaaaaaaaaaaaaaaaaaaaaaaaaaaaaaaaaaaaaaaaaaaaaaaaaaaaaaaaaaaagataaaaaaaatggggtggggggcaggacttaagaaactcacc

SEQ ID NO: 76618 - DNA, 125 bp, Glycine max
gacttcttgagaactgtaagagtctcaaatatctggttgatgagtgtccttttgcatttgtgaactagtatgtagtattttattcacttaaataaagcgcattactatgtgcaatgagtgtgttt

SEQ ID NO: 76619 - DNA, 95 bp, Glycine max
gacttctttatatactgtagagtctcaaatatctggtgggtgagtgatctattgcatttgtgaactattttcgtgtattttatccaccttaaata

SEQ ID NO: 76620 - DNA, 421 bp, Glycine max
attatgaagaaaagggacaaacttagttgtcaagttggaatcaacccatactccatggaatggactggtttggccaatagattactgagtaagggcaatgatattctgtgttgcgattatgctagttttgatggtttgattaccaagcaagttatgagcaagatggcagaaatgataaacagtctttgtggtggtgatgaaaaattgatgcgtgaaaggacgcacctgctgttggcttgttgttcaaggatggcaatttgtaagaaagatgtttggagagttgaatgtggaatcccttctggatttccgctcacagttatttgcaatagcatttttaatgagatgctcattagatatagctatgaaaaattactgcgccaggctaaaacttcaagtatgtttttacaatccttcaaaaatt

SEQ ID NO: 76621 - DNA, 300 bp, Glycine max
gctatggtgcatgatagttcagtgtctacaataccaggtgattttgtcattggtgttaagttgacaaccataaacaatatgtgtgcatatgggctcaatcctggtatttcaggttctcgtcttttgggcaccattcctcagtctatttcacagcaaactgtttggaatcaaatggcaacagtgagaacaccattgaattttgattctagcaagcagagcttttgtcaattttctattgaccttctcggtggaggaattttagtggacaaaactggaagatggatcacacttatacaaaat

SEQ ID NO: 76622 - DNA, 111 bp, Glycine max
atcaatccagggttcccctttttctgtgaaggtgggatagctggattctgttgcatggccaaaggaggactatagggtcatttccagcaattgatagcatgatgcaagggc

SEQ ID NO: 76623 - DNA, 310 bp, Glycine max
gagccgattcggctcgagtgtcaagccttactttagtggttctaaattgaaaagctttctagctagtcataacatcaccattactgatggtattgacaaaactagtgcaactttgcaatttagaaagttagcagattgtgattttctcaagagaaactttaagcagatgtctaatgttttgtgggtggctcctgaggacaaggcgagtttatggtcacaacttcattatgtttcgtgtaataatctggaaatgcaagaagcttatcttgtcaatctcgtaaatgtgttacgagaattgtatttgcacagt

SEQ ID NO: 76624 - DNA, 261 bp, Glycine max
aaaaaaattaaaaaaaaaaaaaaaaaaaaaaaaaaaaaggagagaaaaaaaaaaaaaaaaaaaaaaaaaaaaaaaaaaaaaaaaaaaaaaaagggcgggcaaaaaaatagtggaaagatagccccggaaaaaaataacaaggcagaaaaataaaggcgaacaaaaaataaacagggggggggcgccttagaggggggctcctcccgacaaggttaatattaccggcgcgacttgggtgtcccccgtcttttcttttggggg

SEQ ID NO: 76625 - DNA, 352 bp, Glycine max
tgaatatgccaaatgctgttctttcaatgtggagatattttgttggagatctcgtctttgaagtttctaagatgacttctccctacattaaatgtacagtctctttcttcatagcatttggaaatttggctgatgataccatcaattttgaggcttttccccacaagctggtgcagtttggagagattcaggaaaaagttgtattgaaattttcacaagaagaatttcttacagcttggtcaactcaggtgcgtcctgcaacaactctgttggctgatgggtgtccatatttgtatgcaatggtgcatgatagttcagtgtctacaataccaagtgattttgtcattggtgt

SEQ ID NO: 76626 - DNA, 227 bp, Glycine max
gcacgctctagctgaatcggtggacgcttcctttcgacttctcttcttgagcccaaattctaggtgttatattgcccctcaaaccaactgatcctgctttatctaattgtggcttaagacccttaattaccacgaactgatagtcagtcttgtagagaacatctgaaactaaagaaaaatgctagatacttagggaggtcacaaaaggaatggaatttcaggaatat

SEQ ID NO: 76627 - DNA, 391 bp, Glycine max
ccttccgtaagctcggaattcggttcgaggtcaaaaggagtgattgggcctcattggtacaagtgtttttaacaaacagcaacagtacagagcattttgatgcatgtaagtggacaaaatcagaaccacattcctgggaattgatcttcccaatagaggtatgtggtcctaataatggttttgaaatgtggagttctgagtgggcaaatcaaacttcatggcatttgagtttccttattgacaatcccaaacagtctacagtttttgatattctcttgggaatctctcaagattttgaaattgctggtaatactcttatgccagctttttctgttccacaggctactgccagatcttctgaaaatgcggaatcctctgcatgatctggaaa

SEQ ID NO: 76628 - DNA, 312 bp, Glycine max
tgcaattgaagttgaagtcttgcccttctctcttcaactccaaacacaagacatcatcatccatggctgcctccgtctccactgtcggagctgtcaacagagctcttttgaacctgaatgggtctggacctggggtttcagctcccagttcatccttctttgggagcagcttgaagaaggttattggctcaagggtccccaacacaaagatttcctctggaagcttcaagattgttgctgtagaagagaagaaagagattgaagagacccagcagaccgacaaggacagatggaaaggtcttgcctatgata

SEQ ID NO: 76629 - DNA, 363 bp, Glycine max
cagttttctattgaccttctcggtggaggaatcttagtggacaaaactggagattggatcacacttatacaaaattctccaattagtaacttgttgagagttgctgcttggaagaaaggctgtttaatggtcaagattgtgatgtctgggaatgcagcagtcaaaaggagtgattgggcctcattggtacaagtgtttttaacaaacagcaacagtacagagcattttgatgcatgtaagtggacaaaatcagaaccacattcctgggaattgatcttcccaatagaggtatgtggtcctaataatggttttgaaatgtggagttctgagtgggcaaatcaaacttcatggcatttgagtttc

SEQ ID NO: 76630 - DNA, 391 bp, Glycine max
gtctttgaagtttctaagatgacttctccctacattaaatgtacagtctctttcttcatagcatttggaaatttggctgatgacaccatcaattttgaggcttttccccacaagctggtgcagtttggagagattcaggaaaaagttgtattgaaattttcacaagaggaatttcttacagcttggtcaactcaggtgcgtcctgcaacaactctgttggctgatgggtgtccatatttgtatgctatggtgcatagttcagtgtctacaataccaggtgattttgtcattggtgttaagttgacaaccataaacaatatgtgtgcatatgggctcaatcctggtatttcaggttctcgtcttttgggcaccattcctcagtctatttcac

SEQ ID NO: 76631 - DNA, 145 bp, Glycine max
cctaatcgttggggtaatcatcttcttcttcctctttctaagatctcttctttttttacgccgcacgccgaaaccatggccggaaaaggagagggtcctgctatcggaatcgatctcggaaccacctactcttgcgtcggtgtgt

SEQ ID NO: 76632 - DNA, 257 bp, Glycine max
tgggtgtccatatttgtatgcaatggtgcatgatagttcagtgtctacaataccaggtgattttgtcattggtgtcaagttgacaaccataaacaatatgtgtgcatatgggctcaatcctggtatttcaggttctcgtcttttgggcaccattcctcagtccatttcacagcaaactgtttggaatcaaatggcaacagtgagaacaccattgaattttgattctagcaagcagagcttttgtcaagtttctattg

SEQ ID NO: 76633 - DNA, 346 bp, Glycine max
ggctcctgaggacaaggcgagtttatggtcacaacttcattatgtttcgtgtaataatctggaaatgcaagaagcttatcttgtcaatctcgtaaatgtgttacgagaattgtatttgcacagtccagaggaagctcgccaattgagaaggaaagctctctctcgtattgaatggctgcaaaaagctgatgtgcctaccatagcacagattgaagagttccattcgatgcagaggatgatgaatgctcctgattcaaatgataatattgatttactgttgagcattgatttgttgggtttacaaggagcaggtaaagctttttcaaacaaaattgtttttgatgat

SEQ ID NO: 76634 - DNA, 331 bp, Glycine max
gcaaattgtgattttctcaagagaaactttaagcagatgtctaatgttttgtgggtggctcctgaggacaaggcgagtttatggtcacaacttcattatgtttcgtgtaataatctggaaatgcaagaagcttatcttgtcaatctcgtaaatgtgttacgagaattgtatttgcacagtccagaggaagctcgccaattgagaaggaaagctctctctcgtattgaatggctgcaaaaagctgatgtgcctaccatagcacagattgaagagttccattcgatgcaaaggatgatgaatgctcctgattcaaatgataatattgatttac

SEQ ID NO: 76635 - DNA, 355 bp, Glycine max
agaacaccattgaattttgattctagcaagcagagcttttgtcagttttctattgaccttctcggtggaggaatcttagtggacaaaactggagattggatcacacttatacaaaattctccaattagtaacttgttgagagttgctgcttggaagaaaggctgtttaatggtcaagattgtgatgtctgggaatgcagcagtcaaaaggagtgattgggcctcattggtacaagtgtttttaacaaacagcaacagtacagagcattttgatgcatgtaagtggacaaaatcagaaccacattcctgggaattgatcttcccaatagaagtatgtggtcctaataaatggtttg

SEQ ID NO: 76636 - DNA, 181 bp, Glycine max
ctgggaattcggttcgagaaaaaataatttattcttatggtacatgaaaattttacagcctagctatggaaacttcataaaaaatatatttgttttgcggttttgggattcattgtgcttccaatacttatttgtacacttcaagattaattctcgcaagttaaaatgaaataatacgggg

SEQ ID NO: 76637 - DNA, 106 bp, Glycine max
tgcacccttccttaagctcggaattcggttcgagcaaacccaccgaattaaccgtttaaccaaacaaccaccaccacgggtaatccaaaaccaaacaaccaacacc

SEQ ID NO: 76638 - DNA, 188 bp, Glycine max
cgacactccctacggtacccccacgttcgagccaagacaattctcttgcctgaaagcttgatcactccaacactactccctttcgcgacgcgcgcagagtgtatccaagcctggcgctggaccttggctgcgaccgcctagagccgagccgacctactctgtctgcaacatgaagttcacctctgtca

SEQ ID NO: 76639 - DNA, 313 bp, Glycine max
tatgtttttacaatccttcaaaaattttgtttctttgtgtgtgtatggtgatgataacttaattagtgttcatgaatatgtcaagccttactttagtggttctaaattgaaaagctttctagctagtcataacatcaccattactgatggtattgacaaaactagtgcaactttgcaatttagaaagttagcagattgtgattttctcaagagaaactttaagcagatgtctaatgttttgtgggtggctcctgaagacaaggcgagtttatggtcacaacttcattatgtttcgtgtaataatctggaaatg

SEQ ID NO: 76640 - DNA, 349 bp, Glycine max
ctcgagccgaatcggctcgagatcaaatggcaacagtgagaacaccattgaattttgattctagcaagcagagcttttgtcagttttctattgaccttctcggtggaggaatcttagtggacaaaactggagattggatcacacttatacaaaattctccaattagtaacttattgagagttgctgcttggaagaaaggctgtttaatggtcaagattgtgatgtctgggaatgcagcagtcaaaaggagtgattgggcctcattggtacaagtgtttttaacaaacagcaacagtacagagcattttgatgcatgtaagtggacaaaatcagaaccacattcctggga

SEQ ID NO: 76641 - DNA, 436 bp, Glycine max
ctcgagccgcttggaagaaaggctgtttaatggtcaagattgtgatgtctgggaatgcagcagtcaaaaggagtgattgggcctcattggtacaagtgtttttaacaaacagcaacagtacagagcattttgatgcatgtaagtggacaaaatcagaaccacattcctgggaattgatcttcccaatagaggtatgtggtcctaataatggttttgaaatgtggagttctgagtgggcaaatcaaacttcatggcatttgagtttccttattgacaatcccaaacagtctacagtttttgatattctcttgggaatctctcaagattttgaaattgctggtaatactcttatgccagctttttctgttccacaggctactgccagatcttcttgaaatgcggaatcctctgcatgatctggaaatttgtgtttctt

SEQ ID NO: 76642 - DNA, 103 bp, Glycine max
ctattctccgagacaattgacactgctctctcgtcttcattcaactacacccaattacccctttctcctttccttacaaaaacaacaacaacaacaacaattg

SEQ ID NO: 76643 - DNA, 440 bp, Glycine max
gtggaatcctgcttgcacaaaagcaatgactatgtcatttaatccaaacccgtgttctgatgcatggagtttggaatttctgaagcgtactggatttcattgcgatatcatttgtgtcactggatggactgccaccccaatgcaggatgttcaggttacaattgattggtttatttcctctcaggaatgtgttcccaggacctattgtgttttaaatccacaaaatccttttgtgttaaataggtggatgggaaaattgactttcccccagggcacttcccgaagtgttaagagaatgcctctttctatagggggaggagctggtgcaaagaatgctattctcatgaatatgccaaatgctgttctttcaatgtggagatattttgttggagatctcgtctttgaagtttctaagatgacttcttcctacattaaatgta

SEQ ID NO: 76644 - DNA, 292 bp, Glycine max
gcattttgatgcatgtaagtggacaaaatcagaaccacattcctgggaattgatcttcccaatagaggtatgtggtcctaataatggttttgaaatgtggagttctgagtgggcaaatcaaacttcatggcatttgagtttccttattgacaatcccaaacagtctacagtttttgatattctcttgggaatctctcaagattttgaaattgctggtaatactcttatgccagctttttctgttccacaggctactgccagatcttctgaaaatgccgaatcctctgcatga

SEQ ID NO: 76645 - DNA, 410 bp, Glycine max
  unsure (1)..(410): unsure at all n locations
aagctcggaattcggttcgaggtcacaacttcattatgtttcgtgtaataatctggaaatgcaagaagcttatcttgtcaacctcgtaaatgtgttacgagaattgtatttgcacagtccagaggaagctcgccaattgagaaggaaagctctctctcgtattgaatggctgcaaaaagctgatgtgcctaccatagcacagattgaagagttccattcgatgcagaggatgatgaatgctcctgattcaaatgataatattgatttactgttgagcattgatttgttgggtttacaaggagcaggtaaagcttttccaaacaaaattgtttttgatgataagcttgtgttggctaacacacaagaattctntgatggaaaatttccagtggattctggttaccaatttt

SEQ ID NO: 76646 - DNA, 485 bp, Glycine max
ccttccgtagcctcggattccggttcgaggctgtccttccaaggtggagatttttggtgggagatctcgtctttgaagtttctaagatgacttctccctacattaaatgtacagtctctttcttcatagcatttggaaatttggctgatgataccatcaattttgaggcttttccccacaagctggtgcagtttggagagattcaggaaaaagttgtattgaaattttcacaagaggaatttcttacagcttggtcaactcaggtgcgtcctgcaacaactctgttggctgatgggtgtccatatttgtatgcaatggtgcatgatagttcagtgtctacaataccaggtgattttgtcattggtgtcaagttgacaaccataaacaatatgtgtgcatatgggctcaatcctggtatttcaggttctcgtcttttgggcaccattcctcagtccatttcacagcaaactgtttggaatcaaatg

SEQ ID NO: 76647 - DNA, 342 bp, Glycine max
gaccactcttagagtgtgatgtttcctgctctgtctatcaagatggcataagggttggctggctcgaaaggttgttggaatacgaaaatttgatttcagatcacgtggtgattttgtatcatgacatcagtgaatttgacaaaataagtgaagtgcatgatcatttcttcagcaacataacatttatatttgaaaacaatgaagaccgcataacagagtttggtgtcttcccggtatatgcctcagaatcagggttgaagttggttggtagcaaggaaatttttgaatgagaattcattactcaaatatctgaaatgagtcacagaaagaattgttgttttt

SEQ ID NO: 76648 - DNA, 350 bp, Glycine max
gaccactcttttagtgtgatgtttcctgctctgtctatcaggatggcataagggttggctggctctaaaggttgttggaatacgaaaatttgatttcagatcacgtggtgattttgtatcatgacatcattgaatttgacatattaagtgaagtgcatgatcatttcttcagcatcataacatttatatttgaaaacaatgaataccgtataacagagttaggtgtctttcctgtttatgcctcataatcatgtttgatattggtatgtatgtaattatatttttgaatgtttatttatttcttatctcttttaatatagtcacagaaagtattgttttttttcttttaa

SEQ ID NO: 76649 - DNA, 148 bp, Glycine max
tacaactacaaaggttgctgtaggagataagatattgaagtagtgctaagtgcctaacacctgcagtgaacaatggcctctgcatcagcatctcttctcaagtcttcacttgttcttgacaaggctgagtgggtgaagggacaaacac

SEQ ID NO: 76650 - DNA, 126 bp, Glycine max
aaaaaaaaatttaatttactgaaaaaaaaaaaaaaaaataagcaagataaaaaaaaaaataccaaaacataaataaaaaaaatggggcggtccccggctggtgggcctctactgccgtggattaat

SEQ ID NO: 76651 - DNA, 131 bp, Glycine max
gcacgcgtacgtaagctcggatttcggctcgagccaggcttttctgttaaaaaaaaattaggcgtctaaagggccaaagcttactaagttcaaacttcttttgttgaagataaagttaaatggatggcaag

SEQ ID NO: 76652 - DNA, 352 bp, Glycine max
gtttggagagattcaggaaaaagttgtattgaaattttcacaagaggaatttcttacagcttggtcaactcaggtgcgtcctgcaacaactctgttggctgatgggtgtccatatttgtatgcaatggtgcatgatagttcagtgtctacaataccaggtgattttgtcattggtgtcaagttgacaaccataaacaatatgtgtgcatatgggctcaatcctggtatttcaggttctcgtcttttgggcaccattcctcagtccatttcacagcaaactgtttggaatcaaatggcaacagtgagaacaccattgaattttgattctagcaagcagagcttttgtcagttt

SEQ ID NO: 76653 - DNA, 338 bp, Glycine max
  unsure (1)..(338): unsure at all n locations
gcattttgatgcatgtaagtggacaaaatcagaaccacattcctgggaattgatcttcccaatagaggtatgtggtcctaataatggttttgaaatgtggagttctgagtgggcaaatcaaacttcatggcatttgagtttccttattgacaatcccaaacagtctacagtttttgatattctcttgggaatctctcaagattttgaaattgctggtaatactcttatgccagctttttctgttccacaggctactgccagatcttctgaaaatgcggaatcctctgcatgatctggaatnntgtgttttctttcgctttgttccgttggttaaattc

SEQ ID NO: 76654 - DNA, 358 bp, Glycine max
atcggattataggaagagagagagagaggatggtgaaaacactggaaaaggtggcggaggacgtgcctgtgcaaaagtgttacggtggacaaaatgaatataagaagggaatgatccctcctaacacgatgtttgtgaatccaaaaggcatacggattcagcataccatttacagggacactgctgctgcttttatctgcccttactgatgtgacaccgatcttactaccatcagatcaaagcccaatgtaacagcattagatagatgcttagtgcctatgatgctagtagtctgctttgtatgaactacaatggattgcctttggcataaatatcactactgtgctaaatgtcaaga

SEQ ID NO: 76655 - DNA, 309 bp, Glycine max
gacgtcgcttgcacccgtccgtaagctcggatttcggctcgagaaacgatttccaacggtcatgaatggcggcgctgaagcctccctcatcacaagcgcaaacaccaaacaagttccggcgaccgggcttaaagggtttagggtgccaaccgggcccttggggaaccctcccttttcaaagacttcttgggggcgttgttcattaaattgacccggggttgccccttccaccttgttgccccccctttgattgccggccttgtcccatttggggcttttttttttattggccgggaagtcccccctttt

SEQ ID NO: 76656 - DNA, 265 bp, Glycine max
ctcgagccgattcggctcgagattaaatctcgctctagattggaaaaagtttcctctacaaaagcacaatttgttagtggaaaaaccttcaaatatgatataattggtgctggttcacattcttcaaaaaattttcctggaaaggaagatcaagaaaaacccaaaaagattggtgcccgattgggacaaaaaattgatccccaatacaatgaagttcaggctcaaattggaaccaatttggttaaattggctcttgatgatgttg

SEQ ID NO: 76657 - DNA, 341 bp, Glycine max
gcatgcacgcgtacctaagctcggatttcggctcgagatgcataggtgcatgatagttcagtgtctacaataccaggtgattttgtcattggtgtcaagttgacaaccataaacaatatgtgtgcatatgggctcaatcctggtatttcaagttctcgtcttttgagcaccattcgtcagtccatttcacagcaaactgtttggaatcaaatggcaacagtgagaacaccattgaattttgattctagcaagcagagctcttgtcagttttctattgaccttctcggtggaggaatcttagtggacaaaactggagattggatcacacttattcaaaattc

SEQ ID NO: 76658 - DNA, 459 bp, Glycine max
ttgagagttgctgcttggaagaaaggctgtttaatggtcaagattgtgatgtctgggaatgcagcagtcaaaaggagtgattgggcctcattggtacaagtgtttttaacaaacagcaacagtacagagcattttgatgcatgtaagtggacaaaatcagaaccacattcctgggaattgatcttcccaatagaagtatgtggtcctaataatggttttgaaatgtggagttctgagtgggcaaatcaaacttcatggcatttgagtttccttattgacaattccaaacagtctacagtttttgatattctcttgggaatctctcaagattttgaaattgctggtaatactcttatgccagctttttctgttccacaggctactgccagatcttctgaaaatgcggaatcctctgcatgatctggaatttgtgttttcttttcgctagtccgttggtta

SEQ ID NO: 76659 - DNA, 315 bp, Glycine max
ctttttatttgagtaaaaagacatctttattacacaaaactctgctctgcctatttagaacattccacacctgttataatggcctatatgatgtgtgaagcgtgagctttctgaacagatactgtacctcattcttgttctcctgattgaccacatgaccttcagcttcaacttctttaatctgcctttctatattgcataataatacaaactgggcgggcccccccttatgatctcttgaccccgggatttttattcatgccgttcccttcaagcttaccacctttccctattataggtgcttttataccctgg

SEQ ID NO: 76660 - DNA, 455 bp, Glycine max
ttgggcctcattggtacaagtgtttttaacaaacagcaacagtacagagcattttgatgcatgtaagtggacaaaatcagaaccacattcctgggaattgatcttcccaatagaggtatgtggtcctaataatggttttgaaatgtggagttctgagtgggcaaatcaaacttcatggcatttgagtttccttattgacaatcccaaacagtctacagtttttgatattctcttgggaatctctcaagattttgaaattgctggtaatactcttatgccagctttttctgttccacaggctactgccagatcttctgaaaatgcggaatcctctgcatgatctggaatttgtgttttctttcgcttagtcgtttgtttaattcaataaaggaaattaggcatgaccctcttggtgagtatgctctgcctatttgaaaatttccacacctctttta

SEQ ID NO: 76661 - DNA, 316 bp, Glycine max
ctgatgctcgctcatgtagtatttcatcacaatgaaatctttaaaagatagaagattcttgttcgaagaaaaagccgaaataactgacttagcatctgccgtttaatttaacacgtttgtttgtgcttgaatgcgattgaacgtacaaaagatatgaaacacgggaatatttgtggactgcactgtgttgggcacaatattatttgacctgaggggaggctgggcaattgatcccatgttgttatctcaatttagtacgatgcgcttcgaaccctgaagaactacaacggcgtttgaaactgcaaaaattatgggg

SEQ ID NO: 76662 - DNA, 67 bp, Glycine max
aaaaaaaaaaaaaaaaaaaaaaaaaaaaaaaaaaaaaaaaaaaaaaaaaaaaaaaaaaaaaaaaaaa

SEQ ID NO: 76663 - DNA, 395 bp, Glycine max
atttgcaatagcatttttaatgagatgctcattagatatagctatgaaaaattactgcgccaggctaaagctccaagtatgtttttacaatccttcaaaaattttgtttctttgtgtgtgtatggtgatgataacttaattagtgttcatgaatatgtcaagccttactttagtggttctaaattgaaaagctttctagctagtcataacatcaccattactgatggtattgacaaaactagtgcaactttgcaatttagaaagttagcagattgtgattttctcaagagaaactttaagcagatgtctaatgttttgtgggtggctcctgaggacaaggcgagtttatggtcacaacttcattatggttcgtgtaataatctggaaatgcaaga

SEQ ID NO: 76664 - DNA, 180 bp, Glycine max
cttgacgtcgcatgccccgacgtaagctcggattcggctcgagctcgagccgaatcggctcgagctgaacacttattactcactccttcatggccacttcgctctctttctccatttctcccaaaaccactggcacaacctcaggctttcgattcaaagtctccgccatgggtaccacca

SEQ ID NO: 76665 - DNA, 437 bp, Glycine max
ctcgagccgattcggctcgagtgaaaagctttctagctagtcataacatcaccattactgatggtattgacaaaactagtgcaactttgcaatttagaaagttagcagattgtgattttctcaagagaaactttaagcagatgtctaatgttttgtgggtggctcctgaggacaaggcgagtttatggtcacaacttcattatgtttcgtgtaataatctggaaatgcaagaagcttatcttgtcaatctcgtaaatgtgttacgagaattgtatttgcacagtccagaggaagctcgccaattgagaaggaaagctctctctcgtattgaatggctgcaaaaaagctgtgtgcctaccatagcacagattgaagagttccattcgatgcaaaggatgatgaatgctcctgattcaaatgataatattgatttactg

SEQ ID NO: 76666 - DNA, 455 bp, Glycine max
gttctttcaatgtggagatattttgttggagatctcgtctttgaagtttctaagatgacttctccctacattaaatgtacagtctctttcttcatagcatttggaaatttggctgatgataccatcaattttgaggcttttccccacaagctggtgcagtttggagagattcaggaaaaagttgtattgaaattttcacaagaggaatttcttacagcttggtcaactcaggtgcgtcctgcaacaactctgttggctgatgggtgtccatatttgtatgcaatggtgcatgatagttcagtgtctacaataccaggtgattttgtcattggtgtcaagttgacaaccataaacaatatgtgtgcatatgggctcaatcctggtatttcaagttctcgtcttttgggcaccattcctcagtccatttcacagcaaactgtttggaatcaaatggc

SEQ ID NO: 76667 - DNA, 392 bp, Glycine max
gcctatttgaaaatttccacacctcttttaattgtcgtaatgatgtgtgaagtgagagttattttaaaaaaaaaaaaaaaaaaaaaaaaaaaataaaaaaaaaaaaaactattaaaaaaaaaataaatttataaattaaaaaaaaaaaaaaaaaattatttttaaaaaaaaaaaaaaaaatttataaaaaatgggcccccccttaaataaaaattcccacacccgatattaacccaaaattttttttaaatttaaaaaatttaaaaaaaaaaaaggcgctccaatctatggggcacaaaaaaaaaaagggggcaaaaaaaaaaaaaaaaatccggttccccccccccaaaaaaaatttaaaatcccccaaaattttttaaaacccatttttt

SEQ ID NO: 76668 - DNA, 249 bp, Glycine max
gctcaatcctggtatttcaagttctcgtcttttgggcaccattcctcagtccatttcacagcaaactgtttggaatcaaatggcaacagtgagaacaccattgaattttgattctagcaagcagagcttttgtcagttttctattgaccttctcggtggaggaatcttaatggacaaaactggagattggatcacacttattcaaaattctccaattaataacttgttgaaagttgctgcttggaaaaa

SEQ ID NO: 76669 - DNA, 382 bp, Glycine max
cgccaacgcgcgacgattacatcaaccaaaatctcacgccatcacccgcatcagacgaaagggcgtgccccatatgctacgaaaactggaacgcagatacagagcaaattatccggacccattgcaaccacactttccaccgcgaatgcttcatcgcatggcttggcaaggaaaacgtcaacagcgcgaactcgtgccccagttgtcgcgcaatctgctaccccaaagttgagcaccaaaaagagacaaggttgacgctggatatgtcgtttttgtaccggaccatgcgctcggagtacattacgcgaatttcgttggcgcgtcagtcgagggcaaagaaacacaccaaccagcgacgatatgatgatgaggatggcttttg

SEQ ID NO: 76670 - DNA, 406 bp, Glycine max
aaggcagaaagcaagctcatcctagagttttaaaaatggcagcagcctcctccatggctctctcttccccatccttggctggcaaggccgtgaagctgggcccatcagcccccgaagtcgggagggtcagcatgaggaagaccgtcaccaagcaggcctcctccggaagcccatggtacggcccagaccgcgtcaagtacttgggcccattctctggcgagcccccgtcctacctcactggcgagttcccaggtgactacggctgggacactgctgggctttcggccgacccagaaaccttcgccagaaaccgtgagctcgaagtgatccactccaggtgggccatgctcggggccttgggctgcgtcttccccgaactgttgtcccgcaacggggtcaagtttgg

SEQ ID NO: 76671 - DNA, 437 bp, Glycine max
ccaatattttacaatgtgcaaaagtcggatgtatgcaatcaaacaaaaagttatggtgaagccatgactgaacatgaaaaaagatttggaaaggactctgagaaggtgcagaaatggaggtctgctttgtctgaaatcaaaaacttggaaggagaccatgtcaaacaaaatgagtaccaacatgaattaatcgaaaggattgtggaaaaagtcattaaaattgaaggtagcaagcatacagcaaatcctttccttttatccaatgacagctacgaggaagaatgagtgaaagagggtcaaatatatgctgtggagctgtgaaactaactgattgtaacctctataactggccttgaattcatttggtcctatcaatggtggttttaacatcaagtcaatttcctaaggggtatatggatccctcctaaacctggttc

SEQ ID NO: 76672 - DNA, 70 bp, Glycine max
aaaaaaaaaaaaaaaaaaaaaaaaaaaaaaaaaaaaaaaaaaaaaaaaaaaaaaaaaaaaaaaaaaaaaa

SEQ ID NO: 76673 - DNA, 348 bp, Glycine max
cttcattatgtttcgtgtaataatctggaaatgcaagaagcttatcttgtcaacctcgtaaatgtgttacgagaattgtatttgcacagtccagaggaagctcgccaattgagaaggaaagctctctctcgtattgaatggctgcaaaaagctgatgtgcctaccatagcacagattgaagagttccattcgatgcaaaggatgatgaatgctcctgattcaaatgataatattgatttactgttgagcattgatttgttgggtttacaaggagcaagtaaagcttttccaaacaaaattagttttgatgataaagctgtgttggctaacacacaagaattctttgat

SEQ ID NO: 76674 - DNA, 385 bp, Glycine max
gacgtcgcttgcacccgtccgtaagctcggatttcggctcgaggcaaaaagctgatgtgcctaccatagcacagtttgaagagttccattcgatgcagaggatgatgaatgctcctgattcaaatgataatattgatttactgttgagcattgatttgttgggtttacaaggagcaggttaagcttttccaaacaaaattgtttttgatgataagcttgtgttggctaacacacaagaattctttgatggaaattttccagtggattcttggttaccaatttttgtgaattggctttatcctgtaagtcaattaccttcagaagctgtcgttgtaaatgttacatgtggtaatggaccgtaggtttacccaccactgcttggatt

SEQ ID NO: 76675 - DNA, 101 bp, Glycine max
ggagacctcatccaaatttgggtcatggaagactttgaagcgcactcttcctctgtcaggagcttatgtcttttacatgctagacaccatggagtctgatc

SEQ ID NO: 76676 - DNA, 275 bp, Glycine max
gacactatgcatagagctgtgactgcacacgcacgcatacctaggacttcggctcgagctactgcaccgcacgtggctccatcatgcgctctgtcttattaccaatctctccgaccctggcctgcacaaaagcgagtgtgggttctcatggcactcgcttgcttaaacgaatgatccaaatggtggcctcccagggacctacagtgtattcttgtttttcttccgccttctctttggatggctatttcaacatgcatgcacatgattttttttac

SEQ ID NO: 76677 - DNA, 188 bp, Glycine max
catcttttggggcggccccccccttttattctcttcgccccggtattttattccgtcccggttcctcctggcgtcccagctttcccttttgggagtctttttagaccttggcgtttccttggtcatagctttttcctgtgaaaatttgttttcccttcccatttccacacatctttcgacccggctgc

SEQ ID NO: 76678 - DNA, 113 bp, Glycine max
gtgactcgagaaaagagaattcgggccacgagggtttcatcctgcggcatctgtcatgggaggaggccatgggcaaaaagcaaagatggctcgcgagaagaacatcgagaagc

SEQ ID NO: 76679 - DNA, 393 bp, Glycine max
gaaattttcacaagaggaatttcttacagcttggtcaactcaagtgcgtcctgcaacaactctgttggctgatgggtgtccatatttgtatgcaatggtgcatgatagttcagtgtctacaataccaggtgattttgtcattggtgtcaagttgacaaccataaacaatatgtgtgcatatgggctcaatcctggtatttcaggttctcgtcttttgggcaccattcctcagtccatttcacaacaaactgtttggaatcaaatggcaacagtgagaacaccattgaattttgattctagcaagcagagcttttgtcagttttctattgaccttttcggtggaagaatcttagtggacaaaactggagattggatcacacttatacaaaattc

SEQ ID NO: 76680 - DNA, 259 bp, Glycine max
  unsure (1)..(259): unsure at all n locations
atgtgaaaaggaaaaaagccttcttaggtaggtgatggcgaggacagctgaacagaatgttgcttcttccaattgtatttacttttttatttctatattattaggaatcgtaatggaaaaaagagatgctattcttttctttttcaaaaaaaaaaaaaaaaaaaaaaaaaaaaaaaaaaaaaaaaaaaaaaaaaataataatactnnnnnnnnaattaaaaaataataaaaaaaataaaaaaatctcaaaatgaatggt

SEQ ID NO: 76681 - DNA, 435 bp, Glycine max
aagtagttgagaactaagaaggagaagcaaatggcttcctcaatgatctcttccccagctgttaccactgtcaaccgtgccggtgccggcatggttgctccattcactggcctcaagtccatggctggcttccccaccaggaagaccaacaatgacattacctccattgctagcaacggtggaagagtgcaatgcatgcaggtgtggccaccagttggcaagaagaagtttgagactctttcctacctgccagaccttgatgatgcacaattggcaaaggaagtagaataccttcttaggaagggatggattccttgcttggaattcgagttggagcacggtttcgtgtaccgtgagcacaacaggtcaccaggatactacgatggacgctactggaccatgtggaagctgcctatgtttggttgcactgatgct

SEQ ID NO: 76682 - DNA, 91 bp, Glycine max
tgcgctcggcgacccgggaattaaggtttctctcaaaaaatggtgcagagtctctgtttgatggcttctcatggttaccctcctggccttg

SEQ ID NO: 76683 - DNA, 389 bp, Glycine max
aatcaaatggcaacagtgagaacaccattgaattttgattctagcaagcagagcttttgtcagttttctattgaccttctcggtggaggaatcttagtggacaaaactggagattggatcacacttatacaaaattctccaattagtaacttattgagagttgctgcttggaagaaaggctgtttaatggtcaagattgtgatgtctgggaatgcagcagtcaaaaggagtgattgggcctcattggtacaagtgtttttaacaaacagcaacagtacagagcattttgatgcatgtaagtggacaaaatcagaaccacattcctgggaattgatcttcccaatagaagtatgtggtcctaataatggttttgaatgtggagtttgagt

SEQ ID NO: 76684 - DNA, 387 bp, Glycine max
ttcccaatagaggtatgtggtcctaataatggttttgaaatgtggagttctgagtgggcaaatcaaacttcatggcatttgagtttccttattgacaatcccaaacagtctacagtttttgatattctcttgggaatctctcaagattttgaaattgctggtaatactcttatgccagctttttctgttccacaggctactgccagatcttctgaaaatgcggaatcctctgcatgatctggaatttgtgttttctttcgcttgttcgtttgtttaattcaataaaggaaattaggcatgaccctcttgttgagtatgctctgcctatttgaaaatttccacacctcttttaattgtcgtaatgatgtgtgaagtgtgtgttatttt

SEQ ID NO: 76685 - DNA, 412 bp, Glycine max
atgacgttgaatgcacacgcacgcgtgcgtaagctcggaattcggctcgcgctaaaggaggaaacttttgactgcgctaagtagtttctttagtcgggtttctttcaaaaaatggtgcagagtctctgtttgatggcttctcatggttaccctcctggccttgtcttgcatccacaagtactgggcttgccctgcagtaccatgaagggctaccaaacattctttccttctccagtagcaaaagcagacctgatcagatatcagtctccttgtcttgatccaagtccatgtgaggagtcaacgaaatctccaaatgatgggttgatttataagaagttgtcaatgttgacttctcagttgaaaggcccatgcttattaatgaccaaactaactgctcaaatgcaattctttt

SEQ ID NO: 76686 - DNA, 168 bp, Glycine max
tagaagagctatgacatcacatcgtccttaacctcggatttcggttcgggtaaaaaggcaaaaaaccgtccaaaacctggtgggttttcagtggaaatcataacggttactagtggaacaggcatggaaccagttatatggtgccttggatggcctggcctggggggg

SEQ ID NO: 76687 - DNA, 479 bp, Glycine max
gttctgatatttacaccatctgctctcaagactgtgaattgtggaatcctgcttgcacaaaagcaatgactatgtcatttaatccaaacccgtgttctgatgcatggagtttggaatttctgaagcgtactggatttcattgcgatatcatttgtgtcactggatggactgccaccccaatgcaggatgttcaggttacaattgattggtttatttcctctcacgaatgtgttcccaggacctattgtgttttaaatccacaaaatccttttgtgttaaataggtggatgggaaaattgactttcccccagggcacttcccgaagtgttaagagaatgcctctttctatagggggaggagctggtgcaaagaatgctattctcatgaatatgccaaatgcttgtctttcaatgtggagatattttgttggagatctcgtctttgaaagttctaagatgacttctccctacattaaatgt

SEQ ID NO: 76688 - DNA, 454 bp, Glycine max
tagaaagttagcagattgtgattttctcaagagaaactttaagcagatgtctaatgttttgtgggtggctcctgaggacaaggcgagtttatggtcacaacttcattatgtttcgtgtaataatctggaaatgcaagaagcttatcttgtcaatctcgtaaatgtgttacgagaattgtatttgcacagtccagaggaagctcgccaattgagaaggaaagctctctctcgtattgaatggctgcaaaaagctgatgtgcctaccatagcacagattgaagagttccattcgatgcagaggatgatgaatgctcctgattcaaatgataatattgatttactgttgagcattgatttgttgggtttacaaggagcaagtaaagcttttccaaacaaaattgtttttgatgataagcttgtgttggctaacacacaagaattctttgatggaaat

SEQ ID NO: 76689 - DNA, 492 bp, Glycine max
cattcctcagtccatttcacagcaaactgtttggaatcaaatggcaacagtgagaacaccattgaattttgattctagcaagcagagcttttgtcagttttctattgaccttctcggtggaggaatcttagtggacaaaactggagattggatcacacttatacaaaattctccaattagtaacttattgagagttgctgcttggaagaaaggctgtttaatggtcaagattgtgatgtctgggaatgcagcagtcaaaaggagtgattgggcctcattggtacaagtgtttttaacaaacagcaacagtacagagcattttgatgcatgtaagtggacaaaatcagaaccacattcctgggaattgatcttcccaatagaggtatgtggtcctaataatggttttgaaatgtggagttctgagtgggcaaatcaaacttcatggcatttgagtttccttattgacaatcccaaacagtctacagtttttga

SEQ ID NO: 76690 - DNA, 305 bp, Glycine max
ctcgagccgctgttggcttgttgttcaaggatggcaatttgtaagaaagatgtttggagagttgaatgtggaatcccttctggatttccgctcacagttatttgcaatagcatttttaatgagatgctcattagatatagctatgaaaaattactgcgccaggctaaagctccaagtatgtttttacaatccttcaaaaattttgtttctttgtgtgtgtatggtgatgataacttaattagtgttcatgaatatgtcaagccttactttaatggttctaaattgaaaagctttctagctagtca

SEQ ID NO: 76691 - DNA, 382 bp, Glycine max
ctcggtggaggaatcttagtggacaaaactggagattggatcacacttatacaaaattctccaattagtaacttattgagagttgctgcttggaagaaaggctgtttaatggtcaagattgtgatgtctgggaatgcagcagtcaaaaggagtgattgggcctcattggtacaagtgtttttaacatacagcaacagtacagagcattttgatgcatgtaagtggacaaaatcagaaccacattcctgggaattgatcttcccaatagaggtatgtggtcctaataatggttttgaaatgtggagttctgagtgggcaaatcaaacttcatggcatttgagtttccttattgacaatcccaaacagtctacagtttttgata

SEQ ID NO: 76692 - DNA, 398 bp, Glycine max
ctacctagctttcggtcgagagatggagaacgatgcctcgaactctaagttcatggaccgcttgcgtcctaggattgcagcgggctagaaagaagttacaaaagccgaatgagtagtcactggtattttgcgaaggttatggataaggttttaaattgcgggtatggtcgctgattcatcgcattccttgatattgctggaaattgcggacaaatgccactgaggtggccataattgcagttgcgttacagtcatagacatccccataacggattgagaaaatggagaaattgttaagggaacctacagggggatcattgggcagggaattttaccaaaaactggctcgaagttcaactattccttctgtcgtgctgggaagcctatcataaaatgac

SEQ ID NO: 76693 - DNA, 426 bp, Glycine max
tttgattctagcaagcagagcttttgtcagttttctattgaccttctcggtggaggaatcttagtggacaaaactggagattggatcacacttatacaaaattctccaattagtaacttgttgagagttgctgcttggaagaaaggctgtttaatggtcaagattgtgatgtctgggaatgcagcagtcaaaaggagtgattgggcctcattggtacaagtgtttttaacaaacagcaacagtacagagcattttgatgcatgtaagtggacaaaatcagaaccacattcctgggaattgatcttcccaatagaggtatgtggtcctaataatggttttgaaatgtggagttctgagtgggcaaatcaaacttcatggcatttgagtttccttattgacaatcccaaacagtctacagtttttgat

SEQ ID NO: 76694 - DNA, 423 bp, Glycine max
  unsure (1)..(423): unsure at all n locations
gttgtaactcgttcttcttcttttgttgttctgtgtttgtgtttgttttttctctcacctgaaaatgtcttgctgcggtggtaactgtggttgcggaagctcctgcaagtgcggcaacggctgcggaggctgcaagatgtacccagacttgagctacactgagtcaaccaccaccgagaccttggtcatgggagtggcacctgttaaggctcaatttgagggtgctgaaatgggtgtgcccgctgagaacgatggctgcaaatgtggaccaaactgctcctgcaacccctgcacttgcaagtgaggtgttgggagagcaagcttcaagcagagatagcccttaattaggaataatgataaactattaatgtgtagctaaaaacttatgtattatgtctgngatggttttcgtgcactctggtg

SEQ ID NO: 76695 - DNA, 439 bp, Glycine max
gtttggagagttgaatgtggaatcccttctggatttccgctcacagttatttgcaatagcatttttaatgagatgctcattagatatagctatgaaaaattactgcgccaggctaaagctccaagtatgtttttacaatccttcaaaaattttgtttctttgtgtgtgtatggtgatgataacttaattagtgttcatgaatatgtcaagccttactttagtggttctaaattgaaaagctttctagctagtcataacatcaccattactgatggtattgacaaaactagtgcaactttgcaatttagaaagttagcagattgtgattttctcaagagaaactttaagcagatgtctaatgttttgtgggtggctcctgaagacaaggcgagtttatggtcacaacttcaatatgtttcgtgtaataatctggaaatgc

SEQ ID NO: 76696 - DNA, 422 bp, Glycine max
gtcataacatcaccattactgatggtattgacaaaactagtgcaactttgcaatttagaaagttagcagattgtgattttctcaatagaaactttaagcagatgtctaatgttttgtgggtggctcctgaggacaaggcgagtttatggtcacaacttcattatgtttcgtgtaataatctggaaatgcaagaagcttatcttgtcaatctcgtaaatgtgttacgagaattgtatttgcacagtccagaggaagctcgccaattgagaaggaaagctctctctcgtattgaatggctgcaaaaagctgatgtgcctaccatagcacagattgaagagttccattcgatgcagaggatgatgaatgctcctgattcaaatgataatattgatttactgttgagcattgatttgtgggtttac

SEQ ID NO: 76697 - DNA, 478 bp, Glycine max
  unsure (1)..(478): unsure at all n locations
caggacctattgtgttttaaatccacaaaatccttttgtgttaaataggtgggtgggaaaattgactttcccccagggcacttcccgaagtgttaagagaatgcctctttctatagggggaggagctggtgcaaagaatgctattctcatgaatatgccaaatgctgttctttcaatgtggagatattttgttggagatctcgtctttgaagtttctaagatgacttctccctacattaaatgtacagtctctttcttcatagcatttggaaatttggctgatgataccatcaattttgaggcttttccccacaagctggtgcagtttggagagattcaggaaaaagttgtattgaaattttcacaagaggaatttcttacagcttggtcaactcangtgcgtcctgcaacaactcttgtggctgatgggtgttcatanttgtatgcaatggtgcatgatagttcagtgtctacaata

SEQ ID NO: 76698 - DNA, 452 bp, Glycine max
  unsure (1)..(452): unsure at all n locations
caaaatccttttgtgttaaataggtggatgggaaaattgactttcccccagggcacttcccgaagtgttaagagaatgcctctttctatagggggaggagctggtgcaaagaatgctattctcatgaatatgccaaatgctgttctttcaatgtggagatattttgttggagatctcgtctttgaagtttctaagatgacttctccctacattaaatgtacagtctctttcttcatagcatttggaaatttggctgatgataccatcaattttgaggcttttccccacaagctggtgcagtttggagagattcangaaaaagttgtattgaaattttcacaagaagaatttcttacaacttggtcaactcangtgcgtnctgcaacaactctgttggctgatgggtgtccatatttgtatgcaatggtgcatgatagttcagtgtctacaat

SEQ ID NO: 76699 - DNA, 459 bp, Glycine max
aatccacaaaatccttttgtgttaaataggtggatgggaaaattgactttcccccagggcacttcccgaagtgttaagagaatgcctctttctatagggggaggagctggtgcaaagaatgctattctcatgaatatgccaaatgctgttctttcaatgtggagatattttgttggagatctcgtctttgaagtttctaagatgacttctccctacattaaatgtacagtctctttcttcatagcatttggaaatttggctgatgataccatcaattttgaggcttttccccacaagctggtgcagtttggagagattcaggaaaaagttgtattgaaattttcacaagaggaatttcttacagcttggtcaactcaggtgcgtcctgcaacaactctgttggctgatgggtgtccatatttgtatgcaatggtgcatgatagttcagtgtctacaata

SEQ ID NO: 76700 - DNA, 344 bp, Glycine max
gcaaatgtaaatggttatagttgatgaagaaaaaaaagaaaaattgtctctctgaaaaaaaaaaaaaaaaaaaaaaaaaaaaaaaaaaaaaaaaaaaaaaaaaaaaaaaaaaaaaaaaaaaaaaaaaaaaaaaaaaaaaaaaaaaaaaaaaaaaaaaaaaaaaaaaaaagggggcgccccccacctagggaccccgcccccccggaaataaattccggaccgggcccggaaggcgaacaaattttcctaaaagggagactaataaaacctgggcaaaaaaatggcaaaaccggttcccgggggaaaatggtattccgtcaaaaatcccacaaaaaatacaaccc

SEQ ID NO: 76701 - DNA, 367 bp, Glycine max
cttcattatgtttcgtgtaataatctggaaatgcaagaagcttatcttgtcaatctcgtaaatgtgttacgagaattgtatttgcacagtccagaggaagctcgccaattgagaaggaaagctctctctcgtattgaatggctgcaaaaagctgatgtgcctaccatagcacagattgaagagttccattcgatgcagaggatgatgaatgctcctgattcaaatgataatattgatttactgttgagcattgatttgttgggtttacaaggagcaggtaaagcttttccaaacaaaattgtttttgatgataagcttgtgttggctaacacacaagaattctttgatgggaaatttccagtggatt

SEQ ID NO: 76702 - DNA, 218 bp, Glycine max
tatgccagctttttctgttccacaggctactgccagatcttctgaaaatgcggaatcctctgcatgatctggaatttgtgttttctttcgcttgttcgtttgtttaattcaataaaggaaattaggcatgaccctcttgttgagtatgctctgcctatttgaaaatttccacacctcttttaattgtcgtaatgatgtgtgaagtgtgtgttattttt

SEQ ID NO: 76703 - DNA, 254 bp, Glycine max
gtggagggagcattcatgataaatggtgatacctaacttagcgatatatatatgtatattcttcagaggcatatgcacgtgaacaaacacaaattgttcggaaacttgtttctgagcacaatggctcagattttgtattcgcagaagaacctgaagcaaaaaaagaactttggaaggtaaggaaagaggcactctgggcttgctttgcaatggaaccaaatctggtggcaatgactacaggggggggggggggg

SEQ ID NO: 76704 - DNA, 405 bp, Glycine max
tttgaagtttctaagatgacttctccctacattaaatgtacagtctctttcttcatagcatttggaaatttggctgatgataccatcaattttgaggcttttccccacaagctggtgcagtttggagagattcaggaaaaagttgtattgaaattttcacaagaggaatttcttacagcttggtcaactcaggtgcgtcctgcaacaactctgttggctgatgggtgtccatatttgtatgcaatggtgcatgatagttcagtgtctacaataccaggtgattttgtcattggtgtcaagttgacaaccataaacaatatgtgtgcatatgggctcaatcctggtatttcaagttctcgtcttttgggcaccattcctcagtccatttcacagcaaactgtttgg

SEQ ID NO: 76705 - DNA, 309 bp, Glycine max
  unsure (1)..(309): unsure at all n locations
caaaattattaaagaatgtctctctagaagcaaaggaaaaaaaatnattaaaaaaaaaaaaaaaaaaaaaaaaaaaaaaaaaaaaaaaaaaaaaaaaaaaaaaaaaaaaaaaaaaaaaaaaaaaaaaaaaaaaaaaaaaaaaaaaaaaaaaaaaaaaaaaaaaaaaaaaaaaaaaaaaaaaaaaaaaaaaaacaaaaaaaaataaaaaaatagncatcctcaataaataaaggatagtgaaaaagggggggcggctccacattgcactatanccttcaagcataaaacttaaagtgcaaattctggggc

SEQ ID NO: 76706 - DNA, 289 bp, Glycine max
aaaaaaaaaaaataaaaaaaaaaaaaaaaaaaaaaaaaaaaaaaaaaaaaaaaaaaaaaaaaaaaaaaaaaaaaaaaaaaaaaaaaaaaaaaaaaaaaaaaaaaaaaaaaaaaaaaaaaaaaaaaaaaaggggcctgcagaaaaacaagattatacctaaaatgagaaatttaaaaagcttggggtaattaaaggctataatttttttttgggtgaaattgtaatacagctaacaattctacacaacaaacaagccgggagcgtaaaaattaaagcctgggttacctaa

SEQ ID NO: 76707 - DNA, 280 bp, Glycine max
cgagaattgtatttgcacagtccagaggaagctcgccaattgagaaggaaagctctctctcgtattgaatggctgcaaaaagctgatgtgcctaccatagcacagattgaagagttccattcgatgcagaggatgatgaatgctcctgattcaaatgataatattgatttactgttgagcattgatttgttgggtttacaaggagcaggtaaagcttttccaaacaaaattgtttttgatgataaagcttgtgttggctaacacacaagaattctttgat

SEQ ID NO: 76708 - DNA, 325 bp, Glycine max
aaacaatatgtgtgcatatgggctcaatcctggtatttcaggttctcgtcttttgggcaccattcctcagtccatttcacagcaaactgtttggaatcaaatggcaacagtgagaacaccattgaattttgattctagcaagcagagcttttgtcagttttctattgaccttctcggtggaggaatcttagtggacaaaactggagattggatcacacttatacaaaattctccaattagtaacttattgagagttgctgcttgaagaaaggctgtttaatggtcaagatgtgatgtctgggaatgcagcagtcaaaaggagtga

SEQ ID NO: 76709 - DNA, 301 bp, Glycine max
  unsure (1)..(301): unsure at all n locations
ctcgagccgaatcggctcgagcggctcgagttcttattctcttgagttcccacatttttctatcttttttttttttcctttgctgaaaacctggtaacttcaactttggctaaaagcctgctaattaaactacttgaatctgaattctcgtgtgtctattctatgtgaaaatgcaaaaggggaaaattaattcgctaacattctttttttttgggctcaatattatatattattcggtgaacgaggttcagaaaatagaaacctcttttggtttctggaaactngatttactttcatttat

SEQ ID NO: 76710 - DNA, 330 bp, Glycine max
ccaaaaaatttgtttctttgtgtgtgtatggtgatgataacttaattagtgttcatgaatatgtcaagccttactttagtggttctaaattgaaaagctttctagctagtcataacatcaccattactgatggtattgacaaaactagtgcaactttgcaatttagaaagttagcagattgtgattttctcaagagaaactttaagcagatgtctaatgttttgtgggtggctcctgaagacaaagcgagtttatggtcacaacttcattatgtttcgtgtaataatctggaaatgcaagaagcttatcttgtcaatctcgtaaatgtgt

SEQ ID NO: 76711 - DNA, 281 bp, Glycine max
ctgtttaatggtcaagattgtgatgtctgggaatgcagcagtcaaaaggagtgattgggcctcattggtacaagtgtttttaacaaacagcaacagtacagagcattttgatgcatgtaagtggacaaaatcagaaccacattcctgggaattgatcttcccaatagaggtatgtggtcctaataatggttttgaaatgtggagttctgagtgggcaaatcaaacttcatggcatttgagtttccttattgacaatcccaaacagtctacagtttttgata

SEQ ID NO: 76712 - DNA, 399 bp, Glycine max
cccttacgcactcctagaagacgaaagggtccacatattgtggaggtgatatagccatcttgcttgcatcatggacaaatgttggtccaaaataaaagtaaagagcagaaaaggttgcaacaattatgaggatccttacgcactcctagaagacgaaaggatatctcagatagcacctcggctaaactaaaggcaagactacagtacacatacttagctcttaggaatgtagttgcatatatcaaatttctgtttactttgcctttgttgatttagttccattgtaaaatgtcatccaggatcaacttgttatctattttgccttcatcattgactcaaaattctttccaactgccttttccgttttgcatagatatatgtataatttaaatctaaatg

SEQ ID NO: 76713 - DNA, 364 bp, Glycine max
tgtttttacaatccttcaaaaattttgtttctttgtgtgtgtatggtgatgataacttaattagtgttcatgaatatgtcaagccttactttagtggttctaaattgaaaagctttctagctagtcataacatcaccattactgatggtattgacaaaactagtgcaactttgcaatttagaaagttagcagattgtgattttctcaagagaaactttaagcagatgtctaatgttttgtgggtggctcctgaagacaaggcgagtttatggtcacaacttcattatgtttcgtgtaataatctggaaatgcaagaagcttatcttgtcaatctcgtaaatgtgttaccagaattgtatttgca

SEQ ID NO: 76714 - DNA, 187 bp, Glycine max
tgtttaaacctaattctcatttcttcatcgttcgattcttctcctcctaaagatgcagatcttcgtgaaaactttgaccggtaagaccatcacccttgaggtggagtcctccgacaccatcgataacgtgaaagctaagattcaagacaaggaaaggatcccacctgaccagcagagacttatcttt

SEQ ID NO: 76715 - DNA, 146 bp, Glycine max
gcacgcgtcgtagctcggattcgctcagggaccttccaccccatcaaggttctctagtgatcttcgtctttggggaatctgttttcatctactttctctaattaagacaagcttcgcagtgaaacctactgctgcttcaccaattt

SEQ ID NO: 76716 - DNA, 95 bp, Glycine max
gaaaagtcccttcatgtcctttcactctgacagttctgattgttctacccggtgatgtaaggcgaaaggctcacatgaaggttggattaaatata

SEQ ID NO: 76717 - DNA, 259 bp, Glycine max
gaaattttcacaagaggaaatatttacagcttgctcaacttaaggtgcgtcctgcacaaactctgtggcatgatgggtgtccatatttgttttcaaaggtgcatgatagttcagtgtctacaataccaggtgattttgtcattggtgtcaagttggcaaccataaacaatatgtgtgcatatgggctcaatcctggtatttcaggttctcgtcttttgggcaccattcctcagtccatttcacagcaaactgtttgaat

SEQ ID NO: 76718 - DNA, 203 bp, Glycine max
taacttcttcccccctacttctactcaaaccatggtatgagacacaaaatcatgttcaaacacaacccaagtaccaaaccatgattttccctaactttttatttgtaatgaaagttagtttactcagccaaactaggatttggggtgtgtgatctatgatcagaatgttctcttaatagtttggaatatttctgaattttagg

SEQ ID NO: 76719 - DNA, 326 bp, Glycine max
ggctgtttaatggtcaagattgtgatgtctgggaatgcaacaggcaaaaggagtgattgggcctcattggtacacgtgtttttaacaaacagcaacagtgcagagcattttgatgcatgtcagtggacaaaatcagaaccacattgctgggaattgatcttcccaatagaggtatgtggtcctaataatggttttgaaatgtggagttctgagtgggcaaatcaaacttcatggcatttgagtttccttattgacaatcccaaacagactacagtttttgatattctcttgggaatctcttaagattttgaaattgctggtaatac

SEQ ID NO: 76720 - DNA, 171 bp, Glycine max
  unsure (1)..(171): unsure at all n locations
tgcacgcgacgtaagctcgaattcgctcgagattgcatgtaagcgatacacttttgggccnaaatggaagcccccggcaacaagttgatgcctttcatcaggtacccggtagttgtcatgtagcaatatatgcctccggccaccacggatacctgccatgatcatgttgtt

SEQ ID NO: 76721 - DNA, 153 bp, Glycine max
gaaaaaaaaagaaaattctctttttttgtgattttttatttgtttgcacacccttcctgaaatctagagacaagccgcaaaattaatccatacccagaatttctctcttctgaatatcttgtgggggttatcttgtttttggtggttttggtt

SEQ ID NO: 76722 - DNA, 80 bp, Glycine max
  unsure (1)..(80): unsure at all n locations
tagacgncgcatgcacgcgnacgnaagcncggaanncggctcgagagaagnncnacngggcaccaacaagggaagaccgc

SEQ ID NO: 76723 - DNA, 172 bp, Glycine max
ataagatattgaagtagtgctaagtgcctaacacctgcagtgaacaatggcctctgcatcagcatctcttctcaagtcttcacttgttcttgacaagtctgagtgggtgaagggacaaacacttcgccaaccttctgctgcatcagttgtgagatgcaaccccaccacccca

SEQ ID NO: 76724 - DNA, 123 bp, Glycine max
cacgcgtacgtaagctcggaattcggctcgcgagaaaaaaagctcgagacaatatttaatgtcacttaatcaatgtggaattgcttgggtgaacgatgacgctccttacttttgttcctgtca

SEQ ID NO: 76725 - DNA, 215 bp, Glycine max
caaagcatctaataccctcgtttgatagatctgttataagagacactttggggatcggtgagatttacgcgaactcatggatgaacttcggtggagccaccaatgaccgaagcttgaatgtgtgggattccctcggtggaagtcaaaccgatttggttaaagggttgttcgagttgacaccgttggatatcaagaagctgaagaaattagcggag

SEQ ID NO: 76726 - DNA, 335 bp, Glycine max
aatccttcaaaaattttgtttctttgtgtgtgtatggtgatgataacttaattagtgttcatgaatatgtcaagccttactttagtggttctaaattgaaaagctttctagctagtcataacatcaccattactgatggtattgacaaaactagtgcaactttgcaatttagaaagttagcagattgtgattttctcaagagaaactttaagcagatgtctaatgttttgtgggtggctcctgaagacaaggcgagtttatggtcacaacttcattatgtttcgtgtaataatctggaaatgcaagaagcttatcttgtcaatctcgtaaatgtg

SEQ ID NO: 76727 - DNA, 294 bp, Glycine max
atgataactcaattagcgttcatgaatatgtcaagccttactttagtggtcctaaagtgaaaagctatctagctagtcataacatcaccattactgatggtattgacaaaactagtgcaactctgcactttaaaaagttagcagattgggattttctcaagagaaactttaagcagatgtctaatgttacgacggtggctcctgaggacaaggcgagtttatggtcacaacttcattatgtttcgtgtaataatgtgcgaatgcaagaagcttatcttgtcaatctcgtaaatg

SEQ ID NO: 76728 - DNA, 279 bp, Glycine max
gcaaaaagacagagggttaattgtggagtattttggaaggatgtcttacgttgctcataacgttaatcagccccaagagaaagatttgttggagggaaatttttcctttgatattaaatctcgctctagattggaaaaagtttcctctacaaaagcacaatttgttagtggaaaaaccttcaaatatgatataattggtgcttgttcacattcttcagaagatttttcttgaaaggaagatctagaaaaacccaaaaagattgatgccagattgagaca

SEQ ID NO: 76729 - DNA, 173 bp, Glycine max
cgtcttttgggcaccattcctcagtccatttcacagcaaactgtttggaatcaaatggcaacagtgagaacaccattgaattttgattctagcaagcagagcttttgtcagttttctattgaccttctcggtggaggaatcttagtggacaaaactggagaatgggtcacact

SEQ ID NO: 76730 - DNA, 80 bp, Glycine max
gtccttttgcatttgtgaactagtatgtagtattttattcacttaaataaagcgcattactatgtgcaatgagtgtgttt

SEQ ID NO: 76731 - DNA, 165 bp, Glycine max
ttctagcttcttgtttcatgcaagatgtatgcaactggttacgtgatataaattcatgtgaaattgcaaacagggctgtctttttatatggaacatattaaaccaaaataaaattccataccggtgcctggaggcttcccagctatctttatagtgagggcggtt

SEQ ID NO: 76732 - DNA, 301 bp, Glycine max
caataccaggtgattttgtcattggtgtcaagttgacaaccataaacaatatgtgtgcatatgggctcaatcctggtatttcaggttctcgtcttttgggcaccattcctcagtccatttcacagcaaactgtttggaatcaaatggcaacagtgagaacaccattgaattttgattctagcaagcagagcttttgtcagttttctattgaccttctcggtggaggaatcttagtggacaaaactggagattggatcacacttatacaaaattctccaattagtaacttattgagagttgc

SEQ ID NO: 76733 - DNA, 276 bp, Glycine max
gcagtcaaaaggagtgattgggcctcattggtacaagtgtttttaacaaacagcaacagtacagagcattttgatgcatgtaagtggacaaaatcagaaccacattcctgggaattgatcttcccaatagaggtatgtggtcctaataatggttttgaaatgtggagttctgagtgggcaaatcaaacttcatggcatttgagtttccttattgacaatcccaaacagtctacagtttttgatattctcttgggaatctctcaagattttgaaatt

SEQ ID NO: 76734 - DNA, 265 bp, Glycine max
ctcagtccatttcacagcaaactgtttggaatcaaatggcaacagtgagaacaccattgaattttgattctagcaagcagagcttttgtcagttttctattgaccttctcggtggaggaatcttagtggacaaaactggagattggatcacacttatacaaaattctccaattagtaacttattgagagttgctgcttggaagaaaggctgtttaatggtcaagattgtgatgtctgggaatgcagcagtcaaaaaggagtgatt

SEQ ID NO: 76735 - DNA, 319 bp, Glycine max
gacaaaactggagattggatcacacttatacaaaattctccaattagtaacttgttgagagttgctgcttggaagaaaggctgttttatggtcaagattgtgatgtctgggaatgcagcagtcaaaaggagtgattgggcctcattggtacacgtgtttttaacaaacagcaacagtacagagcattttgatgcatgtaagtggacaaaatcagaaccacattcctgggaattgatctttccaataaaggtatgtggtcctaataatggttttgaaatgtggagttcttagtgggcaaatcaaacttcatgggattttg

SEQ ID NO: 76736 - DNA, 424 bp, Glycine max
ttggaatgtttggcaatgcactttagattattccggagttcaaaagctttccactttctaccaattatatgcatttagagttaggcatatcatgaaaaggacctaaaattgaatgattgaactagttagcatctttctgccactaattgtgtgagcggtcataaacttgattttgagcgatcttgattttaggtgaaggggaatttgaagtgaagtgatttatgattggaagtttttattttggaagtaattttgtagtgaaagttagtatcaaaatttcaacttagcacagaagttgtatatatattttttaggagcgaagttaatttttaatcattgtaactaaatatgcaaaagtttgccaaaattatgttttgttccatgcaaatctgtgtttcgtgagctgaaatgctcccccatacta

SEQ ID NO: 76737 - DNA, 304 bp, Glycine max
gaagaacaagtagttgagaactaagaaggagaagcaaatggcttcctcaatgatctcttccccagctgttaccactgtcaaccgtgccggtgccggcatggttgctccattcactggcctcaagtccatggctggcttccccaccagaaagaccaacaatgacattacctccattgctagcaacggtggaagagtgcaatgcatgcaggtgtggccaccagttggcaagaagaagtttgagactctttcctacctgccagaccttgatgatgcacaattggcaaaagaagtagaataccttctt

SEQ ID NO: 76738 - DNA, 232 bp, Glycine max
cacgcgtacgtaagctcggaattcggctccagcgccactaattctatgctgacgcgacttcttgagaactgtaagagtctcaaatatctggttgatgagtgtccttttgcatttgtgaactagtatgtagtattttattcacttaaataaagcgcattactatgtgcaatgagtgtgtttaaatttcaaaaaaaaaaaatgaaaaacaatcacacaaaaaaatttaaaatta

SEQ ID NO: 76739 - DNA, 303 bp, Glycine max
caaaaattttgtttctttgtgtgtgtatggtgatgataacttaattagtgttcatgaatatgtcaagccttactttagtggttctaaattgaaaagctttctagctagtcataacatcaccattactgatggtattgacaaaactagtgcaactttgcaatttagaaagttagcagattgtgattttctcaagagaaactttaagcagatgtctaatgttttgtgggtggctcctgaggacaaggcgagtttatggtcacaacttcattatgtttcgtgtaataatctggaaatgcaagaagc

SEQ ID NO: 76740 - DNA, 347 bp, Glycine max
  unsure (1)..(347): unsure at all n locations
ttttgatattctcttgggaatctctcaagattttgaaattgctggtaatactcttatgccagctttttctgttccacaggctactgccagatcttctgaaaatgcggaatcctctgcatgatctggaatttgtgttttctttcgcttgttcgtttgtttaattcaataaaggaaattaggcatgaccctcttgttgagtatgctctgcctatttgaaaatttccacacctcttttaattgtcgtaatgatgtgtgaagtgtgtgttatttttaaaaaaaaaaaannnaaaaaataatataatttattataattattaatatatataaaaaaaaaaaaaaangggggg

SEQ ID NO: 76741 - DNA, 263 bp, Glycine max
agaaacgataaaatcaatcaatcaaaggaagcaaaaaagtcagaatggatttgtgtggaaaaggttcttcgcatgaacagcacacaaattcgttttgccacagacccatttcctcccatttgggaaggaccagagtgtttgagatcactgtttcgaggagaaagccttactctaaagttgggtatcgcccatttgttgtcagcgccacggggaagaagaatcatggcaactcctcttcttctggcaatgaagaacggtccatt

SEQ ID NO: 76742 - DNA, 361 bp, Glycine max
ggctagagcttggaagaaaggctgattgatggtcaagattgtgatgtctgggaatgcagcagtcaaaaggagtgattgggcctcattggtacaagtgtttttaacaaacagcaacagtacagagcattttgatgcatgtaagtggacaaaatcagaaccacattcctgggaattgatcttcccaatagaggtatgtggtcctaataatggttttgaaatgtggagttctgagtgggcaaatcaaacttcatggcatttgagtttccttattgacaatcccaaacagtctacagtttttgatattctcttgggaatctctcaagattttgaaattgctggtcatactcttatgccagctttt

SEQ ID NO: 76743 - DNA, 184 bp, Glycine max
tgatattgagccaaaatttctattactgtcctctgaaggcaaggacggctaaatatcgaggttttctgtagaccaatctaaggaggccacaaccgaaatagcatgactcttatacaaagtagaacaattcaatacttgataatagtggctgcttgtaagaaaggcctgttaatggtcaacattg

SEQ ID NO: 76744 - DNA, 313 bp, Glycine max
tgacttctccctacattaaatgtacagtctctttcttcatagcatttggaaatttggctgatgataccatcaattttgaggcttttccccacaagctggtgcagtttggagagattcaggaaaaagttgtattgaaattttcacaagaggaatttcttacagcttggtcaactcaggtgcgtcctgcaacaactctgttggctgatgggtgtccatatttgtatgcaatggtgcatgatagttcagtgtctacaataccaggtgattttgtcattggtgtcaagttgacaaccataaacaatatgtgtgcata

SEQ ID NO: 76745 - DNA, 153 bp, Glycine max
cacattcctgggaattgatcttcccaatagaggtatgtggtcctaataatggttttgaaatgtggagttctgagtgggccaatcaaacttcatggcctttgggttttcttattgaccattcccaaccggctaccagttttggttttctctttg

SEQ ID NO: 76746 - DNA, 133 bp, Glycine max
cacgcgacgaagctcgaattcggctcgggaaaaaagccaagccttccctcaactccaaacacaaagacatcatcattgatggctgccgccgtctccactgtcggagctgacaacagagctcttttgaacctgg

SEQ ID NO: 76747 - DNA, 401 bp, Glycine max
caagtctacacttcaatcaaccactttcaacgaatcaactttcagctttacgcttccagccaattatattcaccatgtctccctgtgactgcaagacctgcggctcctgcaagggcgactgcgcttccagctgcagctgcggctcctgctcccactaagcgcctcatgctgctgctgcgcctgacaccctgagttccccccttcgcgcaaacacaccaccccgacaatgtccccgcaagatccgatcaaacaccacttgggacgtcaagaacaacgcatgggcctttctgatggcgttttggggtgtggagccagagggggggggggggttgaaaggtactctgcttgttcgcttgaacgaatggaacaaatcctgtcaaatgaaaacgggttcgaccttg

SEQ ID NO: 76748 - DNA, 208 bp, Glycine max
caacatgacattacaggaggaaagggtttggttgactcccttttccaagctccacaggatgctggaactcactatgcagtcatgagctcctacgagtacctcagcactggacttcgccagtacttggacaacaaaatggatggattctacattgctccagcttttatggacaagcttgttgttcacatctccaagaacttcatgaccc

SEQ ID NO: 76749 - DNA, 195 bp, Glycine max
ccagataccgattgttcaattcaataatttagagaaaatgtggatgctggtgctgaatatgcagttaatgagctcctactagatccatataactggacttcgtcagtacttgcgcaactaaatggtatgatcatgcaccttctcacacctcatcaccaacaaccactttgatgtttatttgccggcgaacattaa

SEQ ID NO: 76750 - DNA, 243 bp, Glycine max
gttaaataggtggatgggaaaattgactttccccacgggactttccggaatggtaaaagaatgcctttttctataaggggaggagctggtgcaaagaatgctattctcatgaatatgccaaatgctgttctttcaatgtggagatattttgttggagatctcgtctttgaagtttctaagatgacttctccctacattaaatgtacaggctcttttttcatagcatttggaaatttggctgat

SEQ ID NO: 76751 - DNA, 164 bp, Glycine max
aacctctgaaaatcctttctttctttcatcgatcactctctctctctagatctgttcaaatctccgaacatttccgctcccattttcattttcctggacaaaacccaaccctaaccctttctttcttggtgagacctggattcccccccgagggggtggttttg

SEQ ID NO: 76752 - DNA, 321 bp, Glycine max
gtgaaaggacgcacctgctgttggcttgttgttcaaggatggcaatttgtaagaaagatgtttggagagttgaatgtggaatcccttctggatttccgctcacagttatttgcaatagcatttttaatgagatgctcattagatatagctatgaaaaattactgcgccaggctaaagctccaagtatgtttttacaatccttcaaaaattttgtttctttgtgtgtgtatggtgatgataacttaattagtgttcatgaatatgtcaagccttactttagtggttctaaattgaaaagctttctagctagtcataacatca

SEQ ID NO: 76753 - DNA, 422 bp, Glycine max
  unsure (1)..(422): unsure at all n locations
gattttgtcattggtgtcaagttgacaaccataaacaatatgtgtgcatatgggctcaatcctggtatttcaggttctcgtcttttgggcaccattcctcagtccatttcacagcaaactgtttggaatcaaatggcaacagtgagaacaccattgaattttgattctagcaagcagagcttttgtcagttttctattgaccttctcggtggaggaatcttagtggacaaaactggagattggatcacacttatacaaaattctccaattagtaacttgttgagagttgctgcttggaagaaaggctgtttaatggtcaagattgtgatgtctgggaatgcagcagtcaaaaggagtgattgggccttattggtacaagtgtttntaacanacagcaacagtacaaagcattttgatgcatg

SEQ ID NO: 76754 - DNA, 316 bp, Glycine max
aagctcggaattcggttcgagcttcaaagaaaggctgtttaatggtcaagattgtgatgtctgggaatgcagcagtcaaaaggagtgattgggcctcattggtacaagtgtttttaacaaacagcaacagtacagagcattttgatgcatgtaagtggacaaaatcagaaccacatttctgggaattgatcttcccaatagaggtatgtggtcctaataatggttttgaaatgtggagttctgagtgggcaaatcaaacttcatggcatttgagtttccttattgacaattccaaacagtctacagtttttgatat

SEQ ID NO: 76755 - DNA, 281 bp, Glycine max
attaccttcagaagctgtcgttgtaaatgttacatgtggtagtggacgtggtggtttacccaccactgcttggattagttctgcagttaacaatcgctcctcagatatcaacaaaaggattcgcacagcacttgggaaaggtaagaaaattgtttttcttactagagttgatccttttccagtagctttactggctgttctttttggcgttaagaatgaaattctgagttctaacgccactaatcctatgctgacgcgacttcttgagaaactgtagagtc

SEQ ID NO: 76756 - DNA, 366 bp, Glycine max
tcaggttctcgtcttttgggcaccattcctcagtccatttcacagcaaactgtttggaatcaaatggcaacagtgagaacaccattgaattttgattctagcaagcagagcttttgtcagttttctattgaccttctcggtggaggaatcttagtggacaaaactggagattggatcacacttatacaaaattctccaattagtaacttattgagagttgctgcttggaagaaaggctgtttaatggtcaagattgtgatgtctgggaatgcagcaatcaaaaggagtgattgggcctcattggtacaagtgtttttaacaaacagcaacagtacagagcattttgatgcatgtaagtggacaaaa

SEQ ID NO: 76757 - DNA, 187 bp, Glycine max
ggatatggcaaaggaatacgagaaagctattgaagaacttcagaaattgttgagggagaagagtgaactcaaagcgacagctgctgaaaaagtggagcagataacagcttctctagggacatcatcatctgatggcatcccatcatcagaagcctcagacaggatcaaagctggtttcattcacttc

SEQ ID NO: 76758 - DNA, 244 bp, Glycine max
agagtcttaggtgttttcgttaaggtatatttttaagtttctggccgtttcatgtagccggaaccttccaaactagggtcttggtcgggcggggacaattttcaatgctgggtggttttgatgagtactggtttttggtttgatgggcaaaaaagtctgggatatttcgaatttcacaagccgctataggggtttaggccatttcccttgctgctgagggatgttttaagatgcatttaattta

SEQ ID NO: 76759 - DNA, 349 bp, Glycine max
  unsure (1)..(349): unsure at all n locations
agaatcttattactttttttgtaaagnanacaaataagtttcgcgcggttttatatagtcggagcgggcaaaactatactcattatacattctaaacatattttcataacttgtttgtttttgattagaactgaaataatgattttattaaaaaaacaaatattttatattttaaattatacaaactatattttggttttagtccatatactttaataatcatgtcttatttaaatcacatctaatatattcccaaccttttctttctatccttcctattaaaccaattattatataaagaaaatggcccccctccttttaattcaccttctccctcatattttaattt

SEQ ID NO: 76760 - DNA, 333 bp, Glycine max
gaagaacaagtagtttagaactaagaaggagaagcaaatggcttgcggaatgatctcttccccagctgttaccactgtcaaccgtgccggtgccggcatggttgctccattcactggcctcaagtccatggctggcttccccaccagaaagaccaacaatgacattacctccattgctagcaacggtggaagagtgcaatgcatgcaggtgtggccaccagttggcaagaagaagtttgagactctttcctacctgccagaccttgatgatgcacaattggcaaaggaagtagaataccttcttaggaagggatggattccttgcttggaatt

SEQ ID NO: 76761 - DNA, 359 bp, Glycine max
tcgggaaaggacccacctgctgttggcttgttgttcaaggatggcaatttgtaagaaagatgtttggagagttgaatgtggaatcccttctggatttccgctcacagttatttgcaatagcatttttaatgagatgctcattagatatagctatgaaaaattactgcgccaggctaaagctccaagtatgtttttacaatccttcaaaaattttgtttctttgtgtgtgtatggtgatgataacttaattagtgttcatgaatatgtcaagccttactttagtggttctaaattgaaaagctttctagctagtcataacatcaccattactgatggtattgacaaaactagtgcaactt

SEQ ID NO: 76762 - DNA, 350 bp, Glycine max
aaaagacagagggttaattgtggagtattttggaaggatgtcttacgttgctcataacgttaatcagccccaagagaaagatttgttggagggaaatttttcctttgatattaaatctcgctctagattggaaaaagtttcctctacaaaagcacaatttgttagtggaaaaaccttcaaatatgatataattggtgctggttcacattcttcagaagattttcctgaaaaggaagatcaagaaaaacccaaaaagattgatgccagattgagacaaagaatagatcctcaatacaatgaggttcaggctcagatggaaacaaatttgtttaaattgtctcttgatgatg

SEQ ID NO: 76763 - DNA, 336 bp, Glycine max
gaaaagctttctagctagtcataacatcaccattactgatggtattgacaaaactagtgcaactttgcaatttagaaagttagcagattgtgattttctcaagagaaactttaagcagatgtctaatgttttgtgggtggctcctgaggacaaggcgagtttatggtcacaacttcattatgtttcgtgtaataatctggaaatgcaagaagcttatcttgtcaatctcgtaaatgtgttacgagaattgtatttgcacagtccagaggaagctcgccaattgagaaggaaagctctctttcgtattgaatggctgcaaaaagctgatgtgcctac

SEQ ID NO: 76764 - DNA, 125 bp, Glycine max
atcatcttcttactctttcatttgtctctctactttccctttcccctctctttcgagggattttctttttctttttttaccccttttttatttttccttcttttttttactttctcttgtttttc

SEQ ID NO: 76765 - DNA, 382 bp, Glycine max
catcaattttgaggcttttccccacaagctggtgcagtttggagagattcaggaaaaagttgtattgaaattttcacaagaggaatttcttacagcttggtcaactcaggtgcgtcctgcaacaactctgttggctgatgggtgtccatatttgtatgcaatggtgcatgatagttcagtgtctacaataccaggtgattttgtcattggtgtcaagttgacaaccataaacaatatgtgtgcatatgggctcaatcctggtatttcaagttctcgtcttttgggcaccattcctcagtccatttcacagcaaactgtttggaatcaaatggcaacagtgagaacaccattgaattttgattctagcaagcaaagcttttgt

SEQ ID NO: 76766 - DNA, 377 bp, Glycine max
  unsure (1)..(377): unsure at all n locations
gatgatctggtgataatgaatatcttaatttgtatgatagaacgaaacagtttatatatatggcctacacctcaatcccaactggattttcccactacctaaatttcttttaatgctatatctaatactttcctagttgagaaggcccaagctttattatcttaatgatttgaagtcgaaggaagacggtgaggtcggcttcatggatcacatgatgtcattcgacccggttagagataaaatcttcagagatattatttatcatgagattcctctntactgtctccaatgtccttcttttttgggtagaatatatcaccgtgtttcgattccttaaatctcttctatttatttgaaggcttacttatattttggtc

SEQ ID NO: 76767 - DNA, 414 bp, Glycine max
gacgtcgatgcacgcctcctaggctcggaattcggttcggggcccaattggccattgttagcctagaagtaggcaaagcacatggtgccagtcattaattaccgggcacgtcgagtccgatcgcatatatagcttcaatagcatttacatcgtatctccctcgcagagcatcctatacaacttcaaagatgacggacccttgcgaacagaccaaagagcaactggtcaacctgctggccaagttccatgaccccgcctagctgtactacatcgctccagggacgacaggtacagtggatgataatgaccactcgagctcgagaccccttcaatcgaggccgcattcgaatcagtgcaactcgagcggctgtggcgccaaataccataagagtcttgagcttggacttgaagagt

SEQ ID NO: 76768 - DNA, 377 bp, Glycine max
gagcttgacgtccatgcacgcgtacctaagctcggatttcggttcgggcactaactgggtatcttagaattgagaggtaatggaaatgaagaagccgtgttgtgaagagtcagagacaatagttggatcctgggaatgttggttcgacgatgcatgcatcgttgacatggattactttgagaagaccctttcaagcattaaacagaaaggtgttcgtgcagactcgattggtttcatcatcactcattatgcctccatatggcgtcctgacctctgtttctctgctgaaaatggtgtcaccactcacttccaatccctcggaagcgtcacaaattcatggatgaacaagaggttctttgtggaaaccttggtgagtg

SEQ ID NO: 76769 - DNA, 436 bp, Glycine max
tgggctttaaccatgtatactacttgtatcaggttcctatgcaattgccattattgtcaagcctacaatatcactagtgaggtaggctgtgtgttactgtttatcgtcttcagagaggaaagcaggatgatgtgtgaaacgccatttgtcttttgtgtaatgtcagtttcataattaaatatttaaagggaaagcttgcaaatggatctagaataatgttattcatctctgatcttcacagttttcatcatctgattacagttggtcacttggtctgatattggaacagttttctcaagaatttcatttcagactgtctgatattggaacatttaaggcaagaactatttgttttcattgaaagtgtcgctatctttagatcaaagcatgcaagtaattcaaattttatttgaacgtgtcaacatggtatcaaatg

SEQ ID NO: 76770 - DNA, 395 bp, Glycine max
aatgggcgaaacgtatagaaaacgcttaatccgcaggcactgtctcttgatagccggtggcttcccaatccctgctcagctcgcgaaaaacgaaaactagcatctactctccaaagcttctgctgcccgtgagcaacagactaaggtcgatctcatcagaattggtaccagaggaaggtatgatttctccccatatctcctcgccatctatttggtttaacaaaacatacacacgttcttagatttctaccatcatcaaaattcaatgtgtcgagcagtccactctctatagcacatgcacacgagaccagagacatactcagggcatcacaccctgacttagccggagcgggtgctattgagattgtgattatgaagacaacacgagacaaaat

SEQ ID NO: 76771 - DNA, 366 bp, Glycine max
ttgcagcagcaaagtggatgcccctggttgagtttgtagcgcaaccactcatccaagaagactccatgttcaagaaaatcgtagatatcttcattgctcgtcttgggaagcgatattgcggcttatcaactcatcaagtagtttcaaagtttgacggcatggtgtcttccttatactacaatgtcatcgacaatgaagataactgtgttggaaaatgaggactcgaacacgcaccactcttggcttctcaaatgtcagcaacaagctgaaagctgggctaaccactagtgcagatatccattgtgatatgtaaacatgcaaatgacactttatccctataggtataatgtatattaatatctgtga

SEQ ID NO: 76772 - DNA, 470 bp, Glycine max
cttggaagaaaggctgtttaatggtcaagattgtgatgtctgggaatgcagcagtcaaaaggagtgattgggcctcattggtacaagtgtttttaacaaacagcaacagtacagagcattttgatgcatgtaagtggacaaaatcagaaccacattcctgggaattgatcttcccaatagaggtatgtggtcctaataatggttttgaaatgtggagttctgagtgggcaaatcaaacttcatggcatttgagtttccttattgacaatcccaaacagtctacagtttttgatattctcttgggaatctctcaagattttgaaattgcttgtaatactcttatgccagctttttctgttccacaggctactgccagatcttctgaaaatgcggaatcctctgcatgatctggaaattgtgttttctttcgcttgttccgttgttaattcaataaaggaaattaggcatga

SEQ ID NO: 76773 - DNA, 416 bp, Glycine max
gcaggatgttcaggttacaattgattggtttatttcctctcacgaatgtgttcccaggacctattgtgttttaaatccacaaaatccttttgtgttaaataggtggatgggaaaattgactttcccccagggcacttcccgaagtgttaagagaatgcctctttctatagggggaggagctggtgcaaagaatgctattctcatgaatatgccaaatgctgttctttcaatgtggagatattttgttggagatctcgtctatgaagtttctaagatgacttctccctacattaaatgtacagtctctttcttcatagcatttggaaatttggctgatgataccatcaattttgaggctgttccccacaagctggtgcagtttggagagattcatgaaaaagttgtattgaaatttt

SEQ ID NO: 76774 - DNA, 359 bp, Glycine max
  unsure (1)..(359): unsure at all n locations
ataaaaaaaaagttgacaacaaataaacaatataagaacatatgggctcaaatcactggaataaaaagatctaagactaatggacagcaataagaaaatacaaaagacaacaaactgtttggaaatcaaatagaaacaggggggggcagcattgaattttgattgtagcacgcggaattatttccggcccggtattggaccgtgtcagaagtggatttttagtggacataattagagatggggtcaaaactgataaaaaatttgttaatgtggaaaattattttgagttgcaaattgcaaaaaaggttgngtcgtggataaaaatgtgaaaacctggggtgcagtaatgggggggagaa

SEQ ID NO: 76775 - DNA, 412 bp, Glycine max
ctcgagccgctctttcttcatagcatttggaaatttggctgatgataccatcaattttgaggcttttccccacaagctggtgcagtttggagagattcaggaaaaagttgtattgaaattttcacaagaggaatttcttacagcttggtcaactcaggtgcgtcctgcaacaactctgttggctgatgggtgtccatatttgtatgcaatggtgcatgatagttcagtgtctacaataccaggtgattttgtcattggtgtcaagttgacaaccataaacaatatgtgtgcatatgggctcaatcctggtatttcaggttctcgtcttttgggcaccattcctcaatccatttcacagcaaactgtttggaatcaaatggcaacagtgagaacaccattgaattttgattct

SEQ ID NO: 76776 - DNA, 461 bp, Glycine max
  unsure (1)..(461): unsure at all n locations
tgataacttaattagtgttcatgaatatgtcaagccttactttagtggttctaaattgaaaagctttctagctagtcataacatcaccattactgatggtattgacaaaactagtgcaactttgcaatttagaaagttagcagattgtgattttctcaagagaaactttaagcagatgtctaatgttttgtgggtggctcctgaggacaaggcgagtttatggtcacaacttcattatgtttcgtgtaataatctggaaatgcaagaagcttatcttgtcaatctcgtaaatgtgttacgagaattgtatntgcacagtccagaggaagctcgccaattgagaaagaaagctctctctcgtattgaatggctgcaaaaagctgatgtgcctaccatagcacaaattgaagagtttcattcgatgcanaagatgatgaatgcctctgattcaaatgataata

SEQ ID NO: 76777 - DNA, 352 bp, Glycine max
acgtcgcatgcacgcgcacgtacgtctcggtattcggctcgaggtccataagtgactgtgtatacagcttcaagactgcctgtgagatagaatagagaacatccaggaggaagtttctacatccgtccacaacgtggcttagactgttcaaccaatctaatcaatcaagatggttattttttatttgtaaataacataaatgctagaatctatacagattatcatatagtcttgactaaatcatatggcattgattaaggcctcaactctcaggaatcatattaaatacaggtgtctaaaaaaaacgagattcatattgtttacaaatgaaaaattaccatcttgattgatt

SEQ ID NO: 76778 - DNA, 327 bp, Glycine max
gtttttgatattctcttgggaatctctcaagattttgaaattgctggtaatactcttatgccagctttttctgttccacaggctactgccagatcttctgaaaatgcggaatcctctgcatgatctggaatttgtgttttctttcgcttgttcgtttgtttaattcaataaaggaaattaggcatgaccctcttgttgagtatgctctgcctatttgaaaatttccacacctcttttaattgtcgtaatgatgtgtggaagtgtgtgttattttaaaacaaaaaaagaaaaactgaagagacagcttttttaaataagcggccaacc

SEQ ID NO: 76779 - DNA, 198 bp, Glycine max
atctagtgagtgtttttgcgcggaaatttatttcaggccgtaacctgcatgcttaccggtttttgcttttgagagtacaattagcgcttttccctattctggtcatgcccgcttcatggtgtgaatttgctttccttcacaattcccacacaatattcaggtcggatgcattaagcgtatttccttgggtgcctaatt

SEQ ID NO: 76780 - DNA, 294 bp, Glycine max
gcggaatcctctgcatgatctggaatttgtgttttctttcgcttgttcgtttgtttaattcaataaaggaaattaggcatgaccctcttgttgagtatgctctgcctatttaaaaatttccacacctcttttaattgttgtaatgatgtgtgaagtgtgtgttattttaaaaaaaaaaaaaaataaaataaaataaaaaaaaaaaaaaatttaaataaaatttaaataataaaaaaaaaattaatttatatcaaattattttaaaaaaaaatattatttaaaaggggcggcccc

SEQ ID NO: 76781 - DNA, 86 bp, Glycine max
gagctatgacggccgcatgcagcgcgtacgtaagccctcggaatttcggctcgagatcgtgaattggtggatatctctggcttgca

SEQ ID NO: 76782 - DNA, 363 bp, Glycine max
gccaggtcttgctgcaaatgtgaaatttggtggatgtggttcttacccaaatctgccttgggtatccacctcaggttcaggtccaaatggaatgacaatttctggtgttacttataaatacagcactgaccaagtcagaattgtctgtgcatgccatggttctcacatgacccctgaagagtttgttcgtcatgcatacgaagaccaagcctttgcagagggcaatgcaagattggggacagtaacaaacggcaatcctgctgcctgttcccacagctaatcttgtaccgatggaccgtaatatgtaaggtcttaacaagagaatcacgggaattgagctttaatttttgtatagatgaatga

SEQ ID NO: 76783 - DNA, 85 bp, Glycine max
attgaagcgaattgtctttatcctgtaagtcaattaccttcagaagctgtcatggcaaatgttacatgtggtagtggacgtggtg

SEQ ID NO: 76784 - DNA, 363 bp, Glycine max
ttatttcctctcaggaatgtgttcccaggacctattgtgttttaaatccacaaaatccttttgtgttaaataggtggatgggaaaattgactttcccccagggcacttcccgaagtgttaagagaatgcctctttctataggggggaggagctggtgcaaagaatgctattctcatgaatatgccaaatgctgttctttcaatgtggagatattttgttggagatctcgtctttgaagtttctaagatgacttctccctacattaaatgtacagtctctttcttcatagcatttggaaatttggctgatgataccatcaattttgaggcttttccccacaagctggtgcaagttggagagatt

SEQ ID NO: 76785 - DNA, 355 bp, Glycine max
  unsure (1)..(355): unsure at all n locations
ctaatgttttgtgggtggctcctgaggacaaggcgagtttatggtcacaacttcattatgtttcgtgtaataatctggaaatgcaagaagcttatcttgtcaatctcgtaaatgtgttacgagaattgtatttgcacagtccagaggaagctcgtcaattgagaaggaaagctctctctcgtattgaatggctgcaaaaagctgatgtgcctaccatagcacagattgaagagttccattcgatgcagaggatgatgaatgctcctgattcaaatgataatattgatttactgttgagcattgatttgtngggtttacaaggagcaggtaaaagcttttccaaacaaaattgttt

SEQ ID NO: 76786 - DNA, 163 bp, Glycine max
taggaggattatatttgttagcttgtagaattatttcattaatctatgcaagctctctacctcttcctcttcctcttgtgaactctattttctcatgcaaattagatttcattaagcattaggaaatttaatttcttataaataaaaaagttttgatgcataa

SEQ ID NO: 76787 - DNA, 392 bp, Glycine max
ggaaagctctctctcgtattgaatggctgcaaaaagctgatgtgcctaccatagcacagattgaagagttccattcgatgcagaggatgatgaatgctcctgattcaaatgataatattgatttactgttgagcattgatttgttgggtttacaaggagcaggtaaagcttttccaaacaaaattgtttttgatgataagcttgtgttggctaacacacaagaattctttgatggaaattttccagtggattcttggttaccaatttttgtgaattgtctttatcctgtaagtcaattaccttcagaagctgtcgttgtaaatgttacatgtggtagtggacgtggtgggttacccaccactgcttggattagttctgcagttaacaatcgc

SEQ ID NO: 76788 - DNA, 415 bp, Glycine max
caactctgttggctgatgggtgtccatatttgtatgcaatggtgcatgatagttcagtgtctacaataccaggtgattttgtcattggtgtcaagttgacaaccataaacaatatgtgtgcatatgggctcaatcctggtatttcaggttctcgtcttttgggcaccattcctcagtccatttcacagcaaactgtttggaatcaaatggcaacagtgagaacaccattgaattttgattctagcaagcagagcttttgtcagttttctattgaccttctcggtggaggaatcttagtggacaaaactggagattggatcacacttatacaaaattctccaattagtaacttgttgagagttgctgcttggaagaaaggcttgttaatggtcaagattgtgatgtctgggaatgc

SEQ ID NO: 76789 - DNA, 385 bp, Glycine max
aattgatgcgtgaaaggacccacttgctgttggcttgttgttcaaggatggcaatttgtaagaaagatgtttggagagttgaatgtggaatcccttctggatttccgctcacagttatttgcaatagcatttttaatgagatgctcattagatatagctatgaaaaattactgcgccaggctaaagctccaagtatgtttttacaatccttcaaaaattttgtttctttgtgtgtgtatggtgatgataacttaattagtgttcatgaatatgtcaagccttactttagtggttctaaattgaaaagctttctagctagtcataacatcaccattactgatggtattgacaaaactagtgcaactttgcaatttagaaagttagc

SEQ ID NO: 76790 - DNA, 399 bp, Glycine max
gtgtatggtgatgataacttaattagtgttcatgaatatgtcaagccttactttagtggttctaaattgaaaagctttctagctagtcataacatcaccattactgatggtattgacaaaactagtgcaactttgcaatttagaaagttagcagattgtgattttctcaagagaaactttaagcagatgtctaatgttttgtgggtggctcctgaggacaaggcgagtttatggtcacaacttcattatgtttcgtgtaataatctggaaatgcaagaagcttatcttgtcaacctcgtaaatgtgttacgagaattgtatttgcacagtccagaggaagctcgccaattgagaaggaaagctctctctcgtattgaatggctgcaaaaagctgatgtg

SEQ ID NO: 76791 - DNA, 403 bp, Glycine max
ctcggtggaggaatcttagtggacaaaactggagattggatcacacttatacaaaattctccaattagtaacttgttgagagttgctgcttggaagaaaggctgtttaatggtcaagattgtgatgtctgggaatgcagcagtcaaaaggagtgattgggcctcattggtacaagtgtttttaacaaacagcaacagtacagagcattttgatgcatgtaagtggacaaaatcagaaccacattcctgggaattgatcttcccaatagaggtatgtggtcctaataatggttttgaaatgtggagttctgagtgggcaaatcaaacttcatggcatttgagtttccttattgacaatcccaaacagtctacagtttttgatattctcttgggaatctctcaag

SEQ ID NO: 76792 - DNA, 316 bp, Glycine max
gcaaggctaacttgtcccttggtagatcataaaatcttcccttagtttgcaagatatgtacaatgtacagatagtgatcacatctgtttttggtactctactacaagatatgtacgtacaatcattacatgaggagttactatttaagagttgaaaaaagtaagggaagaagtgacagaagactccaatgatcttaaaaggctgtatgcttgggcacaggagagaattggcgagaaaagcttaggagatttggcaattgagaaacttcagcttgaggcagctcagcttgaagttgaagctgccaccaatgcactac

SEQ ID NO: 76793 - DNA, 412 bp, Glycine max
caccattactgatggtattgacaaaactagtgcaactttgcaatttagaaagttagcagattgtgattttctcaagagaaactttaagcagatgtctaatgttttgtgggtggctcctgaggacaaggcgagtttatggtcacaacttcattatgtttcgtgtaataatctggaaatgcaagaagcttatcttgtcaatctcgtaaatgtgttacgagaattgtatttgcacagtccagaggaagctcgccaattgagaaggaaagctctctctcgtattgaatggctgcaaaaagctgatgtgcctaccatagcacagattgaagagttccattcgatgcagaggatgatgaatgctcctgattcaaatgataatattgatttactgttgagcattgatttgttgggttac

SEQ ID NO: 76794 - DNA, 420 bp, Glycine max
acaaaactggagattggatcacacttatacaaaattctccaattagtaacttattgagagttgctgcttggaagaaaggctgtttaatggtcaagattgtgatgtctgggaatgcagcagtcaaaaggagtgattgggcctcattggtacaagtgtttttaacaaacagcaacagtacagagcattttgatgcatgtaagtggacaaaatcagaaccacattcctgggaattgatcttcccaatagaggtatgtggtcctaataatggttttgaaatgtggagttctgagtgggcaaatcaaacttcatggcatttgagtttccttattgacaatcccaaacagtctacagtttttgatattctcttgggaatctctcaagattttgaaattgctggtaatactcttatgccagcttttt

SEQ ID NO: 76795 - DNA, 320 bp, Glycine max
gtgatgataacttaattagtgttcatgaatatgtcaagccttactttagtggttctaaattgaaaagctttctagctagtcataacatcaccattactgatggtattgacaaaactagtgcaactttgcaatttagaaagttagcagattgtgattttctcaagagaaactttaagcagatgtctaatgttttgtgggtggctcctgaggacaaggcgagtttatggtcacaacttcattatgtttcgtgtaataatctggaaatgcaagaagcttatcttgtcaatctcgtaaatgtgttacgagaattgtatttgcac

SEQ ID NO: 76796 - DNA, 398 bp, Glycine max
aaagatattactactgccacagttgcccaaaggataatggctaatcatgaagcttatgtggtaatttctttaacgcaacttttttttttcttccgtttttgctttctcaatatttgagcaacctgcaaattttgttgatatggttaatcggttattctaatatctaaggccaatatcaaatttgtctaaggtgctgttaattttataatccttcacaatttacatagtttccctatcaagtcaaagatttattaaacatctatatctgaaagtgtactccacttgctggaatctgatgtgatcaaccaaagagttattccatactgctgaagcatttgaaaaggttatatgtatgctttacattcacccttttggaaatctttttcttttatcttttc

SEQ ID NO: 76797 - DNA, 384 bp, Glycine max
tcagtgtctacaataccaggtgattttgtcattggtgtcaagttgacaaccataaacaatatgtgtgcatatgggctcaatcctggtatttcaggttctcgtcttttgggcaccattcctcagtccatttcacagcaaactgtttggaatcaaatggcaacagtgagaacaccattgaattttgattctagcaagcagagcttttgtcagttttctattgaccttctcggtggaggaatcttagtggacaaaactggagattggatcacacttatacaaaattctccaattagtaacttgttgagagttgctgcttggaagaaaggctgtttaatggtcaagattgtgatgtctgggaatgcagcagtcaaaaggagtgattgg

SEQ ID NO: 76798 - DNA, 419 bp, Glycine max
caaccagataaaccccaattcaaaacttgatggcggaagcagcctcaggcgcagatcatggcctctcgacgtttcgtcacagcgagtacacacgagacggtattgaatcgtcgctactcactgattccaatggacagcgtgagagttttgtacacggtaagggacttggcggtcagcgtctgacggagatgaagcttcttgcagtggaaccagaccttggagcggctccagagcgtgcacaggactacaaaggccggattcggacgtggccgggcgttctcttgctatttctcattgtagcaggagctgccgctctcattgtattcaatgccatgaattttaatgaccgagcagctattaatgctgaacgatatgagaatgcagcacaattgaaacgaaagattcaagatggattaaat

SEQ ID NO: 76799 - DNA, 425 bp, Glycine max
ttgaagttgaagtcttgcccttctctcttcaactccaaacacaagacatcatcatccatggctgcctccgtctccactgtcggagctgtcaacagagctcttttgaacctgaatgggtctggacctggggtttcagctcccagttcatccttctttgggagcagcttgaagaaggttattggctcaagggtccccaacacaaagatttcctctggaagcttcaagattgttgctgtagaagagaagaaagagattgaagagacccagcagaccgacaaggacagatggaagggtcttgcctatgatatctcagacgaccaacaggacatcacaagaggaaagggtttggttgactcccttttccaagctccacaggatgctggaactcactatgctgtcatgagctcctacgagtaccttagcac

SEQ ID NO: 76800 - DNA, 386 bp, Glycine max
gcctaccatagcacagattgaagagttccattcgatgcagaggatgatgaatgctcctgattcaaatgataatattgatttactgttgagcattgatttgttgggtttacaaggagcaggtaaagcttttccaaacaaaattgtttttgatgataagcttgtgttggctaacacacaagaattctttgatggaaattttccagtggattcttggttaccaatttttgtgaattgtctttatcctgtaagtcaattaccttcagaagctgtcgttgtaaatgttacatgtggtagtggacgtggtggtttacccaccactgcttggattagttctgcagttaacaatcgctcctcagatatcaacaaaaggattcgcacagcacttg

SEQ ID NO: 76801 - DNA, 417 bp, Glycine max
cagaaccacattcctgggaattgatcttcccaatagaggtatgtggtcctaataatggttttgaaatgtggagttctgagtgggcaaatcaaacttcatggcatttgagtttccttattgacaatcccaaacagtctacagtttttgatattctcttgggaatctctcaagattttgaaattgctggtaatactcttatgccagctttttctgttccacaggctactgccagatcttctgaaaatgcggaatcctctgcatgatctggaatttgtgttttctttcgcttgttcgtttgtttaattcaataaaggaaattaggcatgaccctcttgttgagtatgctctgcctatttgaaaatttccacacctcttttaattgtcgtaatgatgtgtgaagtgtgtgttatttaaaaa

SEQ ID NO: 76802 - DNA, 402 bp, Glycine max
  unsure (1)..(402): unsure at all n locations
caaagcacaaagcaaagctcatccttgagttaaaaaatggcagcagcttcttccatggctctctcatccccatccttggctggcaaggccgtgaagctgggcccatcagccccagaagtgggaagggtgagcatgaggaagaccgtcaccaagcaggtctcctcaggaagcccatggtacggcccagaccgagtcaagtacttgggcccattctctggcgagcccccgtcctacctaaccggtgagttcccaggcgactacggctgggacactgctgggctttccgcagacccagaaaccttcgccaagaaccgtgaactcgaagtgatccactccaagtgggccatgctncgagccttgngctgcgtcttcccggaagtgctgtcccgcaacggggtgaag

SEQ ID NO: 76803 - DNA, 160 bp, Glycine max
ctcgagccgctcggatatcctcaccaccagcaccgagtaagggatgcgataaggaaaaaaatggcatatagacatgataccaggctggcgcataccgtccgtgacgatcttgaatgaatgacaaaaatgaagccatcaagttcttcgcctataattcacc

SEQ ID NO: 76804 - DNA, 421 bp, Glycine max
tgagagttgctgcttggaagaaaggctgtttaatggtcaagattgtgatgtctgggaatgcagcagtcaaaaggagtgattgggcctcattggtacaagtgtttttaacaaacagcaacagtacagagcattttgatgcatgtaattggacaaaatcagaaccacattcctgggaattgatcttcccaatagaggtatgtggtcctaataatggttttgaaatgtggagttctgagtgggcaaatcaaacttcatggcatttgagtttccttattgacaatcccaaacagtctacagtttttgatattctcttgggaatctctcaagattttgaaattgctggtaatactcttatgccagctttttctgttccacaggctactgccagatcttcttgaaatgcggaatcctctgcatgatc

SEQ ID NO: 76805 - DNA, 290 bp, Glycine max
ggcaaatgaaaatacaggatgggctgctcctactcaggggctgcctccagtggatgcgagtgactggaaaggacctgggcaaggacgacaccatgtaaatgcaactgcatggtgaactgaggcccgtcatgggccaacacctgtaaatgccaatcctgcatatactgcagcggtggtgaatgcaagcatatggggaagtgagccaagtgataatggagacagggtccccaaccataccgatcacagtgcacatgcataaggacttaattacggtgtttaatgttgtaata

SEQ ID NO: 76806 - DNA, 418 bp, Glycine max
gaaaaagttgtattgaaattttcacaagaggaatttcttacagcttggtcaactcaggtgcgtcctgcaacaactctgttggctgatgggtgtccatatttgtatgcaatggtgcatgatagttcagtgtctacaataccaggtgattttgtcattggtgtcaagttgacaaccataaacaatatgtgtgcatatgggctcaatcctggtatttcaggttctcgtcttttgggcaccattcctcagtccatttcacagcaaactgtttggaatcaaatggcaacagtgagaacaccattgaattttgattctagcaagcagagcttttgtcagttttctattgaccttctcggtggaggaatcttagtggacaaaactggagattggatcacacttatacaaaattctccattagtaa

SEQ ID NO: 76807 - DNA, 391 bp, Glycine max
ggaaatgcaagaagcttatcttgtcaatctcgtaaatgtgttacgagaattgtatttgcacagtccagaggaagctcgccaattgagaaggaaagctctctctcgtattgaatggctgcaaaaagctgatgtgcctaccatagcacagattgaagagttccattcgatgcagaggatgatgaatgctcctgattcaaatgataatattgatttactgttgagcattgatttgttgggtttacaaggagcaggtaaagcttttccaaacaaaattgtttttgatgataagcttgtgttggctaacacacaagaattctttgatggaaattttccagtggattcttggttaccaatttttgtgaattgtctttatcctgtaagtcaattacct

SEQ ID NO: 76808 - DNA, 139 bp, Glycine max
ctggactgagccagcgagaaagggaaaatgctttggcacggagagggctgggatcgtgaagactcaagccatgtgacacgatgtgcaatgccgggatcgtgtactacgaggcgtcatgctcataacaagactgatacga

SEQ ID NO: 76809 - DNA, 417 bp, Glycine max
  unsure (1)..(417): unsure at all n locations
cggctcgagcggctcgaggaaactttaagcagatgtctaatgttttgtgggtggctcctgaggacaaggcgagtttatggtcacaacttcattatgtttcgtgtaataatctggaaatgcaagaagcttatcttgtcaacctcgtaaatgtgttacgagaattgtatttgcacagtccagaggaagctcgccaattgagaaggaaagctctctctcgtattgaatggctgcaaaaagctgatgtgcctaccatagcacagattgaagagttccattcgatgcagaggatgatgaatgctcctgattcaaatgataatattgatttactgttgagcattgatttgttgggtttacaaggagcaggtaaagcttttccaaacaaanatgtttttgatgataagcttgtgttggctaaca

SEQ ID NO: 76810 - DNA, 416 bp, Glycine max
tttaaatccacaaaatccttttgtgttaaataggtggatgggaaaattgactttcccccagggcacttcccgaagtgttaagagaatgcctctttctatagggggaggagctggtgcaaagaatgctattctcatgaatatgccaaatgctgttctttcaatgtggagatattttgttggagatctcgtctttgaagtttctaagatgacttctccctacattaaatgtacagtctctttcttcatagcatttggaaatttggctgatgataccatcaattttgaggcttttccccacaagctggtgcagtttggagagattcaggaaaaagttgtattgaaattttcacaagaggaatttcttacagcttggtcaactcaagtgcgtcctgcaacaactcttgtggctgatgggt

SEQ ID NO: 76811 - DNA, 414 bp, Glycine max
aaatggcaacagtgagaacaccattgaattttgattctagcaagcagagcttttgtcagttttctattgaccttctcggtggaggaatcttagtggacaaaactggagattggatcacacttatacaaaattctccaattagtaacttgttgagagttgctgcttggaagaaaggctgtttaatggtcaagattgtgatgtctgggaatgcagcagtcaaaaggagtgattgggcctcattggtacaagtgtttttaacaaacagcaacagtacagagcattttgatgcatgtaagtggacaaaatcagaaccacattcctgggaattgatcttcccaatagaagtatgtggtcctaataatggttttgaaatgtggagttctgagtgggcaaatcaaacttcatggcatttga

SEQ ID NO: 76812 - DNA, 384 bp, Glycine max
gtctcattcatcaccactacttgaactatataagtcgacacattcttcacattatgccttctccattccaccagaaatattcttcccaaagccacaaggtcttcggagacaatacagtaccagctatgcctgaagcacccaaggacgatgctgagagacgaggctccgacgcttctgtaacccgctcttcttatgatggccgtcgacgatcctccgccgcacaaagattcggtaatcttgaggcactcaagcgccctcaagatgaacaaagcgctgcccgtcgtgcatccctccacgactcgtacggcaaggtcggattcattgggtcaatgtggaacaacttcactcgtggtcctgctcccaagatgcaatcaccacccaaag

SEQ ID NO: 76813 - DNA, 417 bp, Glycine max
gaaattttcacaagaggaatttcttacagcttggtcaactcaggtgcgtcctgcaacaactctgttggctgatgggtgtccatatttgtatgcaatggtgcatgatagttcagtgtctacaataccaggtgattttgtcattggtgtcaagttgacaaccataaacaatatgtgtgcatatgggctcaatcctggtatttcaggttctcgtcttttgggcaccattcctcagtccatttcacagcaaactgtttggaatcaaatggcaacagtgagaacaccattgaattttgattctagcaagcagagcttttgtcagttttctattgaccttctcggtggaggaatcttagtggacaaaactggagattggatcacacttatacaaaattcttcaattagtaacttgttgagagt

SEQ ID NO: 76814 - DNA, 389 bp, Glycine max
ggatgttcaggttacaattgattggtttatttcctctcaggaatgtgttcccaggacctattgtgttttaaatccacaaaatccttttgtgttaaataggtggatgggaaaattgactttcccccagggcacttcccgaagtgttaagagaatgcctctttctatagggggaggagctggtgcaaagaatgctattctcatgaatatgccaaatgctgttctttcaatgtggagatattttgttggagatctcgtctttgaagtttctaagatgacttctccctacattaaatgtacagtctctttcttcatagcatttggaaatttggctgatgataccatcaattttgaggcttttccccacaagctggtgcagtttggagagattc

SEQ ID NO: 76815 - DNA, 399 bp, Glycine max
  unsure (1)..(399): unsure at all n locations
ggctgtttaatggtcaagattgtgatgtctgggaatgcagcagtcaaaaggagtgattgggcctcattggtacaagtgtttttaacaaacagcaacagtacagagcattttgatgcatgtaagtggacaaaatcagaaccacattcctgggaattgatcttcccaatagaggtatgtggtcctaataatggttttgaaatgtggagttctgagtgggcaaatcaaacttcatggcatttgagtttccttattgacaatcccaaacagtctacagtttttgatattctcttgggaatctctcaagattttgaaattgctggtaatactcttatgccagctttttctgttccacaggctactgncagatcttcttgaaatgcggaatcctctgcatgatct

SEQ ID NO: 76816 - DNA, 353 bp, Glycine max
gctggtgcaaagaatgctattctcatgaatatgccaaatgctgttctttcaatgtggagatattttgttggagatctcgtctttgaagtttctaagatgacttctccctacattaaatgtacagtctctttcttcatagcatttggaaatttggctgatgataccatcaattttgaggcttttccccacaagctggtgcagtttggagagattcaggaaaaagttgtattgaaattttcacaagaggaatttcttacagcttggtcaactcaggtgcgttctgcaacaactctgttggctgatgggtgtccatatttgtatgcaatggtgcatgatagttcagtgtctacaat

SEQ ID NO: 76817 - DNA, 179 bp, Glycine max
gtccaactactttttacttccaagtatattcgtatcacaaaggccacacaactaactgttggtcagtacttgcatttccactccagtttcactacaagtgatgtacataacttctgtagtggactgaactatagatgacactctttggagaaaatgccaaatccactagtagattttcc

SEQ ID NO: 76818 - DNA, 403 bp, Glycine max
ggcgagtttatggtcacaacttcattatgtttcgtgtaataatctggaaatgcaagaagcttatcttgtcaatctcgtaaatgtgttacgagaattgtatttgcacagtccagaggaagctcgccaattgagaaggaaagctctctctcgtattgaatggctgcaaaaagctgatgtgcctaccatagcacagattgaagagttccattcgatgcagaggatgatgaatgctcctgattcaaatgataatattgatttactgttgagcattgatttgttgggtttacaaggagcaggtaaagcttttccaaacaaaattgtttttgatgataagcttgtgttggctaacacacaagaattctttgatggaaattttccagtggattcttggttaccaattttt

SEQ ID NO: 76819 - DNA, 405 bp, Glycine max
gtcagttttctattgaccttctcggtggaggaatcttagtggacaaaactggagattggatcacacttatacaaaattctccaattagtaacttgttgagagttgctgcttggaagaaaggctgtttaatggtcaagattgtgatgtctgggaatgcagcagtcaaaaggagtgattgggcctcattggtacaagtgtttttaacaaacagcaacagtacagagcattttgatgcatgtaagtggacaaaatcagaaccacattcctgggaattgatcttcccaatagaggtatgtggtcctaataatggttttgaaatgtggagttctgagtgggcaaatcaaacttcatggcatttgagtttccttattgacaatcccaaacagtctacagtttttgatattc

SEQ ID NO: 76820 - DNA, 169 bp, Glycine max
aggaaagtgcacaagcaacggcttagcacactccagcgaggacctactgctcaagaggggcctgatggagggcgccgtgaccaccattcactggtacaccggcgaccagaggctcctcaacgcgagccaccagaacctgtggccccccagagcggcaactactaacatt

SEQ ID NO: 76821 - DNA, 389 bp, Glycine max
gcaacagtacagagcattttgatgcatgtaagtggacaaaatcagaaccacattcctgggaattgatcttcccaatagaggtatgtggtcctaataatggttttgaaatgtggagttctgagtgggcaaatcaaacttcatggcatttgagtttccttattgacaatcccaaacagtctacagtttttgatattctcttgggaatctctcaagattttgaaattgctggtaatactcttatgccagctttttctgttccacaggctactgccagatcttctgaaaatgcggaatcctctgcatgatctggaatttgtgttttctttcgcttgttcgtttgtttaattcaataaaagaaattaggcatgaccctcttgttgagtatgctc

SEQ ID NO: 76822 - DNA, 331 bp, Glycine max
cccttaaaggaagtaccaaaatggccgtcaattaaaactcacaagaattcctttcacttgtcatgaactacaatcattgaccatacatatggaacagacattagtaggttcaaaatcaatcaagcgtggaaccacaaaatatgtaaaattctaaaacagcacaactttaaattaaattgcattcatgaatcacatcagaattcataattggacattgaagtcgaccccgttaacaatctgagcagtactacttgcaaatttgctcaacgtactttttatagccattttttttattgcacttgctctagcaattttatgcttacaaaagaaa

SEQ ID NO: 76823 - DNA, 84 bp, Glycine max
cgctgaaggcatagatacaagagaaaggacttttgcatttctcacaacagggattggttcctgctcgaccacctcatgtgcgtt

SEQ ID NO: 76824 - DNA, 418 bp, Glycine max
ggaaatgcaagaagcttatcttgtcaatctcgtaaatgtgttacgagaattgtatttgcacagtccagaggaagctcgccaattgagaaggaaagctctctctcgtattgaatggctgcaaaaagctgatgtgcctaccatagcacagattgaagagttccattcgatgcagaggatgatgaatgctcctgattcaaatgataatattgatttactgttgagcattgatttgttgggtttacaaggagcaggtaaagcttttccaaacaaaattgtttttgatgataagcttgtgttggctaacacacaagaattctttgatggaaattttccagtggattcttggttaccaatttttgtgaattgtctttatcctgtaagtcaattaccttcagaagctgtcgttgtaaatgttaca

SEQ ID NO: 76825 - DNA, 147 bp, Glycine max
cacagttggaggaaccattctgcgtagtgatctattggcaaattttttgacagagggcaattttagagcaagtgttgatttgcagcgcactcatcgtattagaggaatgattaaaatggtggccacagttggtattcctgagaatac

SEQ ID NO: 76826 - DNA, 365 bp, Glycine max
gaaatttggctgatgataccatcaattttgaggcttttccccacaagctggtgcagtttggagagattcaagaaaaagttgtattgaaattttcacaagaggaatttcttacagcttggtcaactcatgtgcgtcctgcaacaactctgttggctgatgggtgtccatatttgtatgcaatggtgcatgatagttcagtgtctacaataccaggtgattttgtcattggtgtcaagttgacaaccataaacaatatgtgtgcatatgggctcaatcctggtatttcaagttctcgtcttttgggcaccattcctcagtccatttcacagcaaactgtttggaatcaaatggcaacagtgagaaca

SEQ ID NO: 76827 - DNA, 377 bp, Glycine max
atcggagctcaacaatcggaaaagggaaatgtagaaagtggtgtctggggactgacacccttctgcactggatgtattgtgggagtcaggcgtgggagatgctacaacgggatctgcggatcatataacaagaggaatggtgtcaactgtgatgtcgaatatgaccagcgatagagtgaatggttggaggagaacaatgtctgaaacagtaaagcttggtgtataaattattaaagattcgcattcacaacgacaatctctattgcatgcacattacacactgcatggagtggatgatgacataagcctgaacaagaaaattctgaccaacatgttcagaaggatgcacaagagcatgtgggctattggaggcattg

SEQ ID NO: 76828 - DNA, 359 bp, Glycine max
ctcgagccgaatcggctcgagctaaattgaaaagctttctagctagtcataacatcaccattacttatggtattgacaaaactagtgcaactttgcaatttagaaagttagcagattgtgattttctcaagagaaactttaagcagatgtctaatgttttgtgggtggctcctgaggacaaggcgagtttatggtcacaacttcattatgtttcgtgtaataatctggaaatgcaagaagcttatcttgtcaatctcgtaaatgtgttacgagaattgtatttgcacagtccagaggaagctcgccaattgagaaggaaagctctctctcgtattgaatggctgcaaaaagctgatgtg

SEQ ID NO: 76829 - DNA, 376 bp, Glycine max
  unsure (1)..(376): unsure at all n locations
gaaaaattgatgcgtgaaaggacgcacctgctgttggcttgttgttcaaggatggcaatttgtaagaaagatgtttggagagttgaatgtggaatcccttctggatttccgctcacagttatttgcaatagcatttttaatgagatgctcattagatatagctatgaaaaattactgcgccaggctaaagctccaagtatgtttttacaatccttcaaaaattttgtttctttgtgtgttattnttaaaaaaaaaaatnatataaaaaaaaaaaaaaataaaaattataaaataaattatttatataatataaaataaataataattaataaatttaaaataaaatattattataaaaaaaataaggggcgccccc

SEQ ID NO: 76830 - DNA, 388 bp, Glycine max
cttctccctacattaaatgtacagtctctttcttcatagcatttggaaatttggctgatgataccatcaattttgaggcttttccccacaagctggtgcagtttggagagattcaggaaaaagttgtattgaaattttcacaagaggaatttcttacagcttggtcaactcaggtgcgtcctgcaacaactctgttggctgatgggtgtccatatttgtatgcaatggtgcatgatagttcagtgtctacaataccaggtgattttgtcattggtgtcaagttgacaaccataaacaatatgtgtgcatatgggctcaatcctggtatttcaggttctcgtcttttgggcaccattcctcagtccatttcacagcaaactgtttggaa

SEQ ID NO: 76831 - DNA, 386 bp, Glycine max
gtttttaacaaacagcaacagtacagagcattttgatgcatgtaagtggacaaaatcagaaccacattcctgggaattgatcttcccaatagaggtatgtggtcctaataatggttttgaaatgtggagttctgagtgggcaaatcaaacttcatggcatttgagtttccttattgacaatcccaaacagtctacagtttttgatattctcttgggaatctctcaagattttgaaattgctggtaatactcttatgccagctttttctgttccacaggctactgccagatcttctgaaaatgcggaatcctctgcatgatctggaatttgtgttttctttcgcttgttcgtttgtttaattcaataaaggaaattaggcatgaccc

SEQ ID NO: 76832 - DNA, 386 bp, Glycine max
tggatggactgccaccccaatgcaggatgttcaggttacaattgattggtttatttcctctcaggaatgtgttcccaggacctattgtgttttaaatccacaaaatccttttgtgttaaataggtggatgggaaaattgactttcccccagggcacttcccgaagtgttaagagaatgcctctttctatagggggaggagctggtgcaaagaatgctattctcatgaatatgccaaatgctgttctttcaatgtggagatattttgttggagatctcgtctttgaagtttctaagatgacttctccctacattaaatgtacagtctctttcttcatagcatttggaaatttggctgatgataccatcaattttgaggcttttcccc

SEQ ID NO: 76833 - DNA, 68 bp, Glycine max
  unsure (1)..(68): unsure at all n locations
cccaactcaatntttctctcaaccggcccaatttagcataagcccagcatggccaccgcaacagcagc

SEQ ID NO: 76834 - DNA, 385 bp, Glycine max
gcctctttctatagggggaggagctggtgcaaagaatgctattctcatgaatatgccaaatgctgttctttcaatgtggagatattttgttggagatctcgtctttgaagtttctaagatgacttctccctacattaaatgtacagtctctttcttcatagcatttggaaatttggctgatgataccatcaattttgaggcttttccccacaagctggtgcagtttggagagattcaggaaaaagttgtattgaaattttcacaagaggaatttcttacagcttggtcaactcaggtgcgtcctgcaacaactctgttggctgatgggtgtccatatttgtatgcaatggtgcatgatagttcagtgtctacaataccaggtgat

SEQ ID NO: 76835 - DNA, 396 bp, Glycine max
tggagattggatcacacttatacaaaattctccaattagtaacttattgagagttgctgcttggaagaaaggctgtttaatggtcaagattgtgatgtctgggaatgcagcagtcaaaaggagtgattgggcctcattggtacaagtgtttttaacaaacagcaacagtacagagcattttgatgcatgtaagtggacaaaatcagaaccacattcctgggaattgatcttcccaatagaggtatgtggtcctaataatggttttgaaatgtggagttctgagtgggcaaatcaaacttcatggcatttgagtttccttattgacaatcccaaacagtctacagtttttgatattctcttgggaatctctcaagattttgaaattgctggtaatac

SEQ ID NO: 76836 - DNA, 397 bp, Glycine max
gtttgcaaaaagacagagggttaattgtggagtattttggaaggatgtcttacgttgctcataacgttaatcagccccaagagaaagatttgttggagggaaatttttcctttgatattaaatctcgctctagattggaaaaagtttcctctacaaaagcacaatttgttagtggaaaaaccttcaaatatgatataattggtgctggttcacattcttcagaagattttcctgaaaaggaagatcaagaaaaacccaaaaagattgatgccagattgagacaaagaatagatcctcaatacaatgaggttcaggctcagatggaaacaaatttgtttaaattgtctcttgatgatgttgaaactcctaaaggttccatgttggatctgaaaatttc

SEQ ID NO: 76837 - DNA, 388 bp, Glycine max
tgataacttaattagtgttcatgaatatgtcaagccttactttagtggttctaaattgaaaagctttctagctagtcataacatcaccattactgatggtattgacaaaactagtgcaactttgcaatttagaaagttagcagattgtgattttctcaagagaaactttaagcagatgtctaatgttttgtgggtggctcctgaggacaaggcgagtttatggtcacaacttcattatgtttcgtgtaataatctggaaatgcaagaagcttatcttgtcaatctcgtaaatgtgttacgagaattgtatttgcacagtccaaaaggaactcgccaattgaagaggaaagctctctctcgtattgaatggctgcaaaaagctgatgtg

SEQ ID NO: 76838 - DNA, 243 bp, Glycine max
aacactaccctgaacatagtaaagaagccagtgctaggatttgttagtgaagcaatggctcaaaccatgttgctcatgtctagtgtctctagcagttattccgtggatttgaagaaagaccttttcctccaattgcagagtcaaagtttaaggcctaagttctctcagctctcattcaacccacttccatcatcaacttcttccttttcttcaccccgtacattcacaactctggccctcttc

SEQ ID NO: 76839 - DNA, 113 bp, Glycine max
  unsure (1)..(113): unsure at all n locations
gagcaatgataaataaaatgaccagtgaatggttttaaagagctgtatgcatacacaattgttacatcagtttttttttttcttttgtcaaantaaaataatattaaatatat

SEQ ID NO: 76840 - DNA, 235 bp, Glycine max
  unsure (1)..(235): unsure at all n locations
gaaagataatcttnctattgctgttcctagtgcgaatggagctccaccaacaatgacttatatagcttgaggggatgactctgtcttatgctcgacaatttctcatatagtgcattgcactgcacatgctcatgatcatagtatcgcatagcatctgctcatggatgaagcgtgcatatatatcatcattggtatgtatctatcgactgctattgcacagcgtggtctgatactt

SEQ ID NO: 76841 - DNA, 197 bp, Glycine max
aaatcatgtttatagagactgagagatagggagagggtgactgaatgttctactaaacggctgcctgcaccgtctactgaacacaatccctgatcacaagatgcttcatctgaaccccatcaaagacacagcttagtcacttccaacaaaaacaaggacatttcctgcagaacagcaaaggggcaacagcacaatgc

SEQ ID NO: 76842 - DNA, 380 bp, Glycine max
cgaatagattatcctaagtctttgggaatagtgctgcaatggcttcaagtcaggaggaggtgacccttttgggagctactggaagcccatttgtgtgcagggttcatattgccctcaagttgaagggagttcaatacaaatatgtcgaagaaaatttgaggaacaagagtgaactgcttctcaaatccaacccagttcacaagaaggttccagtgtttattcacaatgagaagcccatagcagagtctcttgtgattgttgaatacattgatgagacatggaagaacaaccccatcttgccttctgatccttaccaaagagccttggctcgtttctggtccaaattcattgatgataaggtttttggtgctgcatggaaa

SEQ ID NO: 76843 - DNA, 391 bp, Glycine max
gttctgatgcatggagtttggaatttctgaagcgtactggatttcattgcgatatcatttgtgtcactggatggactgccaccccaatgcaggatgttcaggttacaattgattggtttatttcctctcaggaatgtgttcccaggacctattgtgttttaaatccacaaaatccttttgtgttaaataggtggatgggaaaattgactttcccccagggcacttcccgaagtgttaagagaatgcctctttctatagggggaggagctggtgcaaagaatgctattctcatgaatatgccaaatgctgttctttcaatgtggagatattttgttggagatctcgtctttgaagtttctaagatgacttctccctacattaaatgtacagt

SEQ ID NO: 76844 - DNA, 384 bp, Glycine max
cccaatagaggtatgtggtcctaataatggttttgaaatgtggagttctgagtgggcaaatcaaacttcatggcatttgagtttccttattgacaatcccaaacagtctacagtttttgatattctcttgggaatctctcaagattttgaaattgctggtaatactcttatgccagctttttctgttccacaggctactgccagatcttctgaaaatgcggaatcctctgcatgatctggaatttgtgttttctttcgcttgttcgtttgtttaattcaataaaggaaattaggcatgaccctcttgttgagtatgctctgcctatttgaaaatttccacacctcttttaattgtcgtaatgatgtgtgaagtgtgtgttattt

SEQ ID NO: 76845 - DNA, 202 bp, Glycine max
cacagtcacatacacatactactacttgtgttcattagcatcttgttgctgccacaagccatggttctacaaacacgcaataatgcacacgtcgtatctgttccgctaaaggctcaaggccacatcatgcccatgatggacattgcacgactattggcgcggactggcgagattgttaccatattcactacaccacaaaatg

SEQ ID NO: 76846 - DNA, 395 bp, Glycine max
gtttcgtgtaataatctggaaatgcaagaagcttatcttgtcaatctcgtaaatgtgttacgagaattgtatttgcacagtccagaggaagctcgccaattgagaaggaaagctctctctcgtattgaatggctgcaaaaagctgatgtgcctaccatagcacagattgaagagttccattcgatgcagaggatgatgaatgctcctgattcaaatgataatattgatttactgttgagcattgatttgttgggtttacaaggagcaggtaaagcttttccaaacaaaattgtttttgatgataagcttgtgttggctaacacacaagaattctttgatggaaattttccagtggattcttggttaccaatttttgtgaattgtctttatcctgt

SEQ ID NO: 76847 - DNA, 388 bp, Glycine max
atcaattttgaggcttttccccacaagctggtgcagtttggagagattcaagaaaaagttgtattgaaattttcacaagaggaatttcttacagcttggtcaactcaggtgcgtcctgcaacaactctgttggctgatgggtgtccatatttgtatgcaatggtgcatgatagttcattgtctacaataccaggtgattttgtcattggtgtcaagttgacaaccataaacaatatgtgtgcatatgggctcaatcctggtatttcaggttctcgtcttttgggcaccattcctcagtccatttcacagcaaactgtttggaatcaaatggcaacagtgagaacaccattgaattttgattctagcaagcagagcttttgtcagtttt

SEQ ID NO: 76848 - DNA, 361 bp, Glycine max
gtgattttgtcattggtgtcaagttgacaaccataaacaatatgtgtgcatatgggctcaatcctggtatttcaggttctcgccttttgggcaccattcctcagtccatttcacagcaaactgtttggaatcaaatggcaacagtgagaacaccattgaattttgattctagcaagcagagcttttgtcagttttctattgaccttctcggtggaggaatcttagtggacaaaactggagattggatcacacttatacaaaattctccaattagtaacttgttgagagttgctgcttggaagaaaggctgtttaatggtcaagattgtgatgtctgggaatgcatcagtcaaaaagagtga

SEQ ID NO: 76849 - DNA, 383 bp, Glycine max
gtggaatcctgcttgcacaaaagcaatgactatgtcatttaatccaaacccgtgttctgatgcatggagtttggaatttctgaagcgtactggatttcattgcgatatcatttgtgtcactggatggactgccaccccaatgcaggatgttcaggttacaattgattggtttatttcctctcaggaatgtgttcccaggacctattgtgttttaaatccacaaaatccttttgtgttaaataggtggatgggaaaattgactttcccccagggcacttcccgaagtgttaagagaatgcctctttctatagggggaggagctggtgcaaagaatgctattctcatgaatatgccaaatgctgttctttcaatgtggagatatt

SEQ ID NO: 76850 - DNA, 395 bp, Glycine max
tgggaatgcagcagtcaaaaggagtgattgggcctcattggtacaagtgtttttaacaaacagcaacagtacagagcattttgatgcatgtaagtggacaaaatcagaaccacattcctgggaattgatcttcccaatagaggtatgtggtcctaataatggttttgaaatgtggagttctgagtgggcaaatcaaacttcatggcatttgagtttccttattgacaatcccaaacagtctacagtttttgatattctcttgggaatctctcaagattttgaaattgctggtaatactcttatgccagctttttctgttccacaggctactgccagatcttctgaaaatgcggaatcctctgcatgatctggaatttgtgttttctttcgcttgt

SEQ ID NO: 76851 - DNA, 385 bp, Glycine max
cttttgtcagttttctattgaccttctcggtggaggaatcttagtggacaaaactggagattggatcacacttatacaaaattctccaattagtaacttattgagagttgctgcttggaagaaaggctgtttaatggtcaagattgtgatgtctgggaatgcagcagtcaaaaggagtgattgggcctcattggtacaagtgtttttaacaaacagcaacagtacagagcattttgatgcatgtaagtggacaaaatcagaaccacattcctgggaattgatcttcccaatagaggtatgtggtcctaataatggttttgaaatgtggagttctgagtgggcaaatcaaacttcatggcatttgagtttccttattgacaatccc

SEQ ID NO: 76852 - DNA, 267 bp, Glycine max
ttcacactgtaaatcgatgttgctgcgttgttgtatatttaattaattaatttatttgtttattttggtgtagtttcgatcttttgctcgttgaaattacctacgtgttacaaaagttgtagtaataataaatttatgttatttagttggacgtgaatttttcgtatattataatgtttttaattcgattgttagttattactcttaaaaaaaaaaaaaaaaaaaaaaaaaaaaaaaaaaaaaaaaaaaaaaaaaaaaaaaaaaata

SEQ ID NO: 76853 - DNA, 387 bp, Glycine max
gtgttcatgaatatgtcaagccttactttagtggttctaaattgaaaagctttctagctagtcataacatcaccattactgatggtattgacaaaactagtgcaactttgcaatttagaaagttagcagattgtgattttctcaagagaaactttaagcagatgtctaatgttttgtgggtggctcctgaggacaaggcgagtttatggtcacaacttcattatgtttcgtgtaataatctggaaatgcaagaagcttatcttgtcaatctcgtaaatgtgttacgagaattgtatttgcacagtccagaggaagctcgccaattgagaaggaaagctctctctcgtattgaatggctgcaaaaagctgatgtgcctaccatagcac

SEQ ID NO: 76854 - DNA, 393 bp, Glycine max
atctcgctctagattggaaaaagtttcctctacaaaagcacaatttgttagtggaaaaaccttcaaatatgatataattggtgctggttcacattcttcagaagattttcctgaaaaggaagatcaagaaaaacccaaaaagattgatgccagattgagacaaagaatagatcctcaatacaatgaggttcaggctcagatggaaacaaatttgtttaaattgtctcttgatgatgttgaaactcctaaaggttccatgttggatctgaaaatttctcaatctaaaattgcacttcccaagaacacagttggaggaaccattctgcgtagtgatctattggcaaattttttgacagagggcaattttagagcaagtgttgatttgcagcgcac

SEQ ID NO: 76855 - DNA, 139 bp, Glycine max
ccaatgcaagatgttcaagtttcaattgattggtttatttcctctcaggaatgtgttccccaggacctattgtgttttaaatccacaaaatccttttgtgttaaataggtggatgggaaaattgactttccccaggcac

SEQ ID NO: 76856 - DNA, 370 bp, Glycine max
gctaaagctccaagtatgtttttacaatccttcaaaaattttgtttctttgtgtgtgtatggtgatgataacttaattagtgttcatgaatatgtcaagccttactttagtggttctaaattgaaaagctttctagctagtcataacatcaccattactgatggtattgacaaaactagtgcaactttgcaatttagaaagttagcagattgtgattttctcaagagaaactttaagcagatgtctaatgttttgtgggtggctcctgaagacaaggcgagtttatggtcacaacttcattatgtttcgtgtaataatctggaaatgcaagaagcttatcttgtcaacctcgtaaatgtgttacgagaat

SEQ ID NO: 76857 - DNA, 385 bp, Glycine max
atctccccttccaattccctttcttcactgacgctcaaacatcgtacagagtatcttactctaacgtcgatctttctttgcctcaaaagaaccgtccgttgaaaccagtctctttccattcacaaatcgagaaaaatgtccattgttagacaacgaaacgccggcgtcgccgagaagaaccagcttctccgtgaagctgaggaaaaggaactctccgagggagaaagattcatcatccctaacttcaccgtcaagcagctcctcgacgctatcccagctcactgttacaagcgctctgctttgcgatcgtcgacttacatcgttcaggattgcatcctggtcggtgctctcgtctacgccgcttaccagattgacccattcttgg

SEQ ID NO: 76858 - DNA, 110 bp, Glycine max
ctcattgacaatcccaaacagtctacagtttctgatattctcttgcgaatctctcaagactgtgaaattgccggtaatactcttatgccagctttttctgttccacaggc

SEQ ID NO: 76859 - DNA, 147 bp, Glycine max
cgaaaccttcttgcactgggcaaaaagccccaaccatcttttggccaacctggcgaggcctaacggccaatcattgcctttaaggtcgggccaattaccaacattatgggctttttccgccgccttggccaagaaggtgttcttaac

SEQ ID NO: 76860 - DNA, 389 bp, Glycine max
aaaagttgtattgaaattttcacaagaggaatttcttacagcttggtcaactcaggtgcgtcctgcaacaactctgttggctgatgggtgtccatatttgtatgcaatggtgcatgatagttcagtgtctacaataccaggtgattttgtcattggtgtcaagttgacaaccataaacaatatgtgtgcatatgggctcaatcctggtatttcaggttctcgtcttttgggcaccattcctcagtccatttcacagcaaactgtttggaatcaaatggcaacagtgagaacaccattgaattttgattctagcaagcagagcttttgtcagttttctattgaccttctcggtggaggaatcttagtggacaaaactggagattggatca

SEQ ID NO: 76861 - DNA, 105 bp, Glycine max
cgcttgaagaaagacgcaaacctatttacattggctttcgtagcctgcctgatcaagatccagaccggatgacacaaagaatcgtagatgcctaggatatcactg

SEQ ID NO: 76862 - DNA, 388 bp, Glycine max
atttgtatgcaatggtgcatgatagttcagtgtctacaataccaggtgattttgtcattggtgtcaagttgacaaccataaacaatatgtgtgcatatgggctcaatcctggtatttcaggttctcgtcttttgggcaccattcctcagtccatttcacagcaaactgtttggaatcaaatggcaacagtgagaacaccattgaattttgattctagcaagcagagcttttgtcagttttctattgaccttctcggtggaggaatcttagtggacaaaactggagattggatcacacttatacaaaattctccaattagtaacttgttgagagttgctgcttggaaaaaaggctgtttaatggtcaagattgtgatgtctgggaatgc

SEQ ID NO: 76863 - DNA, 386 bp, Glycine max
caacctcgtaaatgtgttacgagaattgtatttgcacagtccagaggaagctcgccaattgagaaggaaagctctctctcgtattgaatggctgcaaaaagctgatgtgcctaccatagcacagattgaagagttccattcgatgcagaggatgatgaatgctcctgattcaaatgataatattgatttactgttgagcattgatttgttgggtttacaaggagcaggtaaagcttttccaaacaaaattgtttttgatgataagcttgtgttggctaacacacaagaattctttgatggaaattttccagtggattcttggttaccaatttttgtgaattgtctttatcctgtaagtcaattaccttcagaagctgtcgttgtaa

SEQ ID NO: 76864 - DNA, 444 bp, Glycine max
aaaggtttttaaattttgtgaggttcattatgaagaaaagggacaaacttagttgtcaagttggaatcaacccatactccatggaatggactggtttggccaatagattactgagtaagggcaatgatattctgtgttgcgattatgctagttttgatggtttgattaccaagcaagttatgagcaagatggcagaaatgataaacagtctttgtggtggtgatgaaaaattgatgcgtgaaaggacgcacctgctgttggcttgttgttcaaggatggcaatttgtaagaaagatgtttggagagttgaatgtggaatcccttctggatttccgctcacagttatttgcaatagcatttttaatgagatgctcattagatatagctatgaaaaattactgcgccaggctaaagctccaagtatgtttttacaatccttcaaaa

SEQ ID NO: 76865 - DNA, 407 bp, Glycine max
cgaatttcggttcggggttcttcccaatataggtatgtggtcctaataatggttttgaaatgtggagttctgagtgggcaaatcaaacttcatggcatttgagtttccttattgacaatcccaaacagtctacagtttttgatattctcttgggaatctctcaagattttgaaattgctggtaatactcttatgccagctttttctgttccacaggctactgccagatcttctgaaaatgcggaatcctctgcatgatctggaatttgtgttttctttcgcttgttcgtttgtttaattcaataaaggaaattaggcatgaccctcttgttgagtatgctctgcctatttgaaaatttccacacctcttttaattgtcgtaatgatgtgtgaagtgtgtgttatttt

SEQ ID NO: 76866 - DNA, 293 bp, Glycine max
attagatatagctatgaaaaattactgcgccaggctaaagcttcaagtatgttttttccattccttcaaaaatttggtttctttggtgtgtatggcgatgataacttaattagtgttcatgaatatgtcaagccttactttagtggttctaaattgaaaagctttctagctagtcataacatcaccattactgatggtattgacaaaactagtgcaactttgcaatttagaaagttagcagattgtgattttctcaagagaaactttaagcagatgtctaatgttttgtgggt

SEQ ID NO: 76867 - DNA, 347 bp, Glycine max
atgcagacgatgatgaatgctcctgattcaaatgataatattgatttactgttgagcattgatttgttgggtttacaaggagcaggtaaagcttttccaaacaaaattgtttttgatgataagcttgtgttggctaacacacaagaattctttgatggaaattttccagtattcttggttaccaatttttgtgaattgtctttatcctgtaagtcaattaccttcagaagctgtcgttgtaaatgttacatgtggtagtggacgtggtggtttacccaccactgcttggattagatctgcagttaacaatcgctcctcagatatcaacaaaaggattcgcacagcac

SEQ ID NO: 76868 - DNA, 113 bp, Glycine max
  unsure (1)..(113): unsure at all n locations
attcaacatttctccccttaagcttggttcaccaaatggctgctgcgggtagtgctgcantctcttttttcatccaccaaatctacctctctttcaagcaggacctccctcat

SEQ ID NO: 76869 - DNA, 526 bp, Glycine max
gccagttctgatatttacaccatctgctctcaagactgtgaattgtggaatcctgcttgcacaaaagcaatgactatgtcatttaatccaaacccgtgttctgatgcatggagtttggaatttctgaagcgtactggatttcattgcgatatcatttgtgtcactggatggactgccaccccaatgcaggatgttcaggttacaattgattggtttatttcctctcaggaatgtgttcccaggacctattgtgttttaaatccacaaaatccttttgtgttaaataggtggatgggaaaattgactttcccccagggcacttcccgaagtgttaagagaatgcctctttctatagggggaggagctggtgcaaagaatgctattctcatgaatatgccaaatgctgttctttcaatgtggagatattttgttggagatctcgtctttgaagtttctaagatgacttctccctacattaaatgtacagtctctttcttcatagcatttggaaaattggctgatgata

SEQ ID NO: 76870 - DNA, 317 bp, Glycine max
attttctcaggagaaactttaagcagatgtctaatgttttgtgggtggctcctgaggacaaggcgagtttatggtcacaacttcattatgtttcgtgtaataatctggaaatgcaagaagcttatcttgtcaacctcgtaaatgtgttacgagaattgtatttgcacagtccagaggaagctcgccaattgagaaggaaagctctctctcgtattgaatggctgcaaaaagctgatgtgcctaccatagcacagattgaagagttccattcgatgcagaggatgatgaatgcttctgattcaaatgataatattgat

SEQ ID NO: 76871 - DNA, 367 bp, Glycine max
  unsure (1)..(367): unsure at all n locations
ttaaaagattgcctttttctatagggggaggagctggtgcaaagaatgctattctcatgaatatgccaaatgctgttctttcaatgtggagatattttgttggagatctcgtctttgaagtttctaagatgacttctccctacattaaatgtacagtctctttcttcatagcatttggaaatttggctgatgataccatcaattttgaggcttttccccacaagctggtgcagtttggagagattcaagaaaaagttgtattgaaattttcacaagaggaatttcttacagcttggtcaactcaagtgcgtnctgcaacaactctgttggctgatgggtgtccatatttgtatgcaatggtgcatga

SEQ ID NO: 76872 - DNA, 526 bp, Glycine max
gaaaaaaaaaaaaattaaaaaaaaaaaaaatataaaaaactaagagggaaaaaaaaaaaaaaaaaaaaaaaaaaaaaaaaaaaaaaaaaaaaaaaaaaaaaaaaaacgaaaaaaaaaaaaaaaaaaaaaaaaaaaaaaaaaaaaaaaaaataaaaaaaaaaaaaaaaaaaaaaaaggggggggccccctctttgaaaactttttcccccggaaaataattcggggccggtttttgggggggaacaaatttttctttatggggggggttttaaaggtgggggaaaaaaggggaaaaggttttctctggggaaaaatttttttccctaaaaattcccaaaaaaaataaaaccggaaataaaaagtggaaagccgggggggcctaagggggggggccaccccaattatttggggggccacaaaggcccctttttaaaggggaaaacctttgggcccctgttttttaaaaaaatgcccaacccccgggagaaggggtttttctttttgggccccagggggtttttttttt

SEQ ID NO: 76873 - DNA, 147 bp, Glycine max
aaaaggatgaagaagacaagcctcatcctcaggaggaggtcatcgccaccgagtttcaaaaagtcactgtctcagaccaaggagagaacaagcacagcctcttagaaaagcttcaccgatctgacagcagctctagctcttcaagtg

SEQ ID NO: 76874 - DNA, 108 bp, Glycine max
cccttctggatttccgctcacagttatttgcaatagcatttttaatgagatgctcattagatatagctatgaaaaattactgcgccaggctaaagctccaagtatgtt

SEQ ID NO: 76875 - DNA, 611 bp, Glycine max
tcggttcaggccaaacctggaaattggatcacacttatacaaaattctccaattagtaacttattgagagttgctgcttggaagaaaggctgtttaatggtcaagattgtgatgtctgggaatgcagcagtcaaaaggagtgattgggcctcattggtacaagtgtttttaacaaacagcaacagtacagagcattttgatgcatgtaagtggacaaaatcagaaccacattcctgggaattgatcttcccaatagaggtatgtggtcctaataatggttttgaaatgtggagttctgagtgggcaaatcaaacttcatggcatttgagtttccttattgacaatcccaaacagtctacagtttttgatattctcttgggaatctctcaagattttgaaattgctggtaatactcttatgccagctttttctgttccacaggctactgccagatcttctgaaaatgcggaatcctctgcatgatctggaatttgtgttttctttcgcttgttcgtttgtttaattcaataaaggaaattaggcatgacccttcttgtgagtatgctctgcctatttgaaaatttccacacctcttttaattgtcgtaatga

SEQ ID NO: 76876 - DNA, 468 bp, Glycine max
attgaccttctcggtggaggaatcttagtggacaaaactggagattggatcacacttatacaaaattctccaattagtaacttgttgagagttgctgcttggaagaaaggctgtttaatggtcaagattgtgatgtctgggaatgcagcagtcaaaaggagtgattgggcctcattggtacaagtgtttttaacaaacagcaacagtacagagcattttgatgcatgtaagtggacaaaatcagaaccacattcctgggaattgatcttcccaatagaggtatgtggtcctaataatggttttgaaatgtggagttctgagtgggcaaatcaaacttcatggcatttgagtttccttattgacaatcccaaacagtctacagtttttgatattctcttgggaatctctcaagattttgaaattgctggtaatactcttatgccagctttttctgttccacaggctact

SEQ ID NO: 76877 - DNA, 411 bp, Glycine max
atcggcaccgctacgcctgtagactctgcttatggcgctggcggagcttttgtcgtcagcttccctggcgcatcttcggcaccagaatgccccggaccgaattacattgtacaagattacgctgtcgactgggcgattgtgcagacgcagaattggagcacgctttacatcctgagcagggagcgacagccagcacctgcaagcattgatgcctggattgatcgcgctgtggcctttggatccgacgcgacgtcgatttcgaagttcaaccaaacaggctgcgaatagacgtaagcggacaagaaaaagatggctatgtagagactcgatctgtgggaagcagcctgtttttccatcgagaaagtacctaatagaagagtgatcaaataatacgagcattgtctacgcgtc

SEQ ID NO: 76878 - DNA, 478 bp, Glycine max
  unsure (1)..(478): unsure at all n locations
cgaatttcggttcgaggagcattttgatgcatgtaagtggacaaaatcagaaccacattcctgggaattgatcttcccaatagaggtatgtggtcctaataatggttttgaaatgtggagttctgagtgggcaaatcaaacttcatggcatttgagtttccttattgacaatcccaaacagtctacagtttttgatattctcttgggaatctctcaagattttgaaattgctggtaatactcttatgccagctttttctgttccacaggctactgccagatcttctgaaaatgcggaatcctctgcatgatctggaatttgtgttttctttcgcttgttcgtttgtttaattcaataaaggaaattaggcatgaccctcttgttgagtatgctctgcctatttgaaaatttccacaccccttttaattgtcgtaatgatgtgtgaagtgtgtgttattttnaaaaaaaaaaannnnaa

SEQ ID NO: 76879 - DNA, 480 bp, Glycine max
  unsure (1)..(480): unsure at all n locations
tgccaccccaatgcaggatgttcaggttacaattgattggtttatttcctctcaggaatgtgttcccaggacctattgtgttttaaatccacaaaatccttttgtgttaaataggtggatgggaaaattgactttcccccagggcacttcccgaagtgttaagagaatgcctctttctatagggggaggagctggtgcaaagaatgctattctcatgaatatgccaaatgctgttctttcaatgtggagatattttgttggagatctcgtctttgaagtttctaagatgacttctccctacattaaatgtacagtctctttcttcatagcatttggaaatttggctgatgataccatcaattttgaggcttttccccacaagctggtgcagtttggagagattcaggaaaaagttgtattgaaattttcacaagaggaatttcttacagcttggtcaactcangtgcgtnctgcaacaac

SEQ ID NO: 76880 - DNA, 531 bp, Glycine max
gttctaaattgaaaagctttctagctagtcataacatcaccattactgatggtattgacaaaactagtgcaactttgcaatttagaaagttagcagattgtgattttctcaagagaaactttaagcagatgtctaatgttttgtgggtggctcctgaggacaaggcgagtttatggtcacaacttcattatgtttcgtgtaataatctggaaatgcaagaagcttatcttgtcaatctcgtaaatgtgttacgagaattgtatttgcacagtccagaggaagctcgccaattgagaaggaaagctctctctcgtattgaatggctgcaaaaagctgatgtgcctaccatagcacagattgaagagttccattcgatgcagaggatgatgaatgctcctgattcaaatgataatattgatttactgttgagcattgatttgttgggtttacaaggagcaagtaaagcttttccaaacaaaattgtttttgatgataaagctgtgttggctaacacacaagaattctttgatg

SEQ ID NO: 76881 - DNA, 622 bp, Glycine max
tttcggttcaagggaaagtggaatgtggaatcccttctggatttccgctcaaagttatttgcaatagcatttttaatgagatgctcattagatatagctatgaaaaattactgcgccaggctaaagctccaagtatgtttttacaatccttcaaaaattttgtttctttgtgtgtgtatggtgatgataacttaattagtgttcatgaatatgtcaagccttactttagtggttctaaattgaaaagctttctagctagtcataacatcaccattactgatggtattgacaaaactagtgcaactttgcaatttagaaagttagcagattgtgattttctcaagagaaactttaagcagatgtctaatgttttgtgggtggctcctgaggacaaggcgagtttatggtcacaacttcattatgtttcgtgtaataatctggaaatgcaagaagcttatcttgtcaatctcgtaaatgtgttacgagaattgtatttgcacagtccagaggaagctcgccaattgagaaggaaagctctctctcgtattgaatggctgcaaaaagctgatgtgcctaccatagcacagattgaaagagtccattcgatgcagaggatgatgaa

SEQ ID NO: 76882 - DNA, 496 bp, Glycine max
taacctcggatttcggttcgagtgatgataacttaattagtgttcatgaatatgtcaagccttactttagtggttctaaattgaaaagctttctagctagtcataacatcaccattactgatggtattgacaaaactagtgcaactttgcaatttagaaagttagcagattgtgattttctcaagagaaactttaagcagatgtctaatgttttgtgggtggctcctgaggacaaggcgagtttatggtcacaacttcattatgtttcgtgtaataatctggaaatgcaagaagcttatcttgtcaatctcgtaaatgtgttacgagaattgtatttgcacagtccagaggaagctcgccaattgagaaggaaagctctctctcgtattgaatggctgcaaaaagctgatgtgcctaccatagcacagattgaagagttccattcgatgcagaggatgatgaatgctcctgattcaaatgataatattgatttact

SEQ ID NO: 76883 - DNA, 475 bp, Glycine max
ggtgatgataacttaattagtgttcatgaatatgtcaagccttactttagtggttctaaattgaaaagctttctagctagtcataacatcaccattactgatggtattgacaaaactagtgcaactttgcaatttagaaagttagcagattgtgattttctcaagagaaactttaagcagatgtctaatgttttgtgggtggctcctgaggacaaggcgagtttatggtcacaacttcattatgtttcgtgtaataatctggaaatgcaagaagcttatcttgtcaatctcgtaaatgtgttacgagaattgtatttgcacagtccagaggaagctcgccaattgagaaggaaagctctctctcgtattgaatggctgcaaaaagctgatgtgcctaccatagcacagattgaagagttccattcgatgcagaggatgatgaatgctcctgattcaaatgataatattgatttac

SEQ ID NO: 76884 - DNA, 560 bp, Glycine max
  unsure (1)..(560): unsure at all n locations
actctctaagagctctgacatctcatgcacgcctaccttaacttcgaatttcggttcaaggttgacaaccataaacaatatgtgtgcatatgggctcaatcctggtatttcaggttctcgtcttttgggcaccattcctcagtccatttcacagcaaactgtttggaatcaaatggcaacagtgagaacaccattgaattttgattctagcaagcagagcttttgtcagttttctattgaccttctcggtggaggaatcttagtggacaaaactggagattggatcacacttatacaaaattctccaattagtaacttgttgagagttgctgcttggaagaaaggctgtttaatggtcaagattgtgatgtctgggaatgcagcagtcaaaaggagtgattgggcctcattggtacaagtgtttttaacaaacagcaacagtacagagcattttgatgcatgtaagtggacaaaatcagaaccacattcctgggaattgatcttnccaatagaggtatgtggtcctaataatggttttgaaatgtggagttctgagtggg

SEQ ID NO: 76885 - DNA, 278 bp, Glycine max
caaaaggattcgcacagcacttgggaaaggtaagaaaattgtttttcttactagagttgatccttttccagtagctttactggctgttctttttggcgttaagaatgaaattctgagttctaacgccactaatcctatgctgacgcgacttcttgagaactgtaagagtctcaaatatctggttgatgagtgtccttttgcatttgtgaactagtatgtagtattttattcacttaaataaagcgcattactatgtgcaatgagtgtgtttaaatata

SEQ ID NO: 76886 - DNA, 395 bp, Glycine max
aatggaccttcccaataaaggtatgtggtcctaataatggttttgaaatgtggagttctgagtgggcaaatcaaacttcatggcatttgagtttccttattgacaatcccaaacagtctacagtttttgatattctcttgggaatctctcaagattttgaaattgctggtaatactcttatgccagctttttctgttccacaggctactgccagatcttctgaaaatgcggaatcctctgcatgatctggaatttgtgttttctttcgcttgttcgtttgtttaattcaataaaggaaattaggcatgaccctcttgttgagtatgctctgcctatttgaaaatttccacacctcttttaattgtcgtaatgatgtgtgaagtgtgtgttatttt

SEQ ID NO: 76887 - DNA, 408 bp, Glycine max
ggaaaaagttgtattgaaattttcacaagaggaatttcttacagcttggtcaactcaggtgcgtcctgcaacaactctgttggctgatgggtgtccatatttgtatgcaatggtgcatgatagttcagtgtctacaataccaggtgattttgtcattggtgtcaagttgacaaccataaacaatatgtgtgcatatgggctcaatcctggtatttcaggttctcgtcttttgggcaccattcctcagtccatttcacagcaaactgtttggaatcaaatggcaacagtgagaacaccattgaattttgattctagcaagcagagcttttgtcagttttctattgaccttctcggtggaggaatcttagtggacaaaactggagattggatcacacttatacaaaattc

SEQ ID NO: 76888 - DNA, 266 bp, Glycine max
tagcattctaccaagagactctatggcttttgcatttgatctttgctgagtaaatccttctgcccaaatggaacaaggttctccaccctacattgaaaaataacattccaagtaaggtaaggtatttgtattctgagtgcaatgcaccaattcaatcagatattaaataggaacagtcatgatacaaggggactatgaccatgaccccatgcagtatgctctcaaaatgtaaatagattaacttcatagaaataaattaatagtgt

SEQ ID NO: 76889 - DNA, 490 bp, Glycine max
ttgattaccaagcaagttatgagcaagatggcagaaatgataaacagtctttgtggtggtgatgaaaaattgatgcgtgaaaggacgcacctgctgttggcttgttgttcaaggatggcaatttgtaagaaagatgtttggagagttgaatgtggaatcccttctggatttccgctcacagttatttgcaatagcatttttaatgagatgctcattagatatagctatgaaaaattactgcgccaggctaaagctccaagtatgtttttacaatccttcaaaaattttgtttctttgtgtgtgtatggtgatgataacttaattagtgttcatgaatatgtcaagccttactttagtggttctaaattgaaaagctttctagctagtcataacatcaccattactgatggtattgacaaaactagtgcaactttgcaatttagaaagttagcagattgtgattttctcaagagaaactttaaagcagatg

SEQ ID NO: 76890 - DNA, 365 bp, Glycine max
  unsure (1)..(365): unsure at all n locations
ttgcaattgaagttgaagtcttgcccttctctcttcaactccaaacacaagacatcatcatccatggctgcctccgtctccactgtcggagctgtcaacagagctcttttgaacctgaatgggtctggacctggggtttcagctcccagttcatccttctttgggagcagcttgaagaaggttattggctcaagggtccccaacacaaagatttcctctggaagcttcaagattgttgctgtagaagagaagaaagagattgaagagacccagcagaccgacaaggacagatggaagggtcttgcctatgatatctcagacgaccaacaggacatcacaagaggaaaggggtnggttgactccct

SEQ ID NO: 76891 - DNA, 264 bp, Glycine max
  unsure (1)..(264): unsure at all n locations
tgcaaagaatgctattctcatgaatatgccaaatgctgttctttcaatgtggagatattttgttggagatctcgtctttgaagtttctaagatgacttctccctacattaaatgtacagtctctttcttcatagcatttggaaatttggctgatgataccatcaattttgaggcttttccccacaagctggtgcagtttggagagattcangaaaaagttgtattgaaattttcacaagaagaatttcttacagcttggtcaac

SEQ ID NO: 76892 - DNA, 471 bp, Glycine max
ctcgagccgctcgagccgattcggctcgagctcggtggaggaatcttagtggacaaaactggagattggatcacacttatacaaaattctccaattagtaacttattgagagttgctgcttggaagaaaggctgtttaatggtcaagattgtgatgtctgggaatgcagcagtcaaaaggagtgattgggcctcattggtacaagtgtttttaacaaacagcaacagtacagagcattttgatgcatgtaagtggacaaaatcagaaccacattcctgggaattgatcttcccaatagaggtatgtggtcctaataatggttttgaaatgtggagttctgagtgggcaaatcaaacttcatggcatttgagtttccttattgacaatcccaaacagtctacagtttttgatattctcttgggaatctctcaagattttgaaattgctggtaatactcttatgccagctttt

SEQ ID NO: 76893 - DNA, 436 bp, Glycine max
  unsure (1)..(436): unsure at all n locations
ctagtatgtaatattttattcactaaaataaagcacattactatgtgcaatgagtgtgtttaaatatnaaaaaaaaaaaaaaaaaaaaaaaaaaaaaaaaaaaaaaaaaaaaaaaaaaaaaaaaaaaaaaaaaaaaaaaaaaaaaaaaaaaaaaaaaaaaaaaaaaaaaaaaaaaaaaaaaaaaaaaaaaaaaaaaaaaaaaantttnnggggggggcccgcaaaaaaggaatttggaaacccggaaaaaaaattcggaccgggccctgggggggtaaaaatttttctttaaaaaaagtgataaaaaactggggggaaaaaagggaaaaaatggttcctgggaaaaaaattatttccgtaaaaaattcaaaaaaaaaaaaagccggaaaaaaaaaagggaaaacccggggggccttaaggggggaccaaaccaaaa

SEQ ID NO: 76894 - DNA, 515 bp, Glycine max
tttacctccttccccctccttacctcgaattcgtctcggaaaaaatcattttttatcacaacaaaaaaaaaaaaaaaaggggaattacaaaaataaaggcaaaaaaaaaacataataaaaaaaatactaaatataataataaaaatgcccccaaattttttgaccggggcccccccctttttttttgccctcttccccgtaattttttaaaaggggcgcccccggactctcctcctttttcccccggtttttatttctccccccttccccctgggcccccccctttccctttttgggggggctttttaacccgggccctatctttccaaaattttttcccgggggactttttttttcccccccctaatccccaacaaattgagccccctgctaaatttccaaatccgttcgttccctccttgaggaatttaatccctttgtttgcgtgtggttataataccttttttaatggggaaaaatgtgtcctccctttttttaccagaaaccggcccccc

SEQ ID NO: 76895 - DNA, 533 bp, Glycine max
attttctcaagagaaactttaagcagatgtctaatgttttgtgggtggctcctgaggacaaggcgagtttatggtcacaacttcattatgtttcgtgtaataatctggaaatgcaagaagcttatcttgtcaatctcgtaaatgtgttacgagaattgtatttgcacagtccagaggaagctcgccaattgagaaggaaagctctctctcgtattgaatggctgcaaaaagctgatgtgcctaccatagcacagattgaagagttccattcgatgcagaggatgatgaatgctcctgattcaaatgataatattgatttactgttgagcattgatttgttgggtttacaaggagcaggtaaagcttttccaaacaaaattgtttttgatgataagcttgtgttggctaacacacaagaattctttgatggaaattttccagtggactcttggttaccaatttttgtgaattgtctttatcctgtaagtcaattaccttcagaagctgtcgttgtaaatgttacatgtggtaat

SEQ ID NO: 76896 - DNA, 491 bp, Glycine max
gaaattttcacaagaggaatttcttacagcttggtcaactcaagtgcgtcctgcaacaactctgttggctgatgggtgtccatatttgtatgcaatggtgcatgatagttcagtgtctacaataccaggtgattttgtcattggtgtcaagttgacaaccataaacaatatgtgtgcatatgggctcaatcctggtatttcaggttctcgtcttttgggcaccattcctcagtccatttcacagcaaactgtttggaatcaaatggcaacagtgagaacaccattgaattttgattctagcaagcagagcttttgtcagttttctattgaccttctcggtggaggaatcttagtggacaaaactggagattggatcacacttatacaaaattctccaattagtaacttgttgagagttgctgcttggaagaaaggcttgttaatggtcaagattgtgatgtctgggaatgcagcaatcaaaaggagtgatt

SEQ ID NO: 76897 - DNA, 563 bp, Glycine max
cccttaaccattttgtgtgcttatgggctcaatcctggtttttcaggttctcgtcttttgggcaccattcctcagtccatttcacagcaaactgtttggaatcaaatggcaacagtgagaacaccattgaattttgattctagcaagcagagcttttgtcagttttctattgaccttctcggtggaggaatcttagtggacaaaactggagattggatcacacttatacaaaattctccaattagtaacttattgagagttgctgcttggaagaaaggctgtttaatggtcaagattgtgatgtctgggaatgcagcagtcaaaaggagtgattgggcctcattggtacaagtgtttttaacaaacagcaacagtacagagcattttgatgcatgtaagtggacaaaatcagaaccacattcctgggaattgatcttcccaatagaggtatgtggtcctaataatggttttgaaatgtggagttctgagtgggcaaatcaaacttcatggcatttgagtttccttattgacaatcccaaacagtctacagtttttgatattct

SEQ ID NO: 76898 - DNA, 498 bp, Glycine max
gtctctttcttcatagcatttggaaatttggctgatgataccatcaattttgaggcttttccccacaagctggtgcagtttggagagattcaggaaaaagttgtattgaaattttcacaagaggaatttcttacagcttggtcaactcaggtgcgtcctgcaacaactctgttggctgatgggtgtccatatttgtatgcaatggtgcatgatagttcagtgtctacaataccaggtgattttgtcattggtgtcaagttgacaaccataaacaatatgtgtgcatatgggctcaatcctggtatttcaggttctcgtcttttgggcaccattcctcagtccatttcacaagaaactgtttggaatcaaatggcaacagtgagaacaccattgaattttgattctagcaagcagagcttttgtcagttttctattgaccttctcggtggaggaatcttagtggacaaaactggagattggatcacacttatacaaaat

SEQ ID NO: 76899 - DNA, 606 bp, Glycine max
acttaagctcgaatttcggctcgagctcgagccgaatcggctcgaggtgcaactttgcaatttagaaagttagcagattgtgattttctcaagagaaactttaagcagatgtctaatgttttgtgggtggctcctgaggacaaggcgagtttatggtcacaacttcattatgtttcgtgtaataatctggaaatgcaagaagcttatcttgtcaatctcgtaaatgtgttacgagaattgtatttgcacagtccagaggaagctcgccaattgagaaggaaagctctctctcgtattgaatggctgcaaaaagctgatgtgcctaccatagcacagattgaagagttccattcgatgcagaggatgatgaatgctcctgattcaaatgataatattgatttactgttgagcattgatttgttgggtttacaaggagcaggtaaagcttttccaaacaaaattgtttttgatgataagcttgtgttggctaacacacaagaattctttgatggaaattttccagtggattcttggttaccaatttttgtgaattgtctttatcctgtaagtcaattaccttcagaagctgtcgttgtaaatgttaca

SEQ ID NO: 76900 - DNA, 368 bp, Glycine max
tgacgctttccccccctccttaaacccgaatttcgcctcgagaaaaaaaaattttgtgagcataatataaaaaaaccttaaagaaggggcgatcacagttaaatacaaaaaaaaaaaacaaaaaaaaacaaaaaaaaatataaactataaaaaaataactaaaccaaacttggggccgcccccctctttttaccctccttcccccgtttttttttttctgcccggtccctgggggcttcccacttttccttttagggagcctttttaaacctggcctaaaccatggcaatagcttttccctgggaaaaattgttaccccccccattttccccccaatttccaacccgaaggcatatttgcaaaaccca

SEQ ID NO: 76901 - DNA, 295 bp, Glycine max
gtgatgataacttaattagtgttcatgaatatgtcaagccttactttagtggttctaaattgaaaagctttctagctagtcataacatcaccattactgatggtattgacaaaactagtgcaaactttgcaatttaaaaagttagcaaatggtggattttctaaagaagaaactttaagcagatgtctaatgttttgtgggtggctcctgaagacaaggcgagtttatgggcacaacttcattatgtttcgtgtataatctggaaatgcaagaagctatcttgcaatctcgtaaa

SEQ ID NO: 76902 - DNA, 359 bp, Glycine max
ctcgagccgcatgattccatcgtatcccatgcctgcaccccctgttgattctccagaatacaggatagcgcactgctgacctagggcgaggtgatggaaatagcggtaaatcgtcactgccgaggcgggcaagctccctcagccatggggcgtggtccttagcaggcagggaagctggaaacggtcccacgatgtaggcgtacttgaggtagtgggcgcccttgtccctgcgtatcctgacttctagaaacattgtttcgatttcgacgcacgcgcactgctgtgcgactgcgttgtgtgcatcaacatgcagtacgagaagacgctgaagcttgcgctcatcccgaccatcgtcttct

SEQ ID NO: 76903 - DNA, 554 bp, Glycine max
gaaagatgtttggagagttgaatgtggaatcccttctggatttccgctcacagttatttgcaatagcatttttaatgagatgctcattagatatagctatgaaaaattactgcgccaggctaaagctccaagtatgtttttacaatccttcaaaaattttgtttctttgtgtgtgtatggtgatgataacttaattagtgttcatgaatatgtcaagccttactttagtggttctaaattgaaaagctttctagctagtcataacatcaccattactgatggtattgacaaaactagtgcaactttgcaatttagaaagttagcagattgtgattttctcaagagaaactttaagcagatgtctaatgttttgtgggtggctcctgaggacaaggcgagtttatggtcacaacttcattatgtttcgtgtaataatctggaaatgcaagaagcttatcttgtcaatctcgtaaatgtgttacgagaattgtatttgcacagtccagaggaagctcgccaattgagaaagaaaagctctctctcgtatttgaaat

SEQ ID NO: 76904 - DNA, 668 bp, Glycine max
  unsure (1)..(668): unsure at all n locations
atatgtgtgcatatgggctcaatcctggtatttcaggttctcgtcttttgggcaccattcctcagtccatttcacagcaaactgtttggaatcaaatggcaacagtgagaacaccattgaattttgattctagcaagcagagcttttgtcagttttctattgaccttctcggtggaggaatcttagtggacaaaactggagattggatcacacttatacaaaattctccaattagtaacttgttgagagttgctgcttggaagaaaggctgtttaatggtcaagattgtgatgtctgggaatgcagcagtcaaaaggagtgattgggcctcattggtacaagtgtttttaacaaacagcaacagtacagagcattttgatgcatgtaagtggacaaaatcagaaccacattcctgggaattgatcttcccaatagaggtatgtggtcctaataatggttttgaaatgtggagttctgagtgggcaaatcaaacttcatggcatttgagtttccttattgacaatcccaaacagtctacagtttttgatattctcttgggaatctctcaagattntgaaattgctggtaatactcttatgccagctttttctgttccacangctactgncagatcttctgaaaaatgcgaatctctgcatgatctggaa

SEQ ID NO: 76905 - DNA, 409 bp, Glycine max
gtcataacatcaccattactgatggtattgacaaaactagtgcaactttgcaatttagaaagttagcagattgtgattttctcaagagaaactttaagcagatgtctaatgttttgtgggtggctcctgaggacaaggcgagtttatggtcacaacttcattatgtttcgtgtaataatctggaaatgcaagaagcttatcttgtcaatctcgtaaatgtgttacgagaattgtatttgcacagtccaaaggaagctcgccaattgagaaggaaagctctctctcgtattgaatggctgcaaaaagctgatgtgcctaccatagcacagattgaagagttccattcaatgcagaggatgatgaatgctcctgattcaaatgataatattgatttactggtgagcattga

SEQ ID NO: 76906 - DNA, 196 bp, Glycine max
gtatgttataaaagtgggagcttccagtatcaggtattttctcgagttgtataattttcttttgtcttgttttgatgtcgtagaggttgttgattgagggaaaattcaaaccataaagctaaggattttgtttttcagttggctaatcatgtgccaagagaatggcctatccacccgggggtccaaatgcttttgt

SEQ ID NO: 76907 - DNA, 274 bp, Glycine max
aaaaataaaaaaaagaaagggaaaaaaaaaaaaaaaaaaatacaaaaaaaaaaaaatacctaataactaaaaaaaggggcgtcccccctttattaacctttcaaacccggaattaatttcggacccggtccctaaaggattccaaatttcccttataagaagccgtttaaaacctgggctaaataagggcaatagctgttccctgtgaaaaattgtaatccgttaaaatttccaaaaaaaatacaacccgaaaccataaagtgaaaaccctggg

SEQ ID NO: 76908 - DNA, 620 bp, Glycine max
  unsure (1)..(620): unsure at all n locations
ggtatttcaggttctcgtcttttgggcaccattcctcagtccatttcacagcaaactgtttggaatcaaatggcaacagtgagaacaccattgaattttgattctagcaagcagagcttttgtcagttttctattgaccttctcggtggaggaatcttagtggacaaaactggagattggatcacacttatacaaaattctccaattagtaacttattgagagttgctgcttggaagaaaggctgtttaatggtcaagattgtgatgtctgggaatgcagcagtcaaaaggagtgattgggcctcattggtacaagtgtttttaacaaacagcaacagtacagagcattttgatgcatgtaagtggacaaaatcagaaccacattcctgggaattgatcttcccaatagaggtatgtggtcctaataatggttttgaaatgtggagttctgagtgggcaaatcaaacttcatggcatttgagtttccttattgacaatcccaaacagtctacagtttttgatattctcttgggaatctctcaagattntgaaattgctggtaatactcttatgccagctttttctgttccacaagctactgccagatcttctgaaaatgc

SEQ ID NO: 76909 - DNA, 597 bp, Glycine max
ctcgagccgtgaaaaattactgcgccaggctaaagctccaagtatgtttttacaatccttcaaaaattttgtttctttgtgtgtgtatggtgatgataacttaattagtgttcatgaatatgtcaagccttactttagtggttctaaattgaaaagctttctagctagtcataacatcaccattactgatggtattgacaaaactagtgcaactttgcaatttagaaagttagcagattgtgattttctcaagagaaactttaagcagatgtctaatgttttgtgggtggctcctgaggacaaggcgagtttatggtcacaacttcattatgtttcgtgtaataatctggaaatgcaagaagcttatcttgtcaatctcgtaaatgtgttacgagaattgtatttgcacagtccagaggaagctcgccaattgagaaggaaagctctctctcgtattgaatggctgcaaaaagctgatgtgcctaccatagcacagattgaagagttccattcgatgcagaggatgatgaatgctcctgattcaaatgataatattgatttacttgtgagcattgatttgttgggtttacaaggagc

SEQ ID NO: 76910 - DNA, 502 bp, Glycine max
aaaaaaaaaaaaaaaaaaaaaaaaaaaaaaaaaaaaaaaaaaggggaaaaaaaaaaaaaaaaaaaaaaaaaaaaaaaaaaaaaaaaaaaaaaaaaaaaaaaaaaaaaaaaaaaaaaaaaaaaaaaaaaaaaaaaaaaaaaaaaaaaaaaaggggggggccccccctttggggcctcttcccccgggattttattccgggccgggtccctgggggtgtccaagtttcccttttaggggggcttttaaagcttgggcaaaaaatgggaaaaagcttttccctgggaaaaattgataccgcctcaaatccccccaaaaattccgaccgggaaaattaattggtaaacccggggggcccaattggggggcctaccccactttattggggtgggcctaatggcccgtttccaagggggaaaacctgtgggcccatttgtttatataaatcgcccaccccccgggaaagggcggtttccttttgggcccccagggtggtttttttttt

SEQ ID NO: 76911 - DNA, 532 bp, Glycine max
cctcgaattccgcctcgggaaaaaaaaaaaaaattaaaaaaaaaaaaaaaaaacaaaaaaaaaggggcggcctcaaactattagagaaaaacaacccaaaaaataaattacaaaccgataccatgaaagcaaaccaaacataactaaaaaaaaaacaaataaggggcgccccccacttatggccctcgcccccccgctatttatttcggtcccgggccctcaaggccacccagtttcccatttcggaagcctattaaaacctggccgaattaacgaaaaaacctgctccctgggaaaaattgttttccgctcaatttccccccaaaattccggccccaagccataacttttaaacccggggttccctaatggggcactaacctccctttatttgattggccccaattgccctttttcaattgagaaaccattcgggccacttttttttaataatcaccccatcccccggagagagccgctttgctttttgccccccaggttgttttttttttccacaataaaaacggaaaaa

SEQ ID NO: 76912 - DNA, 609 bp, Glycine max
  unsure (1)..(609): unsure at all n locations
tccctcaacttcgaattctgcttctggatggtaaaagcctatgccagctccaagttcattcaaaatctctgggtgtacttaacctctatggttgttcatcacttagggaattcttagtgacatcagaggaattgacagaactgaacttggcttttactgctatatgtgcattgccatcatcaatttggcaaaaaagaaaactcagatctctttacctaagaggttgtcacaatctcaacaagttatcagatgaacccagattttgtggttcttacaagcactccatcacaacattggcctctaatgttaagagattgcctgtgaacattgaaaatctttcgatgatgacaatgatttggttagatgattgcaggaaactcgtgtctttgccggagcttccgctgttccttgaaaagttaagtgcctgcaactgcacttctttggacacaaagatcactcatcagcaagtgttacaacacatgttacaaagtcgcataccctacttacgcaaacactatcttaagtgttatgatgaagaatatttcttcccnggggatcatgtgattgatgagtgtangtttcacacgacacagaattcaataaccattc

SEQ ID NO: 76913 - DNA, 643 bp, Glycine max
  unsure (1)..(643): unsure at all n locations
ctggtatttcaggttctcgtcttttgggcaccattcctcagtccatttcacagcaaactgtttggaatcaaatggcaacagtgagaacaccattgaattttgattctagcaagcagagcttttgtcagttttctattgaccttctcggtggaggaatcttagtggacaaaactggagattggatcacacttatacaaaattctccaattagtaacttgttgagagttgctgcttggaagaaaggctgtttaatggtcaagattgtgatgtctgggaatgcagcagtcaaaaggagtgattgggcctcattggtacaagtgtttttaacaaacagcaacagtacagagcattttgatgcatgtaagtggacaaaatcagaaccacattcctgggaattgatcttcccaatagaggtatgtggtcctaataatggttttgaaatgtggagttctgagtgggcaaatcaaacttcatggcatttgagtttccttattgacaatcccaaacagtctacagtttttgatattctcttgggaatctctcaagattntgaaattgctggtaatactcttatgccagctttntcttgttcacaggctactgccagatcttctgaaaatgcggaatcctctgcatgatctgg

SEQ ID NO: 76914 - DNA, 530 bp, Glycine max
taaaaatggtgatgtctgggaatgcagcagtcaaaaggagtgattgggcctcattggtacaagtgtttttaacaaacagcaacagtacagagcattttgatgcatgtaagtggacaaaatcagaaccacattcctgggaattgatcttcccaatagaggtatgtggtcctaataatggttttgaaatgtggagttctgagtgggcaaatcaaacttcatggcatttgagtttccttattgacaatcccaaacagtctacagtttttgatattctcttgggaatctctcaagattttgaaattgctggtaatactcttatgccagctttttctgttccacaggctactgccagatcttctgaaaatgcggaatcctctgcatgatctggaatttgtgttttctttcgcttgttcgtttgtttaattcaataaaggaaattaggcatgaccctcttgttgagtatgctctgcctatttgaaaatttccacacctcttttaattgtcgtaatgatgtgtgaagtgtgtgttat

SEQ ID NO: 76915 - DNA, 637 bp, Glycine max
  unsure (1)..(637): unsure at all n locations
attgcaatttcatttgtgtcactggatggactgccaccccaatgcaggatgttcaggttacaattgattggtttatttcctctcaggaatgtgttcccaggacctattgtgttttaaatccacaaaatccttttgtgttaaataggtggatgggaaaattgactttcccccagggcacttcccgaagtgttaagagaatgcctctttctatagggggaggagctggtgcaaagaatgctattctcatgaatatgccaaatgctgttctttcaatgtggagatattttgttggagatctcgtctttgaagtttctaagatgacttctccctacattaaatgtacagtctctttcttcatagcatttggaaatttggctgatgataccatcaattttgaggcttttccccacaagctggtgcagtttggagagattcaggaaaaagttgtattgaaattttcacaagaggaatttcttacagcttggtcaactcaagtgcgtcctgcaacaactctgttggctgatgggtgtccatatttgtatgcaatggtgcatgatagttcagtgtctacaataccaggtgattttgtcatttgtgtcaagtngacaaccataaacaatatgtgtgcatatgggct

SEQ ID NO: 76916 - DNA, 338 bp, Glycine max
ggatcgtctgagctctggggccttcaggtaggcctggcatgcggggtatccgtatgaacatcgtccatgatcaatgacctcgtcttgtttccctaagtgaaagaggtggccaccactatggagttggagctctacgggccatgcttagaggacatgtgtatcttgcatgaagaggcctagccaccttcataccatatgatatttataaaagcctctatatatgaaacgatgagctgaggctacgcatgccatgataatttctgttgataatagtgtggaaatcctcttgtaacaaaatgttcaagatctaaccttgatatttatatagccggcttcac

SEQ ID NO: 76917 - DNA, 618 bp, Glycine max
  unsure (1)..(618): unsure at all n locations
atttaatccaaacccgtgttctgatgcatggagtttggaatttctgaagcgtactggatttcattgcgatatcatttgtgtcactggatggactgccaccccaatgcaggatgttcaggttacaattgattggtttatttcctctcaggaatgtgttcccaggacctattgtgttttaaatccacaaaatccttttgtgttaaataggtggatgggaaaattgactttcccccagggcacttcccgaagtgttaagagaatgcctctttctatagggggaggagctggtgcaaagaatgctattctcatgaatatgccaaatgctgttctttcaatgtggagatattttgttggagatctcgtctttgaagtttctaagatgacttctccctacattaaatgtacagtctctttcttcatagcatttggaaatntggctgatgataccatcaattttgaggcttttccccacaagctggtgcagtttggagagattcangaaaaagttgtattgaaattttcacaagaggaatttcttacagctgggtcaactcangtgcgtnctgcaacaactctgttggctgatgggtgtncatatttgtatgcaatggtgcatga

SEQ ID NO: 76918 - DNA, 51 bp, Glycine max
ttttcatattggactgtcttcctctataattttgagttaaagtgtccactt

SEQ ID NO: 76919 - DNA, 567 bp, Glycine max
aacatcctttgtggtggtgatgaaaaattgatgcgtgaaaggacgcacctgctgttggcttgttgttcaaggatggcaatttgtaagaaagatgtttggagagttgaatgtggaatcccttctggatttccgctcacagttatttgcaatagcatttttaatgagatgctcattagatatagctatgaaaaattactgcgccaggctaaagctccaagtatgtttttacaatccttcaaaaattttgtttctttgtgtgtgtatggtgatgataacttaattagtgttcatgaatatgtcaagccttactttagtggttctaaattgaaaagctttctagctagtcataacatcaccattactgatggtattgacaaaactagtgcaactttgcaatttagaaagttagcagattgtgattttctcaagagaaactttaagcagatgtctaatgttttgtgggtggctcctgaggacaaggcgagtttatggtcacaacttcattatgtttcgtgtaacaatctggaaatgcaagaagcttatcttgtcaacctcgtaaatgtgtta

SEQ ID NO: 76920 - DNA, 482 bp, Glycine max
ctgaggacaaggcgagtttatggtcacaacttcattatgtttcgtgtaataatctggaaatgcaagaagcttatcttgtcaatctcgtaaatgtgttacgagaattgtatttgcacagtccagaggaagctcgccaattgagaaggaaagctctctctcgtattgaatggctgcaaaaagctgatgtgcctaccatagcacagattgaagagttccattcgatgcagaggatgatgaatgctcctgattcaaatgataatattgatttactgttgagcattgatttgttgggtttacaaggagcaagtaaagcttttccaaacaaaattgtttttgatgataagcttgtgttggctaacacacaagaattctttgatggaaattctccagtggattcttggttaccaatttttgtgaattgtctttatcctgtaagtcaattaccttcagaagctgtcgatgtaaatgttacatgtggtagt

SEQ ID NO: 76921 - DNA, 120 bp, Glycine max
gtttgtttaattcaataaaggaaattaggcatgaccctcttgttgagtatgctctgcctatttgaaaatttccacacctcttttaattgtcgtaatgatgtgtgaagtgtgtgttatttt

SEQ ID NO: 76922 - DNA, 580 bp, Glycine max
ttccttagcctcgaattccggttcgagggaatttcttacagctgggtcaactcaggtgcgtcctgcaacaactctgttggctgatgggtgtccatatttgtatgcaatggtgcatgatagttcagtgtctacaataccaggtgattttgtcattggtgtcaagttgacaaccataaacaatatgtgtgcatatgggctcaatcctggtatttcaggttctcgtcttttgggcaccattcctcagtccatttcacagcaaactgtttggaatcaaatggcaacagtgagaacaccattgaattttgattctagcaagcagagcttttgtcagttttctattgaccttctcggtggaggaatcttagtggacaaaactggagattggatcacacttatacaaaattctccaattagtaacttattgagagttgctgcttggaagaaaggctgtttaatggtcaagattgtgatgtctgggaatgcagcagtcaaaaggagtgattgggcctcattggtacaagtgtttttaacaaacagcaacagtacagagcattttgatgcatgtaagtggacaaaatca

SEQ ID NO: 76923 - DNA, 519 bp, Glycine max
  unsure (1)..(519): unsure at all n locations
cttttgggcaccattcctcagtccatttcacagcaaactgtttggaatcaaatggcaacagtgagaacaccattgaattttgattctagcaagcagagcttttgtcagttttctattgaccttctcggtggaggaatcttagtggacaaaactggagattggatcacacttatacaaaattctccaattagtaacttattgagagttgctgcttggaagaaaggctgtttaatggtcaagattgtgatgtctgggaatgcagcagtcaaaaggagtgattgggcctcattggtacaagtgtttttaacaaacagcaacagtacagagcattttgatgcatgtaagtggacaaaatcagaaccacattcctgggaattgatcttcccaatagaggtatgtggtcctaataatggttttgaaatgtggagttctgagtgggcaaatcaaacttcatggcatttgagtttccttattgacaatcccanacagtctacagtttttgatattctcttgggaatc

SEQ ID NO: 76924 - DNA, 585 bp, Glycine max
  unsure (1)..(585): unsure at all n locations
gtttggaatcaaatggcaacagtgagaacaccattgaattttgattctagcaagcagagcttttgtcagttttctattgaccttctcggtggaggaatcttagtggacaaaactggagattggatcacacttatacaaaattctccaattagtaacttattgagagttgctgcttggaagaaaggctgtttaatggtcaagattgtgatgtctgggaatgcagcagtcaaaaggagtgattgggcctcattggtacaagtgtttttaacaaacagcaacagtacagagcattttgatgcatgtaagtggacaaaatcagaaccacattcctgggaattgatcttcccaatagaggtatgtggtcctaataatggttttgaaatgtggagttctgagtgggcaaatcaaacttcatggcatttgagtttccttattgacaatcccaaacagtctacagtttttgatattctcttgggaatctctcaagattntgaaattgctggtaatactcttatgccagctttttctgttccacaggctactgccagatcttctgaaaatgcggaatcctctgcatgatctgga

SEQ ID NO: 76925 - DNA, 269 bp, Glycine max
atttgggaaatggccctcagcctctacaaccttagagatcctgttaatgagttcaactatggacagcttccattggaggtttaagtatgaatgattttattgttgctgcaaagatcgatcagataaagacatcagatcttgtcccaaggaaaagggtttgggcgtaatgccttaatgaacttcataaaacattttgccgcttgattttcttcaatattgaattaccactaattcgtgttatttgattaaatctattattctttactttc

SEQ ID NO: 76926 - DNA, 436 bp, Glycine max
gcacgcgtacgtaagctcggaattcggttcgagctgatgggtgtccatatttgtatgcaatggtgcatgatagttcagtgtctacaataccaggtgattttgtcattggtgtcaagttgacaaccataaacaatatgtgtgcatatgggctcaatcctggtatttcaggttctcgtcttttgggcaccattcctcagtccatttcacagcaaactgtttggaatcaaatggcaacagtgagaacaccattgaattttgattctagcaagcagagcttttgtcagttttctattgaccttctcggtggaggaatcttagtggacaaaactggagattggatcacacttatacaaaattctccaattagtaacttgttgagagttgctgcttggaagaaaagcttgttaatggtcaaaattgtgatgtctgggaatgc

SEQ ID NO: 76927 - DNA, 408 bp, Glycine max
agatccacacaatgttacgtatcatcatgtcatgtcatgcatgcttaaaaaaaacattatgccacaggttcattgatgaaggttctatttttctacatataggaaatttcaatccatgacaaattattcttgctagggagaaactttaatgtttctatgatacaagactaggcataaaattaataattgttcttgatgacaaatggataacttttggtatgtgtttgggtcttgaattctgcagtcagtacagggagatatgccagaagccagtgatatatatgaaacagttcgttctgaagtgaggcgtgctatttctgagattcagattgaccttgaaagtgtttgtttcatgaactcttatctttttcattgtcaactggctctatttgaattgatttagcccat

SEQ ID NO: 76928 - DNA, 382 bp, Glycine max
gacctccgttcctgcatgcttcttccccgtttctcctaccttctccgccaccctccttctctccacgccatggcgcgtgccgtcacgtgcgccactcagccctctcatttccacgcctcgctcgggaattccagctaatgccagcctgtcactgggccgtgctaagaatagcttttctgccgcacctttcacgccctcgcgcggtgccagagcgaaaagatgacgcggcggcgcgtggctggagtccgcgccgggcagaaggagtacaggaaggcgaggagaagagcgccgcccaagagcaaaggcaaggagctgcaactctgtgtcgacatttgcatcgaagaagatttgcctgacgatcctgaaattttgagcattgcag

SEQ ID NO: 76929 - DNA, 322 bp, Glycine max
  unsure (1)..(322): unsure at all n locations
caatttccaaacggcatctccttgagcaaggatgcttccctctttgtcttttctgaagggatgaatggaaggtgagtctaatattcgcataagttcataacccctttctattttctctatatgtggtgaaaaagatactaatttgattggttttaagttaatgttggcagataccaattaaacaattccagaagatttttctattttctctactgaactcatgctagtgttatccagaagtgaaatttagaaactatcttttccataattttgtaattttcaaaanaaaacaaaataaaagaacaatttgttttttgacatt

SEQ ID NO: 76930 - DNA, 376 bp, Glycine max
gggaaatttttcctttgatattaaatctcgctctagattggaaaaagtttcctctacaaaagcacaatttgttagtggaaaaaccttcaaatatgatataattggtgctggttcacattcttcagaagattttcctgaaaaggaagatcaagaaaaacccaaaaagattgatgccagattgagacaaagaatagatcctcaatacaatgaggttcaagctcaaatggaaacaaatttgtttaaattgtctcttgatgatgttgaaactcctaaaggttccatgttggatctgaaaatttctcaatctaaaattgcacttcccaagaacacagttggaggaaccattctgcgtagtgatctattggcaaattttttg

SEQ ID NO: 76931 - DNA, 226 bp, Glycine max
ctcgagccgctcacacctcagcagcacagcaaacagcacatacacacatacatagcatacagtcatgcagtccacgctccgatccgccagctctgccttcctccgcaaggcctcacctattgccgcagccaggcagcccgggttcgccgctgctctcgccggtcccgcaggatcgaggcgaggataccaccagaacgttgtcgaccactttgagaagcctcgcaac

SEQ ID NO: 76932 - DNA, 83 bp, Glycine max
ctcatcaagggttgtgaaagcagagaagtgagatacactaagttatcctcataaatacactctaataggtggcaagatagtgt

SEQ ID NO: 76933 - DNA, 336 bp, Glycine max
gacgccatgcgcacgggtttacgttcgtgcatgcgattggttcgaaccgaagtctacggtgtgttgtttgtgatcgttcgttcagtatgtttttttttttcgaaccgtttgtcgttgttgctgttgatgattttgttagtttgatttgtctggcggcggtggcaaaatgcggcaggtaggtgggtgcggaaatcggtcgaagctcgatgtggaatgaaaatgatgacgaaccaatcttcttcttccttccttctttcttttgcttgtctctctatcggctcttctcatttggtcgaaaaaaaatacatgtgcgtgtgtgttgttctgtgtgtgatg

SEQ ID NO: 76934 - DNA, 409 bp, Glycine max
ggagtttggaatttctgaagcgtactggatttcattgcgatatcatttgtgtcactggatggactgccaccccaatgcaggatgttcaggttacaattgattggtttatttcctctcaggaatgtgttcccaggacctattgtgttttaaatccacaaaatccttttgtgttaaataggtggatgggaaaattgactttcccccagggcacttcccgaagtgttaagagaatgcctctttctatagggggaggagctggtgcaaagaatgctattctcatgaatatgccaaatgctgttctttcaatgtggagatattttgttggagatctcgtctttgaagtttctaagatgacttctccctacattaaatgtacagtctctttcttcatagcatttggaaatttggc

SEQ ID NO: 76935 - DNA, 407 bp, Glycine max
atcagaaccacattcctgggaattgatcttcccaatagaggtatgtggtcctaataatggttttgaaatgtggagttctgagtgggcaaatcaaacttcatggcatttgagtttccttattgacaatcccaaacagtctacagtttttgatattctcttgggaatctctcaagattttgaaattgctggtaatactcttatgccagctttttctgttccacaggctactgccagatcttctgaaaatgcggaatcctctgcatgatctggaatttgtgttttctttcgcttgttcgtttggttaattcaataaaagaaattaggcatgaccctcttgttgagtatgctctgcctatttgaaaatttccacacctcttttaattgtcgtaatgatgtgtgaagtgtgt

SEQ ID NO: 76936 - DNA, 407 bp, Glycine max
cacaacttcattatgtttcgtgtaataatctggaaatgcaagaagcttatcttgtcaacctcgtaaatgtgttacgagaattgtatttgcacagtccagaggaagctcgccaattgagaaggaaagctctctctcgtattgaatggctgcaaaaagctgatgtgcctaccatagcacagattgaagagttccattcgatgcagaggatgatgaatgctcctgattcaaatgataatattgatttactgttgagcattgatttgttgggtttacaaggagcaggtaaagcttttccaaacaaaattgtttttgatgataagcttgtgttggctaacacacaagaattctttgatggaaattttccagtggattcttggttaccaatttttgtgaattgtctttatcct

SEQ ID NO: 76937 - DNA, 405 bp, Glycine max
attggtgtcaagttgacaaccataaacaatatgtgtgcatatgggctcaatcctggtatttcaggttctcgtcttttgggcaccattcctcagtccatttcacagcaaactgtttggaatcaaatggcaacagtgagaacaccattgaattttgattctagcaagcagagcttttgtcagttttctattgaccttctcggtggaggaatcttagtggacaaaactggagattggatcacacttatacaaaattctccaattagtaacttgttgagagttgctgcttggaagaaaggctgtttaatggtcaagattgtgatgtctgggaatgcagcagtcaaaaagagtgattgggcctcattggtacaagtgtttttaacaaacagcaacagtacagagcatttt

SEQ ID NO: 76938 - DNA, 404 bp, Glycine max
ggaattcggttcgggaaaaaaaaaaaaaaaaaaaaaaaaaaaaaaaaaaaaaaaaaaaaagaaagaaaaaaaaaaaaaaaaaaaaaaaaaaaaaaaaaaaaaaaaaaaaaaaaaaaaaaaaaagaaaaaaaaaaaaaaaaaaaaagaaaagaaaccaagaaaacagaaaggaacaaaataaaaaaaaaaaaggggggggccccccctttggggccccccccccccggtataaatttgggaccgggcccctgggggacccaaatttttcttattgtggggcatattaaatagtggggttaataagggaaaaggctttttttggggaaaaattttttttcgcaaaaatttcccaaaaaaaaacgaccggaaaataaaaagtgaaacccggggggcccatatggggg

SEQ ID NO: 76939 - DNA, 414 bp, Glycine max
ttcctttgatattaaatctcgctctagattggaaaaagtttcctctacaaaagcacaatttgttagtggaaaaaccttcaaatatgatataattggtgctggttcacattcttcagaagattttcctgaaaaggaagatcaagaaaaacccaaaaagattgatgccagattgagacaaagaatagatcctcaatacaatgaggttcaggctcagatggaaacaaatttgtttaaattgtctcttgatgatgttgaaactcctaaaggttccatgttggatctgaaaatttctcaatctaaaattgcacttcccaagaacacagttggaggaaccattctgcgtagtgatctattggcaaattttttgacagagggcaattttagagcaagtgttgatttgcagcgcactcatcg

SEQ ID NO: 76940 - DNA, 410 bp, Glycine max
tggtgatgataacttaattagtgttcatgaatatgtcaagccttactttagtggttctaaattgaaaagctttctagctagtcataacatcaccattactgatggtattgacaaaactagtgcaactttgcaatttagaaagttagcagattgtgattttctcaagagaaactttaagcagatgtctaatgttttgtgggtggctcctgaggacaaggcgagtttatggtcacaacttcattatgtttcgtgtaataatctggaaatgcaagaagcttatcttgtcaatctcgtaaatgtgttacgagaattgtatttgcacagtccagaggaagctcgccaattgagaaggaaagctctctctcgtattgaatggctgcaaaaagctgatgtgcctaccatagcacaga

SEQ ID NO: 76941 - DNA, 408 bp, Glycine max
gatagttcagtgtctacaataccaggtgattttgtcattggtgtcaagttgacaaccataaacaatatgtgtgcatatgggctcaatcctggtatttcaggttctcgtcttttgggcaccattcctcagtccatttcacagcaaactgtttggaatcaaatggcaacagtgagaacaccattgaattttgattctagcaagcagagcttttgtcagttttctattgaccttctcggtggaggaatcttagtggacaaaactggagattggatcacacttatacaaaattctccaattagtaacttgttgagagttgctgcttggaagaaaggctgtttaatggtcaagattgtgatgtctgggaatgcagcagtcaaaaggagtgattgggcctcattggtacaagtg

SEQ ID NO: 76942 - DNA, 386 bp, Glycine max
cctgaggacaaggcgagtttatggtcacaacttcattatgtttcgtgtaataatctggaaatgcaagaagcttatcttgtcaatctcgtaaatgtgttacgagaattgtatttgcacagtccagaggaagctcgccaattgagaaggaaagctctctctcgtattgaatggctgcaaaaagctgatgtgcctaccatagcacagattgaagagttccattcaatgcagaggatgatgaatgctcctgattcaaatgataatattgatttactgttgagcattgatttgttgggtttacaaggagcaagtaaagcttttccaaacaaaattgtttttgatgataagcttgtgttggctaacacacaagaattctttgatggaaattt

SEQ ID NO: 76943 - DNA, 446 bp, Glycine max
tgcacccgtccgtaagctcggaattcggttcgagaagactgtgaattgtggaatcctgcttgcacaaaagcaatgactatgtcatttaatccaaacccgtgttctgatgcatggagtttggaatttctgaagcgtactggatttcattgcgatatcatttgtgtcactggatggactgccaccccaatgcaggatgttcaggttacaattgattggtttatttcctctcaggaatgtgttcccaggacctattgtgttttaaatccacaaaatccttttgtgttaaataggtggatgggaaaattgactttcccccagggcacttcccgaagtgttaagagaatgcctctttctatagggggaggagctggtgcaaagaatgctattctcatgaatatgccaaatgctgttctttcaatgtggagatattttgttggagatctcgt

SEQ ID NO: 76944 - DNA, 437 bp, Glycine max
ccttccttaacctcggaattcggttcgaggttgaccattgatttgttgggtttacaaggagcaggtaaagcttttccaaacaaaattgtttttgatgataagcttgtgttggctaacacacaagaattctttgatggaaattttccagtggattcttggttaccaatttttgtgaattgtctttatcctgtaagtcaattaccttcagaagctgtcgttgtaaatgttacatgtggtagtggacgtggtggtttacccaccactgcttggattagttctgcagttaacaatcgctcctcagatatcaacaaaaggattcgcacagcacttgggaaaggtaagaaaattgtttttcttactagagttgatccttttccagtagctttactggctgttctttttggcgttaagaatgaaattctgagttctaacgccac

SEQ ID NO: 76945 - DNA, 409 bp, Glycine max
cacaacttcattatgtttcgtgtaataatctggaaatgcaagaagcttatcttgtcaatctcgtaaatgtgttacgagaattgtatttgcacagtccagaggaagctcgccaattgagaaggaaagctctctctcgtattgaatggctgcaaaaagctgatgtgcctaccatagcacagattgaagagttccattcgatgcagaggatgatgaatgctcctgattcaaatgataatattgatttactgttgagcattgatttgttgggtttacaaggagcaggtaaagcttttccaaacaaaattgtttttgatgataagcttgtgttggctaacacacaagaattctttgatggaaattttccagtggattcttggttaccaatttttgtgaattgtctttatcctgt

SEQ ID NO: 76946 - DNA, 343 bp, Glycine max
agaaacagccacaaaaataaagtgtctgagtcattacattggcaaacagattatccacctccttccttatatcatcagatagcttctccaacacactcagctttgtctgcaattccttggctgcatcatgtctcacttcatcagaagcaacaagaaggttagaaacagcattgtttacctctttgatctcactgaagattggcctttgcttcatcaactgttcaccaactttggtcaagatcatgatgactaaaaaagggtttttttctctggcaaggagtggatggttcatgaggctgtaaaggaaatgaggagttttggattttgggtctgtggggatatg

SEQ ID NO: 76947 - DNA, 413 bp, Glycine max
aatatgtgtgcatatgggctcaatcctggtatttcaggttctcgtcttttgggcaccattcctcagtccatttcacagcaaactgtttggaatcaaatggcaacagtgagaacaccattgaattttgattctagcaagcagagcttttgtcagttttctattgaccttctcggtggaggaatcttagtggacaaaactggagattggatcacacttatacaaaattctccaattagtaacttgttgagagttgctgcttggaagaaaggctgtttaatggtcaagattgtgatgtctgggaatgcagcagtcaaaaggagtgattgggcctcattggtacaagtgtttttaacaaacagcaacagtacagagcattttgatgcatgtaagtggacaaaatcagaaccacattc

SEQ ID NO: 76948 - DNA, 350 bp, Glycine max
ttaccaagcaagttatgagcaagatggcagaaatgataaacagtctttgtggtggtgatgaaaaattgatgcgtgaaaggacgcacctgctgttggcttgttgttcaaggatggcaatttgtaagaaagatgtttggagagttgaatgtggaatcccttctggatttccgctcacagttatttgcaatagcatttttaatgagatgctcattagatatagctatgaaaaattactgcgccaggctaaagctccaagtatgtttttacaatccttcaaaaattttgtttctttgtgtgtgtatggtgatgataacttaattagtgttcatgaatatgtcaagccttacttt

SEQ ID NO: 76949 - DNA, 415 bp, Glycine max
ggtgcagtttggagagattcaggaaaaagttgtattgaaattttcacaagaggaatttcttacagcttggtcaactcaggtgcgtcctgcaacaactctgttggctgatgggtgtccatatttgtatgcaatggtgcatgatagttcagtgtctacaataccaggtgattttgtcattggtgtcaagttgacaaccataaacaatatgtgtgcatatgggctcaatcctggtatttcaggttctcgtcttttgggcaccattcctcagtccatttcacagcaaactgtttggaatcaaatggcaacagtgagaacaccattgaattttgattctagcaagcagagcttttgtcagttttctattgaccttctcggtggaggaatcttagtggacaaaactggagattggatcaca

SEQ ID NO: 76950 - DNA, 414 bp, Glycine max
aacttcattatgtttcgtgtaataatctggaaatgcaagaagcttatcttgtcaacctcgtaaatgtgttacgagaattgtatttgcacagtccagaggaagctcgccaattgagaaggaaagctctctctcgtattgaatggctgcaaaaagctgatgtgcctaccatagcacagattgaagagttccattcgatgcagaggatgatgaatgctcctgattcaaatgataatattgatttactgttgagcattgatttgttgggtttacaaggagcaggtaaagcttttccaaacaaaattgttttttgatgataagcttgtgttggctaacacacaagaattctttgatggaaattttccagtggattcttggttaccaatttttgtgaattgtctttatcctgtaagtcaa

SEQ ID NO: 76951 - DNA, 412 bp, Glycine max
caattttgaggcttttccccacaagctggtgcagtttggagagattcaggaaaaagttgtattgaaattttcacaagaggaatttcttacagcttggtcaactcaggtgcgtcctgcaacaactctgttggctgatgggtgtccatatttgtatgcaatggtgcatgatagttcagtgtctacaataccaggtgattttgtcattggtgtcaagttgacaaccataaacaatatgtgtgcatatgggctcaatcctggtatttcaggttctcgtcttttgggcaccattcctcagtccatttcacagcaaactgtttggaatcaaatggcaacagtgagaacaccattgaattttgattctagcaagcagagcttttgtcagttttctattgaccttctcggtggaggaatc

SEQ ID NO: 76952 - DNA, 411 bp, Glycine max
ttgcaattgaagttgaagtcttgcccttctctcttcaactccaaacacaagacatcatcatccatggctgcctccgtctccactgtcggagctgtcaacagagctcttttgaacctgaatgggtctggacctggggtttcagctcccagttcatccttctttgggagcagcttgaagaaggttattggctcaagggtccccaacacaaagatttcctctggaagcttcaagattgttgctgtagaagagaagaaagagattgaagagacccagcagaccgacaaggacagatggaagggtcttgcctatgatatctcagacgaccaacaggacatcacaagaggaaagggtttggttgactcccttttccaagctccacaggatgctggaactcactatgctgtcatgagc

SEQ ID NO: 76953 - DNA, 412 bp, Glycine max
ggaagctcgccaattgagaaggaaagctctctctcgtattgaatggctgcaaaaagctgatgtgcctaccatagcacagattgaagagttccattcgatgcagaggatgatgaatgctcctgattcaaatgataatattgatttactgttgagcattgatttgttgggtttacaaggagcaggtaaagcttttccaaacaaaattgtttttgatgataagcttgtgttggctaacacacaagaattctttgatggaaattttccagtggattcttggttaccaatttttgtgaattgtctttatcctgtaagtcaattaccttcagaagctgtcgttgtaaatgttacatgtggtagtggacgtggtggtttacccaccactgcttggattagttctgcagttaacaatcgc

SEQ ID NO: 76954 - DNA, 409 bp, Glycine max
tgaaaagttccattcgatgcaaaggatgatgaatgctcctgattcaaatgataatattgatttactgttgagcattgatttgttgggtttacaaggagcaggtaaagcttttccaaacaaaattgtttttgatgataagcttgtgttggctaacacacaagaattctttgatggaaattttccagtggattcttggttaccaatttttgtgaattgtctttatcctgtaagtcaattaccttcagaagctgtcgttgtaaatgttacatgtggtagtggacgtggtggtttacccaccactgcttggattagttctgcagttaacaatcgctcctcagatatcaacaaaaagattcgcacagcacttgggaaaggtaagaaaattgtttttcttactagagttgatcct

SEQ ID NO: 76955 - DNA, 410 bp, Glycine max
gcaaaaaaggcttttttcatgattttcccaaaggctgttctttcaaggtggaaatattttgttggagatctcgtctttgaagtttctaagatgacttctccctacattaaatgtacagtctctttcttcatagcatttggaaatttggctgatgataccatcaattttgaggcttttccccacaagctggtgcagtttggagagattcaggaaaaagttgtattgaaattttcacaagaggaatttcttacagcttggtcaactcaggtgcgtcctgcaacaactctgttggctgatgggtgtccatatttgtatgcaatggtgcatgatagttcagtgtctacaataccaggtgattttgtcattggtgtcaagttgacaaccataaacaatatgtgtgcatatgggct

SEQ ID NO: 76956 - DNA, 415 bp, Glycine max
atcagaaccacattcctgggaattgatcttcccaatagaggtatgtggtcctaataatggttttgaaatgtggagttctgagtgggcaaatcaaacttcatggcatttgagtttccttattgacaatcccaaacagtctacagtttttgatattctcttgggaatctctcaagattttgaaattgctggtaatactcttatgccagctttttctgttccacaggctactgccagatcttctgaaaatgcggaatcctctgcatgatctggaatttgtgttttctttcgcttgttcgtttgtttaattcaataaaggaaattaggcatcaccctcttgttgagtatgctctgcctatttgaaaatttccacacctcttttaattgtcgtaatgatgtgtgaagtgtgtgttatttt

SEQ ID NO: 76957 - DNA, 410 bp, Glycine max
gagaaactttaagcagatgtctaatgttttgtgggtggctcctgaggacaaggcgagtttatggtcacaacttcattatgtttcgtgtaataatctggaaatgcaagaagcttatcttgtcaatctcgtaaatgtgttacgagaattgtatttgcacagtccagaggaagctcgccaattgagaaggaaagctctctctcgtattgaatggctgcaaaaagctgatgtgcctaccatagcacagattgaagagttccattcgatgcagaggatgatgaatgctcctgattcaaatgataatattgatttactgttgagcattgatttgttgggtttacaaggagcaagtaaagcttttccaaacaaaattgtttttgatgataagcttgtgttggctaacacacaagaat

SEQ ID NO: 76958 - DNA, 334 bp, Glycine max
gcaaactgtttggaatcaaatggcaacagtgagaacaccattgaattttgattctagcaagcagagcttttgtcagttttctattgaccttctcggtggaggaatcttagtggacaaaactggagattggatcacacttatacaaaattctccaattagtaacttattgagagttgctgcttggaagaaaggctgtttaatggtcaagattgtgatgtctgggaatgcagcagtcaaaaggagtgattgggcctcattggtacaagtgtttttaacaaacagcaacagtacagagcattttgatgcatgtaagtggacaaaatcaagaccacat

SEQ ID NO: 76959 - DNA, 432 bp, Glycine max
ccgtccgtaagctcggaattcggttcgagagctgggtcaactaaggtgcgtcctgcaccaactttgttggctgatgggtgtccatatttgtatgcaatggtgcatgatagttcagtgtctacaataccaggtgattttgtcattggtgtcaagttgacaaccataaacaatatgtgtgcatatgggctcaatcctggtatttcaggttctcgtcttttgggcaccattcctcagtccatttcacagcaaactgtttggaatcaaatggcaacagtgagaacaccattgaattttgattctagcaagcagagcttttgtcagttttctattgaccttctcggtggaggaatcttagtggacaaaactggagattggatcacacttatacaaaattctccaattagtaacttattgagagttgctgcttggaag

SEQ ID NO: 76960 - DNA, 406 bp, Glycine max
cagcaccagtccaaagcattttgatgcatgtaagtggacaaaatcagaaccacattcctgggaattgatcttcccaatagaggtatgtggtcctaataatggttttgaaatgtggagttctgagtgggcaaatcaaacttcatggcatttgagtttccttattgacaatcccaaacagtctacagtttttgatattctcttgggaatctctcaagattttgaaattgctggtaatactcttatgccagctttttctgttccacaggctactgccagatcttctgaaaatgcggaatcctctgcatgatctggaatttgtgttttctttcgcttgttcgtttgtttaattcaataaaggaaattaggcatgaccctcttgttgagtatgctctgcctatttgaaaat

SEQ ID NO: 76961 - DNA, 388 bp, Glycine max
gtacgtaagctcggatttcggctcgagaaaaaaaaaaaaatttaaaaaaaaaaaaaaaaaaaaaggaaaaagggagggcggacaacatctaagagccgtgaactaacaggggagttaattcctgaccgcaacctaaaatgcccccaaactttctctatagcgaggcttggcaaaagctatgggaatagcatgttccctgtgtgatatggggggggccctgatatttggtttcttcttccccccgatatattttccggccccctccctgggggcccccattttttctttttgagggcattaattgactttggctgaatgccggctaattgctttttttgcggaaaattatctcttcctccaagatccaaaaaaaaacccgcccccaggc

SEQ ID NO: 76962 - DNA, 362 bp, Glycine max
  unsure (1)..(362): unsure at all n locations
gcttatcttgtcaatctcgtaaatgtgttacgagaattgtatttgcacagtccagaggaagctcgccaattgagaaggaaagctctctctcgtattgaatggctgcaaaaagctgatgtgcctaccatagcacagattgaagagttccattcgatgcagaggatgatgaatgctcctgattcaaatgataatattgatttactgttgagcattgatttgttgggtttacaaggagcaggtaaagcttttccaaacaaaattgtttttgatgataagcttgtgtnggctaacacacaagaattctttgatggaaattttcagtggattcttggttaccaatttttgtgaatggtctttatcct

SEQ ID NO: 76963 - DNA, 145 bp, Glycine max
tgcgtcagctgtgtatggaccctactgggggccggatctgaatcgacctatctggaaacaggattacacttatacgccactcttcaatgatgaactcatggatagtcgcattctggaagaaaggtggatatggccagattgagac

SEQ ID NO: 76964 - DNA, 397 bp, Glycine max
ctcgagccggccaaatgctgttctttcaatgtggagatattttgttggagatctcgtctttgaagtttctaagatgacttctccctacattaaatgtacagtctctttcttcatagcatttggaaatttggctgatgataccatcaattttgaggcttttccccacaagctggtgcagtttggagagattcaggaaaaagttgtattgaaattttcacaagaggaatttcttacagcttggtcaactcaggtgcgtcctgcaacaactctgttggctgatgggtgtccatatttgtatgcaatggtgcatgatagttcagtgtctacaataccaggtgattttgtcattggtgtcaagttgacaaccataaacaatatgtgtgcatatgggctcaat

SEQ ID NO: 76965 - DNA, 415 bp, Glycine max
gtttaatggtcaaaattgtgatgtctgggaatgcaccagtcaaaaggagtgattgggcctcattggtacaagtgtttttaacaaacagcaacagtacagagcattttgatgcatgtaagtggacaaaatcagaaccacattcctgggaattgatcttcccaatagaggtatgtggtcctaataatggttttgaaatgtggagttctgagtgggcaaatcaaacttcatggcatttgagtttccttattgacaatcccaaacagtctacagtttttgatattctcttgggaatctctcaagattttgaaattgctggtaatactcttatgccagctttttctgttccacaggctactgccagatcttctgaaaatgcggaatcctctgcatgatctggaatttgtgttttctttcg

SEQ ID NO: 76966 - DNA, 417 bp, Glycine max
atggatactaccacaccttccgtaacaacatggtcggccggatcgactataaactatacaattgcaggaaccgccattcacggtggaggatcatgccagatttccatgtcgtacgaccatggtagcacctggaatgttatttacagtatcatcggtggatgtgttattgagtcattgactgagaatgttaaaattccctcggatgcgccaagtggagaagccttattctcatggagctggttcaacctcatcggaaacagagagatgtaccaaaactgcgctccagtcaccatcatcgatggaggcaacggtctaaattcggcggattatcccgctcctttcgttgcaaacgtcgatgttgcccctggatgcaaaaccatcgaaggtaccgaagttgtctttcccaacccaggtaaa

SEQ ID NO: 76967 - DNA, 394 bp, Glycine max
aagctcggaattcggttcgagttcgtgtaataatctggaaatgcaagaagcttatcttgtcaatctcgtaaatgtgttacgagaattgtatttgcacagtccagaggaagctcgccaattgagaaggaaagctctctctcgtattgaatggctgcaaaaagctgatgtgcctaccatagcacagattgaagagttccattcgatgcagaggatgatgaatgctcctgattcaaatgataatattgatttactgttgagcattgatttgttgggtttacaaggagcaggtaaagcttttccaaacaaaattgtttttgatgataagcttgtgttggctaacacacaagaattctttgatggaaattttccagtggattcttggttaccaattttt

SEQ ID NO: 76968 - DNA, 53 bp, Glycine max
gttgggtagaatgagggtgtggtagtaacgcgttctgatggattatcccatac

SEQ ID NO: 76969 - DNA, 491 bp, Glycine max
gacctattgtgttttaaatccacaaaatccttttgtgttaaataggtggatgggaaaattgactttcccccagggcacttcccgaagtgttaagagaatgcctctttctatagggggaggagctggtgcaaagaatgctattctcatgaatatgccaaatgctgttctttcaatgtggagatattttgttggagatctcgtctttgaagtttctaagatgacttctccctacattaaatgtacagtctctttcttcatagcatttggaaatttggctgatgataccatcaattttgaggcttttccccacaagctggtgcagtttggagagattcaggaaaaagttgtattgaaattttcacaagaggaatttcttacagcttggtcaactcaggtgcgtcctgcaacaactcttgtggctgatgggtgtccatatttgtatgcaatggtgcatgatagttcagtgtctacaataccaggtgattttgtca

SEQ ID NO: 76970 - DNA, 479 bp, Glycine max
tgcatgatagttcagtgtctacaataccaggtgattttgtcattggtgtcaagttgacaaccataaacaatatgtgtgcatatgggctcaatcctggtatttcaggttctcgtcttttgggcaccattcctcagtccatttcacagcaaactgtttggaatcaaatggcaacagtgagaacaccattgaattttgattctagcaagcagagcttttgtcagttttctattgaccttctcggtggaggaatcttagtggacaaaactggagattggatcacacttatacaaaattctccaattagtaacttgttgagagttgctgcttggaagaaaggctgtttaatggtcaagattgtgatgtctgggaatgcagcagtcaaaaggagtgattgggcctcattggtacaagtgtttttaacaaacagcaacagtacagagcattttgatgcatgtaagtggacaaaatcagaaccacat

SEQ ID NO: 76971 - DNA, 555 bp, Glycine max
tcggaattcggttcgaggggaggacctggtccaaagaatgctattctcatgaatatgccaaatgctgttctttcaatgtggagatattttgttggagatctcgtctttgaagtttctaagatgacttctccctacattaaatgtacagtctctttcttcatagcatttggaaatttggctgatgataccatcaattttgaggcttttccccacaagctggtgcagtttggagagattcaggaaaaagttgtattgaaattttcacaagaggaatttcttacagcttggtcaactcaggtgcgtcctgcaacaactctgttggctgatgggtgtccatatttgtatgcaatggtgcatgatagttcagtgtctacaataccaggtgattttgtcattggtgtcaagttgacaaccataaacaatatgtgtgcatatgggctcaatcctggtatttcaggttctcgtcttttgggcaccattcctcagtccatttcacagcaaactgtttggaatcaaatggcaacagtgagaacaccattgaattttgattctagc

SEQ ID NO: 76972 - DNA, 173 bp, Glycine max
tgcaattgaagttgaagtcttgcccttctctcttcaactccaaacacaagacatcatcatccatggctgcctccgtctccactgtcggagctgtcaacagagctcttttgaacctgaatgggtctggacctggggtttcagctcccagttcatccttctttgggagcagcttg

SEQ ID NO: 76973 - DNA, 251 bp, Glycine max
cccagggcacttcccgaagtgttaagagaatgcctctttctatagggggaggagctggtgcaaagaatgctattctcatgaatatgccaaatgctgttctttcaatgtggagatattttgttggagatctcgtctttgaagtttctaagatgacttctccctacattaaatgtacagtctctttcttcatagcatttggaaatttggctgatgataccatcaattttgaggcttttccccacaagctggtg

SEQ ID NO: 76974 - DNA, 466 bp, Glycine max
aaaggagtgatggggcctctttggtacaagtgtttttaacaaacagcaacagtacagagcattttgatgcatgtaagtggacaaaatcagaaccacattcctgggaattgatcttcccaatagaggtatgtggtcctaataatggttttgaaatgtggagttctgagtgggcaaatcaaacttcatggcatttgagtttccttattgacaatcccaaacagtctacagtttttgatattctcttgggaatctctcaagattttgaaattgctggtaatactcttatgccagctttttctgttccacaggctactgccagatcttctgaaaatgcggaatcctctgcatgatctggaatttgagttttctttcgcttgttcgtttgtttaattcaataaaggaaattaggcatgaccctcttgttgagtatgctctgcctatttgaaaatttccacacctcttttaa

SEQ ID NO: 76975 - DNA, 507 bp, Glycine max
cttcattatgtttcgtgtaataatctggaaatgcaagaagcttatcttgtcaatctcgtaaatgtgttacgagaattgtatttgcacagtccagaggaagctcgccaattgagaaggaaagctctctctcgtattgaatggctgcaaaaagctgatgtgcctaccatagcacagattgaagagttccattcgatgcagaggatgatgaatgctcctgattcaaatgataatattgatttactgttgagcattgatttgttgggtttacaaggagcaggtaaagcttttccaaacaaaattgtttttgatgataagcttgtgttggctaacacacaagaattctttgatggaaattttccagtggattcttggttaccaatttttgtgaattgtctttatcctgtaagtcaattaccttcagaagctgtcgttgtaaatgttacatgtggtagtggacgttgtggtttacccaccactgcttggattagttctgcagttaacaatcgc

SEQ ID NO: 76976 - DNA, 327 bp, Glycine max
cgttaacagtaattggcattaccatttttatggagatgctaattaaatttacctttgaaaaatacctgcgccaggttaaagctccaagtttgtttttacaatccttcaaaaattttgtttctttgtgtgtgtatggtgatgataacttaattagtgttcatgaatatgtcaagccttactttagtggttctaaattgaaaagctttctagctagtcataacatcaccattactgatggtattgacaaaactagtgcaactttgcaatttagaaagttagcagattgtgattttctcaagagaaactttaagcagatgtctaatgttt

SEQ ID NO: 76977 - DNA, 439 bp, Glycine max
agcattttgatgcatgtaagtggacaaaatcagaaccacattcctgggaattgatcttcccaatagaggtatgtggtcctaataatggttttgaaatgtggagttctgagtgggcaaatcaaacttcatggcatttgagtttccttattgacaatcccaaacagtctacagtttttgatattctcttgggaatctctcaagattttgaaattgctggtaatactcttatgccagctttttctgttccacaggctactgccagatcttctgaaaatgcggaatcctctgcatgatctggaatttgtgttttctttcgcttgttcgtttgtttaattcaataaaggaaattaagcatgaccctcttgttgagtatgctctgcctatttgaaaatttccacacctcttttaattgtcgtaatgatgtgtgaagtgtgtgtta

SEQ ID NO: 76978 - DNA, 371 bp, Glycine max
ggtaatcgtatcgttacgagagacgatgatatggacaaagctggtgcatctgctcaaggcagaggtgagagcaaacgagatttatttagagagcaactatgatcagaggtgtaatgatatatctgaggctactgaggacatggcgagagcatagtaacatctgaagtaccaagcctataagaaacgggaagactggcaagctgatgtggataatactaatgatgaggatcacaattcgtatttgcaccatgcaaagaaggactatcaatagaaagtgcaagctgattctcgtgatgaatggctgcaaaaagctaacgtgcataccattacgcatattgaatagtgacattaaaatcataacatgatgaatg

SEQ ID NO: 76979 - DNA, 362 bp, Glycine max
acacttaacttacttcacatgacagtctaatctaccaatttttgcacgatacaaatttcgggcaaacactacaacatgcatttttaacttatagaaacctgaatatccgaggattcgcacatgcatgttgacattgagaatactgcacaggacataaggtctcagggtgtgcttaacactcctgatccctcgactccatggcatgtggatgcatattctgtaagcaaaaccatatcccactataaacataagcttttctctctcacagatcaaccttgcaccagactcttactttcatatctgagtgtcatttatcctatttttgcttatcacaaaaactacacttgttctaactttaataa

SEQ ID NO: 76980 - DNA, 277 bp, Glycine max
  unsure (1)..(277): unsure at all n locations
gacgnccatccgcgcgtacgtaagctcggaattcgtctcgagctaaaacaaatttttcaaacatagctactgtaaatactctatggcccttattccagcttggagcaaacaacacaaactctaataactaatctcactcttacaaaactacaaattttttaacattgtctcttaaaatgctttaaacaactaatggttacttctcatatactaaaatttttcaatttcaaaattcactttccataccacaatcttattgaaacatttttttttaaca

SEQ ID NO: 76981 - DNA, 423 bp, Glycine max
  unsure (1)..(423): unsure at all n locations
aagaaagatgtttggagagttgaatgtggaatcccttctggatttccgctcacagttatttgcaatagcatttttaatgagatgctcattagatatagctatgaaaaattactgcgccaggctaaagctccaagtatgtttttacaatccttcaaaaattttgtttctttgtgtgtgtatggtgatgataacttaattagtgttcatgaatatgtcaagccttactttagtggttctaaattgaaaagctttctagctagtcataacatcaccattactgatggtattgacaaaactagtgcaactttgcaatttagaaagttagcagattgtgattttctcaagagaaactntaagcagatgtctaatgttntgtgggtggctcctgaggacaaggcgagtttatggtcacaacttcattat

SEQ ID NO: 76982 - DNA, 106 bp, Glycine max
atatatgtatgcaatggcgcatgatggaacactgtctacagtgccaggcgataccgtcattgacgccaatttggcaaccataaacgatatgtgtgcatatgggctc

SEQ ID NO: 76983 - DNA, 429 bp, Glycine max
cggctcgagtgaaattttcacaagaggaatttcttacagcttggtcaactcaggtgcgtcctgcaacaactctgttggctgatgggtgtccatatttgtatgcaatggtgcatgatagttcagtgtctacaataccaggtgattttgtcattggtgtcaagttgacaaccataaacaatatgtgtgcatatgggctcaatcctggtatttcaggttctcgtcttttgggcaccattcctcagtccatttcacagcaaactgtttggaatcaaatggcaacagtgagaacaccattgaattttgattctagcaagcagagcttttgtcagttttctattgaccttctcggtggaggaatcttagtggacaaaactggagattggatcacacttatacaaaattctccaattagtaacttattgagagttg

SEQ ID NO: 76984 - DNA, 92 bp, Glycine max
aaaaaaaaaaaaaaaaaaaaaaaaaaaaaaaaaaaaaaaaaaaaaaaaaaaaaaaaaaaaaaaaaaaaaaaaaaaaaaaaaaaaaaaaaaaa

SEQ ID NO: 76985 - DNA, 301 bp, Glycine max
cctcggaattcggttcgaggtccatcctctcttaaaccaaacaaagtccttgccattaagccgggcaaactagtggaagtatcattcacattttattatgtatgtgccaaatcaccaacttcataaataatattggcatcaaaacgggatacgtgctctctaggatcctaatatccgaacaaccctcatttagctatgaagccaattccattaaaataagatgtggagactacatatatagtttatcatgaactattgaacgcgcacattatcatcaacaattatatggccacgaaaaaca

SEQ ID NO: 76986 - DNA, 531 bp, Glycine max
tttaaatccacaaaatccttttgtgttaaataggtggatgggaaaattgactttcccccagggcacttcccgaagtgttaagagaatgcctctttctatagggggaggagctggtgcaaagaatgctattctcatgaatatgccaaatgctgttctttcaatgtggagatattttgttggagatctcgtctttgaagtttctaagatgacttctccctacattaaatgtacagtctctttcttcatagcatttggaaatttggctgatgataccatcaattttgaggcttttacccacaagctggtgcagtttggagagattcaggaaaaagttgtattgaaattttcacaagaggaatttcttacagcttggtcaactcatgtgcgtgctgcaacaactctgttggctgatgggtgtccatatttgtatgcaatggtgcatgatagttcaatgtctacaataccaggtgattttgtcattggtgtcaagttgacaaccataaacaatatgtgtgcatatgggctcaatcc

SEQ ID NO: 76987 - DNA, 421 bp, Glycine max
gacaaaatcagaaccacattcctgggaattgatcttcccaatagaggtatgtggtcctaataatggttttgaaatgtggagttctgagtgggcaaatcaaacttcatggcatttgagtttccttattgacaatcccaaacagtctacagtttttgatattctcttgggaatctctcaagattttgaaattgctggtaatactcttatgccagctttttctgttccacaggctactgccagatcttctgaaaatgcggaatcctctgcatgatctggaatttgtgttttctttcgcttgttcgtttgtttaattcaataaaggaaattaggcatgaccctcttgttgagtatgctctgcctatttgaaaatttccacacctcttttaattgtcgtaatgatgtgtgaagtgtgtgttatttt

SEQ ID NO: 76988 - DNA, 224 bp, Glycine max
ctcgagccgaaaatataaataaaaagaaaaataagtaaaatgggagaataaactaaaaaaaaagggcacttacaaaaaaagaaaaaaaaatgccataaaaatataagaaaaggaaacatggggggcggcctgctattattgagcttgtgcacccgggatttaatttcggaccggacctttcaggctgaccatctttccttatagggagtctaataaaaccttgg

SEQ ID NO: 76989 - DNA, 332 bp, Glycine max
gttttaaatccacaaaatccttttgtgttaaataggtggatgggaaaattgactttcccccagggcacttcccgaagtgttaagagaatgcctctttctatagggggaggagctggtgcaaagaatgctattctcatgaatatgccaaatgctgttctttcaatgtggagatattttgttggagatctcgtctttgaagtttctaagatgacttctccctacattaaatgtacagtctctttcttcatagcatttggaaatttggctgatgataccatcaattttgaggcttttccccacaagctggtgcaatttggagagaatcaagaaaa

SEQ ID NO: 76990 - DNA, 405 bp, Glycine max
accatcaccattactgatggtattgacaaaactagtgcaactttgcaatttagaaagttagcagattgtgattttctcaagagaaactttaagcagatgtctaatgttttgtgggtggctcctgaggacaaggcgagtttatggtcacaacttcattatgtttcgtgtaataatctggaaatgcaagaagcttatcttgtcaatctcgtaaatgtgttacgagaattgtatttgcacagtccagaggaagctcgccaattgagaaggaaagctctctctcgtattgaatggctgcaaaaagctgatgtgcctaccatagcacagattgaagagttccattcgatgcagaggatgatgaatgctcctgattcaaatgataatattgatttactgttgagcattgat

SEQ ID NO: 76991 - DNA, 514 bp, Glycine max
gtaacctcggaattcggttcgaggttttgtgggtggctcctgaggacaaggcgagtttatggtcacaacttcattatgtttcgtgtaataatctggaaatgcaagaagcttatcttgtcaatctcgtaaatgtgttacgagaattgtatttgcacagtccagaggaagctcgccaattgagaaggaaagctctctctcgtattgaatggctgcaaaaagctgatgtgcctaccatagcacagattgaagagttccattcgatgcagaggatgatgaatgctcctgattcaaatgataatattgatttactgttgagcattgatttgttgggtttacaaggagcaggtaaagcttttccaaacaaaattgtttttgatgataagcttgtgttggctaacacacaagaattctttgatggaaattttccagtggattcttggttaccaatttttgtgaattgtctttatcctgtaagtcaattaccttcagaagctgtcgttgtaaatgttacatg

SEQ ID NO: 76992 - DNA, 220 bp, Glycine max
cttattataggaataattgacttcagtgtgacaacatgtgcgcgagcttgctatgtattgggtaccggccggtgacatcaaaactctgcctttgttaatctaaagggtgtgtcattagatttgtgtctgcacagaccagaggaagctcgccaattgagagggcgggcgccctctagtgtgctctggcacccgaaagttaatgtggcacccatacctgaaa

SEQ ID NO: 76993 - DNA, 553 bp, Glycine max
attgaattttgattctagcaagcagagcttttgtcagttttctattgaccttctcggtggaggaatcttagtggacaaaactggagattggatcacacttatacaaaattctccaattagtaacttgttgagagttgctgcttggaagaaaggctgtttaatggtcaagattgtgatgtctgggaatgcagcagtcaaaaggagtgattgggcctcattggtacaagtgtttttaacaaacagcaacagtacagagcattttgatgcatgtaagtggacaaaatcagaaccacattcctgggaattgatcttcccaatagaggtatgtggtcctaataatggttttgaaatgtggagttctgagtgggcaaatcaaacttcatggcatttgagtttccttattgacaatcccaaacagtctacagtttttgatattctcttgggaatctctcaagattttgaaattgctggtaatactcttatgccagctttttctgttccacaggctactgccagatcttctgaaaatgcggaatcctctgcatgatctgga

SEQ ID NO: 76994 - DNA, 237 bp, Glycine max
aagctcggaattcggttcgaggctataatatctattaatggctttacacagttaccgtatcacttatgataggttttccagaaatgacaaggttgctaaaccagctgcccagacatcattatctagcacatgctcttgtggagagtgacttatagttttgtaattgaatttttggttttagttatcctgttatcaggaaacggctccaagttgttatgcatgttctttgccagtgtc

SEQ ID NO: 76995 - DNA, 523 bp, Glycine max
gtcaagccttactttagtggttctaaattgaaaagctttctagctagtcataacatcaccattactgatggtattgacaaaactagtgcaactttgcaatttagaaagttagcagattgtgattttctcaagagaaactttaagcagatgtctaatgttttgtgggtggctcctgaggacaaggcgagtttatggtcacaacttcattatgtttcgtgtaataatctggaaatgcaagaagcttatcttgtcaatctcgtaaatgtgttacgagaattgtatttgcacagtccagaggaagctcgtcaattgagaaggaaagctctctctcgtattgaatggctgcaaaaagctgatgtgcctaccatagcacagattgaagagttccattcgatgcagaggatgatgaatgctcctgattcaaatgataatattgatttactgttgagcattgatttgttgggtttacaaggagcaagtaaagcttttccaaacaaaattgtttttgatgataaagcttgtg

SEQ ID NO: 76996 - DNA, 514 bp, Glycine max
gtttggaatttctgaagcgtactggatttcattgcgatatcatttgtgtcactggatggactgccaccccaatgcaggatgttcaggttacaattgattggtttatttcctctcaggaatgtgttcccaggacctattgtgttttaaatccacaaaatccttttgtgttaaataggtggatgggaaaattgactttcccccagggcacttcccgaagtgttaagagaatgcctctttctatagggggaggagctggtgcaaagaatgctattctcatgaatatgccaaatgctgttctttcaatgtggagatattttgatggagatctcgtctttgaagtttctaagatgacttctccctacattaaatgtacagtctctttcttcatagcatttggaaatttggctgatgataccatcaattttgaggcttttccccacaagctggtgcaatttggagagattcaagaaaaagttgtattgaaattttcacaagaagaatttcttacagcttg

SEQ ID NO: 76997 - DNA, 519 bp, Glycine max
gtttcttggtgtgtgtatggggatgataacttaattagggttcatgaatatgtcaagccttactttagtggttctaaattgaaaagctttctagctagtcataacatcaccattactgatggtattgacaaaactagtgcaactttgcaatttagaaagttagcagattgtgattttctcaagagaaactttaagcagatgtctaatgttttgtgggtggctcctgaggacaaggcgagtttatggtcacaacttcattatgtttcgtgtaataatctggaaatgcaagaagcttatcttgtcaatctcgtaaatgtgttacgagaattgtatttgcacagtccagaggaagctcgccaattgagaaggaaagctctctctcgtattgaatggctgcaaaaagctgatgtgcctaccatagcacagattggagagttccattcgatgcacaggatgatgaatgctcctgattcaaatgataatattgatttactgctgagcattgatttggtgggttac

SEQ ID NO: 76998 - DNA, 625 bp, Glycine max
cttaacctctctcactctcttctaacttccgattcatggcagcgtcttctcctctccctttacccgaactccatttcctttctccgcaaatcacccccaaacgccgtatttccctctccaaactcccctccatttcccgccacgtcacctccaacgtttctctccgcaccgcgcgaatccgcgcaagcagagaagaatccgcgttggccgaccgagtcaacgacgtcgaatggaccggaaatggcgccgccgccgctgcttccaacgccaatggtgcctccgttagtggatacgtcaacggcgccactaacggaagcttggtcaagtacggttacgaagacggaaacgacgttgctgctgcggaggtggtggaagttgaagcctctaacaagctgagcgaggatgggaggaagaagaggttggaggagattgggaaagaagacgcgtggttcaaacaaaccgggaacgaacaagttgagggtcgtcgttttgattgagtttaagtaggttctactacttggaacttggaatgaagtatgaacgtgtggtttttcgcaggtggcagttgcacctgggggtcgttggaacaggttcaagacttactccacaatacaaagaacctttg

SEQ ID NO: 76999 - DNA, 358 bp, Glycine max
ctcgagccgtctaaattgaaaagctttctagctagtcataacatcaccattactgatggtattgacaaaactagtgcaactttgcaatttagaaagttagcagattgtgattttctcaagagaaactttaagcagatgtctaatgttttgtgggtggctcctgaggacaaggcgagtttatggtcacaacttcattatgtttcgtgtaataatctggaaatgcaagaagcttatcttgtcaatctcgtaaatgtgttacgagaattgtatttgcacagtccaaaagaagctcgccaattgagaaagaaagctctctctcgtattgaatggctgcaaaaagctgatgtgcctaccatag

SEQ ID NO: 77000 - DNA, 474 bp, Glycine max
tacaagtgtttttaacaaacagcaacagtacagagcattttgatgcatgtaagtggacaaaatcagaaccacattcctgggaattgatcttcccaatagaggtatgtggtcctaataatggttttgaaatgtggagttctgagtgggcaaatcaaacttcatggcatttgagtttccttattgacaatcccaaacagtctacagtttttgatattctcttgggaatctctcaagattttgaaattgctggtaatactcttatgccagctttttctgttccacaggctactgccagatcttctgaaaatgcggaatcctctgcatgatctggaatttgtgttttctttcgcttgttcgtttggttaattcaataaaggaaattaagcatgaccctcttgttgagtatgctctgcctatttgaaaaatttcacacctctttttattgtcgtaatgatgtgtgaagtgtgtgtattt

SEQ ID NO: 77001 - DNA, 51 bp, Glycine max
aaaaaaaaaaaattaaaaaaaaaaaaaaaaaacaaaaaataaataaaaaaa

SEQ ID NO: 77002 - DNA, 381 bp, Glycine max
  unsure (1)..(381): unsure at all n locations
acagagcattttgatgcatgtaagtggacaaaatcagaaccacattcctgggaattgatcttcccaatagaggtatgtggtcctaataatggttttgaaatgtggagttctgagtgggcaaatcaaacttcatggcatttgagtttccttattgacaatcccaaacagtctacagtttttgatattctcttgggaatctctcaagattttgaaattgctggtaatactcttatgccagctttttctgttccacaagctactgccagatcttctgaaaatgcggaatcctctgcatgatctggaatttgtgttttctttcgcttgttcggttgtttaattcaataaaagaaattaagcatgaccctctngttgagtatgctc

SEQ ID NO: 77003 - DNA, 51 bp, Glycine max
  unsure (1)..(51): unsure at all n locations
aaatttaaaaannaaaaaataaataaaaaaacaaggggtggttttaataat

SEQ ID NO: 77004 - DNA, 240 bp, Glycine max
cgcatttggaaatttggctgatgataccatcaattatgaggcttttccccacaagctggtgcagtttggagagattcatgaaaaagttgtattgaaattttcacaagatgaatttcttacagattggtcaactcatgggcgtcctgcaacaactctgttggctgatcggtgtccatatttgcatgcaatggtgcatgatagcttactgtctacaataccacgtgattttgtcattggtgt

SEQ ID NO: 77005 - DNA, 387 bp, Glycine max
atgaaaaattgatgcgtgaaaggacgcacctgctgttggcttgttgttcaaggatggcaatttgtaagaaagatgtttggagagttgaatgtggaatcccttctggatttccgctcacagttatttgcaatagcatttttaatgagatgctcattagatatagctatgaaaaattactgcgccaggctaaagctccaagtatgtttttacaatccttcaaaaattttggttctttgtgtgtgtatggtgatgataacttaattagtgttcatgaatatgtcaagccttactttagtggttctaaattgaaaagctttctagctagtcataacatcaccattactgattgtattgacaaaactagtgcaactttgcaatttaaaaagt

SEQ ID NO: 77006 - DNA, 385 bp, Glycine max
gagataactagaaacagtgtgatgaaaatgaaggtccttgttttcttcgttgctacaattttggtagcatggcaatgccatgcgtacgatatgttccctctccgaatgaacactggctatggtgcccgtactccggaggtgaaatgcgcaagttggaggcttgctgtggaagcacacaacatctttggctttgagaccattcctgaagagtgcgttgaagcaacaaaggaatacattcatggcgaacaatatagatcagactccaaaacagttaaccaacaagcttacttttatgccagagacctcgaaatccatcccaaggacacattttgtgtcagtatagatggcaccgtactctctaatattccatactacaaaaaaacat

SEQ ID NO: 77007 - DNA, 315 bp, Glycine max
gttcagggtgaccactaacaggcggccatggataaagccataagctggcaccaatgggtaatgtacgtgcacatggtcaaaatggtgcgttaggaggataacccctttaactgacgagatgtaactttactatacacgaagctgatatgtaaccaatgggaaccctgcgtagagcattagatcgtgaaagtactatgccgattaatacaagggctctattgacctaggacaaaacagaatctcaatacataaaactcgaggtcgtaacacatgcatacgaaattcgacatgtacctactatgagggacttgtttc

SEQ ID NO: 77008 - DNA, 172 bp, Glycine max
acgaacatgacgaatgctgtgcttttaatgaggcgatatatagttggaaaattcatcctagacgtttatagaaaaacagctctaaagcttaagcgggctttcgttcatgcatgggctttgaaaaaaaaattgtgatacgatctctgaagacgctatcaacaacaataaattg

SEQ ID NO: 77009 - DNA, 268 bp, Glycine max
gaagtgtgtgttattttaaacaaaaaaacaaaaaaaaagctagtgctaattttaaaaaaataatttctaaaaaaaaaaaaaacaaacaaattaaaaaaaaaaaaaataaaataaacaaaaaaaaaatggggccccccccttctattgggctctttaccccggaaataatttccggaccggtcccttcaggcataccatttttccttattaagaggtttttaaaacctggccgtattaatggccaaacctttgatcctgttgaaaattt

SEQ ID NO: 77010 - DNA, 266 bp, Glycine max
ggtgcaaagaatgctattctcatgaatatgccaaatgctgttctttcaatgtggagatattttgttggagatctcgtctttgaagtttctaagatgacttctccctacattaaatgtacagtctctttcttcatagcatttggaaatttggctgatgataccatcaattttgaggcttttccccacaagctggtgcagtttggagagattcaagaaaaagttgtattgaaattttcacaagaagaatttcttacagcttggtcaac

SEQ ID NO: 77011 - DNA, 266 bp, Glycine max
ctggtgcaaagaatgctattctcatgaatatgccaaatgctgttctttcaatgtggagatattttgttggagatctcgtctttgaagtttctaagatgacttctccctacattaaatgtacagtctctttcttcatagcatttggaaatttggctgatgataccatcaattttgaggcttttccccacaagctggtgcagtttggagagattcaagaaaaagttgtattaaaattttcacaagaggaatttcttacagcttggtca

SEQ ID NO: 77012 - DNA, 227 bp, Glycine max
ctcgagcttatgtccaagtgcttacacacggcgggagagctagactcctagctcaaccccaagcccgagcccaagcccaatacacaattgaaaaagcccggtgatcagatgattaacaggagcatagttaccgagccagaccttgggaacaagttgaaggaaaacatgtttctagttggggacaggctggagagacagaatgaagagaaggagctcaccttcgagcg

SEQ ID NO: 77013 - DNA, 133 bp, Glycine max
gtgcaccaaatattgtttgttaaatgctgcattaccaatgggcggagggaactatttggcgtgggggtatccatatacacatttccaaacaatctacattttttgatcttctcttatcatttccacaatattt

SEQ ID NO: 77014 - DNA, 69 bp, Glycine max
aaaaaaaaaaaatttatttttaaaaaaaaaaaaaaaaaaaaagcaaaagggtaaattataaaattaaat

SEQ ID NO: 77015 - DNA, 321 bp, Glycine max
gctggaaaaagttgtttttataattttcacaggaggaatttctgacagcttggtcaattcaggtgcgtcctgcaacaactctgttggctgatgggtgtacatatttggatgcaatggtgcatgatagttcagtgtctacaataccaggtgattatgtcattggtgtcaagttgacaaccataaacaatatgtgtgcatatgggctcaatcctggtatttcaggttctcgtcttttgggcaccattcctcaatccatttcacagcaaaactggttggaattaaaatggcaacaggtgagaacaccatttgaattttgatttt

SEQ ID NO: 77016 - DNA, 232 bp, Glycine max
cgaacctctcttttacaaaaatactcaaagccaggcgagctatgagtcgcagcgagtactaacggcagtataatgaacaagatctatatttttgcaaatgaagtagacaaaaggagtcattctacctaatataaacatgcgctgttcactaactggaacagaacaaaacattctgatatatgtacttgtacagaatgatgaacacatacgactgaatagagttccccaatag

SEQ ID NO: 77017 - DNA, 171 bp, Glycine max
cggaacttgcgtttatatacctgtcaacggaaattgcatctaaagagacagaatgcaaggacctgggggtggcagggatccttccatagatttgggaggtactgaaagatatggagcctttgggcctccaaagaatttaatttgaaaactaattggagttaaggacctcat

SEQ ID NO: 77018 - DNA, 333 bp, Glycine max
gcctgatcgaggcatctgcccagaatcacccaccctgaaccaggttttgatcagtgagacagaggagggagaacacacacacacacacacacacgttaaactaacagtctttattagtaagaagacatggctcaaccgagactcaacggggatctgaataataaccagcatggtcacggtgcatcaacagcagcaccagtgggcggcggttcaaacgcatcagtattagcagctatggattgccatgcaggacccggccacagacattgccattatgcagcattagatgatgatgtacccgcagcattacatgccctacgctcactcacatta

SEQ ID NO: 77019 - DNA, 288 bp, Glycine max
atgtctctgacttgctgagactattaatatggtgtgacaataagtaaaccattaattcatgtcgaagacaggacccacgacttatttacgccaattgatgtagcctaaattaatgtactaactagcattttaactaacgaggcgtttgtttgataggatcttctcaaatttattttattaaatttgcaacactttgaatccgattaatggcttggaaatgcaattaaaggactgtgtgtggagaataataatctgtgttgcgataatgttaattatgatgggttgatt

SEQ ID NO: 77020 - DNA, 51 bp, Glycine max
tatgacgtcgcattgcacgcccgtactgtaagccttcggaattcgtgctcg

SEQ ID NO: 77021 - DNA, 376 bp, Glycine max
ttgcaacctccacattagttttttccaaccaactcgatgaagatcaattaaaacttgttttttagtgactcggcttgattcttcgtcaggatatacttctattaaaaaagtaattattatcattattatgatgatgatattatagtcaaagaaaaatcaaacgctcttgtacaattaggtaatagtaccacattaaagtatcaccactggaatagtgtgacgtgacaggcaaagtttaagaaccgattcattattttctttttgtccaggaatcgtctcttcttacttaggcaatgttgctactttctaaccaagtgaaatatgcccaactgtataatttgcagcaataaacgttaattttggtactttctttcac

SEQ ID NO: 77022 - DNA, 379 bp, Glycine max
tgctcggtggtctttccaacctcgggcattgtggttacggtacgaagcttctcatggtgaccgcttacatgctctcaaaagcggccgtctggcctgtcacacttgtacaggctcgcgccctggaagcacatgccaaccacatcaaccagcgcgctgaaaactccgtcattgcctcgtaaatagcttggtccaaaacaagatagcgtcttgcaggagacgttcatccaccatactcgctgcgcccattcgaagaacacccatttcaaggtcatcaattctggaccatgagcttacgtcattcatcaaagacctgcctgctattcacgtcagcaacacacgagcgacttccggctgaattagtgtacgacgggttcttctc

SEQ ID NO: 77023 - DNA, 181 bp, Glycine max
ctcgagccgaatcagctcgataacgctgttgcagggaacctatgtaacaccaaggctccatcgaaggactaacacataatgcttcacctattgctcgctagagagccttgacgtgacacattactagcttactactatgaccctaatggcatgcatcaccttaaatcccttgtgaatcatt

SEQ ID NO: 77024 - DNA, 157 bp, Glycine max
tatttgtatgcaatggtgcatgatagttcagggtctccaataccagtgattatgtcattggtgtcaagttgacaaccataaacaatatgtgtgcatatgggctcaatcctggtatttcaagttctcgtctttttggcaccattcctcagttcatttt

SEQ ID NO: 77025 - DNA, 252 bp, Glycine max
ccgctcgagccgctcgagatcaccctctccctcccttgcacaaacccctacttgctctattcttctccaaaacgattcagattcaacactcaatcagcacaactttccccttgctgctcctaacctctccaatccccaccactgcccaaaaccaccggagtcatcgacatcggcgcgggccttgccggactcgccgacggcacccacctgaactcccagaacattccctttctcctcctggaaagcctcgac

SEQ ID NO: 77026 - DNA, 343 bp, Glycine max
ggctgatgataccatcaattttgaggcttttccccacaagctggtgcagtttggagagattcaggaaaaagttgtattgaaattttcacaagaggaatttcttacagcttggtcaactcaggtgcgttctgcaacaactctgttagctgatgggtgtccatatttgtatgcaatggtgcatgatagttcagtgtctacaataccaggtgattttgtcattggtgtcaagttgacaaccataaacaatatgtgtgcatatgggctcaatcctggtatttcaggttctcgtcttttgggcaccattcctcaatccatttcacagcaaactgtttgggatcaaaat

SEQ ID NO: 77027 - DNA, 308 bp, Glycine max
gaagaatatggattgggattaaatattttcaactgcccagaattagttgagagagattgctgcaccaacaattgtttctcatggatgatacaaatacttcagtgcctcagtctttccggctttagtgggctgttcagctttccattattttcaagtattattccaggaagtgaaataccaaggtggttcaagaaagagcatgtgggcacgggcaatgtcataaacatagacagatctcactttacgcagcattacaaaaataggataggcattgcgttgggtgtaatcttcgtggtacacaaagaaag

SEQ ID NO: 77028 - DNA, 214 bp, Glycine max
cacacgcacgctatacctcggaatgggattcgagcaaatgaaagccatggccacctacaacttctctattgttctctccgtgtacctagccttctttttggtgctacttaccaaggcacactcgaccgataccgtttctttcaccttcaacaagttcaacccagtccaaccaaacattatgctccaaaaagatgctagtattttattctctggg

SEQ ID NO: 77029 - DNA, 243 bp, Glycine max
gaaggaacaagtgaaagagagactttacaacaacaaacatataatgcagctgaagatgctcgatcgtggatagcaagagctaaagaagcagcaaaacatgatccaagaaaacttgagagactcgccagtgttgaagtaatgatgccctcaccaaaagaccctgagcgctttagtttttggctggctactctctccaatcggaggcctgcggaaagattggatctcctacgcataagagacact

SEQ ID NO: 77030 - DNA, 354 bp, Glycine max
gctggtgcaaagaatgctattctcatgaatatgccaaatgctgttctttcaatgtggagatattttgttggagatctcgtctttgaagtttctaagatgacttctccctacattaaatgtacagtctctttcttcatagcatttggaaatttggctgatgataccatcaattttgaggcttttccccacaagctggtgcagtttggagagattcaggaaaaagttgtattgaaattttcacaagaggaatttcttacagcttggtcaactcaggtgcgtcctgcaacaactctgttggctgatgggtgtccatatttgtatgcaatggtgcatgatagttcagtgtctacaata

SEQ ID NO: 77031 - DNA, 379 bp, Glycine max
cccgaagtgttaagagaatgcctctttctatagggggaggagctggtgcaaagaatgctattctcatgaatatgccaaatgctgttctttcaatgtggagatattttgttggagatctcgtctttgaagtttctaagatgacttctccctacattaaatgtacagtctctttcttcatagcatttggaaatttggctgatgataccatcaattttgaggcttttccccacaagctggtgcagtttggagagattcaggaaaaagttgtattgaaattttcacaagaggaatttcttacagcttggtcaactcaggtgcgtcctgcaacaactctgttggctgatgggtgtccatatttgtatgcaatggtgcatgatag

SEQ ID NO: 77032 - DNA, 377 bp, Glycine max
  unsure (1)..(377): unsure at all n locations
ctcgagccgaatcggctcgaggttcccaggacctattgtgttttaaatccacaaaatccttttgtgttaaataggtggatgggaaaattgactttcccccagggcacttcccgaagtgttaagagaatgcctctttctatagggggaggagctggtgcaaagaatgctattctcatgaatatgccaaatgctgttctttcaatgtggagatattttgttggaggtctcgtctttgaaggttctaagatgacttctccctacattaaatgtacagtctctttcttcatagcatttggaaatttggctgatgataccatcaattttgaggcttttccccacaagctggtgcagtttggagagattcangaaaaagttgt

SEQ ID NO: 77033 - DNA, 273 bp, Glycine max
ggcttgcaattgaagttgaagtcttgcccttctctcttcaactccaaacacaagacatcatcatccatgggtgcctccgtctccactgtgggagctgtcaacagagctcttttgaacctgaatgggtctggacccggggtttcagctcccagatcatccttctttgggagcagcttgaaaaaagttattggctcaagggtccccaacacaaagatttcctctggaagcttcaagattgttgctgttgaagagaagaaagagattggagagacc

SEQ ID NO: 77034 - DNA, 326 bp, Glycine max
aattgagtgtgtttaaatgtatcaataaaaaaaacaaaggaggaacaaacaaaaaaatacataaaaaaaaaaaaacaaagataaagctaaacaaaaactgaaatagacaagcaatactaaagatatcaacccctgacttaaaagtcatggaaaaaagacaaatacgggggggccccccaacttgtgtttagcacgccccatgatataaatcatgaccctgaaccctgggtgttcccatttttccttgtggggggggtatttactaaatgagcaactggagctgtcttctctcccccgtgataaattttcttccgctcaaaatttaa

SEQ ID NO: 77035 - DNA, 299 bp, Glycine max
ccgatctctttctttcaatcacaagcactccactaccactggctttcgattacgggtactgctcgggcctattccataaccgctgctaactccccttacttcctaggcttgcacaagcgcgcagatgatccctatcacgagactgataatcctgacggcgctattcaactctctttgcatcaaaacaccactgctctcgacttgattcaagattgtgttcaccacaacggaatcactgctgcgttcgggacaccactcagcattgctaggattgctacttaccaacctctccatggatt

SEQ ID NO: 77036 - DNA, 164 bp, Glycine max
ccacactatttctttgaatcacacaccctccactcccagtgcgtcctattacgtgaagggtcgtaccaattccatcaccgtttttacatttcattacttgctaagatgccacatgattgctgatcatccgtatctctagagtgatattcctgataaaacaatta

SEQ ID NO: 77037 - DNA, 366 bp, Glycine max
gtgttacgagaattgtatttgcacagtccagaggaagctcgccaattgagaaggaaagctctctctcgtattgaatggctgcaaaaagctgatgtgcctaccatagcacagattgaagagttccattcgatgcagaggatgatgaatgctcctgattcaaatgataatattgatttactgttgagcattgatttgttgggtttacaaggagcaggtaaagcttttccaaacaaaattgtttttgatgataagcttgtgttggctaacacacaagaattctttgatggaaattttccagtggattcttggttaccaatttttgtgaattgtctttatcctgtaagtcaattaccttcagaagctgtc

SEQ ID NO: 77038 - DNA, 377 bp, Glycine max
agcaagcagagcttttgtcagttttctattgaccttctcggtggaggaatcttagtggacaaaactggagattggatcacacttatacaaaattctccaattagtaacttgttgagagttgctgcttggaagaaaggctgtttaatggtcaagattgtgatgtctgggaatgcagcagtcaaaaggagtgattgggcctcattggtacaagtgtttttaacaaacagcaacagtacagagcattttgatgcatgtaagtggacaaaatcagaaccacattcctgggaattgatcttcccaatagaggtatgtggtcctaataatggttttgaaatgtggagttctgagtgggcaaatcaaacttcatggcatttgag

SEQ ID NO: 77039 - DNA, 357 bp, Glycine max
ttttgtcattggtgtcaagttgacaaccataaacaatatgtgtgcatatgggctcaatcctggtatttcaggttctcgtcttttgggcaccattcctcagtccatttcacagcaaactgtttggaatcaaatggcaacagtgagaacaccattgaattttgattctagcaagcagagcttttgtcagttttctattgaccttctcggtggaggaatcttagtggacaaaactggagattggatcacacttatacaaaattctccaattagtaacttgttgagagttgctgcttggaagaaaggctgtttaatggtcaagattgtgatgtctgggaatgcagcagtcaaaaggagtga

SEQ ID NO: 77040 - DNA, 150 bp, Glycine max
ctgacacgtttgaatatactactaccattatgcgtccgaagggaattgctctagagctggcgcaaatatatattactagacaaatagattttgagcaagtgaaggtgaaatgctaaataattcccgcaataaacatcaccatgctatgtt

SEQ ID NO: 77041 - DNA, 295 bp, Glycine max
aaaaaaaaataatgtatagtaagacacacataaacaatatatgggcggtataaactaaatagtggcgtttcaaaaatctaaaataaaagaaaaaccattcctaaaaaacattaaaaaaaaaactaaaaaaaaaaggggcggccccccccttttacacctttcaccccggattttatttcgggcccgttccctgaggggtacccagttttccctttggggaggcattttaaagctcggcgaaacaaagggcataactgttccccggggaaaattgtttcccgtccaaatttccccc

SEQ ID NO: 77042 - DNA, 243 bp, Glycine max
gctccaagtatgtttttacaatccttcaaaaattttgtttctttgtgtgtgtatggggatgataacttaattagtgttcatgaatatgtcaagccctactttagtgggtctaaaatgaaaagctttctagctagtcataacatcaccattactgatggtattgacaaaactagtgccactttgcaatttataaaggtagcagattgtgattttctcaaaagaaacttttaacagatgtcttat

SEQ ID NO: 77043 - DNA, 360 bp, Glycine max
ggcacataaaccggcattgaacgctcatactgtgcctgcggtgagttactcaatgaataagatcatatgggctccactgtcaacaaaatattgtctctcattcataagtatcgcccatagattgcctgagataaattcagatattacgcccaactcttttgagctgcttgggcacccacatcttcaaccttatgttcttaaggtccatctcaaaattaacagccccagacgaagcacattgccagttcactggccagaatccaactacatgaagaaaactagatttttggtgccagaagatgatcctgtttccatctatatggataagcgacattctttcaccaatgatcggtctctaaa

SEQ ID NO: 77044 - DNA, 380 bp, Glycine max
ctcgagccgctctagctagtcataacatcaccattactggtgggattggcaaaactagtgcaactttgcaatttataaaggtcgcagattgtgattttctcaagagaaactttaagcagatgtctaatgttttgtgggtggctcctgaggacaccgcgagtttatggtcacaacttcattatgtttcgtgtaataatctggaaatgcaagaagcttatcttgtcaatctcgtaaatgtgttacgagaattgtatttgcacagtccagaggaagctcgccaattgagaaggaaagctctctctcgtattgaatggctgcaaaaagctgatgtgcctaccatagcacagattgaagagttccattcgatgcatatgatgatg

SEQ ID NO: 77045 - DNA, 381 bp, Glycine max
aaaagccttagccttccctacaactccaaacacaaagacatcatcatccatggctgcctccgtctccactgtcggagctgtcaacagagctcttttgaacctgaatggttctggagctggagcttcagctcccagttcagccttctttgggaccagcttgaagaaggttattgcctcaagggtccccaacagcaaggtttccggtggaagcttcaagattgttgctgtagaagagaagaaagagattgaagagacccagcagaccgacaaggacagatggaagggtcttgcctatgatatctcagacgaccaacaagacatcacaagaggaaagggtttggttgactcccttttccaagctccacaggatgctggaactca

SEQ ID NO: 77046 - DNA, 352 bp, Glycine max
cgttgctcataacgttaatcagccccaagagaaagatttgttggagggaaatttttcctttgatattaaatctcgctctagattggaaaaagtttcctctacaaaagcacaatttgttagtggaaaaaccttcaaatatgatataattggtgctggttcacattcttcagaagattttcctgaaaaggaagatcaagaaaaacccaaaaagattgatgccagattgagacaaagaatagatcctcaatacaatgaggttcaggctcagatggaaacaaatttgtttaaattgtctcttgatgatgttgaaactcctaaaggttccatgttggatctgaaaatttctcaatct

SEQ ID NO: 77047 - DNA, 371 bp, Glycine max
aaagcctcacgccctccggcccacagaccctcagcctcctcatggtccccaccaactccgccttctcagagatcccctccaccgccccccaaaaccaggtcgacgaagacttctacctgcacctcaatctccctcccgagctcgacctcccgctccccgctacaactcaaatctaccaccagccgccaaactcatacctcatcccgcgatgggacctaggccccgactccggcgctttcacgcgcatcgagttcccgcctatcggctacgatgtcagccaggaagatctggatacctttgaaactatcctcgcacaatgcactgctttcatggagcgcgcgcaacctcctctgcctcgcaggccgagtcag

SEQ ID NO: 77048 - DNA, 382 bp, Glycine max
gaaaggctgtttaatggtcaagattgtgatgtctgggaatgcagcagtcaaaaggagtgattgggcctcattggtacaagtgtttttaacaaacagcaacagtacagagcattttgatgcatgtaagtggacaaaatcagaaccacattcctgggaattgatcttcccaatagaggtatgtggtcctaataatggttttgaaatgtggagttctgagtgggcaaatcaaacttcatggcatttgagtttccttattgacaatcccaaacagtctacagtttttgatattctcttgggaatctctcaagattttgaaattgctggtaatactcttatgccagcattttctgttccacaggctactgccagatcttctgaaaat

SEQ ID NO: 77049 - DNA, 384 bp, Glycine max
ctcgagccgaatcggctcgagcggctcgagcagcaaactgtttggaatcaaatggcaacagtgagaacaccattgaattttgattctagcaagcagagcttttgtcagttttctattgaccttctcggtggaggaatcttagtggacaaaactggagattggatcacacttatacaaaattctccaattagtaacttgttgagagttgctgcttggaagaaaggctgtttaatggtcaagattgtgatgtctgggaatgcagcagtcaaaaggagtgattgggcctcattggtacaagtgtttttaacaaacagcaacagtacagagcattttgatgcatgtaagtggacaaaatcagaaccacattcctgggaattgatcttc

SEQ ID NO: 77050 - DNA, 97 bp, Glycine max
ctaaaaaatttttttttactaaaaaatcaaaccacaaacagacggggtaacaaatagcaagggagaagcactccttgctaccattaaaaaataaact

SEQ ID NO: 77051 - DNA, 188 bp, Glycine max
cctttattgaactttatgggagctacttctgactgttctatgctacattctgcaaagcagtgtctggaatttgggtcccttggtgcttctgcctgtcttttattattatgcatgcgaggagtctttcgaggatttaaagacaactgaactccttgatattccactgtggcaggagatggaacccacat

SEQ ID NO: 77052 - DNA, 306 bp, Glycine max
ttctaatcgaggttgatcatccacaagatgtgcctgacccatgcgtggatataaacgggggctggagagatgaatcggccacacccgatccaatgcttaaatagtgctgtccatatactaccagcacgcatcgcgcaatccgttaggaaagaataccagccatagacaaaacttatgtggccagtcattctgaacactcagcacggctgctcgacatcggagaatatattcaagatcagggacgtacccatgcttcacactcatgatgcaggctggttgggtctccaattcacggggtgctcgtgg

SEQ ID NO: 77053 - DNA, 164 bp, Glycine max
aaccaaagttccaaaccctaaacgctacgaatttaattttctgggtttctctttttcaatcggggctttctccggcggcgcgtgggaatgtcttttgcgcgcgattcctaatttcccgcttacctattcttctctcgacccccattgtagaattcacccccgag

SEQ ID NO: 77054 - DNA, 376 bp, Glycine max
tttcacaagaggaatttcttacagcttggtcaactcaggtgcgtcctgcaacaactctgttggctgatgggtgtccatatttgtatgcaatggtgcatgatagttcagtgtctacaataccaggtgattttgtcattggtgtcaagttgacaaccataaacaatatgtgtgcatatgggctcaatcctggtatttcaggttctcgtcttttgggcaccattcctcagtccatttcacagcaaactgtttggaatcaaatggcaacagtgagaacaccattgaattttgattctagcaagcagagcttttgtcagttttctattgaccttctcggtggaggaatcttagtggacaaaactggagattggatcacact

SEQ ID NO: 77055 - DNA, 351 bp, Glycine max
gaagaaaggctgtttaatggtcaagattgtgatgtctgggaatgcagcagtcaaaaggagtgattgggcctcattggtacaagtgtttttaacaaacagcaacagtacagagcattttgatgcatgtaagtggacaaaatcagaaccacattcctgggaattgatcttcccaatagaggtatgtggtcctaataatggttttgaaatgtggagttctgagtgggcaaatcaaacttcatggcatttgagtttccttattgacaatcccaaacagtctacagtttttgatattctcttgggaatctctcaagattttgaaattgctggtaatactcttatgccagctttttc

SEQ ID NO: 77056 - DNA, 378 bp, Glycine max
cctgaggacaaggcgagtttatggtcacaacttcattatgtttcgtgtaataatctggaaatgcaagaagcttatcttgtcaatctcgtaaatgtgttacgagaattgtatttgcacagtccagaggaagctcgccaattgagaaggaaagctctctctcgtattgaatggctgcaaaaagctgatgtgcctaccatagcacagattgaagagttccattcgatgcagaggatgatgaatgctcctgattcaaatgataatattgatttactgttgagcattgatttgttgggtttacaaggagcaggtaaagcttttccaaacaaaattgtttttgatgataagcttgtgttggctaacacacaagaattctttgat

SEQ ID NO: 77057 - DNA, 207 bp, Glycine max
atggtattgacaaaactagtgcaactttgcaatttataaagttagcagattgtgattttctcaagagaaactttaagcagatgtctaatgttttgtggggggctcctgatgacaaagcgagtttatggtcacaacttcattatgtttcgtgttataatctggaaatgcaagaagcttatcttgtcaatctcgtaaatgtgttacgag

SEQ ID NO: 77058 - DNA, 379 bp, Glycine max
atataattggtgctggttcacattcttcagaagattttcctgaaaaggaagatcaagaaaaacccaaaaagattgatgccagattgagacaaagaatagatcctcaatacaatgaggttcaggctcagatggaaacaaatttgtttaaattgtctcttgatgatgttgaaactcctaaaggttccatgttggatctgaaaatttctcaatctaaaattgcacttcccaagaacacagttggaggaaccattctgcgtagtgatctattggcaaattttttgacagagggcaattttagagcaagtgttgatttgcagcgcactcatcgtattagaggaatgattaaaatggtggccacagttggtattcctgagaatac

SEQ ID NO: 77059 - DNA, 291 bp, Glycine max
gaaaaaactactgtacaaaatcatactcctctagatcagatgctggttccagaatactcggaagcttttcctgctcaacatgccgcttcaaagacaccaggtgccatattatcttattctgaaagcggctatgccgaggtacatacttgatcaacggtgactgatcatgtcacgaacaaaacaatttctgagcaccttgattccaacaaatcaaagggtagatatccggttgaccgttcctcatgtggctccaacacggcctataactgggatgtggaaactgatgcgcta

SEQ ID NO: 77060 - DNA, 395 bp, Glycine max
gcccccgtacgtaagctcggaattcggctgaagcgaggtttcatcatctttcaaagatgacgacagcctacaacaacggtgcattgttggaaaatgatcaccacaacttgttggaagggatgatgataggtaacagcaacggagggatgaacacaactactactactacacctggtcccatgtcatctcacttagggggatccaaggaagagctttcttttgttccaaccatgactcactcttcaaacacttctaagagaacactttcatcactgtattggaacgatgaggatgtggcgggtacctcatcttcgaacaaaaggttcaatttggaattaagtggggacaataataaccatggaagtgttgtgagggatgatcaagagaatggcact

SEQ ID NO: 77061 - DNA, 415 bp, Glycine max
cactctacaagagctttgacgtcgcatgcaccccgtccgtagcctcggatttcggttcgggccaaatttgggccggaacccccccaggaaatttgagagaacttcctaacgaggaaaaggatgtccttgaaaagtccactctgagatccaaagtctcgctcaggttcacgctgaagagaccgaatagccattcagaccaatcattaatgacttggatgaccaagctgaacaagagtatcttgaccccgaagagctcgctctattgaagatgaaggagctcggtttccccacggaggctgaagatgaagatcttggtgaacaaagagttttctatatggagaaagaaatgcctgaagagcaacactggaagaagcactacgatccctatgaataagatgtcttcaacatccctgat

SEQ ID NO: 77062 - DNA, 381 bp, Glycine max
tttctattgaccttctcggtggaggaatcttagtggacaaaactggagattggatcacacttatacaaaattctccaattagtaacttgttgagagttgctgcttggaagaaaggctgtttaatggtcaagattgtgatgtctgggaatgcagcagtcaaaaggagtgattgggcctcattggtacaagtgtttttaacaaacagcaacagtacagagcattttgatgcatgtaagtggacaaaatcagaaccacattcctgggaattgatcttcccaatagaggtatgtggtcctaataatggttttgaaatgtggagttctgagtgggcaaatcaaacttcatggcatttgagtttccttattgacaatcccaaacagt

SEQ ID NO: 77063 - DNA, 376 bp, Glycine max
ttgcaatttagaaagttagcagattgtgattttctcaagagaaactttaagcagatgtctaatgttttgtgggtggctcctgaggacaaggcgagtttatggtcacaacttcattatgtttcgtgtaataatctggaaatgcaagaagcttatcttgtcaatctcgtaaatgtgttacgagaattgtatttgcacagtccataggaagctcgccaattgagaaggaaagctctctctcgtattgaatggctgcaaaaagctgatgtgcctaccatagcacagattgaagagttccattcgatgcagaggatgatgaatgctcctgattcaaatgataatattgatttactgttgagcattgatttgttgggtttac

SEQ ID NO: 77064 - DNA, 355 bp, Glycine max
cgaagaaagagtgtatcaaaaaaaacatcaaccaacgacatcctcgtcttcatcttcttcttcgtcttcttctttggtcagcttccctaacgttaacgtggtcggcgtgtatcccaaaacaaaacgatggacttcaccacttttgcaaattgcatatcctcttctcatgcaattccttcaatacacacttatcgccttcaaccctctcctttttctctccacctcccattttcggtacgtaattacgtcttgttcttcttcttattccgatttgtatctctctgtcatctctgtgtgaactctcgtgggtctatatatatataatatatgatatatatatatagtatatatatat

SEQ ID NO: 77065 - DNA, 380 bp, Glycine max
atttgttgggtttacaaggagcaggtaaagcttttccaaacaaaattgtttttgatgataagcttgtgttggctaacacacaagaattctttgatggaaattttccagtggattcttggttaccaatttttgtgaattgtctttatcctgtaagtcaattaccttcagaagctgtcgttgtaaatgttacatgtggtagtggacgtggtggtttacccaccactgcttggattagttctgcagttaacaatcgctcctcatatatcaacaaaaggattcgcacagcacttgggaaaggtaagaaaattgtttttcttactagagttgatccttttccagtagctttactggctgttctttttggcgttaagaatgaaatt

SEQ ID NO: 77066 - DNA, 274 bp, Glycine max
tttttgtggagattccatgttccttgctgctctgctgtgttctctgtctttgttttcttaaaaaaaaaacttgttgcaaggtttcctgatttagttatttcaaactcttcatttcgattctgtcaatgagaatcctgatgaaagacaaatgaccggacagaattttagtatattgtatatttctttcacgtgttgggattattcatatgctcattgcccacgtcatcgacgcttacttatgccgagatgtctagtactttacgctggtcccaaa

SEQ ID NO: 77067 - DNA, 383 bp, Glycine max
tgggaatgcagcagtcaaaaggagtgattgggcctcattggtacaagtgtttttaacaaacagcaacagtacagagcattttgatgcatgtaagtggacaaaatcagaaccacattcctgggaattgatcttcccaatagaggtatgtggtcctaataatggttttgaaatgtggagttctgagtgggcaaatcaaacttcatggcatttgagtttccttattgacaatcccaaacagtctacagtttttgatattctcttgggaatctctcaagattttgaaattgctggtaatactcttatgccagctttttctgttccacaggctactgccagatcttctgaaaatgcggaatcctctgcatgatctggaatttgtgttt

SEQ ID NO: 77068 - DNA, 399 bp, Glycine max
tgggtgtccatatttgtatgcaatggtgcatgatagttcagtgtctacaataccaggtgattttgtcattggtgtcaagttgacaaccataaacaatatgtgtgcatatgggctcaatcctggtatttcaggttctcgtcttttgggcaccattcctcagtccatttcacagcaaactgtttggaatcaaatggcaacagtgagaacaccattgaattttgattctagcaagcagagcttttgtcagttttctattgaccttctcggtggaggaatcttagtggacaaaactggagattggatcacacttatacaaaattctccaattagtaacttgttgagagttgctgcttggaagaaaggctgtttaatggtcaagattgtgatgtctgggaatgc

SEQ ID NO: 77069 - DNA, 334 bp, Glycine max
  unsure (1)..(334): unsure at all n locations
gaaaaaggctgatgtccctaccatagcacagattgaagagttccattcgatgcagaggatgatgaatgctcctgattcaaatgataatattgattaactgttgagcattgattggttgggtttacaaggagcaggtaaagcttttccaaacaaaattgtttttgatgataagcttgtgttggctaacacacaagaattctttgatggaaattttccagtggattcttggttaccaattnttgtgaattgtctttatcctgtaagtcaattaccttcagaagctgtcgttgtaaatgttacatgtgggaaggggaccgtgtggttacccaccact

SEQ ID NO: 77070 - DNA, 107 bp, Glycine max
gttcagagaatgtacaatgtgcagcatatattgaacaacacagatgaaataaataaatagggcgtcaaatttttagttaaaattaacaatatttatatcctaattat

SEQ ID NO: 77071 - DNA, 74 bp, Glycine max
tacctttgtataaatctatttctgaagaagcaattacaactttcaagggatgaaagcattttgtggcataagga

SEQ ID NO: 77072 - DNA, 217 bp, Glycine max
atgatactgtgtgactactgtgctcaagttagtctcaggaggggtaacaataacagcagacattttaagcggggattgaacgcactttaatgactgcgatgtgcacctgctcagacctctgaccaaccaccgcaacattctgctttttaaatcaaccataatatacagatattgtccttgcttcatagatccatatgtatcactcttacgattggga

SEQ ID NO: 77073 - DNA, 377 bp, Glycine max
caatttgtaagaaagatgtttggagagttgaatgtggaatcccttctggatttccgctcacagttatttgcaatagcatttttaatgagatgctcattagatatagctatgaaaaattactgcgccaggctaaagctccaagtatgtttttacaatccttcaaaaattttgtttctttgtgtgtgtatggtgatgataacttaattagtgttcatgaatatgtcaagccttactttagtggttctaaattgaaaagctttctagctagtcataacatcaccattactgatggtattgacaaaactagtgcaactttgcaatttagaaagttagcagattgtgattttctcaagagaaactttaagcagatgtctaat

SEQ ID NO: 77074 - DNA, 373 bp, Glycine max
attgtatttgcacagtccagaggaagctcgccaattgagaaggaaagctctctctcgtattgaatggctgcaaaaagctgatgtgcctaccatagcacagattgaagagttccattcgatgcagaggatgatgaatgctcctgattcaaatgataatattgatttactgttgagcattgatttgttgggtttacaaggagcaggtaaagcttttccaaacaaaattgtttttgatgataagcttgtgttggctaacacacaagaattctttgatggaaattttccagtggattcttggttaccaatttttgtgaattgtctttatcctgtaagtcaattaccttcagaagctgtcgatgtaaatgttacatgt

SEQ ID NO: 77075 - DNA, 71 bp, Glycine max
aaaaaaaattttttaaaaaaaaaaaaaaaaaaaaaaaaaaagggggaaaaaaaaaaaaaggggaaaaaaaa

SEQ ID NO: 77076 - DNA, 384 bp, Glycine max
ctcgagccgaatcggctcgagcggtggaggaatcttagtggacaaaactggagattggatcacacttatacaaaattctccaattagtaacttgttgagagttgctgcttggaagaaaggctgtttaatggtcaagattgtgatgtctgggaatgcagcagtcaaaaggagtgattgggcctcattggtacaagtgtttttaacaaacagcaacagtacagagcattttgatgcatgtaagtggacaaaatcagaaccacattcctgggaattgatcttcccaatagaggtatgtggtcctaataatggttttgaaatgtggagctctgagtgggcaaatcaaacttcatggcatttgagtttccttattgacaatcccaaaca

SEQ ID NO: 77077 - DNA, 405 bp, Glycine max
gcatttggaaatttggctgatgataccatcaattttgaggcttttccccacaagctggtgcagtttggagagattcaggaaaaagttgtattgaaattttcacaagaggaatttcttacagcttggtcaactcaggtgcgtcctgcaacaactctgttggctgatgggtgtccatatttgtatgcaatggtgcatgatagttcagtgtctacaataccaggtgattttgtcattggtgtcaagttgacaaccataaacaatatgtgtgcatatgggctcaatcctggtatttcaagttctcgtcttttgggcaccattcctcagtccatttcacagcaaactgtttggaatcaaatggcaacagtgagaacaccattgaattttgattctagcaagcagagcttt

SEQ ID NO: 77078 - DNA, 169 bp, Glycine max
ggactatggagatggccatagctgcactgtttccatagatgacagttttgcacatcctcatgcatttcggcgacctaacttaacgtggcgttgcacgactcatgccctgactaaaattcattctgaaccgcgggactccttgactaccacagaccaactagaaagtggc

SEQ ID NO: 77079 - DNA, 103 bp, Glycine max
agaatttctgaaaaatatatattaccctcttttacactcctttgaagatgaacgtactttctactttcagctttaatgcattgcttcttttattgtcctgtat

SEQ ID NO: 77080 - DNA, 157 bp, Glycine max
cttatgatagacgtacataagaaaaagttggcgcattaaaaaaccatgtgtaaacttttttttatgatagacgtacataatgtgtggaagattaagtttgggtgtgaggagatacaatcatttttatgatagaagtacataattttgtgagagtttt

SEQ ID NO: 77081 - DNA, 360 bp, Glycine max
ctttcttttcctttcaagatggcttacttgaaggttgtcataaacatgttcgacttgctattcgtgcttatcttatcaatgattctggcaacagcaagggtgcccctgaggatatacgaacctcatcacaaagcacatggacgcctccttgctatggatgatccacgtgaccaccattgtcaatttacaccataatcaccgaggagtgaagacccaatatgctgccaaaggcgagtcgaataccacataataatcaaatcagacagcactgggtttcaaggacaaaacttgctgtggagaagaagatatatttgcagacatactactcataaattatactattcaattgctttggaatta

SEQ ID NO: 77082 - DNA, 375 bp, Glycine max
ctggtatttcaggttctcgtcttttgggcaccattcctcagtccatttcacagcaaactgtttggaatcaaatggcaacagtgagaacaccattgaattttgattctagcaagcagagcttttgtcagttttctattgaccttctcggtggaggaatcttagtggacaaaactggagattggatcacacttatacaaaattctccaattagtaacttgttgagagttgctgcttggaagaaaggctgtttaatggtcaagattgtgatgtctgggaatgcagcagtcaaaaggagtgattgggcctcattggtacaagtgtttttaacaaacagcaacagtacagagcattttgatgcatgtaagtggacaaaat

SEQ ID NO: 77083 - DNA, 179 bp, Glycine max
gtctttgaagtttctaagatgacttctccctacattaaatgtacaggcggtttcttcatagcattgggaaatttggctgatgataccatcaattgtgatgcttttccccacaagctggtgcagtttggagagattcatgaaaaagttgtattgaaattttcacaagaggaatttttaca

SEQ ID NO: 77084 - DNA, 399 bp, Glycine max
  unsure (1)..(399): unsure at all n locations
tgggaattgatcttcccaatagaggtatgtggtcctaataatggttttgaaatgtggagttctgagtgggcaaatcaaacttcatggcatttgagtttccttattgacaatcccaaacagactacagtttttgatattctcttgcgaatctctcaagattttgaaattgctggtaatactcttatgccagctttttctgttccacaggctactgacagatcttctgaaaatgcggaatcctctgcatgatctggaatttgtgttttctttcgctcgttcgcttgtttaattcaataaacgaaattaggcatgaccctcttgttgagtatgctctgcctatttgaaaatttccacacctctnttaattgtcgtaatgatgtgtgaagtgtgtgttatttt

SEQ ID NO: 77085 - DNA, 130 bp, Glycine max
tttccttcaacacagtcggccaaaatctttcaccaccaacacacagccatggcaggctctcaccttctttcttactccccctcctttccaaaacctatactactctaaccaaaccttatccaaatctttt

SEQ ID NO: 77086 - DNA, 256 bp, Glycine max
gtttggagagattcaggaaaaagttgtattgaaattttcacaagaggaatttcttacagcttggtcaactcaggtgcgtcctgcaacaactctgttggctgatgggtgtccatatttgtatgcaatggtgcatgatagttcagtgtctacaataccaggtgattttgtcattggtgtcaagttgacaaccataaacaatatgtgtgcatatgggctcaatcctggtatttcaggttctcgtcttttgggcaccatt

SEQ ID NO: 77087 - DNA, 303 bp, Glycine max
  unsure (1)..(303): unsure at all n locations
gctaaaaacgggnttaaatttccgacaacngaccaaacaaaccgggacggggcgcatttcagaccgcttgatcaacaccccttccaacaaacaaatctcagttggctcatcactatccatattaatcctcaattcaaaacgaacgctcatacaccaaaacccccattcctacagtcaacgccccaaaccttgaaacaaactaaaatctgtaaacttctcagaaacattgcttgtacttaaaacacatgtgtgggctgcccaataacgcagagcatgggtcagccaaatcaaaaacatatacta

SEQ ID NO: 77088 - DNA, 400 bp, Glycine max
cacgagcaattcccctaaatcaattagacggtcaaaactgaagatggcttccggagatgatacctcagctggcggctatgcgcaatctgtcaattcggctcagcaggcgaagggcccctccgacatcaacgttgggagcggagtagcggactctgctgatggaactggtggcgacatcaatcaaggaggcggggttgccgattcttcaggctcaattggacaggccgagcctggaaacggacgaaacctccagacctactctgcagcagaggctggatcgcatgaagataagggagtcggtcagaagatcaaagatgccttcaagccaaagtagatttcctgactcgacatcgggcaacccgaggcgcctgcgctttgttcttctcacctgtgtatcaca

SEQ ID NO: 77089 - DNA, 371 bp, Glycine max
gaaaaacattaaatataaagtgagacatacaaaaatgagtaattgtgaacaattttcacaattatgaaataatgtttgatttgcattaaataaaaagtgagacatacaaaaatgagtatggctagcgcacattcttgagtaaatgtaattgtgaaattaaaaataatgtgttgtttttcacaattttcatattaaataaaaagtgagacatacaaaaatgaatgtggctagcattcttgtgtaaatgtattgagaacatagaaataatgatgattttttctctttctttgaataatttttgggatgcaatatgtttcaattgattgatgaggacaacaagttcatctttgatctaaatcgcttggaaaacg

SEQ ID NO: 77090 - DNA, 336 bp, Glycine max
gttttgatggtttgattaccaagcaagttatgagcaagatggcagaaatgataaacagtctttgtggtggtgatgaaaaattgatgcgtgaaaagacgcacctgctgttggcttgttgttcaaagatggcaatttgtaagaaagatgtttggagagttgaatgtggaatcccttctggatttccgctcacaggtatttgcaatagcatttttaatgagatgctcattagatatagctatgaaaaattacttgcccaggcttaagcttcaagtatgtttttacaatccttcaaaaattttggttctttgggtgggtatggtgatgataacttaatta

SEQ ID NO: 77091 - DNA, 384 bp, Glycine max
gcagagcttttgtcagttttctattgaccttctcggtggaggaatcttagtggacaaaactggagattggatcacacttatacaaaattctccaattagtaacttattgagagttgctgcttggaagaaaggctgtttaatggtcaagattgtgatgtctgggaatgcagcagtcaaaaggagtgattgggcctcattggtacaagtgtttttaacaaacagcaacagtacagagcattttgatgcatgtaagtggacaaaatcagaaccacattcctgggaattgatcttcccaatagaggtatgtggtcctaataatggttttgaaatgtggagttcttgatgggcaaatcaaacttcatggcatttgagtttccttattga

SEQ ID NO: 77092 - DNA, 393 bp, Glycine max
acgtgacacaattcgtctagggacaccgttcgacgagcgtgcaggtaatatcttccctcgaacatcaagttcttacggtttcgagccgccagcatcatttgagcaacgttttgctgcggcacccagcatctctgagcgttagccctgtttttaggtggcctgtttctacatcaggcacagagtgtgcatcggcgtctggggtcgcatcatcatcggcgtttagcatcagaagcttcgagcttcatctgtgacatgtcagcgagcgagcactcgcgtgccatttgatctctcattttctttctttctctgggcgcatctcctatgtttccagcttcactttacccataacttttgcatggcctggccagcaagccttcattagatgggctctgc

SEQ ID NO: 77093 - DNA, 396 bp, Glycine max
  unsure (1)..(396): unsure at all n locations
aaatggcaacagtgagaacaccattgaattttgattctagcaagcagagcttttgtcagttttctattgaccttctcggtggaggaatcttagtggacaaaactggagattggatcacacttatacaaaattctccaattagtaacttattgagagttgctgcttggaagaaaggctgtttaatggtcaagattgtgatgtctgggaatgcagcagtcaaaaggagtgattgggcctcattggtacaagtgtttttaacaaacagcaacagtacagagcattttgatgcatgtaagtggacaaaatcagaaccacattcctgggaattgatcttcccaatagaggtatgtggtcctaataatggttntgaaatgtggagttctgagtgggcaaatc

SEQ ID NO: 77094 - DNA, 81 bp, Glycine max
tgttgactgggtccgcaacaatgcctgggcctacgccaccaacttggtccccggcaggggagcatgaaaaaaaggatgact

SEQ ID NO: 77095 - DNA, 392 bp, Glycine max
  unsure (1)..(392): unsure at all n locations
ctcgagccgaatcggctcgagatttgcacactccataggaagctccncaattgaaaaggaaagctctctctcgtattgaatggctgcaaaaagctgatgtgcctaccatagcacagattgaagagntccattccatgcanaggatgatgaatgctcctgattcacatgataatattgatttactgttgagcattgatttgttgggtttacaaggagcaggtaaagcttttccaaacaaaattgtttttgatgataagcttgtgttggctaacacacaagaattctttgatggaaattttccagtggattcttggttaccaattattgtgaattgtctttatcctgtaagtcaattaccttcaaaagctgtcgttgtaaatgttacatgtggt

SEQ ID NO: 77096 - DNA, 226 bp, Glycine max
gtattttggaaggatgtcttacgttgctcataacgttaacacccccaaaaaaaaaattgtggaaggaaaattttcttgatattaaactcctctaaatggaaaaagttcctttcaaaaccaattgtaggggaaaactcaaatgaatatggctgtccatcttaaaatttctgaaggaacagaaacccaagatgaccgatgaacaaatatctaatacaagagtagctca

SEQ ID NO: 77097 - DNA, 368 bp, Glycine max
gacaaaactagtgcaactttgcaatttagaaagttagcagattgtgattttctcaagagaaactttaagcagatgtctaatgttttgtgggtggctcctgaggacaaggcgagtttatggtcacaacttcattatgtttcgtgtaataatctggaaatgcaagaagcttatcttgtcaatctcgtaaatgtgttacgagaattgtatttgcacagtccagaggaagctcgccaattgagaaggaaagctctctctcgtattgaatggctgcaaaaagctgatgtgcctaccatagcacagattgaagagttccattcgatgcagaggatgatgaatgctcctgattcaaatgataatattgatttact

SEQ ID NO: 77098 - DNA, 136 bp, Glycine max
ctcattagatatagctatgaaaaaatactgcgcccggcttaagctcccaggatgtttttaccaaccctccaaaaatttggttctttgtgggtgtgtggggggggtaacctaattagggggcctgaatatgtccagc

SEQ ID NO: 77099 - DNA, 350 bp, Glycine max
gggcatagcaaactgaatgggatttgaatgacattaacgacaaaagcagacacctctctgcatgtgatattctttcgagaatctgtcaacaaattgaagatgctgtgtagcctactatgccatgtggaatttgtgcacaggctacaggataatcttattgaacggccctatcacaatgattatcggcataatgcttctcttcttgcttatggaagtggaaagaagaactgctgagactgcgcttaacatatattgaaaaacatgctctggctatgggagacatatcacattcaatggaacacttctcatgcaactagaatatcgtgaatgcttaaatttcaatgtaaatg

SEQ ID NO: 77100 - DNA, 398 bp, Glycine max
gctgcttggaagaaaggctgtttaatggtcaagattgtgatgtctgggaatgcagcagtcaaaaggagtgattgggcctcattggtacaagtgtttttaacaaacagcaacagtacagagcattttgatgcatgtaagtggacaaaatcagaaccacattcctgggaattgatcttcccaatagaggtatgtggtcctaataatggttttgaaatgtggagttctgagtgggcaaatcaaacttcatggcatttgagtttccttattgacaatcccaaacagtctacagtttttgatattctcttgggaatctctcaagattttgaaattgctggtaatactcttatgccagctttttctgttccacaggctactgccagatcttctgaaaatgcgga

SEQ ID NO: 77101 - DNA, 327 bp, Glycine max
gttgaagtcttgcccttctctcttcaactccaaacacaagacatcatcatccatggctgcctccgtctccactgtcggagctgtcaacagagctcttttgaacctgaatgggtctggacctggggtttcagctcccagttcatccttctttgggagcagcttgaagaaggttattggctcaagggtccccaacacaaagatttcctctggaagcttcaagattgttgctgtagaagagaagaaagagattgaagagacccagcagaccgacaaggacagatggaagggtcttgcctatgatatctcagacgaccaacaggacatcac

SEQ ID NO: 77102 - DNA, 334 bp, Glycine max
caaaggttgctgtaggagataagattgcagtagtgctaagtgctaacacctgcagtgaacaatggcctctgcatcagcatctctgctcaagtcttcacttgttcttgacaagtctgagtgggtgaagggacaaacccttcgccaaccttctgcatcagttgtgagatgcaaccccaccaccccatcaggcctcaccatcagagctggttcctatgctgatgagctcgttaagaccgcgaaaacagtggcttcaccagggaggggtattttggccatggatgagtccaatgctacctgtgggaagcgtttggcttcaattgggctaaagaacact

SEQ ID NO: 77103 - DNA, 115 bp, Glycine max
ctcaaattttcagtacaggggtactggccagcagaaggtggattaaccggggtaatgattaccgcgcttggagaggagaaaccataatttagcaggggttgggtcaaaatatttt

SEQ ID NO: 77104 - DNA, 355 bp, Glycine max
atgccccccgtccgtaacctcggatttcggctcgagtttaaggcccttttctttttttttgaatttgaagtatctatcaccaattaattccactctttttgccatcaaacaacaaaaaatcaatctgggtatcaaaaacataatgccgtcattagaggaggaactctttccatcaacctcaggaaagtgcaagatcgagcggacccaccacatgatccggcgactctatcgctgtttcgtctcaccagcaccatgtacctgtgggccctcttattaatcggccttaccgcttactatctcaactttcaaggcttcgtcgattgcggcagcctataacttatcagcctctggggcg

SEQ ID NO: 77105 - DNA, 266 bp, Glycine max
  unsure (1)..(266): unsure at all n locations
ctcgagccgnnntaattaaataaaaaaaaaaaaaaaaaaaaaaaaaaaaaaaaaaaaaaaaaaaaaaaaaaaaaaaaaaaaaaaaaaaaaaaaaaaaaaaaaaaaaaaaaaaaaaggggggggcccccaatttttaaattttttaacccggaaattaatttcggaccggtactttgaggggtaccaattttttttttattgagtcgttttaaaacttggggtaaaaatgggaataacttttttctttgtaaaattttttttcgttt

SEQ ID NO: 77106 - DNA, 380 bp, Glycine max
ccctaacaacaacccttcgccggagtcgcaacagaatggcagaggttccggcgccggaggcacagctcaacggcggagccccaacaacggcggcgaattcctcggatcccatcggatcgaagcggcagcggcggccgagcgtccgattgggcgacatcggcgaccagccctacgactcccacccccgccgcgccgcagcgaaaacgtggcgcctcgcctttgaccacccccggaactccgccgccgtcaagccctccaagacccgccccctcacgaacctcacccccgccgctgccgagttcggcgaaaccctagagagcgacggcaacgtggacagcgttgtaattggaagctggaaagttaaggactccaagaagcgc

SEQ ID NO: 77107 - DNA, 163 bp, Glycine max
taaattattcccataagggctttcctcctataaacgggctacacagattataccgtgctagcgggaaaaatgggatatggaccctttctagcatgacaataaaagctcgggcggctgtggaaggggatcaactacggggctaagagtccctctgtgtcaatga

SEQ ID NO: 77108 - DNA, 404 bp, Glycine max
ctcattagatatagctatgaaaaattactgcgccaggctaaagctccaagtatgtttttacaatccttcaaaaattttgtttctttgtgtgtgtatggtgatgataacttaattagtgttcatgaatatgtcaagccttactttagtggttctaaattgaaaagctttctagctagtcataacatcaccattactgatggtattgacaaaactagtgcaactttgcaatttagaaagttagcagattgtgattttctcaagagaaactttaagcagatgtctaatgttttgtgggtggctcctgaggacaaggcgagtttatggtcacaacttcattatgtttcgtgtaataatctggaaatgcaagaagcttatcttgtcaatctcgtaaatgtgttacgaga

SEQ ID NO: 77109 - DNA, 56 bp, Glycine max
ggatggggaagattacctaatttagggtccatgaatttgtcaggccttactttagg

SEQ ID NO: 77110 - DNA, 365 bp, Glycine max
ctcagtccatttcacagcaaactgtttggaatcaaatggcaacagtgagaacaccattgaattttgattctagcaagcagagcttttgtcagttttctattgaccttctcggtggaggaatcttagtggacaaaactggagattggatcacacttatacaaaattctccaattagtaacttgttgagagttgctgcttggaagaaaggctgtttaatggtcaagattgtgatgtctgggaatgcagcagtcaaaaggagtgattgggcctcattggtacaagtgtttttaacaaacagcaacagtacagagcattttgatgcatgtaagtggacaaaatcagaaccacattcctgggaattgatc

SEQ ID NO: 77111 - DNA, 365 bp, Glycine max
cagcaccgaacgtaaggtggtgtcctgtgcatccccatgggtgcttatacatcctgaggaccgaatgcctctcacgcccgcacctacttatatacacatgatggctacaatgtgaacagtctatgctcgatggtacaatgatgacgatggacgacgtctaaatggctcctttaccatgcgcaaaggatctgatcttaggactcatcacggccgtcctagtccctaacccgacgcctgtctgatgactgatcaacctggtttcacagcaagagcgggtcatcgcgctcatttctactgacggatagacaaccagccctttttgaacttttactcgtgcgtttaacagcacacttaccactggtact

SEQ ID NO: 77112 - DNA, 404 bp, Glycine max
gctggtgcaaagaatgctattctcatgaatatgccaaatgctgttctttcaatgtggagatattttgttggagatctcgtctttgaagtttctaagatgacttctccctacattaaatgtacagtctctttcttcatagcatttggaaatttggctgatgataccatcaattttgaggcttttccccacaagctggtgcagtttggagagattcaggaaaaagttgtattgaaattttcacaagaggaatttcttacagcttggtcaactcaggtgcgtcctgcaacaactctgttggctgatgggtgtccatatttgtatgcaatggtgcatgatagttcagtgtctacaataccaggtgattttgtcattggtgtcaagttgacaaccataaacaatatgtg

SEQ ID NO: 77113 - DNA, 446 bp, Glycine max
gacatgcatgcgtacgtaagctagcaattaatttcgagtcgaggacaccacttctataagttcagagtgtaataagcaacacagtgcgactgtcacggaaatgcatgctagcacaacacattcaatcaaataaaaacattaagctgagtttgggatgctcatgtggtgatgtttgagatggaaattgaacatattataggggggcatttatggccatcacttacaaaaattaataaatttggcagagcatatgtttttcttactcacagatattctctgtagttaaaattttgtgactcttttttccatacagagtaagtcaatgagaagattgatatattcaaccttgcagttatactattggagctgacaattggtaaagaattgatgggctctcatctcttgcagagtgggcatgttgtaaatatagacctttgattcatttt

SEQ ID NO: 77114 - DNA, 291 bp, Glycine max
catggcagctatatgagttgtatgcactgcatgcccgagggttatttctaacgtataaggcttgaccctgaacgcgcatgctaaacagttctcacttctaccgatacaagcagtgcgacccggtaatatgaaggtatgtagaatgatgacgattctaaccagtcgcgctagagatgaccgcctatggcaccaggcgggcgagagcataaaaaacgcgcatgaggcgttcgcctatcataccaacagctcacacatcatagtccgcatgtacgaatatgttgatcttatcac

SEQ ID NO: 77115 - DNA, 333 bp, Glycine max
ctcgagccgtttgtaagaaagatgtttggagagttgaatgtggaatcccttctggatttccgctcacagctatttgcaatagcatttttaatgagatgctcattagatatagctatgaaaaattactgcgccaggctaaagctccaagtatgtttttacaatccttcaaaaattttgtttctttgtgggtggatggtgatgataacttaattagtgttcatgaatatgtcaagccttactttagtggctctaaattgaaaagctttctagctagtcataacatcaccattactgatggtattgacaaaactagtgcaactttgcaatttaaaa

SEQ ID NO: 77116 - DNA, 294 bp, Glycine max
gttgcatgcgcgcgtacgtcagctaataattctggtcgagcatcaggactaatttttccacccttgaagatcttccctgctgggaattctacgagcaaagataggcaaacacacacgtcacaaagaacgtcacacacataggacgcatcaactaccatcgcatatgtctggtgcggagttcaagaaaacggacagtattgcctcgttagagcaactccctctgactgactgaaccctgacaacgctagaatgcaaatattgatggacactaacaaatgctttaatatcaaacct

SEQ ID NO: 77117 - DNA, 291 bp, Glycine max
cactgctgtgcttttcaggacagtgatggtagaactgtggactaagccactcacaaagccattactgtcccatactccacataatgaaagatgatgcatgacgaaaatgacagatccaggtactgaaagtgcagaatgagacagtatcccacttattgagagagcccaccaatatgaagcagatgttgatggccatgatattcatcgcacagcattatttgcgccttggttaccactacaacacacactgttcatgcgaatgtgagcgtaagcaatgaagatgcattcatg

SEQ ID NO: 77118 - DNA, 404 bp, Glycine max
  unsure (1)..(404): unsure at all n locations
agttgacaaccataaacaatatgtgtgcatatgggctcaatcctggtatttcaggttctcgtcttttgggcaccattcctcagtccatttcacagcaaactgtttggaatcaaatggcaacagtgagaacaccattgaattttgattctagcaagcagagcttttgtcagttttctattgaccttctcggtggaggaatcttagtggacaaaactggagattggatcacacttatacaaaattctccaattagtaacttgttgagagttgctgcttggaagaaaggctgtttaatggtcaagattgtgatgtctgggaatgcagcagtcaaaaggagtgattgggcctcattggtacaagtgtttttaacaaacagncacagtacagagcattttgatgcatgt

SEQ ID NO: 77119 - DNA, 376 bp, Glycine max
  unsure (1)..(376): unsure at all n locations
gggaaatttttcctttgatattaaatctcgctctagattggaaaaagtttcctctacaaaagcacaatttgttagtggaaaaaccttcaaatatgatataattggtgctggttcacattcttcagaagattttcctgaaaaggaagatcaagaaaaacccaaaaagattgatgccagattgagacaaagaatagatcctcaatacaatgaggttcaggctcagatggaaacaaatttgtttaaattgtctcttgatgatgttgaaactcctaaaggttccatgttggatctgaaaatttctcaatctaaaattgcacttcccaagaacacagttggaggaaccattctgcgtagtgatctattggcanattttttg

SEQ ID NO: 77120 - DNA, 404 bp, Glycine max
cggctcgagctcgagccgaatcggctcgagtctaaattgaaaagctttctagctagtcataacatcaccattactgatggtattgacaaaactagtgcaactttgcaatttagaaagttagcagattgtgattttctcaagagaaactttaagcagatgtctaatgttttgtgggtggctcctgaggacaaggcgagtttatggtcacaacttcattatgtttcgtgtaataatctggaaatgcaagaagcttatcttgtcaatctcgtaaatgtgttacgagaattgtatttgcacagtccagaggaagctcgccaattgagaaggaaagctctctctcgtattgaatggctgcaaaaagctgatgtgcctaccatagcacagattgaagagttccattcgat

SEQ ID NO: 77121 - DNA, 403 bp, Glycine max
gcagatgtctaatgttgtgtgggtggctcctgaggacaaggcgagtttatggtcacaacttcattatgtttcgtgtaataatctggaaatgcaagaagcttatcttgtcaatctcgtaaatgtgttacgagaattgtatttgcacagtccagaggaagctcgccaattgagaaggaaagctctctctcgtattgaatggctgcaaaaagctgatgtgcctaccatagcacagattgaagagttccattcgatgcagaggatgatgaatgctcctgattcaaatgataatattgatttactgttgagcattgatttgttgggtttacaaggagcaggtaaagcttttccaaacaaaattgtttttgatgataagcttgtgttggctaacacacaagaattcttt

SEQ ID NO: 77122 - DNA, 397 bp, Glycine max
caaaaagctgatgtgcctaccatagcacagattgaagagttccattcgatgcagaggatgatgaatgctcctgattcaaatgataatattgatttactgttgagcattgatttgttgggtttacaaggagcaggtaaagcttttccaaacaaaattgtttttgatgataagcttgtgttggctaacacacaagaattctttgatggaaattttccagtggattcttggttaccaatttttgtgaattgtctttatcctgtaagtcaattactttcagaagctgtcgttgtaaatgttacatgtggtagtggacacgtgggtttacccaccactgcttggattagttctgcagttaacaatcgctcctcagatatcaacaaaaagattcgcacagcac

SEQ ID NO: 77123 - DNA, 390 bp, Glycine max
gaaaattgactttcccccagggcacttcccgaagtgttaagagaatgcctctttctatagggggaggagctggtgcaaagaatgctattctcatgaatatgccaaatgctgttctttcaatgtggagatattttgttggagatctcgtctttgaagtttctaagatgacttctccctacattaaatgtacagtctctttcttcatagcatttggaaatttggctgatgataccatcaattttgaggcttttccccacaagctggtgcagtttggagagattcaggaaaaagttgtattgaaattttcacaagaggaatttcttacagcttggtcaactcaggtgcgtcctgcaacaactctgttggctgatgggtgtccatatttgtatg

SEQ ID NO: 77124 - DNA, 402 bp, Glycine max
gattcacgccgccgcggacggtaccgcgccgccgggattcgagtccgccgtcgaagagcacgagttcggcgacctccagggaatgcttttcatgttctctgtttgtcatgttataatatatattcaggatcggtcacattttggtactaggattttgaggaattttcgggtgctgcaagcagccaagcatgctatggctccctttgttagatcccagactatgccgcctttaccgtctaggtcgcatccttcgccgtcgtcccgacctgtttcgtcggcaaacaattcttcaccagttagaggtggtggtaacttgggtcgcaatgtgtcagccatatctctcatgtcaggtttaggttcttatgcttctttgtttccaggacagtgcatacctgtcacact

SEQ ID NO: 77125 - DNA, 141 bp, Glycine max
ccttgattctctctcttcgggcagaaacatgaatttgggaacgcaaccagtaacggcgtggtattggtgctacagctgcacccgattagtgcacctatgtggtcaaagtaacatcgcctgcccccactgttaaagcggttt

SEQ ID NO: 77126 - DNA, 407 bp, Glycine max
ctcgagccgaatcggctcgagttgaaaagctttctagctagtcataacatcaccattactgatggtattgacaaaactagtgcaactttgcaatttagaaagttagcagattgtgattttctcaagagaaactttaagcagatgtctaatgttttgtgggtggctcctgaggacaaggcgagtttatggtcacaacttcattatgtttcgtgtaataatctggaaatgcaagaagcttatcttgtcaatctcgtaaatgtgttacgagaattgtatttgcacagtccagaggaagctcgccaattgagaaggaaagctctctctcgtattgaatggctgcaaaaagctgatgtgcctaccatagcacagattgaagagttccattcgatgcagaggatgatgaatgc

SEQ ID NO: 77127 - DNA, 108 bp, Glycine max
ctatcatgatggagatcacgtcatagaagcttctaatacgactactacctacattaaaggacacagctctcatgtgatcccaccaggaagacgctccctttggcccag

SEQ ID NO: 77128 - DNA, 405 bp, Glycine max
cttccatcatccaccaaaccttagagctccttcatctccccttaccagaacatcttttgaacacagtcaacatgagtaccagccagtatgacgctccctctggcgatgttgtagacgacgattacaagtcccgcactggacagtccgagattcccgttcagagtgacagcgtagctgtcgaggcaaccgagtacgacaacggcggggattctgacaagcaactcgagaaggatgagaacgaagctattgacaggagcaacatcctggatgagcgcacccgtggtgccaccaagaaggctggcacctacaccgagcctggcgacgaggaggaagttgacaatctgacagcgggaggtaatgatggcacctcttctggtcgccagtaagactatagatacccacgta

SEQ ID NO: 77129 - DNA, 358 bp, Glycine max
atgacttctccctacattaaatgtacagtctctttcttcatagcatttggaaatttggctgatgataccatcaattttgaggcttttccccacaagctggtgcagtttggagagattcaggaaaaagttgtattgaaattttcacaagaggaatttcttacagcttggtcaactcaggtgcgtcctgcaacaactctgttggctgatgggtgtccatatttgtatgcaatggtgcatgatagttcagtgtctacaataccaggtgattttgtcattggtgtcaagttgacaaccataaacaatatgtgtgcatatgggctcaatcctggtatttcaggttctcgtcttttgggcacca

SEQ ID NO: 77130 - DNA, 289 bp, Glycine max
  unsure (1)..(289): unsure at all n locations
gaagagttatgacgncgcacgcgcgcgtacgtaagctagaatttcggcgggtttcaacatatttttttagcaccttctaaaaccctttatttgggggttatatgaggagctggtgctggtggcctaatgactgttttgtctgcggccccaatcttttttaaggctaatggcccaaagttgactccgttggaggagatgcaggactacaagaaattgggacctaaacaattggaacctactacagcttggtcaaaaattgtggaacctgccacaacgagtggggatgttt

SEQ ID NO: 77131 - DNA, 386 bp, Glycine max
cgacgcacgcgcgcgtacgtatagcaattcgtttcgagactggttgagagttgctgcttggaagaaaggctgtttaatggtcaagattgtgatgtctgggaatgcaacaatcaaaaggagtgattgggcctcattggtacaagtgtttttaacaaacagcaacagtacagagcattttgatgcatgtaagtggacaaaatcagaaccacattcctgggaattgatcttcccaatagaggtatgtggtcctaataatggttttgaaatgtggagttctgagtgggcaaatcaaacttcatggcatttgagtttgcttattgacaatcccaaacagtctacagttgttgatattctcttgggaatctgtcaagatttagaaattgctg

SEQ ID NO: 77132 - DNA, 406 bp, Glycine max
ctcgagccgaatcggctcgaggaaagttagcagattgtgattttctcaagagaaactttaagcagatgtctaatgttttgtgggtggctcctgaggacaaggcgagtttatggtcacaacttcattatgtttcgtgtaacaatctggaaatgcaagaagcttatcttgtcaacctcgtaaatgtgttacgagaattgtatttgcacagtccagaggaagctcgccaattgagaaggaaagctctctctcgtattgaatggctgcaaaaagctgatgtgcctaccatagcacagattgaagagttccattcgatgcagaggatgatgaatgctcctgattcaaatgataatattgatttactgttgagcattgatttgttgggtttacaaggagcaaggtaagcttt

SEQ ID NO: 77133 - DNA, 93 bp, Glycine max
aaaaaaaaaaaaaaataaaaaaaaaaaaaaaaaaaaaaaaaaaaaaagaaaaaaaaaaaaaaaaaaaaaaaaaaaaaaaaaaaaaaaaaaaaa

SEQ ID NO: 77134 - DNA, 265 bp, Glycine max
gagaaagacattcaatacacaggataatgagtgctgatagattggatgcacactagcgctttgcgtgggaccattgaaacaccggctttacagaagaggcgggcatgcttttacataccaagctgtattggatgatcagcttgcgttggctaacacacaagacttctttgatggaaattgtccaggggatcctaggttaccaatctttgtgcatcgtatgtatactgtgagtcaatttgcttcaaaagctgtccatgcaatgtca

SEQ ID NO: 77135 - DNA, 389 bp, Glycine max
  unsure (1)..(389): unsure at all n locations
aacaccagacatatggatctagtacaagttctaactgctggtatctcaataccaaccttacagtcagtgaatatattggctgcggttttggcgtacagtgtcgttgcttctctaatcatcccaggaccatactttttaggagcaccattgaaggataaccgcccacgtgtcaattatagactcaatggcctacgtgtccacatcctcgcgatgatactttacgtcgttggaagcgactatggtctaaatttatacagggctaccattattcacgataactatggagccctcctcacaaccacagntgtttgggctttctttgtctcagcttacctttatgttagagcaacgttcatgatttcaaagatcgaccaaaactatcactcaag

SEQ ID NO: 77136 - DNA, 385 bp, Glycine max
cgctgacggcttagggccctacaccgttgacgccgatggacggattctcaagtgggacggggaagagacatgtttcactatatttgctgccaccaaatccaatatgttgaagtgtagtctcccatttgaaccaaagttggagcacatttgggtgatgccattaggacttggatccgataaaaaaagtggatatcgtaccatcgctgattcctacctacgcctaataattatgttgtctacagtgagattgactcaccaaagaggtatctgcacgtattaggccagccctcttcattcaccgattccattgacatcattgatcattcacacgcgatatactgcactgcttcaacctcaattttccagacaatgcattttatgcttg

SEQ ID NO: 77137 - DNA, 410 bp, Glycine max
attactgagtaagggcaatgatattctgtgttgcgattatgctagttttgatggtttgattaccaagcaagttatgagcaagatggcagaaatgataaacagtctttgtggtggtgatgaaaaattgatgcgtgaaaggacgcacctgctgttggcttgttgttcaaggatggcaatttgtaagaaagatgtttggagagttgaatgtggaatcccttctggatttccgctcacagttatttgcaatagcatttttaatgagatgctcattagatatagctatgaaaaattactgcgccaggctaaagctccaagtatgtttttacaatccttcaaaaattttgtttctttgtgtgtgtatggtgatgataacttaattagtgttcatgaatatgtcaagccttacttta

SEQ ID NO: 77138 - DNA, 408 bp, Glycine max
aagagttccattcgatgcagaggatgatgaatgctcctgattcaaatgataatattgatttactgttgagcattgatttgttgggtttacaaggagcaggtaaagcttttccaaacaaaattgtttttgatgataagcttgtgttggctaacacacaagaattctttgatggaaattttccagtggattcttggttaccaatttttgtgaattgtctttatcctgtaagtcaattaccttcagaagctgtcgttgtaaatgttacatgtggtagtggaccgtgtggttacccaccactgcttggattagttctgcagttaacaatcgcttcttaaatatctacaaaaggattcgcacagcacttgggaaaggtaagaaaattgtttttcttactagaagtgatccttt

SEQ ID NO: 77139 - DNA, 407 bp, Glycine max
caaatggcaacagtgagaacaccattgaattttgattctagcaagcagagcttttgtcagttttctattgaccttctcggtggaggaatcttagtggacaaaactggagattggatcacacttatacaaaattctccaattagtaacttgttgagagttgctgcttggaagaaaggctgtttaatggtcaagattgtgatgtctgggaatgcagcagtcaaaaggagtgattgggcctcattggtacaagtgtttttaacaaacagcaacagtacagagcattttgatgcatgtaagtggacaaaatcagaaccacattcctgggaattgatcttcccaatagaggtatgtggtcctaataatggttttgaaatgtggagttctgagtgggcaaatcaaacttcatg

SEQ ID NO: 77140 - DNA, 409 bp, Glycine max
atttcattgcgatatcatttgtgtcactggatggactgccaccccaatgcaggatgttcaggttacaattgattggtttatttcctctcaggaatgtgttcccaggacctattgtgttttaaatccacaaaatccttttgtgttaaataggtggatgggaaaattgactttcccccagggcacttcccgaagtgttaagagaatgcctctttctatagggggaggagctggtgcaaagaatgctattctcatgaatatgccaaatgctgttctttcaatgtggagatattttgttggagatctcgtctttgaagtttctaagatgacttctccctacattaaatgtacagtctctttcttcatagcatttggaaatttggctgatgataccatcaattttgaggctttt

SEQ ID NO: 77141 - DNA, 99 bp, Glycine max
ctctcatttctgtggatctaattaaatatccattggtttgtgggggtcaccaacacaggggagaactaaccccacctatagctatttggccgcgaatgc

SEQ ID NO: 77142 - DNA, 325 bp, Glycine max
gccctatgtactggtgagaaggggtactgacagctgacaaagtcaacctaatctaagggtttctatatctaataaatggatcgacctgatacttcacgatatgacaccggaggtgcattaaacaccttgagacaaatctaaccctaactgtgtagataaacatctataacttacccctaggtcacgatggctgtgctgtgaaattcatagacaggactagatattctaccggcagaggctacatcactttcatggatgccaagaccaagagctttttaggaaaggctgctaagcatgcagcagacgcattcagaattgacggcag

SEQ ID NO: 77143 - DNA, 82 bp, Glycine max
aaaaaaaaaaaaaaaaaaaaaaaaaaaaaaaaaaaaaaaaaaagaaagaaaaaaaaaaaaaagaaagaaaaaaaaaaaaaaa

SEQ ID NO: 77144 - DNA, 411 bp, Glycine max
aaactgtttggaatcaaatggcaccagtgagaacaccattgaattttgattctagcaagcagagcttttgtcagttttctattgaccttctcggtggaggaatcttagtggacaaaactggaaattggatcacacttatacaaaattctccaattagtaacttgttgagagttgctgtttggaagaaaggctgtttaatggtcaagattgtgatgtctgggaatgcagcagtcaaaaggagtgattgggcctcattggtacaagtgtttttaacaaacagcaacagtacagagcattttgatgcatgtaagtggacaaaatcagaaccacattcctgggaattgatcttcccaatagaggtatgtggtcctaataatggttttgaaatgtggagttctgagtgggcaaatc

SEQ ID NO: 77145 - DNA, 409 bp, Glycine max
gacaaaactagtgcaactttgcaatttaaaaagttagcagattgtgattttctcaagagaaactttaagcagatgtctaatgttttgtgggtggctcctgaggacaaggcgagtttatggtcacaacttcattatgtttcgtgtaataatctggaaatgcaagaagcttatcttgtcaatctcgtaaatgtgttacgagaattgtatttgcacagtccagaggaagctcgccaattgagaaggaaagctctctctcgtattgaatggctgcaaaaagctgatgtgcctaccatagcacagattgaagagttccattcgatgcagaggatgatgaatgctcctgattcaaatgataatattgatttactggtgagcattgatttgttgggtttacaaggagcaggtaaag

SEQ ID NO: 77146 - DNA, 407 bp, Glycine max
gactttcccccagggcacttcccgaagtgttaagagaatgcctctttctatagggggaggagctggtgcaaagaatgctattctcatgaatatgccaaatgctgttctttcaatgtggagatattttgttggagatctcgtctttgaagtttctaagatgacttctccctacattaaatgtacagtctctttcttcatagcatttggaaatttggctgatgataccatcaattttgaggcttttccccacaagctggtgcagtttggagagattcaggaaaaagttgtattgaaattttcacaagaggaatttcttacagcttggtcaactcaggtgcgtcctgcaacaactctgttggctgatgggtgtccatatttgtatgcaatggtgcatgatagttcagtgt

SEQ ID NO: 77147 - DNA, 275 bp, Glycine max
ctcgagccgattctcttgggaatctctcaagattttgaaattgctggtaatactcttatgccagctttttctgttccacaggctactgccagatcttctgaaaatgcggaatcctctgcatgatctggaatttgtgttttctttcgcttgttcgtttgtttaattcaataaaggaaattaggcatgaccctcttgttgagtatgctctgcctatttaaaaatttccacacctcttttaattgtcgtaatgatgtgtgaagtgtgtgttattttaa

SEQ ID NO: 77148 - DNA, 410 bp, Glycine max
tttctccctagctttgcttatagttcctgtattaatttttctctccctgagattaccaagctctgcaactttgcttctcaacatggagtatcgtctcctacccatttttactttactcaatgttagcttcagcatccaaacaactgtagcatgcatgcttattaatactttatttaaagttatggtttccttttaatataaaagctcgatttctatttagaacgggaattttcttactatagccacaagagttataatatatgggatttattttttataagtggtaaagcattttctggtattaattaattttatcacatattattatcatgaaaagaataaggccaggtgctgcataatctgtttggaatgtattaaaatgttaattacgagatgtttttgtatttgac

SEQ ID NO: 77149 - DNA, 399 bp, Glycine max
ctcgagccgaatcggttcgagatgataccatcaattttgaggcttttccccacaagctggggcagtttggagagattcaggaaaaagttgtattgaaattttcacaagaggaatttcttacagcttggtcaactcaagtgcgtcctgcaacaactctgttggctgatgggtgtctatatttgtatgcaatggtgcatgatagttcagtgtctacaataccaggtgattttgtcattggtgtcaagttgacaaccataaacaatatgtgtgcatatgggctcaatcctggtatttcaagttctcgtctattgggcaccattcctcagtccatttcacagcaaactgtttggaatcaaatggcaacagtgagaacaccattgaattttgattctagcaagc

SEQ ID NO: 77150 - DNA, 109 bp, Glycine max
agaagaccaagttgttgacaactcctacggtgaacaactcgggtccctcaacgttctcttccatggctgccaccactgtcaatggtgccgctgccaacatagctgtttc

SEQ ID NO: 77151 - DNA, 435 bp, Glycine max
cccttccttagcttgggaattcggttcgaggtctgggaatgcagcagtcaaaaggagtgattgggcctcattggtccaagtgtttttaacaaacagcaacagtacagagcattttgatgcatgtaagtggacaaaatcagaaccacattcctgggaattgatcttcccaatagaggtatgtgggcctaataatggttttgaaatgtggagttctgagtgggcaaatcaaacttcatggcatttgagtttccttattgacaatcccaaacagtctacagtttttgatattctcttgggaatctctcaagattttgaaattgctggtaatactcttatgccagctttttctgttccacaggctactgccagatcttctgaaaatgcggaatcctctgcatgatctggaaattgtgttttctttcgcttgggtcgttg

SEQ ID NO: 77152 - DNA, 257 bp, Glycine max
gaaacacataagtgagactcacacgcaaaacgatgcatgcattagtgattaaccttagaatcatatatgtttcatatagtgtgcctgcacaaattgacccactaaaataatgttcatctatgtactcattatcttatcctatgcgatcactccttgcacaccctataatccaaagttacagcacttctaggaagatccataatgaagatgctgcttatgacataaaacagagtgaacttcttgaagtgaaggccatg

SEQ ID NO: 77153 - DNA, 360 bp, Glycine max
aaaatgagctgtttccctgcattatcatgttgcagctgcttctggcttgggtagcttgctattgtactttggttgttttgaacgaacatgtcaagaaagcaataaacaaataccctgtcattacattacactcaaaagtctagacgtgtccacgggaagcttctgtatggtcaattctttcattgagcaaattggcttttgagggatctatggattcgtcagtctctcccttgtccctagcaagtctatatttggaacaggtggaacaagtggatcggtcaaccactcaacctgacaaatctctagtatatccaatacaattttattaataaaattaattattttttttagctttaaaaa

SEQ ID NO: 77154 - DNA, 413 bp, Glycine max
caatgatattctgtgttgcgattatgctagttttgatggtttgattaccaagcaagttatgagcaagatggcagaaatgataaacagtctttgtggtggtgatgaaaaattgatgcgtgaaaggacgcacctgctgttggcttgttgttcaaggatggcaatttgtaagaaagatgtttggagagttgaatgtggaatcccttctggatttccgctcacagttatttgcaatagcatttttaatgagatgctcattagatatagctatgaaaaattactgcgccaggctaaagctccaagtatgtttttacaatccttcaaaaattttgtttctttgtgtgtgtatggtgatgataacttaattagtgttcatgaatatgtcaagccttactttagtggttctaaattgaaaa

SEQ ID NO: 77155 - DNA, 396 bp, Glycine max
gggctcaatcctggtatttcaggttctcgtcttttgggcaccattcctcagtccatttcacagcaaactgtttggaatcaaatggcaacagtgagaacaccattgaattttgattctagcaagcagagcttttgtcagttttctattgaccttctcggtggaggaatcttagtggacaaaactggagattggatcacacttatacaaaattctccaattagtaacttgttgagagttgctgcttggaagaaaggctgtttaatggtcaagattgtgatgtctgggaatgcagcagtcaaaaggagtgattgggcctcattggtacaagtgtttttaacaaacagcaacagtacagagcattttgatgcatgtaagtggacaaaatcagaaccacat

SEQ ID NO: 77156 - DNA, 403 bp, Glycine max
ttgcaattgaagttaaaagccttagccttccctacaactccaaacacaaagacatcatcatccatggctgcctccgtctccactgtcggagctgtcaacagagctcttttgaacctgaatggttctggagctggagcttcagctcccagttcagccttctttgggaccagcttgaagaaggttattgcctcaagggtccccaacagcaaggtttccggtggaagcttcaagattgttgctgtagaagagaagaaagagattgaagagacccagcagaccgacaaggacagatggaagggtcttgcctatgatatctcagacgaccaacaagacatcacaagaggaaagggtttggttgactcccttttccaagctccacaggatgctggaactcactatgcag

SEQ ID NO: 77157 - DNA, 355 bp, Glycine max
ctcaggtgcgtcctgcaacaactctgttggctgatgggtgtccatatttgtatgcaatggtgcatgatagttcagtgtctacaataccaggtgattttgtcattggtgtcaagttgacaaccataaacaatatgtgtgcatatgggctcaatcctggtatttcaggttctcgtcttttgggcaccattcctcagtccatttcacagcaaactgtttggaatcaaatggcaacagtgagaacaccattgaattttgattctagcaagcagagcttttgtcagttttctattgaccttctcggtggaggaatcttagtggacaaaactggagattggatcacacttatacaaaattc

SEQ ID NO: 77158 - DNA, 412 bp, Glycine max
gtcaagccttactttagtggatctaaatagaaaagctttctagctagtcataacatcaccattactgatggtattgacaaaactagtgcaactttgcaatttagaaaggtagcagattgtgattctctcaagagaaactgtaagcagatgtctaatgttgtgtgggtggctcctgaggacaaggcgagtttatggtcacaacttcattatgtttcgtgtaataatctggaaatgcaagaagcttatcttgtcaatctcgtaaatgtgttacgagaatcgtatctgcacagtccataggaagctcgccaattgagaatgaaagctctctctcgtattgaatggctgcaaaaagctgatgtgcctaccatagcacagattgaagagttccattcgatgcacatgatgatgaatg

SEQ ID NO: 77159 - DNA, 268 bp, Glycine max
ctcgagccgaatcggctcgaggctaatcgcgacgtgagagatggggatggggtgtacgtgtatgagaacgacaagaagccctgcgggcggaaggttgttcttggtaacgaaaagcacgatcccggtgtggtaaaacactcttgtactttatacattcacacgtcatatccggcttgcaatgcttttgtctctagcctgtacttcctcttttcatcgcttggtgcaatggggaaaatagtggtctatagaaagacatgggtttctttgt

SEQ ID NO: 77160 - DNA, 272 bp, Glycine max
caaagaggatgttgctcccgacgctgtcaggcacatatgcgttcctgataaaaaggtctactatagcgacatcagtcggggatggcctgtaccgcctcccgcactatagatcagataatccacaacttgcacaatgccaataagcagctcatggtggcatttatctgggtaggatacatacatgcactgatctcactcccgctcggagcgaccgagggctcgatgcgtcgtaagagccagctggatgaggtatgtttgtccaagtgctatgc

SEQ ID NO: 77161 - DNA, 173 bp, Glycine max
ggcaaatttgttgaccgtaggcaatactagagctggcgttgacactctgtgcactcgtcgactctgacgtgggtgtctaatggtggactgagggggctttcctcggaactccagtgtgcgagcgcccctttctaagtttagctcccgtaaggagctcaccattctttatcttc

SEQ ID NO: 77162 - DNA, 290 bp, Glycine max
ttgcaccgttcattgatataaactttaccaatgccctgctgagcacgagcgcgtacctgcatgcgctatgcacactcttttagccctcgacaccaacactgacataaaggcccagcctagcatccccagtgtgcatctgcgcctcctgcctcggactgaaccgacatacctcgcgcgaggaagacgagtcggacccgttgctcgatgacgcacaaacagtgagatatggcgctgagggggaggatgatgtggcacatccagatgaggaagagctcgaaagagagagggag

SEQ ID NO: 77163 - DNA, 352 bp, Glycine max
  unsure (1)..(352): unsure at all n locations
gcaattgaagttgaagtcttgcccttctctcttcaactccaaacacaagacatcatcatccatggctgcctccgtctccactgtcggagctgtcaacagagctcttttgaacctgaatgggtctggacctggggtttcagctcccagttcatccttctttgggagcagcttgaagaaggttattggctcaagggtccccaacacaaagatttcctctggaagcttcaagattgttgctgtggaagagaagaaagagattgtagagacccagcagaccgacaaggacagatggaagggtcttgcctatgatatctcagacgaccaacaggacatcacangaggaaagggtttg

SEQ ID NO: 77164 - DNA, 55 bp, Glycine max
aaaaaaaaaaaaaaaaaaaaaaaaaaaaaaaaaaaaaaaaaaaaaaaaaaaaaaa

SEQ ID NO: 77165 - DNA, 394 bp, Glycine max
gtgttcccaggacctattgtgttttaaatccacaaaatccttttgtgttaaataggtggatgggaaaattgactttcccccagggcacttcccgaagtgttaagagaatgcctctttctatagggggaggagctggtacaaagaatgctattctcatgaatatgccaaatgctgttctttcaatgtggagatattttgttggagatctcgtctttgaagtttctaagatgacttctccctacattaaatgtacagtctctttcttcatagcatttggaaatttggctgatgataccatcaattttgaggcttttccccacaagctggtgcagtttggagagattcaggaaaaagttgtattgaaattttcacaagaggaatttcttacagcttg

SEQ ID NO: 77166 - DNA, 376 bp, Glycine max
  unsure (1)..(376): unsure at all n locations
gtgagaacaccattgaattttgattctagcaagcagagcttttgtcagttttctattgaccttctcggtggaggaatcttagtggacaaaactggagattggatcacacttatacaaaattctccaattagtaacttgttgagagttgctgcttggaagaaaggctgtttaatggtcaagattgtgatgtctgggaatgcagcagtcaaaaggagtgattgggcctcattggtacaagtgtttttaacaaacagcaacagtacagagcattttgatgcatgtaagtggacaaaatcagaaccacattcctgggaattgatcttcccaatagaggtatgtggtcctaataatggttntgaaatgtggaagtttgagt

SEQ ID NO: 77167 - DNA, 116 bp, Glycine max
tatagttgtaaaagcttattccatataataacaatacatcggcatataggactctctttgtatgaaattccctctatttaggggcacaatcaatgagggaatttcatagaaagaga

SEQ ID NO: 77168 - DNA, 155 bp, Glycine max
aatggcactcatgatgtgggcttcttacactgacaacgcactcaaactcatattcgtgtcaccgaacgacaacaacaaccacgcgcgaaatgcacctcacgtaatcttacaagcagactcgacgtaagtgctctgatactacaaactggggcacg

SEQ ID NO: 77169 - DNA, 411 bp, Glycine max
agttaaaagccttagccttccctacaactccaaacacaaagacatcatcatccatggctgcctccgtctccactgtcggagctgtcaacagagctcttttgaacctgaatggttctggagctggagcttcagctcccagttcagccttctttgggaccagcttgaagaaggttattgcctcaagggtccccaacagcaaggtttccggtggaagcttcaagattgttgctgtagaagagaagaaagagattgaagagacccagcagaccgacaaggacagatggaagggtcttgcctatgatatctcagacgaccaacaagacatcacaagaggaaagggtttggttgactcccttttccaagctccacaggatgctggaactcactatgcagtcatgagctcctacgagt

SEQ ID NO: 77170 - DNA, 391 bp, Glycine max
gtggaatcccttctggatttccgctcacagttatttgcaatagcatttttaatgagatgctcattagatatagctatgaaaaattactgcgccaggctaaagctccaagtatgtttttacaatccttcaaaaattttgtttctttgtgtgtgtatggtgatgataacttaattagtgttcatgaatatgtcaagccttactttagtggttctaaattgaaaagctttctagctagtcataacatcaccattactgatggtattgacaaaactagtgcaactttgcaatttagaaagttagcagattgtgattttctcaagagaaactttaagcagatgtctaatgttttgtgggtggctcctgaagacaaggcgagtttatggtcacaact

SEQ ID NO: 77171 - DNA, 392 bp, Glycine max
catcgatgccgtcctcaacccctccaacaccaccattgctggatcaggtgccaccgctggtgccgtcgccttctctggcgcttcatctgcttccaacgctcctttcacctctggccaacccaacccaacccggtctggtgcaccccctggatcgacttcccgtggtgctggtggggcccgtgccttcaacctcaaccaggcttgtgcttggcaagccatgccaaccggttccgtcggcgttggcgccattcttggaaccgctggtggtttcttcttggaagatgcctgatggggaaaacatttgtggataatgggaaaaagagatgagaaggaggcggaagtgtgttcatagtttcaaatttctttgtgatattagtcacgtatagtcacga

SEQ ID NO: 77172 - DNA, 58 bp, Glycine max
aaaaaaaaaaaaaaaaaaaaaaaaaaaaaaaaaaaaaaaaaaaaaaaaaaaaaaaaaa

SEQ ID NO: 77173 - DNA, 395 bp, Glycine max
gaaaaagttgtattgaaattttcacaagaggaatttcttacagcttggtcaactcaggtgcgtcctgcaacaactctgttggctgatgggtgtccatatttgtatgcaatggtgcatgatagttcagtgtctacaataccaggtgattttgtcattggtgtcaagttgacaaccataaacaatatgtgtgcatatgggctcaatcctggtatttcaggttctcgtcttttgggcaccattcctcagtccatttcacagcaaactgtttggaatcaaatggcaacagtgagaacaccattgaattttgattctagcaagcagagcttttgtcagttttctattgaccttctcggtggaggaatcttagtggacaaaactggagattggatcacact

SEQ ID NO: 77174 - DNA, 351 bp, Glycine max
aggacgcacctgctgttggcttgttgttcaaggatggcaatttgtaagaaagatgtttggagagttgaatgtggaatcccttctggatttccgctcacagttatttgcaatagcatttttaatgagatgctcattagatatagctatgaaaaattactgcgccaggctaaagctccaagtatgtttttacaatccttcaaaaattttgtttctttgtgtgtgtatggtgatgataacttaattagtgttcatgaatatgtcaagccttactttagtggttctaaattgaaaagctttctagctagtcataacatcaccattactgatggtattgacaaaactagtgcaact

SEQ ID NO: 77175 - DNA, 344 bp, Glycine max
gtcttttgggcaccattcctcagtccatttcacagcaaactgtttggaatcaaatggcaacagtgagaacaccattgaattttgattctagcaagcagagcttttgtcagttttctattgaccttctcggtggaggaatcttagtggacaaaactggagattggatcacacttatacaaaattctccaattagtaacttgttgagagttgctgcttggaagaaaggctgtttaatggtcaagattgtgatgtctgggaatgcagcagtcaaaaggagtgattgggcctcattggtacaagtgtttttaacaaacagcaacagtacagagcatttttgatgcatg

SEQ ID NO: 77176 - DNA, 382 bp, Glycine max
tgggaattgatcttcccaatagaggtatgtggtcctaataatggttttgaaatgtggagttctgagtgggcaaatcaaacttcatggcatttgagtttccttattgacaatcccaaacagtctacagtttttgatattctcttgggaatctctcaagattttgaaattgctggtaatactcttatgccagctttttctgttccacaggctactgccagatcttctgaaaatgcggaatcctctgcatgatctggaatttgtgttttctttcgcttgttcgtttgtttaattcaataaaggaaattaggcatgaccctcttgttgagtatgctctgcctatttgaaaatttccacacctcttttaattgtcgtaatgatgtgt

SEQ ID NO: 77177 - DNA, 303 bp, Glycine max
cttcttctgatttgtagagactaacccaagaaagaaccaaccaaaaacaagtgcttcttagagcttggtatagctctctctctctctctctctttgtgcgtgtgtgtgtgagggtacatgcagagcagtgagtttgagacagagaaagaagcagttcaagattgttgttcaattttgcaaaaaactgcccatcaagtacttttggtgctggttttttttttttttttcgaatttgcttcttatccaacccggaagtttcttgaatcattggtgctctctctctctcttctctctattattttc

SEQ ID NO: 77178 - DNA, 169 bp, Glycine max
gcggaatcctctgcatgatctggaattcgtgttttctttcgcttgtgtggtcggtttaattcaataaaggaaattatgcatgaccctcttgttgagtatgctctgcctatttgaaaatttccacacctttcttaattgtcgtaatgatgtgtaaagtgtgtgttatttt

SEQ ID NO: 77179 - DNA, 242 bp, Glycine max
cgccttttgagttgaagcgtcgaacttatgtcttcaccttccaacaccatataccattgagcgtgggtgtctgcggtttcactgtctgtgttgttgacagtgcttttttgaacctacatgcgtatgggcctgggggttaaactgccagatgatgcttcttagggagcagcttgatgacagatatctgctcaagaggccgcaacgcagaggttagctttggaagccttaagattgctgctgta

SEQ ID NO: 77180 - DNA, 370 bp, Glycine max
ctcgagccgctggtatttcaggttctcgtcttttgggcaccattcctcagtccatttcacagcaaactgtttggaatcaaatggcaacagtgagaacaccattgaattttgattctagcaagcagagcttttgtcagttttctattgaccttctcggtggaggaatcttagtggacaaaactggagattggatcacacttatacaaaattctccaattagtaacttgttgagagttgctgcttggaagaaaggctgtttaatggtcaagattgtgatgtctgggaatgcagcagtcaaaaggagtgattgggcctcattggtacaagtgtttttaacaaacagcaacagtacagagcattttgatgcatg

SEQ ID NO: 77181 - DNA, 308 bp, Glycine max
gaaaaggaagatcaagaaaaacccaaaaagattgatgccagattgagacaaagaatagatcctcaatacaatgaggttcaggctcagatggaaacaaatttgtttaaattgtctcttgatgatgttgaaactcctaaaggttccatgttggatctgaaaatttctcaatctaaaattgcacttcccaagaacacagttggaggaaccattctgcgtagtgatctattggcaaattttttgacagagggcaattttagagcaagtgttgatttgcagcgcactcatcgtattagaggaatgattaaaat

SEQ ID NO: 77182 - DNA, 388 bp, Glycine max
gattgggcctcattggtacaagtgtttttaacaaacagcaacagtacagagcattttgatgcatgtaagtggacaaaatcagaaccacattcctgggaattgatcttcccaatagaggtatgtggtcctaataatggttttgaaatgtggagttctgagtgggcaaatcaaacttcatggcatttgagtttccttattgacaatcccaaacagtctacagtttttgatattctcttgggaatctctcaagattttgaaattgctggtaatactcttatgccagctttttctgttccacaggctactgccagatcttctgaaaatgcggaatcctctgcatgatctggaatttgtgttttctttcgcttgttcgtttgtttaattcaat

SEQ ID NO: 77183 - DNA, 391 bp, Glycine max
gcctcattggtacaagtgtttttaacaaacagcaacagtacagagcattttgatgcatgtaagtggacaaaatcagaaccacattcctgggaattgatcttcccaatagaggtatgtggtcctaataatggttttgaaatgtggagttctgagtgggcaaatcaaacttcatggcatttgagtttccttattgacaatcccaaacagtctacagtttttgatattctcttgggaatctctcaagattttgaaattgctggtaatactcttatgccagctttttctgttccacaggctactgccagatcttctgaaaatgcggaatcctctgcatgatctggaatttgtgttttctttcgcttgttcgtttgtttaattcaataaaggaaat

SEQ ID NO: 77184 - DNA, 395 bp, Glycine max
ctcgagccgctctgagagaccctttgggaggaaacgccagaaaacccaaagttttgttcttcctctctttgcaatctctacacagaagatttatggataaaatttgcaaatttggttcactgcagcactgttccgtcgcaaatttcttccaccgacaagtgtttgacttcgtggttccgtcgctttttcaacccttcgatagattcattccttggttacgctttctggctctcaaataacattcaagctaccctctttgtcttgtaattttcttctgaattgaaaaaaaaaagttattgacttggatgttttgcaagcaaggcctccagattgtggctttctgagttctaaatctgctcaagtcttaagacagagagattgcaaagtgatttgag

SEQ ID NO: 77185 - DNA, 334 bp, Glycine max
aattgaagttgaagtcttgcccttctctcttcaactccaaacacaagacatcatcatccatggctgcctccgtctccactgtcggagctgtcaacagagctcttttgaacctgaatgggtctggacctggggtttcagctcccagttcatccttctttgggagcagcttgaagaaggttattggctcaagggtccccaacacaaagatttcctctggaagcttcaagattgttgctgtagaagagaagaaagagattgaagagacccagcagaccgacaaggacagatggaagggtcttgcctatgatatctcagacgaccaacaggacatcac

SEQ ID NO: 77186 - DNA, 368 bp, Glycine max
caaatggcaacagtgagaacaccattgaattttgattctagcaagcagagcttttgtcagttttctattgaccttctcggtggaggaatcttagtggacaaaactggagattggatcacacttatacaaaattctccaattagtaacttgttgagagttgctgcttggaagaaaggctgtttaatggtcaagattgtgatgtctgggaatgcagcagtcaaaaggaatgattgggcctcattggtacaagtgtttttaacaaacagcaacagtacagagcattttgatgcatgtaagtggacaaaatcagaaccacattcctgggaattgatcttcccaatagagggatgtgggcctaataatgggtt

SEQ ID NO: 77187 - DNA, 242 bp, Glycine max
aaaaaaaaaaaataaaaaaaaaaaaaaaaaaaaaaaaaaaaaaaaaaaaaaaaaaaaaaaaaaaaaaaaaaaaaaaaaaaaaaaaaaaaaaaaaaaaaaaaaaaaaaaaaaaaaaaaaaaaaaaaaaaaaaaaggggggggcccccccttttgggccttttccccccggaatttatttcgggcccggtccctgggggggacccatttttccttatagggggccgttttaaagctgggggaaa

SEQ ID NO: 77188 - DNA, 387 bp, Glycine max
cggctcgagatcagaaccacattcctgggaattgatcttcccaatagaggtatgtggtcctaataatggttttgaaatgtggagttctgagtgggcaaatcaaacttcatggcatttgagtttccttattgacaatcccaaacagtctacagtttttgatattctcttgggaatctctcaagattttgaaattgctggtaatactcttatgccagctttttctgttccacaggctactgccagatcttctgaaaatgcggaatcctctgcatgatctggaatttgtgttttcttttgcttgttcgtttgtttaattcaataaaggaaattaggcatgaccctcttgttgagtatgctctgcctatttgaaaatttccacacctcttt

SEQ ID NO: 77189 - DNA, 388 bp, Glycine max
agctgatgtgcctaccatagcacagattgaagagttccattcgatgcagaggatgatgaatgctcctgattcaaatgataatattgatttactgttgagcattgatttgttgggtttacaaggagcaggtaaagcttttccaaacaaaattgtttttgatgataagcttgtgttggctaacacacaagaattctttgatggaaattttccagtggattcttggttaccaatttttgtgaattgtctttatcctgtaagtcaattaccttcagaagctgtcgttgtaaatgttacatgtggtagtggacgctgggtttacccaccactgcttggattagttctgcagttaacaatcgctcctcagatatcaacaaaaggattcgcacag

SEQ ID NO: 77190 - DNA, 381 bp, Glycine max
gaattgtatttgcacagtccagaggaagctcgccaattgagaaggaaagctctctctcgtattgaatggctgcaaaaagctgatgtgcctaccatagcacagattgaagagttccattcgatgcagaggatgatgaatgctcctgattcaaatgataatattgatttactgttgagcattgatttgttgggtttacaaggagcaggtaaagcttttccaaacaaaattgtttttgatgataagcttgtgttggctaacacacaagaattctttgatggaaattttccagtggattcttggttaccaatttttgtgaattgtctttatcctgtaagtcaattaccttcagaagctgtcgttgtaaatgttacatgtggtagt

SEQ ID NO: 77191 - DNA, 390 bp, Glycine max
gagatattttgttggagatctcgtctttgaagtttctaagatgacttctccctacattaaatgtacagtctctttcttcatagcatttggaaatttggctgatgataccatcaattttgaggcttttccccacaagctggtgcagtttggagagattcaggaaaaagttgtattgaaattttcacaagaggaatttcttacagcttggtcaactcaggtgcgtcctgcaacaactctgttggctgatgggtgtccatatttgtatgcaatggtgcatgatagttcagtgtctacaataccaggtgattttgtcattggtgtcaagttgacaaccataaacaatatgtgtgcatatgggctcaatcctggtatttcaggttctcgtctttt

SEQ ID NO: 77192 - DNA, 125 bp, Glycine max
ctcgagccggtttaattcaataaaggaaattaggcatgaccctcttgttgagtatgctctgcctatttgaaaatttccacacctcttttaattgtcgtaatgatgtgtgaagtgtgtgttatttt

SEQ ID NO: 77193 - DNA, 339 bp, Glycine max
gggtgagtgcgaataaagtgagctggtgcgaccaacgagggttggggtgacccctctttcacgtctcgtacaagctctcatcttctctaagcctttctactctgttctcaagcttgctgctagaatggctttgataagtgcagctgataagaacaacataccgtcggggctattggcgaacgagattttagagtccgtagttgatagggagctggacatcattcaaaaccagtatttaccgtaccctgattattatcagaatccattccatgcatatgatgagggcgatctgacatggctggcggctgcatacgcagaggctgctacattgtcgatagc

SEQ ID NO: 77194 - DNA, 372 bp, Glycine max
ggctcgagctgtagatcacccgacccaaaaaaaaacaaaaaaaaaaaaaaaaaaaaaaaaaaaaaaaaaaaaaaaaaaaaaaaaaaaaaaaaaaaaaaaaaaaaaaaaaaaaaaaaaaaaaaaaaaaaaaaaaaaaaaaaaaaaaaaaaaaaaaaaaaaaaaaaaaaaaaggggggggccgccaattattgagtttttcaaccgggaaattaattcgggacggggccttggggggtaacaaattttccttttagggaggggttttaaagttgggggaaaaaaggggaaaaggtgttccctggggaaaaatgttttccgctaaaaattccaaaaaaaataaaagcggaaagaataaagggtaaagccgggggg

SEQ ID NO: 77195 - DNA, 390 bp, Glycine max
attgactttcccccagggcacttcccgaagtgttaagagaatgcctctttctatagggggaggagctggtgcaaagaatgctattctcatgaatatgccaaatgctgttctttcaatgtggagatattttgttggagatctcgtctttgaagtttctaagatgacttctccctacattaaatgtacagtctctttcttcatagcatttggaaatttggctgatgataccatcaattttgaggcttttccccacaagctggtgcagtttggagagattcaagaaaaagttgtattgaaattttcacaagaggaatttcttacagcttggtcaactcaggtgcgtcctgcaacaactctgttggctgatgggtgtccatatttgtatgcaat

SEQ ID NO: 77196 - DNA, 393 bp, Glycine max
cggctctcctcttttctcctctctttccttttgcacaacgtttcctttcttaacgctgtgcgccttgttaccccatcagtttttgtttcggagtagttctccaagtcgttcttttgcaggcctggcgccaggaagaaacaacagtcgttcactcgtttgtgcattgcatcactcacgttccttacagcagctgttccgggtagtgctggtatagacaaagaggttattggcccatctacgcagcgtagttacaccattgtgtcgaaacatttccctcgacattgaattgcatgccaagtgggcgcgcaccaccaacgctctgggaaagttgacagcaagagctttggaatttggttgtctacggcaacgcacagtcagcgggacatcacagtg

SEQ ID NO: 77197 - DNA, 388 bp, Glycine max
gttacaattgattggtttatttcctctcaggaatgtgttcccaggacctattgtgttttaaatccacaaaatccttttgtgttaaataggtggatgggaaaattgactttcccccagggcacttcccgaagtgttaagagaatgcctctttctatagggggaggagctggtgcaaagaatgctattctcatgaatatgccaaatgctgttctttcaatgtggagatattttgttggagatctcgtctttgaagtttctaagatgacttctccctacattaaatgtacagtctctttcttcatagcatttggaaatttggctgatgataccatcaattttgaggcttttccccacaagctggtgcagtttggagagattcaggaaaaag

SEQ ID NO: 77198 - DNA, 392 bp, Glycine max
gatttgttgggtttacaaggagcaggtaaagcttttccaaacaaaattgtttttgatgataagcttgtgttggctaacacacaagaattctttgatggaaattttccagtggattcttggttaccaatttttgtgaattgtctttatcctgtaagtcaattaccttcagaagctgtcgttgtaaatgttacatgtggtagtggacgtggtggtttacccaccactgcttggattagttctgcagttaacaatcgctcctcagatatcaacaaaaggattcgcacagcacttgggaaaggtaagaaaattgtttttcttactagagttgatccttttccagtagctttactggctgttctttttggcgttaagaatgaaattctgagttctaa

SEQ ID NO: 77199 - DNA, 359 bp, Glycine max
cgaatatgtcaagccttactttcatggcactaacttgaaaagccaactaactagatattacatacaccattactgatcgaatcgaaacactagtgcaccttgctattacaaaccatcagattgtattttccatgataaacttagcaacaccaatgatttatggtgatacccggaccaagcacttaaagcaaacttactattgtcacgtacatctgcaatgcacaacttatatacaatcccgcgacaccttactataatcgaactccactatccacactaagctaacgcaacgaaaaggaaagctctctctcatacttaatggatccagatcactgatctgcctaccataacacatattg

SEQ ID NO: 77200 - DNA, 388 bp, Glycine max
gtcatttaatccaaacccgtgttctgatgcatggagtttggaatttctgaagcgtactggatttcattgcgatatcatttgtgtcactggatggactgccaccccaatgcaggatgttcaggttacaattgattggtttatttcctctcaggaatgtgttcccaggacctattgtgttttaaatccacaaaatccttttgtgttaaataggtggatgggaaaattgactttcccccagggcacttcccgaagtgttaagagaatgcctctttctatagggggaggagctggtgcaaagaatgctattctcatgaatatgccaaatgctgttctttcaatgtggagatattttgttggagatctcgtctttgaagtttctaagatgact

SEQ ID NO: 77201 - DNA, 376 bp, Glycine max
cctaccgagtcgtgtgagctacctgatctactggagcgttccgagttatatacctcaccagacacttgctagtcagctgcttgatcacccgcgcaacatggacaaccttggtacctcccccaccgacaccgagaagtccatcgaggtcaacgatgcgctcttctgcgagcacggcctcgaagtctgcaagacgtgcgagtttgacggacgagaggacaacgacgcaatgatgggcctcgaccccaagccgcgaggcccgctcgagatgcccgcatactacaagaacaccaaggacggtcagatcatgtgcaaggcgcacgccaactcgaactgcaagtcatgcttcggctggaagaagatgatcgtcaagcttcag

SEQ ID NO: 77202 - DNA, 163 bp, Glycine max
  unsure (1)..(163): unsure at all n locations
attaaaaatatactgataaagatagaataagagagagagagagagaatggaagggagagagagttgtcacccattgctgagaggaggtaggagaagagaggagaaaggttacaaccatggcttatccaccactcagatgcatgtcatggctgncatatgtgat

SEQ ID NO: 77203 - DNA, 346 bp, Glycine max
cgttaatcagccccaagagaaagatttgttggagggaaatttttcctttgatattaaatctcgctctagattggaaaaagtttcctctacaaaagcacaatttgttagtggaaaaaccttcaaatatgatataattggtgctggttcacattcttcagaagattttcctgaaaaggaagatcaagaaaaacccaaaaagattgatgccagattgagacaaagaatagatcctcaatacaatgaggttcaggctcagatggaaacaaatttgtttaaattggctcttgatgatggtgaaacttctaaaggttccatgttggatctgaaaatttttaatctaaaattg

SEQ ID NO: 77204 - DNA, 397 bp, Glycine max
cttattattttttttttttttaatgtattttttagaatgagttatttttttttatttttatatttttttttaataaatattattattacatattatttttattcatgtaagttgacaaaattataaccacatttttgggaattgatctttccaaaaaaaaatatgggcctaataatggttttgaaaaaaagagttttaatgggcaaatcaaacttcatggcatttgagtttacttattgacaatcccaaaaaaatacattttaaaaaattctcttgggaatctataaaaaatttgaaaatgctggttatactataatgccagctgtttctgaaacaaagctactgtcagatcttctgaaaatgcggaattctattcatgatctggaatttgtgtttt

SEQ ID NO: 77205 - DNA, 280 bp, Glycine max
tattcgagctcgagcctaatcgtctcgagcggctctaggatttatagaaaggatttgtgtttggttggctgctgaattgaaagggaaatcaagcattaatgcgttgggagctatgagattgtattgattaacccgtggtgagccttaattacggtcggggttagatataaaaagccatttaattacttttaaaggctcagagtttacattcggagatcggttgtggggaaagaaaggcgaatgcttgactcttctaaagtttttatttcgcaacggaagt

SEQ ID NO: 77206 - DNA, 212 bp, Glycine max
gccacgctgatactcaattctacagttagatgcttggaaatagtggctgctagtgacaagcgcttggcacatgccaaaattgagacgtgtgtgctggcacttttctaattgacgtgcttggtgcgtggagttacaggggacactaacattacatggcgggacacaaacaataatttcctgattgcggacataagaaaaactacattgccgag

SEQ ID NO: 77207 - DNA, 418 bp, Glycine max
  unsure (1)..(418): unsure at all n locations
cggctcgagctcgagccgaatcggctcgagcggctcgagtgccaccccaatgcaggatgttcaggttacaattgattggtttatttcctctcaggaatgtgttcccaggacctattgtgttttaaatccacaaaatccttttgtgttaaataggtggatgggaaaattgactttcccccagggcacttcccgaagtgttaagagaatgcctctttctatagggggaggagctggtgcaaagaatgctattctcatgaatatgccaaatgctgttctttcaatgtggagatattttgttggagatctcgtctttgaagtttctaagatgacttctccctacattaaatgtacagtctctttcttcatagcatttggaaatttggctgatgataccatcaattntgaggcttttccccac

SEQ ID NO: 77208 - DNA, 324 bp, Glycine max
gtcacgactgtattgtctggcgatgaataatccgaaaaggggggatggttctcttggcaacaagggttgttaataaacagtaatgggtcagcgcagttcgaaggatgttcgtctacaaaattagaaacctctttctcgtattgaatggtttcaataagcgtatgtgcctatcataatgcagattgaatcgggcgatttcactcagactatcatgaatgctgggcattgagattattttatggatatactgaacagcattgattttttgattttacaatgcgaatctctaattattttgaacatactggtcttacatgttaagct

SEQ ID NO: 77209 - DNA, 404 bp, Glycine max
gtcaagattgtgatgtctgggaatgcagcagtcaaaaggagtgattgggcctcattggtacaagtgtttttaacaaacagcaacagtacagagcattttgatgcatgtaagtggacaaaatcagaaccacattcctgggaattgatcttcccaatagaggtatgtggtcctaataatggttttgaaatgtggagttctgagtgggcaaatcaaacttgatggcatttgagtttccttattgacaatcccaaacagtctacagttgttgatattctcttgggaatctctcaagattttgaaattgctggtaatactctgatgccagctttttctgttccacaggctactgacagatcttatgaaaatgcggaatcctctgcatgatctggaatatgtgatttctt

SEQ ID NO: 77210 - DNA, 414 bp, Glycine max
  unsure (1)..(414): unsure at all n locations
tgctaattcattgaaacagacatttacagggtccaaggaattgaaatgaaattaaaacacaatgatttttctttgctagtatcacaattttgatgaacaagtatgtttttgaacattgagatggatcaattaattgtttgctttaaaatctgaaatatgatcaactgatcaagtatgctgttggtatttttgctatctcatgattttgtatttggtgtttctgaattctctttatttgatgcttttgaaaggtaatggtttctgcaaaagaagagccagattgtcccataccacctgctgttgatggtttgttaagggttcataagcaagttatcaatgttgatcgtgaccttgcagatagtgcattggctgctgngcgatcagttgctaccaggcttctagtggcggatactc

SEQ ID NO: 77211 - DNA, 418 bp, Glycine max
gttctttcaatgtggagatattttgttggagatctcgtctttgaagtttctaagatgacttctccctacattaaatgtacagtctctttcttcatagcatttggaaatttggctgatgataccatcaattttgaggcttttccccacaagctggtgcagtttggagagattcacgaaaaagttgtattgaaattttcacaagaggaatttcttacagcttggtcaactcaggtgcgtcctgcaacaactctgttggctgatgggtgtccatatttgtatgcaatggtgcatgatagttcagtgtctacaataccaggtgattttgtcattggtgtcaagttgacaaccataaacaatatgtgtgcatatgggctcaatcctggtatttcaggttctcgtcttttgggcaccattcctc

SEQ ID NO: 77212 - DNA, 405 bp, Glycine max
  unsure (1)..(405): unsure at all n locations
ggaaaattgactttcccccagggcacttcccgaagtgttaagagaatgcctctttctatagggggaggagctggtgcaaagaatgctattctcatgaatatgccaaatgctgttctttcaatgtggagatattttgttggagatctcgtctttgaagtttctaagatgacttctccctacattaaatgtacagtctctttcttcatagcatttggaaatttggctgatgataccatcaattttgaggcttttccccacaagctggtgcagtttggagagattcaggaaaaagttgtattgaaattttcacaagaggaatttcttacagcttggtcaactcaggtgcgtnctgcaacaactctgttggctgatgggtgtccatatttgtatgcaatggtgcatgat

SEQ ID NO: 77213 - DNA, 412 bp, Glycine max
gggcaatgatattctgtgttgcgattatgctagttttgatggtttgattaccaagcaagttatgagcaagatggcagaaatgataaacagtctttgtggtggtgatgaaaaattgatgcgtgaaaggacgcacctgctgttggcttgttgttcaaggatggcaatttgtaagaaagatgtttggagagttgaatgtggaatcccttctggatttccgctcacagttatttgcaatagcatttttaatgagatgctcattagatatagctatgaaaaattactgcgccaggctaaagctccaagtatgtttttacaatccttcaaaaattttgtttctttgtgtgtgtatggtgatgataacttaattagtgttcatgaatatgtcaagccttactttagtggttctaaattg

SEQ ID NO: 77214 - DNA, 407 bp, Glycine max
gtacagagcattttgatgcatgtaagtggacaaaatcagaaccacattcctgggaattgatcttcccaatagaggtatgtggtcctaataatggttttgaaatgtggagttctgagtgggcaaatcaaacttcatggcatttgagtttccttattgacaatcccaaacagtctacagtttttgatattctcttgggaatctctcaagattttgaaattgctggtaatactcttatgccagctttttctgttccacaggctactgccagatcttctgaaaatgcggaatcctctgcatgatctggaatttgtgttttctttcgcttgttcgtttgtttaattcaataaaggaaattaggcatgaccctcttgttgagtatgctctgcctatttgaaaatttccacacc

SEQ ID NO: 77215 - DNA, 282 bp, Glycine max
cttaattagtgttcatgaatatgtcaagccttactttagtggttctaaattgaaaagctttctagctagtcataacatcaccattactgatggtattgacaaaactagtgcaactttgcaatttagaaagttagcagattgtgattttctcaagagaaactttaagcagatgtctaatgttttgtgggtggctcctgaagacaaggcgagtttatggtcacaacttcattatgtttcgtgtaataatctggaaatgcaagagcttatcttggcaatctcgaa

SEQ ID NO: 77216 - DNA, 416 bp, Glycine max
gccaccccaatgcaggatgttcaggttacaattgattggtttatttcctctcaggaatgtgttcccaggacctattgtgttttaaatccacaaaatccttttgtgttaaataggtggatgggaaaattgactttcccccagggcacttcccgaagtgttaagagaatgcctctttctatagggggaggagctggtgcaaagaatgctattctcatgaatatgccaaatgctgttctttcaatgtggagatattttgttggagatctcgtctttgaagtttctaagatgacttctccctacattaaatgtacagtctctttcttcatagcatttggaaatttggctgatgataccatcaattttgaggcttttccccacaagctggtgcagtttggagagattcaggaaaaagttgt

SEQ ID NO: 77217 - DNA, 418 bp, Glycine max
gtctttgtggtggtgatgaaaaattgatgcgtgaaaggacgcacctgctgttggcttgttgttcaaggatggcaatttgtaagaaagatgtttggagagttgaatgtggaatcccttctggatttccgctcacagttatttgcaatagcatttttaatgagatgctcattagatatagctatgaaaaattactgcgccaggctaaagctccaagtatgtttttacaatccttcaaaaattttgtttctttgtgtgtgtatggtgatgataacttaattagtgttcatgaatatgtcaagccttactttagtggttctaaattgaaaagctttctagctagtcataacatcaccattactgatggtattgacaaaactagcgcaactttgcaatttagaaagttagcagattgtgattt

SEQ ID NO: 77218 - DNA, 378 bp, Glycine max
attcctcagtccatttcacagcaaactgtttggaatcaaatggcaacagtgagaacaccattgaattttgattctagcaagcacagcttttgtcagttttctattgaccttctcggtggaggaatcttactggacaaaactggagattggatcacacttatacaaaattctccaattagtaacttgatgagagttgctgcttggaagaaaggctgtttaatggtcaagattgtgatgtctgggaatgcagcaatcaaaaggagtgattgggcctcattggtacaagtgattttaacagacagctacacgcacagagcattttgatgcatgtaagtggacaaaatcagaaccacattcctgggaatagatcttcccaat

SEQ ID NO: 77219 - DNA, 406 bp, Glycine max
ggtacaagtgtttttaacaaacagcaacagtacagagcattttgatgcatgtaagtggacaaaatcagaaccacattcctgggaattgatcttcccaatagaggtatgtggtcctaataatggttttgaaatgtggagttctgagtgggcaaatcaaacttcatggcatttgagtttccttattgacaatcccaaacagtctacagtttttgatattctcttgggaatctctcaagattttgaaattgctggtaatactcttatgccagctttttctgttccacaggctactgccagatcttctgaaaatgcggaatcctctgcatgatctggaatttgtgttttctttcgctcgttcgtttgtttaattcaataaaggaaattaggcatgaccctctttgtgagt

SEQ ID NO: 77220 - DNA, 409 bp, Glycine max
attgtatttgcacagtccagaggaagctcgccaattgagaaggaaagctctctctcgtattgaatggctgcaaaaagctgatgtgcctaccatagcacagattgaagagttccattcgatgcagaggatgatgaatgctcctgattcaaatgataatattgatttactgttgagcattgatttgttgggtttacaaggagcaggtaaagcttttccaaacaaaattgtttttgatgataagcttgtgttggctaacacacaagaattctttgatggaaattttccagtggattcttggttaccaatttttgtgaattgtctttatcctgtaagtcaattaccttcagaagctgtcgttgtaaatgttacatgtggtaatggacacgtgggttacccaccactgcttgga

SEQ ID NO: 77221 - DNA, 319 bp, Glycine max
gaaacacattacagaagaagcttaattattcaactgaggcaagacactagacaagactatttttaagcttctagtttcaatgtttatcttcccaaaaagagactgtggtggtggtacctttggtttgtacataaatggagaaactgaaagtgtctgctaagaatgatcctgctggcagcagtgatcaagcagattcatttccaatattcgaactgggggagagtgaaaatgttggacagaagagcagtagaagagacgaagatgatacaaaagctgtaagattggatggagattctgtaattgctccctctaattctgc

SEQ ID NO: 77222 - DNA, 423 bp, Glycine max
ctcgagccgaatcggctcgagattttcacaagaggaatttcttacagcttggtcaactcaggtgcgtcctgcaacaactctgttggctgatgggtgtccatatttgtatgcaatggtgcatgatagttcagtgtctacaataccaggtgattttgtcattggtgtcaagttgacaaccataaacaatatgtgtgcatatgggctcaatcctggtatttcaggttctcgtcttttgggcaccattcctcagtccatttcacagcaaactgtttggaatcaaatggcaacagtgagaacaccattgaattttgattctagcaagcagagcttttgtcagttttctattgaccttctcggtggaggaatcttagtggacaaaactggagattggatcacacttatacaaaattctccaattagtaa

SEQ ID NO: 77223 - DNA, 156 bp, Glycine max
ggtttagtttcatttttttgaagctcttaaacttaaagcttaagccatgggattctcattctttctggatttatcttaagcccttctggcacgggctgggtaactttatgggttttttttttctgaccgggtcttaattttctttccattattttt

SEQ ID NO: 77224 - DNA, 312 bp, Glycine max
cactaactcgggtttggggcagtggcgtacattggaccacgatatacacgatgtgcacatatgggcttaatactggcatgaccagtgctcggaccatggacaccacccctcatcccatgtcacaccgacccagttctggatatggcggcacatgtgataacaccatggcattctgactgtcgcatgcacagctcctgactgtctcatgggacctgatactgggagcaatgttagtggacacagctgtgtaccggatcacacttataccatagtcttccaatgagtacctacgtgagaggtgcggctagaaag

SEQ ID NO: 77225 - DNA, 244 bp, Glycine max
ggttgaaatacacctattccttccggctcaaatttgtgcacgggaagacagactatgacactaggcactaactgactattccaactagcgcctatttacttaggagagggtgtatggagcgcagactgctagcatactgatgtgcgattaagccggttcttccatattggatgttgaagcctcgagtcaatatttagagtttgctaccatacgtgggcctacgatagatgatcctgctcattct

SEQ ID NO: 77226 - DNA, 412 bp, Glycine max
gaaactttaagcagatgtctaatgttttgtgggtggctcctgaggacaaggcgagtttatggtcacaacttcattatgtttcgtgtaataatctggaaatgcaagaagcttatcttgtcaatctcgtaaatgtgttacgagaattgtatttgcacagtccagaggaagctcgccaattgagaaggaaagctctctctcgtattgaatggctgcaaaaagctgatgtgcctaccatagcacagattgaagagttccattcgatgcagaggatgatgaatgctcctgattcaaatgataatattgatttactgttgagcattgatttgttgggtttacaaggagcaggtaaagcttttccaaacaaaattgtttttgatgataagcttgtgttggctaacacacaagaattctt

SEQ ID NO: 77227 - DNA, 409 bp, Glycine max
gacaaaatcagaaccacattcctgggaattgatcttcccaatagaggtatgtggtcctaataatggttttgaaatgtggagttctgagtgggcaaatcaaacttcatggcatttgagtttccttattgacaatcccaaacagtctacagtttttgatattctcttgggaatctctcaagattttgaaattgctggtaatactcttatgccagctttttctgttccacaggctactgccagatcttctgaaaatgcggaatcctctgcatgatctggaatttgtgttttctttcgcttgttcgtttgtttaattcaataaaggaaattaggcatgaccctcttgttgagtatgctctgcctatttgaaaatttccacacctcttttaattgtcgtaatgatgtgtgaagt

SEQ ID NO: 77228 - DNA, 359 bp, Glycine max
ctgggattgaacactgtttagacttctgaacgtcaacggctatgaggggcttattacattagcagcgatgactcattctctttccatgcaccaacttgctcaaaaaccccttcgtctcaactattaccctgataaccttgaaaacatcatacccttcggatcagaccccactcagtctcaacccataccaccctatccacatacatcccaggctgctgatgctcaggctccgtcacttccttacagctattaccctatgagatagaacacggatgagacctccaccgagtggaacccagttatcccctaatcatctggggaatcaacattccccaccatagacgttgcgaggctcattc

SEQ ID NO: 77229 - DNA, 417 bp, Glycine max
agcattttgatgcatgtaagtggacaaaatcagaaccacattcctgggaattgatcttcccaatagaggtatgtggtcctaataatggttttgaaatgtggagttctgagtgggcaaatcaaacttcatggcatttgagtttccttattgacaatcccaaacagtctacagtttttgatattctcttgggaatctctcaagattttgaaattgctggtaatactcttatgccagctttttctgttccacaggctactgccagatcttctgaaaatgcggaatcctctgcatgatctggaatttgtgttttctttcgcttgttcgtttgtttaattcaataaaggaaattaggcatgaccctcttgttgagtatgctctgcctatttgaaaatttccacacctcttttaattgtcgta

SEQ ID NO: 77230 - DNA, 400 bp, Glycine max
gcccgaccagcgcctctcctccaaccacggcttcggtggtgacagggaacgcgccttcgaggcaggcaagaagggcggatcgacccagcccgatgaggtctacaagccatctgaacacgacggtctccgagaggatggccagcccgaccagcgcaagagctccgagcacggattcggtggtgaccgacaggctgcctccgaggctggccagaagggcggctccaagtaaacaactttccacgagcatcaagtactagggagcagctatcagatcttgcgcaatgtttcgttagctagtcaataccttagtcaaagtcgaatgttcagtgccaccacatactcgccatgattcgctctggcgtagctgaaatgtatcctgcacaattcatcagctttcctc

SEQ ID NO: 77231 - DNA, 362 bp, Glycine max
cggcttccttagtcattagtgaccagagcggtgctgagggggccgctgtgttaacgaataactacatagcaagctccattcatccatttgtcgccgatgaaaggaacatcactcatggacactttatcctttgcataggcaaaagattggaaccacacgggatcatttatgggtggaaagactatgctcttgacattgtaactttgctacgcctggtgttaatcctgcaccatgtgtacccatcaagataacattgagaccttgatgcatgtctttaatgtacaagacgattgtgaaggggaagaggtgataagggctcgcctcaatcttcgataatactgcacgggcataagtagttaaac

SEQ ID NO: 77232 - DNA, 424 bp, Glycine max
cttgttgagagttgctgcttggaagaaaggctgtttaatggtcaagattgtgatgtctgggaatgcagcagtcaaaaggagtgattgggcctcattggtacaagtgtttttaacaaacagcaacagtacagagcattttgatgcatgtaagtggacaaaatcagaaccacattcctgggaattgatcttcccaatagaggtatgtggtcctaataatggttttgaaatgtggagttctgagtgggcaaatcaaacttcatggcatttgagtttccttattgacaatcccaaacagtctacagtttttgatattctcttgggaatctctcaagattttgaaattgctggtaatactcttatgccagctttttctgttccacaggctactgccagatcttctgaaaatgcggaatcctctgcatga

SEQ ID NO: 77233 - DNA, 117 bp, Glycine max
ctatagactagctatgacgtcgcacgcacgcgtacgctcgcatttcggctcgggcgcaacgatattatatttctgcaccatgctaaatttgcaaggttggtttcacaacccgttaaa

SEQ ID NO: 77234 - DNA, 410 bp, Glycine max
gtttggaatcaaatggcaacagtgagaacaccattgaattttgattctagcaagcagagcttttgtcagatttctattgaccttctcggtggaggaatcttagtggacaaaactggagattggatcacacttatacaaaattctccaattagtaacttgttgagagttgctgcttggaagaaaggctgtttaatggtcaagattgtgatgtctgggaatgcagcagtcaaaaggagtgattgggcctcattggtacaagtgtttttaacaaacagcaacagtacagagcattttgatgcatgtaagtggacaaaatcagaaccacattcctgggaattgatcttcccaatagaggtatgtggtcctaataatggttttgaaatgtggagttctgagtgggcaaatcaaac

SEQ ID NO: 77235 - DNA, 384 bp, Glycine max
ggcaacagtgagaacaccattgaattttgattctagcaagcagagcttttgtcagttttctattgaccttctcggtggaggaatcttagtggacaaaactggagattggatcacacttatacaaaattctccaattagtaacttattgagagttgctgcttggaagaaaggctgtttaatggtcaagattgtgatgtctgggaatgcagcagtcaaaaggagtgattgggcctcattggtacaagtgtttttaacaaacagcaacagtacagagcattttgatgcatgtaagtggacaaaatcagaaccacattcctgggaattgatcttcccaatagaggtatgtggtcctaataatggttttgaaatgtggagttctgagtg

SEQ ID NO: 77236 - DNA, 231 bp, Glycine max
cggctcgagctcgtcttcaatcctttcgttattctcttattcatccttctcttctgaataatccagatctctttctgcccttttctccgtcacgcttttcgtgaccggatctgtatggatttgatccagatctacacgccgatggtggttttggccgggtctttcatagatctggtgcgtagaggctcagatctacggtaccgaggtacaacagagaatcgatgacaagaa

SEQ ID NO: 77237 - DNA, 280 bp, Glycine max
ataaaaaaaaaaaattttttatcctaaaaaaaaagcaaaaaacaaagggtgaaaaaatgaaaaaagcaataggataaatatacaacaacaacattgcaaaccatgaaaaaaacctatggcaaaaagtgattgtcatggaagggtcatattacaaaaaaggggggggggcgcccccttttctacctgatcccccggaaaatatttttggccgcggattccacgggtcgtattttttctctttaaaatggggcgatgcaaacctggtttgatgaatgcccct

SEQ ID NO: 77238 - DNA, 193 bp, Glycine max
aaaaattactgcgccaggctaaagctccaagtatgtttttacaatccttcaaaaattttgtttctttgtgtgtgtatggtgatgataacttaattagtgttcatgaatatgtcaagccttactttagtggttctaaattgaaaagctttctagctagtcataacatcaccattactgatggtattgacaaaac

SEQ ID NO: 77239 - DNA, 83 bp, Glycine max
gatgctacagatgctgcaagaagtgcttctgacattgtcctcactgaacctggtctgagtgtcattattagtgcagggcttac

SEQ ID NO: 77240 - DNA, 343 bp, Glycine max
gtgttcccaggacctattgtgttttaaatccacaaaatccttttgtgttaaataggtggatgggaaaattgactttcccccagggcacttcccgaagtgttaagagaatgcctctttctatagggggaggagctggtgcaaagaatgctattctcatgaatatgccaaatgctgttctttcaatgtggagatattttgttggagatctcgtctttgaagcttctaagatgacttctccctacattaaatgtgcagtctctttcttcatagcatttggaaatttgtctgatgataccatcaattttgaggctttttcccacatgctggtgcagattggagagat

SEQ ID NO: 77241 - DNA, 379 bp, Glycine max
  unsure (1)..(379): unsure at all n locations
gagcattttgatgcatgtaagtggacaaaatcagaaccacattcctgggaattgatcttcccaatagaggtatgtggtcctaataatggttttgaaatgtggagttctgagtgggcaaatcaaacttcatggcatttgagtttccttattgacaatcccaaacagtctacagtttttgatattctcttgggaatctctcaagattttgaaattgctggtaatactcttatgccagctttttctgttccacaggctactgccagatcttctgaaaatgcggaatcctctgcatgatctggaatntgtgttttctttcgcttgttcgtttgtttaattcaataaaggaaattaggcatgaccctcttgttgagtatgctct

SEQ ID NO: 77242 - DNA, 363 bp, Glycine max
  unsure (1)..(363): unsure at all n locations
caacaactctgttggctgatgggtgtccatatttgtatgcaatggtgcatgatagttcagtgtctacaataccaggtgattttgnnattggtgtcaagttgacaaccataaacaatatgtgtgcatatgggctcaatcctggtatttcaggttctcgtcttttgggcaccattccttattttatttcacaacaaactgtttggaatcaaatggcaacagtgagaacaccattgaattttgattctagcaagctgggcttttgtcagttttctattgaccttctcggnggaggaatcttagtggacaaaactggagattggatcacacttatacaaaattctccaattagtaacttattgagag

SEQ ID NO: 77243 - DNA, 356 bp, Glycine max
ctaaccatgttctgcattcagatgtggacgttaatctgtttgtgtgggaaggactttactacgcaccgagcaaagcttgcacttatagactcatatgcgatgcaacacctataaacatatggtgatagagagcgagagagagcgtgtcctgatgtgtggttgagaaggaaaaaatggtgcatatcattgcaagataccggtgctcacatgatagatactttatttcctggcgcattgcaggatgattacttgtgttaactccaccacttttcacctcagcttcagttccatttgagtgggaagaggagccagggaagctaatggcttgcactgatattgagagcttctccaaccct

SEQ ID NO: 77244 - DNA, 381 bp, Glycine max
acaaggcagaaagcaagctcatcctagagttttaaaaatggcagcagcctcctccatggctctctcttccccatccttggctggcaaggccgtgaagctgggcccatcagcccccgaagtcgggagggtcagcatgaggaagaccgtcaccaagcaggcctcctccggaagcccatggtacggcccagaccgcgtcaagtacttgggcccattctctggcgagcccccgtcctacctcactggcgagttcccaggtgactacggctgggacactgctgggctttcggccgacccagaaaccttcgccagaaaccgtgagctcgaagtgatccactccaggtgggccatgctcggggccttgggctgcgtcttccccgaact

SEQ ID NO: 77245 - DNA, 260 bp, Glycine max
ggacgcacctgctgttggcttgttgttcaaggatggcaatttgtaagaaagatgtttggagagttgaatgtggaatcccttctggatttccgctcacagttatttgcaatagcatttttaatgagatgctcattagatatagctatgaaaaattactgcgccaggctaaagctccaagtatgtttttacaatccttcaaaaattttgtttttttgggtgtgtatggggatgataacttaattagtgttcatgaatatgtc

SEQ ID NO: 77246 - DNA, 303 bp, Glycine max
ttccttattgacaatcccaaacagtctacagtttttgatattctcttgggaatctctcaagattttgaaattgctggtaatactcttatgccagctttttctgttccacaggctactgccagatcttctgaaaatgcggaatcctctgcatgatctggaatttgtgttttctttcgcttgttcgtttgtttaattcaataaaggaaattaggcatgaccctcttgttgagtatgctctgcctatttgaaaatttccacacctcttttaattgtcgtaatgatgtgtgaagtgtgtgttatttt

SEQ ID NO: 77247 - DNA, 389 bp, Glycine max
ctgggaatgcagcagtcaaaaggagtgattgggcctcattggtacaagtgtttttaacaaacagcaacagtacagagcattttgatgcatgtaagtggacaaaatcagaaccacattcctgggaattgatcttcccaatagaggtatgtggtcctaataatggttttgaaatgtggagttctgagtgggcaaatcaaacttcatggcatttgagtttccttattgacaatgccaaacaggctacagtttttgatattctgtggggaatctctcaagattttgaaattgctggtaatactcttatgccagctttttctgttccacatgctactgccagatctttttaaaatgcggaatcctctgcatgatctggaatttgtgttttcttt

SEQ ID NO: 77248 - DNA, 393 bp, Glycine max
ctcgagccgaaagatttgttggagggaaatttttcctttgatattaaatctcgctctagattggaaaaagtttcctctacaaaagcacaatttgttagtggaaaaaccttcaaatatgatataattggtgctggttcacattcttcagaagattttcctgaaaaggaagatcaagaaaaacccaaaaagattgatgccagattgagacaaagaatagatcctcaatacaatgaggttcaggctcagatggaaacaaatttgtttaaattgtctcttgatgatgttgaaactcctaaaggttccatgttggatctgaaaatttctcaatctaaaattgcacttcccaagaacacagttggaggaaccattctgcgtagtgatctattggcaaat

SEQ ID NO: 77249 - DNA, 387 bp, Glycine max
tgcagattgaaccagacatgaattcaaggtttcagcttttgagtaccactaccaatggtgattttgttcaagggaaagatctcgcaatggttaaagttaatgtagcatgtgctgctgttggcttgacatcaagttacactccaactccattgttggaatctggtttgcaaaaagacagagggttaattgtggagtattttggaaggatgtcttacgttgctcataacgttaatcagccccaagagaaagatttgttggagggaaatttttcctttgatattaaatctcgctctagattggaaaaagtttcctctacaaaagcacaatttgttagtggaaaaaccttcaaatatgatataattggtgctggttcacattcttcagaag

SEQ ID NO: 77250 - DNA, 390 bp, Glycine max
cttaattagtgttcatgaatatgtcaagccttactttagtggttctaaattgaaaagctttctagctagtcataacatcaccattactgatggtattgacaaaactagtgcaactttgcaatttagaaagttagcagattgtgattttctcaagagaaactttaagcagatgtctaatgttttgtgggtggctcctgaggacaaggcgagtttatggtcacaacttcattatgtttcgtgtaataatctggaaatgcaagaagcttatcttgtcaatctcgtaaatgtgttacgagaattgtatttgcacagtccagaggaagctcgccaattgagaaggaaagctctctctcgtattgaatggctgcaaaaagctgatgtgcctaccat

SEQ ID NO: 77251 - DNA, 298 bp, Glycine max
ctcgagccgctgcttgtgaatcatatctggctgcagaagcaggacacgatgctttataaatatcattgcttgatgaacatagcgattgactgtttcaggttgcagaagatctatatcaaccatgttcccgtggagaaattatccgctggccttcagactgtctaaggaagggctataaatagattcgtcctgatgttggtttctaacagtttcatttcgatgatccacataaatactatatctacttttatttagggtgcttctaatcacattgccttacacattggcattccttaag

SEQ ID NO: 77252 - DNA, 395 bp, Glycine max
agagcattttgatgcatgtaagtggacaaaatcagaaccacattcctgggaattgatcttcccaatagaggtatgtggtcctaataatggttttgaaatgtggagttctgagtgggcaaatcaaacttcatggcatttgagtttccttattgacaatcccaaacagtctacagtttttgatattctcttgggaatctctcaagattttgaaattgctggtaatactcttatgccagctttttctgttccacaggctactgccagatcttctgaaaatgcggaatcctctgcatgatctggaatttgtgttttctttcgcttgttcgtttggttaattcaataaaggaaattaggcatgaccctcttgttgagtatgctctgcctatttgaaaatt

SEQ ID NO: 77253 - DNA, 393 bp, Glycine max
gccgaaggcgcaggccccgatctcgccgcgcccgaagcccaaggccttgcgcctgccgatgccggcactccccacggcgtcgccaacactgcggccggtaaggagtcgttcgacgaggtcttcaggcaggacaaggcgtactcgggcgagtgggcgcagacggccgggcgcttcaagccggcgtacaggcctgtgccgcagcggtggaagaacagcgagatcctggcgcgtttgaggtcgcatgtcaagtcgcgtagtgcgggtggtgtgctggaaggcgagggcgtggaggcgaaggcggacgatgcgaatgctgggaagggaatgggttttatgccggagttgaagaattatgatcgtgcttgagggccttggttcggatgatgggtattg

SEQ ID NO: 77254 - DNA, 382 bp, Glycine max
gaaagatgtttggagagttgaatgtggaatcccttctggatttccgctcacagttatttgcaatagcatttttaatgagatgctcattagatatagctatgaaaaattactgcgccaggctaaagctccaagtatgtttttacaatccttcaaaaattttgtttctttgtgtgtgtatggtgatgataacttaattagtgttcatgaatatgtcaagccttactttagtggttctaaattgaaaagctttctagctagtcataacatcaccattactgatggtattgacaaaactagtgcaactttgcaatttagaaagttagcagattgtgattttctcaagagaaactttaagcagatgtctaatgttttgtgggtggct

SEQ ID NO: 77255 - DNA, 66 bp, Glycine max
gaatatactaggttctgtcaaacatcgtaacttggttccgcttttagggttttgcgggggtaaaaa

SEQ ID NO: 77256 - DNA, 361 bp, Glycine max
caaaactggagattggatcacacttatacaaaattctccaattagtaacttgttgagagttgctgcttggaagaaaggctgtttaatggtcaagattgtgatgtctgggaatgcagcagtcaaaaggagtgattgggcctcattggtacaagtgtttttaacaaacagcaacagtacagagcattttgatgcatgtaagtggacaaaatcagaaccacattcctgggaattgatcttcccaatagaggtatgtggtcctaataatggttttgaaatgtggagttctgagtgggcaaatcaaacttcatggcatttgagtttccttattgacaatccaaacagtctacagtttttgatattc

SEQ ID NO: 77257 - DNA, 233 bp, Glycine max
gacagcgagagagagagagacacatagagagagtgatagagttggtgactttctcacatgatgggttcgacaaaggggactggccccacctccgaacgcaaaagcaactcactgcagaggaagatgatgatgaagaatatatcagcaacaacttcaactcacagaaatggtgtgccctcaacctggtactcaggttcaagaagaacacgcatctccaccccacaatgaatcta

SEQ ID NO: 77258 - DNA, 389 bp, Glycine max
gaattgtggaatcctgcttgcacaaaagcaatgactatgtcatttaatccaaacccgtgttctgatgcatggagtttggaatttctgaagcgtactggatttcattgcgatatcatttgtgtcactggatggactgccaccccaatgcaggatgttcaggttacaattgattggtttatttcctctcaggaatgtgttcccaggacctattgtgttttaaatccacaaaatccttttgtgttaaataggtggatgggaaaattgactttcccccagggcacttcccgaagtgttaagagaatgcctctttctatagggggaggagctggtgcaaagaatgctattctcatgaatatgccaaatgctgttctttcaatgtggagatattt

SEQ ID NO: 77259 - DNA, 374 bp, Glycine max
aaagcgtaaactgtcctttctactgcgaaagggatcatcacctccgattcccagatttctgtgtgttcggcgtcaccttgtggttctggaaccaccttctctccgtcgtttctgaccataaaacggtgccatttcccagcaaatggaactgcgtgtccgtgcgacattgtaaatctgagagaggatgattcttacaaagggttttgtaactggtagaatcagtaagtgaaagcttgggttcacgaagaacaatggcaaagctcagagattcggtgagtttgatgatgaaaggagtagcaagttgttatctgagaataaggaagcctcgccggagataatggattcgaatcagcaaagaagaagggtttcagaag

SEQ ID NO: 77260 - DNA, 385 bp, Glycine max
cgagaattgtatttgcacagtccagaggaagctcgccaattgagaaggaaagctctctctcgtattgaatggctgcaaaaagctgatgtgcctaccatagcacagattgaagagttccattcgatgcagaggatgatgaatgctcctgattcaaatgataatattgatttactgttgagcattgatttgttgggtttacaaggagcaggtaaagcttttccaaacaaaattgtttttgatgataagcttgtgttggctaacacacaagaattctttgatggaaattttccagtggattcttggttaccaatttttgtgaattgtctttatcctgtaagtcaattaccttcagaagctgtcgttgtaaatgttacatgtggtagtg

SEQ ID NO: 77261 - DNA, 356 bp, Glycine max
ccattcctcagtccatttcacagcaaactgtttggaatcaaatggcaacagtgagaacaccattgaattttgattctagcaagcagagcttttgtcagttttctattgaccttctcggtggaggaatcttagtggacaaaactggagattggatcacacttatacaaaattctccaattagtaacttgttgagagttgctgcttggaagaaaggctgtttaatggtcaagattgtgatgtctgggaatgcagcagtcaaaaggagtgattgggcctcattggtacaagtgtttttaacaaacagcaacagtacagagcattttgatgcatgtaagtggacaaaatcagaaccacat

SEQ ID NO: 77262 - DNA, 154 bp, Glycine max
ctcacccaatcgttcagggaaaattgtttttgggcggggattcaaagctcatggtgattaaaaaagcagctaagctctgcaatgcatgtggagctttaaatatcattttagtgccaagcctgatgacctaattgtccagctttgttaatccttt

SEQ ID NO: 77263 - DNA, 342 bp, Glycine max
gttctgagtgggcaaatcaaacttcatggcatttgagtttccttattgacaatcccaaacagtctacagtttttgatattctcttgggaatctctcaagattttgaaattgctggtaatactcttatgccagctttttctgttccacaggctactgccagatcttctgaaaatgcggaatcctctgcatgatctggaatttgtgttttctttcgcttgttcgtttgtttaattcaataaaggaaattaggcatgaccctcttgttgagtatgctctgcctatttgaaaatttccacacctcttttaattgtcgtaatgatgtgtgaagtgtgtgttattttt

SEQ ID NO: 77264 - DNA, 348 bp, Glycine max
caaactgtttggaatcaaatggcaacagtgagaacaccattgaattttgattctagcaagcagagcttttgtcagttttctattgaccttctcggtggaggaatcttagtggacaaaactggagagtggatcacacttatacaaaattctccaattagtaacttattgagagttgctgcttggaagaaaggctgtttaatggtcaagattgtgatgtctgggaatgcagcagtcaaaaggagtgattgggcctcattggtacaagtgtttttaacaaacagcaacagtacagagcattttgatgcatgtaagtggacaaaatcagaaccacattcctgggaattgatc

SEQ ID NO: 77265 - DNA, 407 bp, Glycine max
gtgatgataacttaattagtgttcatgaatatgtcaagccttactttagtggttctaaattgaaaagctttctagctagtcataacatcaccattactgatggtattgacaaaactagtgcaactttgcaatttagaaagttagcagattgtgattttctcaagagaaactttaagcagatgtctaatgttttgtgggtggctcctgaggacaaggcgagtttatggtcacaacttcattatgtttcgtgtaataatctggaaatgcaagaagcttatcttgtcaatctcgtaaatgtgttacgagaattgtatttgcacagtccagaggaagctcgccaattgagaaggaaagctctctctcgtattgaatggctgcaaaaagctgatgtgcctaccatagcacag

SEQ ID NO: 77266 - DNA, 388 bp, Glycine max
aaaaccttcaaatatgatataattggtgctggttcacattcttcagaagattttcctgaaaaggaagatcaagaaaaacccaaaaagattgatgccagattgagacaaagaatagatcctcaatacaatgaggttcaggctcagatggaaacaaatttgtttaaattgtctcttgatgatgttgaaactcctaaaggttccatgttggatctgaaaatttctcaatctaaaattgcacttcccaagaacacagttggaggaaccattctgcgtagtgatctattggcaaattttttgacagagggcaattttagatcaagtgttgatttgcagcgcactcatcgtattagaggaatgattaaaatgggtgccacagttggtatttctg

SEQ ID NO: 77267 - DNA, 276 bp, Glycine max
tgcgatatcatttgtgtcactggatggactgccaccccaatgcaggatgttcaggttacaattgattggtttatttcctctcaggaatgtgttcccaggacctattgtgttttaaatccacaaaatccttttgtgttaaataggtggatgggaaaattgactttcccccagggcacttcccgaagtgttaagagaatgcctctttctatagggggaggagctggtgcaaagaatgctattctcatgaatatgccaaatgctgttctttcaatgtgg

SEQ ID NO: 77268 - DNA, 286 bp, Glycine max
cacaaggcagaaagcaagctcatcctagagttttaaaaatggcagcagcctcctccatggctctctcttccccatccttggctggcaaggccgtgaagctgggcccatcagcccccgaagtcgggagggtcagcatgaggaagaccgtcaccaagcaggcctcctccggaagcccatggtacggcccagaccgcgtcaagtacttgggcccattctctggcgagcccccgtcctacctcactggcgagttcccaggtgactacggctgggacactgctgggctttc

SEQ ID NO: 77269 - DNA, 227 bp, Glycine max
ggactgccgttgctcggaggaatgttactcgggggcgccttgttctaggctcctcgtctcatcaagcctgacaacccgtcatattgatatcggaagttgaactcgaacccgttgagatccgcgaccgggtcgtctgtcggggaacgctttaatatgctcttaaaaaattcgaaactgtgaaaagaagaacaaaatgtggatgtagtgatttatgagatgtacagtaa

SEQ ID NO: 77270 - DNA, 396 bp, Glycine max
gtcattggtgtcaagttgacaaccataaacaatatgtgtgcatatgggctcaatcctggtatttcaggttctcgtcttttgggcaccattcctcagtccatttcacagcaaactgtttggaatcaaatggcaacagtgagaacaccattgaattttgattctagcaagcagagcttttgtcagttttctattgaccttctcggtggaggaatcttagtggacaaaactggagattggatcacacttatacaaaattctccaattagtaacttgttgagagttgctgcttggaagaaaggctgtttaatggtcaagattgtgatgtctgggaatgcagcagtcacaaggagtgattgggccctcattggtacaagtgtttttaacaaaacagcacag

SEQ ID NO: 77271 - DNA, 336 bp, Glycine max
ggttcacattcttcagaagattttcctgaaaaggaagatcaagaaaaacccaaaaagattgatgccagattgagacaaagaatagatcctcaatacaatgaggttcaggctcagatggaaacaaatttgtttaaattgtctcttgatgatgttgaaactcctaaaggttccatgttggatctgaaaatttctcaatctaaaattgcacttcccaagaacacagttggaggaaccattctgcgtagtgatctattggcaaattttttgacagagggcaattttagagcaagtgttgattttgcagcgcactcatcgtattagaggaatgattaaaat

SEQ ID NO: 77272 - DNA, 407 bp, Glycine max
  unsure (1)..(407): unsure at all n locations
aattgaagttgaagtcttgcccttctctcttcaactccaaacacaagacatcatcatccatggctgcctccgtctccactgtcggagctgtcaacagagctcttttgaacctgaatgggtctggacctggggtttcagctcccagttcatccttctttgggagcagcttgaagaaggttattggctcaagggtccccaacacaaagatttcctctggaagcttcaagattgttgctgtagaagagaagaaagagattgaagagacccagcagaccgacaaggacagatggaagggtcttgcctatgatatctcagacgaccaacaggacatcacangaggaaagggtttggttgactcccttttccaagctccacaggatgctggaactcactatgctgtcatgagc

SEQ ID NO: 77273 - DNA, 136 bp, Glycine max
aattgaagttgatttcttgcccttctctcttcaactccaaacgcaaggcgatcatcatccatggctgcctccgtctccactgtcggagctgtcaacagagctcttttgaacctgaatgggtctggacctggggttt

SEQ ID NO: 77274 - DNA, 256 bp, Glycine max
tgccaccccaatgcaggatgttcaggttacaattgattggtttatttcctctcaggaatgtgttcccaggacctattgtgttttaaatccacaaaatccttttgtgttaaataggtggatgggaaaattgactttcccccagggcacttcccgaagtgttaagagaatgcctctttctatagggggaggagctggtgcaaagaatgctattctcatgaatatgccaaatgctgttctttcaatggggagatatttt

SEQ ID NO: 77275 - DNA, 366 bp, Glycine max
ggtgattttgtcattggtgtcaagttgacaaccataaacaatatgtgtgcatatgggctcaatcctggtatttcaggttctcgtcttttgggcaccattcctcagtccatttcacagcaaactgtttggaatcaaatggcaacagtgagaacaccattgaattttgattctagcaagcagagcttttgtcagttttctattgaccttctcggtggaggaatcttagtggacaaaactggagattggatcacacttatacaaaattctccaattagtaacttgttgagagttgctgcttggaagaaaggctgtttaatggtcaagattgtgatgtctgggaatgcagcagtcaaaaagagtgattgg

SEQ ID NO: 77276 - DNA, 354 bp, Glycine max
caacaactctgttggctgatgggtgtccatatttgtatgcaatggtgcatgatagttcagtgtctacaataccaggtgattttgtcattggtgtcaagttgacaaccataaacaatatgtgtgcatatgggctcaatcctggtatttcaggttctcgtcttttgggcaccattcctcagtccatttcacagcaaactgtttggaatcaaatggcaacagtgagaacaccattgaattttgattctagcaagcagagcttttgtcagttttctattgaccttctcggtggaggaatcttagtggacaaaactggagattggatcacacttatacaaaattctccaattagttaac

SEQ ID NO: 77277 - DNA, 81 bp, Glycine max
aaaaaaaaaaaaaaaaaaaaaaaaaaaaaaaaaaaaaaaaaaaaaaaaaaaaaaaaaaaaaaaaaaaaaaaaaaaaaaaaa

SEQ ID NO: 77278 - DNA, 300 bp, Glycine max
ccggctacggccaaaccggctacggtcaaactggtagcgaataccaacaaactggacttgctggagctggattagctggaactactactggctacaatgaaaccagcacccttaacaagggctttgtcgaaggacaatccaccacccaaactggtgttattagagaagaagttattgttgaacaacccgtcattgttgaacaagaagttatcagagaaactgcccccgttgaaaacagacacctcttcactgaacaacaacaattcattgaacctagaactttctttgaaagaagtcgat

SEQ ID NO: 77279 - DNA, 332 bp, Glycine max
aatttctgaagcgtactggatttcattgcgatatcatttgtgtcactggatggactgccaccccaatgcaggatgttcaggttacaattgattggtttatttcctctcaggaatgtgttcccaggacctattgtgttttaaatccacaaaatccttttgtgttaaataggtggatgggaaaattgactttcccccagggcacttcccgaagtgttaagagaatgcctctttctatagggggaggagctggtgcaaagaatgctattctcatgaatatgccaaatgctgttctttcaatgtggagatattttgttggagatctcgtctttgaa

SEQ ID NO: 77280 - DNA, 60 bp, Glycine max
aaaaaaaaaaaaaaaataaaaaaaaaaaaaaaaaaaaaaaaaaaaaaaaaaaaaaaaaaa

SEQ ID NO: 77281 - DNA, 310 bp, Glycine max
cggctcgagtgacaaaactagtgcaactttgcaatttagaaagttagcagattgtgattttctcaagagaaactttaagcagatgtctaatgttttgtgggtggctcctgaggacaaggcgagtttatggtcacaacttcattatgtttcgtgtaataatctggaaatgcaagaagcttatcttgtcaatctcgtaaatgtgttacgagaattgtatttgcacagtccagaggaagctcgccaattgagaaggaaagctctctctcgtattgaatggctgcaaaaaagctgatgtgcctaccatagcaca

SEQ ID NO: 77282 - DNA, 406 bp, Glycine max
gggaaaattgactttcccccagggcacttcccgaagtgttaagagaatgcctctttctatagggggaggagctggtgcaaagaatgctattctcatgaatatgccaaatgctgttctttcaatgtggagatattttgttggagatctcgtctttgaagtttctaagatgacttctccctacattaaatgtacagtctctttcttcatagcatttggaaatttggctgatgataccatcaattttgaggcttttccccacaagctggtgcagtttggagagattcaggaaaaagttgtattgaaattttcacaagaggaatttcttacagcttggtcaactcaggtgcgttctgcaacaactctgttggctgatgggtgtccatatttgtatgcaatggtgcatgat

SEQ ID NO: 77283 - DNA, 293 bp, Glycine max
caaaatcagaaccacattcctgggaattgatcttcccaatagaggtatgtggtcctaataatgggtttgaaatgtggagttctgagtgggcaaatcaaacttcatggcatttgagtttccttattgacaatcccaaacagtctacagtttttgatattctcttgggaatctctcaagattttgaaattgctggtaatactcttatgccagctttttctgttccacaggctactgccagatcttctgaaaatgcggaatcctctgcatgatctggaatttgagttttctttcgc

SEQ ID NO: 77284 - DNA, 328 bp, Glycine max
taagaaagatgtttggagagttgaatgtggaatcccttctggatttccgctcacagttatttgcaatagcatttttaatgagatgctcattagatatagctatgaaaaattactgcgccaggctaaagctccaagtatgtttttacaatccttcaaaaattttgtttctttgtgtgtgtatggtgatgataacttaattagtgttcatgaatatgtcaagccttactttagtggttctaaattgaaaagctttctagctagtcataacatcaccattactgatggtattgacaaaactagtgcaactttgcaatttaaaaagttagcc

SEQ ID NO: 77285 - DNA, 406 bp, Glycine max
ctcgagccgaaaatcagaaccacattcctgggaattgatcttcccaatagaggtatgtggtcctaataatggttttgaaatgtggagttctgagtgggcaaatcaaacttcatggcatttgagtttccttattgacaatcccaaacagtctacagtttttgatattctcttgggaatctctcaagattttgaaattgctggtaatactcttatgccagctttttctgttccacaggctactgccagatcttctgaaaatgcggaatcctctgcatgatctggaatttgtgttttctttcgcttgttcgtttggttaattcaataaaggaaattaggcatgaccctcttggtgagtatgctctgcctatttgaaaatttccacacctcttttaattgtcgtaatgat

SEQ ID NO: 77286 - DNA, 347 bp, Glycine max
caactacaaaggttgctgtaggagataagatattgaagtagtgctaagtgcctaacacctgcagtgaacaatggcctctgcatcagcatctcttctcaagtcttcacttgttcttgacaagtctgagtgggtgaagggacaaacacttcgccaaccttctgctgcatcagttgtgagatgcaaccccaccaccccatcaggcctcaccatcagagctggttcctatgctgatgagctcgttaagaccgcgaaaacagtggcttcaccagggaggggtattttggccatggatgagtccaatgctacctgtgggaagcgtttggcttcaattgggctagagaacactg

SEQ ID NO: 77287 - DNA, 331 bp, Glycine max
ggtcaagattgtgatgtctgggaatgcagcagtcaaaaggagtgattgggcctcattggtacaagtgtttttaacaaacagcaacagtacagagcattttgatgcatgtaagtggacaaaatcagaaccacattcctgggaattgatcttcccaatagaggtatgtggtcctaataatggttttgaaatgtggagttctgagtgggcaaatcaaacttcatggcatttgagtttccttattgacaatcccaaacagtctacagtttttgatattctcttgggaatctctcaagattttgaaattgctggtaatactcttatgccagctttt

SEQ ID NO: 77288 - DNA, 354 bp, Glycine max
ggctgatgggtgtccatatttgtatgcaatggtgcatgatagttcagtgtctacaataccaggtgattttgtcattggtgtcaagttgacaaccataaacaatatgtgtgcatatgggctcaatcctggtatttcaggttctcgtcttttgggcaccattcctcagtccatttcacagcaaactgtttggaatcaaatggcaacagtgagaacaccattgaattttgattctagcaagcagagcttttgtcagttttctattgaccttctcggtggaggaatcttagtggacaaaactggagattggatcacacttatacaaaattcttcaattagtaacttattgagagttgc

SEQ ID NO: 77289 - DNA, 404 bp, Glycine max
caccattgaattttgattctagcaagcagagcttttgtcagttttctattgaccttctcggtggaggaatcttagtggacaaaactggagattggatcacacttatacaaaattctccaattagtaacttgttgagagttgctgcttggaagaaaggctgtttaatggtcaagattgtgatgtctgggaatgcagcagtcaaaaggagtgattgggcctcattggtacaagtgtttttaacaaacagcaacagtacagagcattttgatgcatgtaagtggacaaaatcagaaccacattcctgggaattgatcttcccaatagaagtatgtggtcctaataatggttttgaaatgtggagttctgagtgggcaaatcaaacttcatggcatttgagtttcctt

SEQ ID NO: 77290 - DNA, 315 bp, Glycine max
ttgcaattgaagttgaagtcttgcccttctctcttcaactccaaacacaagacatcatcatccatggctgcctccgtctccactgtcggagctgtcaacagagctcttttgaacctgaatgggtctggacctggggtttcagctcccagttcatccttctttgggagcagcttgaagaaggttattggctcaagggtccccaacacaaagatttcctctggaagcttcaagattgttgctgtagaagagaagaaagagattgaagagacccagcagaccgacaaggacagatggaagggtcttgcctatgatatc

SEQ ID NO: 77291 - DNA, 369 bp, Glycine max
aagtgtttttaacaaacagcaacagtacagagcattttgatgcatgtaagtggacaaaatcagaaccacattcctgggaattgatcttcccaatagaggtatgtggtcctaataatggttttgaaatgtggagttctgagtgggcaaatcaaacttcatggcatttgagtttccttattgacaatcccaaacagtctacagtttttgatattctcttgggaatctctcaagattttgaaattgctggtaatactcttatgccagctttttctgttccacaggctactgccagatcttctgaaaatgcggaatcctctgcatgatctggaatttgtgttttctttcgcttggttcgttggttaattcaat

SEQ ID NO: 77292 - DNA, 368 bp, Glycine max
caagctggtgcagtttggagagattcaggaaaaagttgtattgaaattttcacaagaggaatttcttacagcttggtcaattaaggtccgtcctgcaccacctttgtggctgatgggtgtccatatttgtatgccatggtgcatgatagttcaatgtctacaataccaggtgattttgtcattggtgtcaagttgacaaccataaacaatatgtgtgcatatgggctcaaacctggtatttcaggttctcgtcttttgggcaccattcctcagtccatttcacagcaaactgtttggaatcaaatggcaacagtgagaacaccattgaattttgattctagcaagcagagcttttgtcagttttctat

SEQ ID NO: 77293 - DNA, 351 bp, Glycine max
ggaaaaataaaaaagcaaaaaaaacccgggggcggccgccggctagtgacctggaggcccccgaaattaatcccgtgccgggccctgtaggcgctcgacctttccatatacagacgctgggggcggccccgaattattatcggctcaaccctggacaatgatttacgacccgatcccttaacggttccacccttctttttaggggggagtgataaagcgtacagccaggggggccaaatgagtgccctagctcaaattgttaaccttgccctacctgccccattaacaaaccggaaacctttacggggaaaggcggtgtgcgcatagggcgccgcgccggaaaattttttt

SEQ ID NO: 77294 - DNA, 285 bp, Glycine max
gcttttccaaacaaaattgtttttgatgataagcttgtgttggctaacacacaagaattctttgatggaaattttccagtggattcttggttaccaatttttgtgaattgtctttatcctgtaagtcaattaccttcagaagctgtcgttgtaaatgttacatgtggtagtggacgtggtggtttacccaccactgcttggattagttctgcagttaacaatcgctcctcagatatcaacaaaaggattcgcacagcacttgggaaaggtaagaaaaatggtttt

SEQ ID NO: 77295 - DNA, 151 bp, Glycine max
attctagcaagcagagcttttgacaggtttctattgaccttctcggaggaggaatcttagtggacaaaactggagattggatcacacttatacaaaaagctccactgactaacttagtgacaggagctgcttgtaagataggcagaaaaat

SEQ ID NO: 77296 - DNA, 109 bp, Glycine max
aaaaagactatatatatacaccagaaatggagaaccatcatgagggccttatatagttaggaagcaacccttttgggaccaaaatcctaaaagagcattacgcaacgct

SEQ ID NO: 77297 - DNA, 206 bp, Glycine max
tttggtgggggttttttgtgtgggagattaaaaatacattttaaataaaatacagactaaaatactaattatacgtatattagaactgggggggctcaaggtattttattttcccaaaaaaaaaaaaaataaaaaaaaaaaaaaaaaatataataattaataaatatttattgggggggggggggggggttgaagaaccttggggg

SEQ ID NO: 77298 - DNA, 287 bp, Glycine max
  unsure (1)..(287): unsure at all n locations
ccaaaaactaatgcccaaatccaacgggcccctccaaaacaacttgggcctggcacttgcaaccaatccacaccaaacaacatgaccgacaacacccccggaatggctgacaagctcggcgcanacaaagacaccaatgctattcctagcccgaaccctagtgtgatcagctcagcgggtgctattcgaaagcagttcaaccccgacggcgcaattggccagattggcgagaaggtccgaggaccattcaacaaggacggtgtcattggaagccagttcgatgcgag

SEQ ID NO: 77299 - DNA, 273 bp, Glycine max
gtttttgatattctcttgggaatctctcaagattttgaaattgctggtaatactcttatgccagctttttctgttccacaggctactgccagatcttctgaaaatgcggaatcctctgcatgatctggaatttgtgttttctttcgcttgttcgtttgtttaattcaataaaggaaattaggcatgaccctcttgttgagtatgctctgcctatttgaaaatttccacacctcttttaattgtcgtaatgatgtgtgaagtgtgtgttatttt

SEQ ID NO: 77300 - DNA, 248 bp, Glycine max
ctgaatcttacttacaactacggacgcaaagaccctatgcttcaggggtgtctacgcatccattgtgagggctctcaacagagcgctgttgaaccccaatgcttatggagctggagctatacttttaacctgagcctgttttgtgaccaggttgaagaaggctattggctattggcttcccaacggcatagtgaccagggtgggctgtaccattgttgccgtggagatgtcttacgatcatgattgga

SEQ ID NO: 77301 - DNA, 355 bp, Glycine max
agctggtgcaaagaatgctattctcatgaatatgccaaatgctgttctttcaatgtggagatattttgttggagatctcgtctttgaagtttctaagatgacttctccctacattaaatgtacagtctctttcttcatagcatttggaaatttggctgatgataccatcaattttgaggcttttccccacaagctggtgcagtttggagagattcaggaaaaagttgtattgaaattttcacaagaggaatttcttacagcttggtcaactcaggtgcgtcctgcaacaactctgttggctgatgggtgtccatatttgtatgcaatggtgcatgatagttcagtgtctacaata

SEQ ID NO: 77302 - DNA, 400 bp, Glycine max
gagcttttgtcagttttctattgaccttctcggtggaggaatcttagtggacaaaactggagattggatcacacttatacaaaattctccaattagtaacttgttgagagttgctgcttggaagaaaggctgtttaatggtcaagattgtgatgtctgggaatgcagcagtcaaaaggagtgattgggcctcattggtacaagtgtttttaacaaacagcaacagtacagagcattttgatgcatgtaagtggacaaaatcagaaccacattcctgggaattgatcttcccaataaaagtatgtggtcctaataatggttttgaaatgtggagttctgagtgggcaaatcaaacttcatggcatttgagtttccttattgacaatcccaaacagtctaca

SEQ ID NO: 77303 - DNA, 121 bp, Glycine max
cccttcacaccattctcacaaaacaactttcaaactctgagaaagaatggctgccaacacattgatgagtactgctatctcaaccttcccatctctcctttcttcctcaaaatccagattt

SEQ ID NO: 77304 - DNA, 384 bp, Glycine max
cgtcttttgggcaccattcctcagtccatttcacagcaaactgtttggaatcaaatggcaacagtgagaacaccattgaattttgattctagcaagcagagcttttgtcagttttctattgaccttctcggtggaggaatcttaatggacaaaactggagattggatcacacttatacaaaattctccaattagtaacttgttgagagttgctgcttggaagaaaggctgtttaatggtcaagattgtgatgtctgggaatgcagcagtcaaaaggagtgattgggcctcattggtacaagtgtttttaacaaacagcaacagtacagagcattttgatgcatgtaagtggacaaaatcagaaccacattcctgggaattgatc

SEQ ID NO: 77305 - DNA, 292 bp, Glycine max
aactcggcatgagcctcgagacagattataggtgcctaacaaaaagcgacactatcaagtgaagcagttacgtttgagcacagcggaaattaaaggcgctacgggtatgccagatggcatagaagattctgaagaatctctaggccagtatatgtgcgcacctgcagtaaggggggctgctttatcagcatggcctttggagaaatttggaacataccggtatttattgtctgggccgaatgtgggaaaagccctctatgaatggatgtatgagaaggaacgctcttactac

SEQ ID NO: 77306 - DNA, 324 bp, Glycine max
gtttaatcttgtggtccgtcaaaagtttttaaattttgtgaggttcattatgaagaaaagggacaaacttagttgtcaagttggaatcaacccatactccatggaatggactggtttggccaatagattactgagtaagggcaatgatattctgtgttgcgattatgctagttttgatggtttgattaccaagcaagttatgagcaagatggcagaaatgataaacagtctttgtggtggtgatgaaaaattgatgcgtgaaaagacgcacctgctgttggcttgttgttcaaggatggcaatttgtaagaaagatgtttggag

SEQ ID NO: 77307 - DNA, 408 bp, Glycine max
gaaattttcacaagaggaatttcttacagcttggtcaactcaggtgcgtcctgcaacaactctgttggctgatgggtgtccatatttgtatgcaatggtgcatgatagttcagtgtctacaataccaggtgattttgtcattggtgtcaagttgacaaccataaacaatatgtgtgcatatgggctcaatcctggtatttcaggttctcgtcttttgggcaccattcctcagtccatttcacagcaaactgtttggaatcaaatggcaacagtgagaacaccattgaattttgattctagcaagcagagcttttgtcagttttctattgaccttctcggtggaggaatcttattggacaaaactggagattggatcacacttatacaaaattctccaattagtaactt

SEQ ID NO: 77308 - DNA, 327 bp, Glycine max
ggcgcatccttaggcacaaaagatatttttgtatccatcccatgccatccaaatttgaaggcgtgtttgttgtgtgtggcgtttaaggtttctcgatcttcgtcaataatcgtcgtctccatttcagtcggggttttagtcttctcttccatacactaatacagggaggcggactctgagctcaactcatggctgttgctgcaatcgcgctgaaatgcggacccttactcacagtcttcgcggcgttattgctcgattgaaacgggacatcgatcctgtcacactctcaatatatatatatatatatatatatatatatatatatat

SEQ ID NO: 77309 - DNA, 168 bp, Glycine max
agtttctccaaattcctttccttcttccaaatccctttactgtcacgtgaaatctaacaccgaccgtgtacatagattatgtaatccaattaaatgatcgtctgcgaacaaataacatcagtttacttacagaaagcgcttatcaatggctttacacgaccatcttcc

SEQ ID NO: 77310 - DNA, 302 bp, Glycine max
caacaatcacaacatttagctgccggctcagcttttatgtcgcaacaacaaatgcgacaacggccatcgtcgtcctgtcagtttggttcgatggtgacggtgccaccacaagctgctttacaacgcgtgacaccacctgtttcgtgcaattcttcttgcacaacaaccaatgttttttacccaggcgcgatttcttcatcaacaacaatgtcgacgacgacttcgacaacatcttctgcagcagcagcagcagcggcagcagttgcacttgcgacaaatgcaaggatgaaaggagatgtgat

SEQ ID NO: 77311 - DNA, 245 bp, Glycine max
cacagacgtttgctcgaaagccactgtggtcgatataacctcaggtgcacacttggcagttgctgtggacgctactattgcattgacaaacggggtgtttgtggttcaggaggcgaaccactagacatgaacgcacggctcacacagcgggcgcaggctgaggcactctcattttggtaaaaatgcggcacatgcatacaattttgatgtaactcgttcgtgcttattgaatgataggaactata

SEQ ID NO: 77312 - DNA, 194 bp, Glycine max
ttggtattatcctttacaaccttctccccgaccacccacaccagccttaccaaatactctcagaaactattttcctccctacaatgacaccaactcccacaaccaaccaatatcaacaaatcataattaaataaaataaaattcttaaccaaaggaaaataagactaatatttctgggaacattttgtaataaa

SEQ ID NO: 77313 - DNA, 255 bp, Glycine max
tgcaaaaagctgatgtgcctaccatagcacagattgaagagttccattcaatgcagaggatgatgaatgctcctgattcaaatgataatattgatttactgctgagcattgatttgttgggtttacaaggagcaagtaaagcttttccaaacaaaattgtttttgatgataagcttgtgttggctaacacacaagaattctttggtggaaattttccagtggattcttggttaccaaattttgggaaatggcttt

SEQ ID NO: 77314 - DNA, 222 bp, Glycine max
aaaagacgcaaattttacttacattagcggcgcttcacactgtggacacgaggtgaacgtcacggaggagcaagaacacccccaatggacagaagccacagtgttacagctaagatattctgccggcaaagaggcacacgctcacatggcaccaaagtggaataaaatgcctgccggtgaagcaggcactgcgaaaggatcaaaattgggtcccaaaataca

SEQ ID NO: 77315 - DNA, 408 bp, Glycine max
agcatttggaaatttggctgatgataccatcaattttgaggcttttccccacaagctggtgcagtttggagagattcaggaaaaagttgtattgaaattttcacaagaggaatttcttacagcttggtcaactcaggtgcgtcctgcaacaactctgttggctgatgggtgtccatatttgtatgcaatggtgcatgatagttcagtgtctacaataccaggtgattttgtcattggtgtcaagttgacaaccataaacaatatgtgtgcatatgggctcaatcctggtatttcaggttctcgtcttttgggcaccattcctcagtccatttcacagcaaactgtttggaatcaaatggcaacagtgagaacaccattgaattttgattctagcaagcagagcttttg

SEQ ID NO: 77316 - DNA, 296 bp, Glycine max
aaaaccttcaaatatgatataattggtgctggttcacattcttcagaagattttcctgaaaaggaagatcaagaaaaacccaaaaagattgatgccagattgagacaaagaatagatcctcaatacaatgaggttcaggctcagatggaaacaaatttgtttaaattgtctcttgatgatgttgaaactcctaaaggttccatgttggatctgaaaatttctcaatctaaaattgcacttcccaagaacacagttggaggaaccattctgcgtagtgatctattggcaaaattttt

SEQ ID NO: 77317 - DNA, 297 bp, Glycine max
ggattaggcaaaatgcagggatacagtatttgcataagggaaattgtatgtgaagtaagggctgcttttgtaagtatagaaaggcaatatctcaagagtttgtaaaagggttggatatatactcagtgattcatttgctccattttacgattttccatgtcgttcgcgtcatcattctcgatgctccggcaccgcgcgggggcttacggggcgcctcttcttcttcttcgccgctttcgctgcctacaaattgccggcagacaccaacaacaaaaccctaacaaacaagccccccct

SEQ ID NO: 77318 - DNA, 379 bp, Glycine max
cttaattagtgttcatgaatatgtcaagccttactttagtggttctaaattgaaaagctttctagctagtcataacatcaccattactgatggtattgacaaaactagtgcaactttgcaatttagaaagttagcagattgtgattttctcaagagaaactttaagcagatgtctaatgttttgtgggtggctcctgaggacaaggcgagtttatggtcacaacttcattatgtttcgtgtaataatctggaaatgcaagaagcttatcttgtcaacctcgtaaatgtgttacgagaattgtatttgcacagtccagaggaagctcgccaattgagaaggaaagctctctctcgtattgaatggctgcaaaaagctgat

SEQ ID NO: 77319 - DNA, 361 bp, Glycine max
gtttttacaatccttcaaaaattttgtttctttgtgtgtgtatggtgatgataacttaattagtgttcatgaatatgtcaagccttactttagtggttctaaattgaaaagctttctagctagtcataacatcaccattactgatggtattgacaaaactagtgcaactttgcaatttagaaagttagcagattgtgattttctcaagagaaactttaagcagatgtctaatgttttgtgggtggctcctgaggacaaggcgagtttatggtcacaacttcattatgtttcgtgtaataatctggaaatgcaagaagcttatcttgtcaatctcgtaaatgtgttacgagaattgtatttg

SEQ ID NO: 77320 - DNA, 319 bp, Glycine max
  unsure (1)..(319): unsure at all n locations
gtcacaacttcattatgtttcgtgtaataatctggaaatgcaagaagcttatcttgtcaatctcgtaaatgtgttacgagaattgtatttgcacagtccagaggaagctcgccaattgagaaggaaagctctctctcgtattgaatggctgcaaaaagctgatgtgcctaccatagcacagattgaagagttccattcaatgcagaggatgatgaatgctcctgattcaaatgataatattgatttactgttgagcattgatttgttgggtttacaaggagcaggtnaagcttttccaaacaaaattgtttttgatgat

SEQ ID NO: 77321 - DNA, 309 bp, Glycine max
ctaaagccggatttctctctagcactacccgaattgtctccagcgcaacacgtaacgctctttctgacttgtgcatgcatatactctgtggcccggaaagatccttctatcttgtgaacgcagttgataattgagttggggacaggccatgatcttataaggcaaaacaaaaatcaagtgcgtgaaggctgatggccacttatggcaatacaccaccgaagggcatttaggcacgtggccacgaattgaaaaatctcgacgaatgtacttcagcaagcattcaaggagtggaaaaagatgaagaaattt

SEQ ID NO: 77322 - DNA, 388 bp, Glycine max
acaaaatcagaaccacattcctgggaattgatcttcccaatagaggtatgtggtcctaataatggttttgaaatgtggagttctgagtgggcaaatcaaacttcatggcatttgagtttccttattgacaatcccaaacagtctacagtttttgatattctcttgggaatctctcaagattttgaaattgctggtaatactcttatgccagctttttctgttccacaggctactgccagatcttctgaaaatgcggaatcctctgcatgatctggaatttgtgttttctttcgcttgttcgtttgtttaattcaataaaagaaattaggcatgaccctcttgttgagtatgctctgcctatatgaaaatttccacacctcttttaatt

SEQ ID NO: 77323 - DNA, 354 bp, Glycine max
ctcgtgccgcaaaaaaaaaaaaaaaaaaaaaaaaaaaaaaaaaaggaaaaaaaaaaaaaaaaaaacaaaaaaaaaaaaaaaataaaaaaaaaaaaataaaaatagaaaaaaaaaaagaagaaagaaaaaaaaaaaaaaaaaaagggggcggcccgggatattattattcatcatcccgaaaaaaaatttacagagacggccgactgggggctcaatctggcatgagaacaaatggaccaaactctgggggacgacatgaaacaatcggcttctcgaaaaaagaagtggccggtgaaacatgcgcaaatataagagtcggagatccaaaatgtaaaagccgggggcccagagagg

SEQ ID NO: 77324 - DNA, 256 bp, Glycine max
caaatggcaacagtgagaacaccattgaattttgattctagcaagcagagcttttgtcagttttctattgaccttctcggtggaggaatcttagtggacaaaactggagattggatcacacttatacaaaattctccaattagtaacttgttgagagttgctgcttggaagaaaggctgtttaatggtcaagattgtgatgtctgggaatgcagcagtcaaaaggagtgattgggcctcattggtacaagtgtttt

SEQ ID NO: 77325 - DNA, 356 bp, Glycine max
tgttttgtgggtggctcctgaggacaaggcgagtttatggtcacaacttcattatgtttcgtgtaataatctggaaatgcaagaagcttatcttgtcaatctcgtaaatgtgttacgagaattgtatttgcacagtccagaggaagctcgccaattgagaaggaaagctctctctcgtattgaatggctgcaaaaagctgatgtgcctaccatagcacagattgaagagttccattcaatgcagaggatgatgaatgctcctgattcaaatgataatattgatttactgttgagcattgatttgttgggtttacaaggagcaagtaaagcttttccaaacaaaattgtttttgatg

SEQ ID NO: 77326 - DNA, 264 bp, Glycine max
ggtgattttgtcattggtgtcaagttgacaaccataaacaatatgtgtgcatatgggctcaatcctggtatttcaggttctcgtcttttgggcaccattcctcagtccatttcacagcaaactgtttggaatcaaatggcaacagtgagaacaccattgaattttgattctagcaagcagagcttttgtcagttttctattgaccttctcggtggaggaatcttagtggacaaaactggagattggatcacacttatacaaaat

SEQ ID NO: 77327 - DNA, 328 bp, Glycine max
tgatagttcagtgtctacaataccaggtgattttgtcattggtgtcaagttgacaaccataaacaatatgtgtgcatatgggctcaatcctggtatttcaggttctcgtcttttgggcaccattcctcagtccatttcacagcaaactgtttggaatcaaatggcaacagtgagaacaccattgaattttgattctagcaagcagagcttttgtcagttttctattgaccttctcggtggaggaatcttagtggacaaaactggagattggatcacacttatacaaaattctccaattaatgacttgttgagagttgcttcttggaag

SEQ ID NO: 77328 - DNA, 348 bp, Glycine max
ctcgagccgaatcggtcggaaaaaaaaaaaaaaaaaaaaaaaaaaaaaaagagaaaaaaaaaaaaaaaaaaaaaaacaaaaaaagaaaagagctaaaaaaaaaacaaagaataccatgggcccagacaaaagaaagtgaaacaaatgagaaagaaaaagtctcaatcaaaatgggggggcgccgaaaaagggagggcctaccacaggaaaaaaatgaagagggccattcaaggcagaagaagattaatgctattgagtgaaatgataatattgaagtaaaccagggcaaacgattttttggggtgaaaaggataatggggagcaaatccaaaaaaaaaagaaccggtg

SEQ ID NO: 77329 - DNA, 389 bp, Glycine max
gagagattcaggaaaaagttgtattgaaattttcacaagaggaatttcttacagcttggtcaactcaggtgcgtcctgcaacaactctgttggctgatgggtgtccatatttgtatgcaatggtgcatgatagttcagtgtctacaataccaggtgattttgtcattggtgtcaagttgacaaccataaacaatatgtgtgcatatgggctcaatcctggtatttcaggttctcgtcttttgggcaccattcctcagtccatttcacagcaaactgtttggaatcaaatggcaacagtgagaacaccattgaattttgattctagcaagcagagcttttgtcagttttctattgaccttctcggtggaggaatcttagtggacaaaact

SEQ ID NO: 77330 - DNA, 391 bp, Glycine max
  unsure (1)..(391): unsure at all n locations
atcaacccatactccatggaatggactggtttggccaataaattactgagtaagggcaatgatattctgtgttgcgattatgctagttttgatggtttgattaccaagcaagttatgagcaagatggcagaaatgataaacagtctttgtggtggtgatgaaaaattgatgcgtgaaaggacgcacctgctgttggcttgttgttcaaggatggcaatttgtaagaaagatgtttggagagttgaatgtggaatcccttctggatttccgctcacagttatttgcaatagcatttttaatgagatgctcattagatatagctatgaaaaattactgcgccaggctaaagctccaagtatgtttttacaatccttcaaaaattttgnttctt

SEQ ID NO: 77331 - DNA, 387 bp, Glycine max
cttattgagagttgctgcttggaagaaaggctgtttaatggtcaagattgtgatgtctgggaatgcagcagtcaaaaggagtgattgggcctcattggtacaagtgtttttaacaaacagcaacagtacagagcattttgatgcatgtaagtggacaaaatcagaaccacattcctgggaattgatcttcccaatagaggtatgtggtcctaataatggttttgaaatgtggagttctgagtgggcaaatcaaacttcatggcatttgagtttccttattgacaatcccaaacagtctacagtttttgatattctcttgggaatctctcaagattttgaaattgctggtaatactcttatgccagctttttctgttacacaggctac

SEQ ID NO: 77332 - DNA, 359 bp, Glycine max
gtttggagagattcaggaaaaagttgtattgaaattttcacaagaggaatttcttacagcttggtcaactcaggtgcgtcctgcaacaactctgttggctgatgggtgtccatatttgtatgcaatggtgcatgatagttcagtgtctacaataccaggtgattttgtcattggtgtcaagttgacaaccataaacaatatgtgtgcatatgggctcaatcctggtatttcaggttctcgtcttttgggcaccattcctcagtccatttcacagcaaactgtttggaatcaaatggcaacagtgagaacaccattgaattttgattctagcaagcagagcttttgtcagttttctattg

SEQ ID NO: 77333 - DNA, 396 bp, Glycine max
aaaaagttgtattgaaattttcacaagaggaatttcttacagcttggtcaactcaggtgcgtcctgcaacaactctgttggctgatgggtgtccatatttgtatgcaatggtgcatgatagttcagtgtctacaataccaggtgattttgtcattggtgtcaagttgacaaccataaacaatatgtgtgcatatgggctcaatcctggtatttcaggttctcgtcttttgggcaccattcctcagtccatttcacagcaaactgtttggaatcaaatggcaacagtgagaacaccattgaattttgattctagcaagcagagcttttgtcagttttctattgaccttctcggtggaagaatcttaatggacaaaactggagaatggatcacactta

SEQ ID NO: 77334 - DNA, 178 bp, Glycine max
cctcaatacaatgaggttcatgctcagatggaaacaaatttgcttaaattgtctcttgatgatgttgaaactcctaaaggttccatgttggatctgaaaatttttcaatgtaaaattgcacttcccaagaacacagttggaggaaccattctgcgtagtgatctatggccaaattttt

SEQ ID NO: 77335 - DNA, 366 bp, Glycine max
gcctctggcctcagctcggccgtctcatcggctgcatcaggcgcaacaagcgagggatccagcctcgcatccgccgtctcatctggcagcatcaccggctcagcagcctctgcctcggcttcttccatcatcgccggagccaactcgaccgtcgcgtctcgtctgtcgtcgctcaactctgagctgtccaccatcgcctccaccgctacctccctccgatccagcatctcggccgagatctcgcgtgccagcgcctcgttgtcgtctgtccaagctcaggtcacctctgccgtagactctgcgggcgcttctgcttcagcctcggccactggtgagggtgccgctatccagtacgctgcccccgct

SEQ ID NO: 77336 - DNA, 343 bp, Glycine max
gaagaacaagtagttgagaactaagaaggagaagcaaatggcttcctcaatgatctcttccccagctgttaccactgtcaaccgtgccggtgccggcatggttgctccattcactggcctcaagtccatggctggcttccccaccagaaagaccaacaatgacattacctccattgctagcaacggtggaagagtgcaatgcatgctgtggccaccacttggcaagaagaagcttgagactctttcctacctgccagaccttgatgatgcacaattggcaaaagaagtagaataccttcttaggaagggatggattccttgcttggaaatcgagttggagcac

SEQ ID NO: 77337 - DNA, 399 bp, Glycine max
gcattttgatgcatgtaagtggacaaaatcagaaccacattcctgggaattgatcttcccaatagaggtatgtggtcctaataatggttttgaaatgtggagttctgagtgggcaaatcaaacttcatggcatttgagtttccttattgacaatcccaaacagtctacagtttttgatattctcttgggaatctctcaagattttgaaattgctggtaatactcttatgccagctttttctgttccacaggctactgccagatcttctgaaaatgcggaatcctctgcatgatctggaatttgtgttttctttcgcttgttcgtttgtttaattcaataaaggaaattaggcatgaccctcttgttgagtatgctctgcctatttgaaaatttccacac

SEQ ID NO: 77338 - DNA, 399 bp, Glycine max
atggcaacagtgagaacaccattgaattttgattctagcaagcagagcttttgtcagttttctattgaccttctcggtggaggaatcttagtggacaaaactggagattggatcacacttatacaaaattctccaattagtaacttgttgagagttgctgcttggaagaaaggctgtttaatggtcaagattgtgatgtctgggaatgcagcagtcaaaaggagtgattgggcctcattggtacaagtgtttttaacaaacagcaacagtacagagcattttgatgcatgtaagtggacaaaatcagaaccacattcctgggaattgatcttcccaatagaagtatgtggtcctaataatggttttgaaatgtggagttctgagtgggcaaatcaaact

SEQ ID NO: 77339 - DNA, 170 bp, Glycine max
gtcacaacttcattatgtttcgcgtaataatctggaaatgcaagaagcttatcttggcaatctcgtaaatgtgttacgagaattgtatttgcacagtccagaggaagctcgccaattgagaaggaaagctctctctcgtattggatggctggaaaaagctgatgtgccta

SEQ ID NO: 77340 - DNA, 324 bp, Glycine max
  unsure (1)..(324): unsure at all n locations
tctaattagattggttgatcctaacttgttgccttttgtgagttccatttcagccttactgtactattcttatctgcnnaaaaaaaaaaaaaaaaaaaaaaaaaaaaaaaaaaaaaaaaaaaaaaaaaaaaaaaaaaaaaaaaaaaaaaaaaaaaaaaaaaaaaaaaaaaaaaatggggcggcccccaactaataagctcgtcaacccggaaataaaatccggaacggtacctggaagcgtaccaactttccctaaaaggaatccaattaaaacttggcgaaaaaaaggaaaaaactgtttcctggggaaaaatgttatcccct

SEQ ID NO: 77341 - DNA, 395 bp, Glycine max
caagtagttgagaactaagaaggagaagcaaatggcttcctcaatgatctcttccccagctgttaccactgtcaaccgtgccggtgccggcatggttgctccattcactggcctcaagtccatggctggcttccccaccaggaagaccaacaatgacattacctccattgctagcaacggtggaagagtgcaatgcatgcaggtgtggccaccagttggcaagaagaagtttgagactctttcctacctgccagaccttgatgatgcacaattggcaaaagaagtagaataccttcttaggaagggatggattccttgcttggaattcgagttggagcacggtttcgtgtaccgtgagcacaacaagtcaccaggatactacgatggacgctact

SEQ ID NO: 77342 - DNA, 138 bp, Glycine max
agagcttgactccatgcacgcgtcgtagctcgattcgtcgggcaaatgttagcccacagccatgccaacatgctatatcactgtgaaatgcgtcaatggcccatcactgctagtgagtcgatttaatctgactaacag

SEQ ID NO: 77343 - DNA, 147 bp, Glycine max
aaactgtttgcctttttaccccgaaataaatttcggaccggttcctgtaggcgtaccaaatggggcgtcctccgaatttttttttttcctgcccggaaattaattcatagccggttcctgggggggatcggttttcccttatagtgg

SEQ ID NO: 77344 - DNA, 325 bp, Glycine max
  unsure (1)..(325): unsure at all n locations
attggtgtcaagttggcaaccattaaccatatgtgtgcatatgggctcaatcctggttttaagttctcgtctttgggcccattctagtcatttacgcaactgttggataaatggcacagggacacatngatttgattctacagcaactttgtagtttctatgacctttcgggagaattagggacaaactggagatgatcacactatacaaaatttcaatagtactattgaagtgctgctgaagaaagtgttaaggcaagatggatgttggaatgcacagcaaaaggagtgatgggcctatgtacagtgtttaacaacagacagtc

SEQ ID NO: 77345 - DNA, 96 bp, Glycine max
ggggaatttggctgatgataccatcaattttgagggttttccccccaaacttgtgccggttggggaggttcaagaaaaaagttgcttggaattttc

SEQ ID NO: 77346 - DNA, 350 bp, Glycine max
tgactgccatgcacgcgagcttgaaccctgtataggggccgggctacatttttttattttttttaaaggtaggggataacgcggcggtctacatttattattggtcccagtctagaaaaaactgcatagaacacaaacgtagtgcttgctcatatagattgtctcgctaatgctgaacatataccaatgtactggctggaccgcagcctatttatctatggaatcatagactacttgccatcgattaaagatgccgtaagcgtgaatgatgtctaacctcaaattctacattctcccgctatctataccacacactgagtcattcccactgtgtttataattggaacatt

SEQ ID NO: 77347 - DNA, 304 bp, Glycine max
ctataactcatgggaataaatgggcggccttgataaggcacagttttacaatattaagatcctacattgaagctgagaactttcagacgtgtcggggggggaacgtacagatgaaaaaactgcacatggactggagcttatccaagttggaaaattagatcaatgatagaacttgctacctgtgagaaacatatgggtactgttcaaccccgtaaagaaggacatcccgacataaatacagagaagttgtgcgcctgtgttatacgtgttgaaaaacatgcaggacattgattcacacacaaaa

SEQ ID NO: 77348 - DNA, 69 bp, Glycine max
gtctagccgcttccgccccgaatatcgcaagctttattttcatcgacctggatgccaaagctttctaac

SEQ ID NO: 77349 - DNA, 275 bp, Glycine max
tagtttgccaagtgaactgctgtatggagaacatccagccaggggtgttactgttcacttaaacatgactttcgtcttgctgaacagtggaaaatgaggggaaatcctgctgtccaaagaagcagaggaaaggggccggttcacacacccagacgttgagcttttcattctggatataagctgtctgtctggggagagaaaggctcctggctggactctaaggtgggagcgggtcattccttcatagcccacgtaagtatggaaggaaagatcat

SEQ ID NO: 77350 - DNA, 234 bp, Glycine max
aaaaagttgtattgaaattttcacaagaggaatttcttacagcttggtcaactcaggtgcgtcctgcaacaactctgttggctgatgggtgtccatatttgtatgcaatggtgcatgatagttcagtgtctacaataccaggtgattttgtcattggtgtcaagttgacaaccataaacaatatgtgtgcatatgggctcaatcctggtatttcaagttctcgtcttttgggca

SEQ ID NO: 77351 - DNA, 371 bp, Glycine max
agtcatcttctaattttctcttggacccggtaattaatataatacagggacctggttcctttcaacaatatcccttggaggagggatcaaaaccccactcaaaatttcaagacctgatatttccatggaaaaaggatcctgttgggctaccccacatcataggaaacagctggaccaagattgaaaaactttgaacactcaccagcgaataatctcacaataattttgttttaattacaggccggcctccaaacggggccgctttacatccacctgtatttaataatttgccaaccccacaacgggaaaatctttacctgttggggaaacaattttatctctcttttatccaacccaaggggttatatttt

SEQ ID NO: 77352 - DNA, 187 bp, Glycine max
  unsure (1)..(187): unsure at all n locations
tgacngcgcatgcgcgcgtgcgtgagctctgaattagggtcgaggcctatttttatttcaacaaacattataaactttacgggtctggtcttacctgaaggggtgggcgcgattcgaccccggccgaacaaaacctatcatgaccacctcttaaacggaagcaccgttgacgaattatgtgagtgga

SEQ ID NO: 77353 - DNA, 327 bp, Glycine max
aaaaagttgtattgaaattttcacaagaggaatttcttacagcttggtcaactcaggtgcgtcctgcaacaactctgttggctgatgggtgtccatatttgtatgcaatggtgcatgatagttcagtgtctacaataccaggtgattttgtcattggtgtcaagttgacaaccataaacaatatgtgtgcatatgggctcaatcctggtatttcaggttctcgtcttttgggcaccattcctcagtccatttcacagcaaactgtttggaatcaaatggcaacagtgagaacaccattgaattttgattctagcaagcaaagctttt

SEQ ID NO: 77354 - DNA, 331 bp, Glycine max
  unsure (1)..(331): unsure at all n locations
cgtgtctctttgctcttttcccctatctctcaactaccaaaagttagcactaacaacaacctattcctttctctccgtgtttagttctacacaaagcaccaacactggctagcaagaagggcatggcaacatgtgggagcctgcatcacatcttcgacacccttttgccagaaaagccaaccctgcttgaatccctctcatgaaccaaataaacccctaaacccacagaccaaaccactcctcactgaatatttgagaactcattcaagggagnctattctcatatcactccacgtttactcatatatcatcactgaatacaacacacaca

SEQ ID NO: 77355 - DNA, 391 bp, Glycine max
cacgcgcacgcaagcttggactctgtatagcgctcgcgcgccactgcaatgggcatggcttagagcgccccgcgctggcgctgtcggcatcgccagttggcgcgaagggaccaccgccggatcttaacgccggtaaccttctcttacacggacggtcctagagcacgcccgggacgacagattgttgctgccaccagtccttgcgctcacgggggctcacgaccaccgtcacctacacacaacctaaagcacaaagccggcccaagagaacgctttcccgtcgcgcaccggcgggctccacgtgccgcacacgcgcaaagcttcctgcgcgccgccatgacaagtctttggacgccaccgaccaacggaggccggaggaactacacccaca

SEQ ID NO: 77356 - DNA, 415 bp, Glycine max
tcgcatggacgcgtgcgtaagctctgaatacggctcgaggaaagataaaaaaaaaagatgaatcagtgtggttatcagcagaagaatgctttgacaagctgtggggagatgaagatggaatcagtggtgtgccctaaaccacgaagattgggcctgttgaaccactcaacctttgatgaccacatcagacccttgaggccaccctttatcaactaccaatcagaaattgaagattcaggagttggggctgagcttctggacatcattctccccaagagatctggagggcaagtggcttcatcacccccatttttctgtggatctccacctagcagggcttcaaaccctgtgatccaagatgagcaatttggtagtaatggtaatgagaattttggtgcatttttctttggcaccc

SEQ ID NO: 77357 - DNA, 56 bp, Glycine max
caccattgaattttgattctagcaagccgagcttttgtcagttttctattgacctt

SEQ ID NO: 77358 - DNA, 293 bp, Glycine max
gttctgcttgacttccacactcacagagcagccctggtctgtgcggaaaccaaacatggccagagtgcatgctctccgacagaaccggctatataaatattccttaccatcctgtgattctggcactagacgaccagactgtggctcttcttgagactctgatgaaggtgctgctgtcactaccatttatgtacgtctacacgatgggcaccatgatgcaagctatgatactaggcaccatgactatagaggggtgaatgtctacgctacttgtcaaagagggttagcatgtg

SEQ ID NO: 77359 - DNA, 210 bp, Glycine max
  unsure (1)..(210): unsure at all n locations
cttcaacccaaacacaaaaagaaggaaagagatgaagatgcatgaaaatcgaaaaattccccaaactttacaccgtacaaaaccctatcccaattttactctttctcaaattcaatttcttgaaatccctcccctataatcatcgattatgcttcgngcaatctctcttcgatcccaatggactacatggaagacgacgcaaggtaccct

SEQ ID NO: 77360 - DNA, 375 bp, Glycine max
ttgaagcaatccaaaatctgggttgatttaattgcgggggctaatggaaaatagaacttgaacagcagttcaactcgataccccatccagctccaggactgtaccatcgctggagccaaagacaggtctttctccatcaacgacctcgttttcacacatagactgctttcacagggcatcagcacgtacctgtcacccaagaacttagttcaagccctgtggatccttctacacttttggccaatactgtcacctttcgcagtcaaggactttaggtctgctacgcgattggcagaggaaagctccctctccacttcaagaaatgtggctacagaagtatggaattggggagcatgattctagggacttcaacta

SEQ ID NO: 77361 - DNA, 256 bp, Glycine max
cggcgcagcttgatccttatagcggcgccttttttttcttttcttacgttataaacccggggagagatttttatgggggattgtctattgtataaaatcactctaaacggccaaagttttttttcagaaaggcccttttttctggggaagccccgcccttaatcaaatgggagctggtctgcaaggttccagagaggtcaccgattaagctggactctatgaacccccaaatatattttcttcggtgccacaaaca

SEQ ID NO: 77362 - DNA, 107 bp, Glycine max
cgctcctcgctccttcaggataaagagggaaaagtgatcgggcaggattcattcccctccaaaacctctcctcttcactccggtggtaaatcaactagggggaactc

SEQ ID NO: 77363 - DNA, 372 bp, Glycine max
cagaagaacaagtcgttgagaactaagaaggagaagcaaatggcttcctcaatgatctcttccccagctgttaccactgtcaaccgtgccggtgccggcatggttgctccattcactggcctcaagtccatggctggcttccccaccaggaagaccaacaatgacattacctccattgctagcaacggtggaagagtgcaatgcatgcaggtgtggccaccagttggcaagaagaagtttgagactctttcctacctgccagaccttgatgatgcacaattggcaaaggaagtagaataccttcttaggaagggatggattccttgcttggaattcgagttggagcacggtttcgtgtaccgtgagcacaac

SEQ ID NO: 77364 - DNA, 174 bp, Glycine max
gcttgtcatctatgactggcaccgcataccatatgccgtggtacatgccaaagggacttgagcatatgtttacattacagttacaccacattggttttatcacccatgtgcaaatcaacattgtatccgatggggatagacccgctgaaaaattctagcctcatgtgttattca

SEQ ID NO: 77365 - DNA, 250 bp, Glycine max
aggaactatagagtgttgcacacacaaacaactcttcgacacaggctctgaggttatgaaagttgacatatacatggccctgtagcacgatatgttaataaatacactaattcttttaatatggaaggtggagacgagcactatatttttctaaataagtcgattggcagacacactaatggtgtagaattggataactatctataatgaaccaaaagtaagatgccatgatgctgtgtctcatgtgatg

SEQ ID NO: 77366 - DNA, 230 bp, Glycine max
ggagttgtaaattaagagcatggctgcacaagctcttgtatcatcatcttctcttaccttctcagcggaggctgcaagacaaagtcttggaccaagatcactccaatctccatttggcttctccagaaaagcctcctttcttggtaaggcagctgctaccccccctgtcaagcaaggatcagacagacctttgtggtttgcatcaaagcaaagtctttcttacttggatg

SEQ ID NO: 77367 - DNA, 268 bp, Glycine max
aaaaaaaaaaaattaaaatataaaataaaataaaaataaaataaaaaaataaaaaaaaaaatatataaaaaaaaaaaaaaaaaaaaaaaattttaaaaaaaaaaaaaaaaaaaaaaagggggcggcccccaattttttaatttttttacccgaaatttattttcgaaccggttcttttaggcttaccaatttttcttttttgaagtcgttttaaaacttggcgtaataattggaatagtttttttctttttaaaattttttattcttt

SEQ ID NO: 77368 - DNA, 368 bp, Glycine max
ggtcaagattgtgatgtctgggaatgcagcagtcaaaaggagtgattgggcctcattggtacaagtgtttttaacaaacagcaacagtacagagcattttgatgcatgtaagtggacaaaatcagaaccacattcctgggaattgatcttcccaatagaggtatgtggtcctaataatggttttgaaatgtggagttctgagtgggcaaatcaaacttcatggcatttgagtttccttattgacaatcccaaacagtctacagtttttgatattctcttgggaatctctcaagaatttgaaaatgctggtaatactcttatgccagctttttctgtttcacaagctactggcagatcttcttaaaatg

SEQ ID NO: 77369 - DNA, 148 bp, Glycine max
gccttatcctttcctacaactccaaacacaaagacatcatcatccatggctgcctccgtctccactgtcggagctgtcaacaaagctcttttgaacccgaatgggtctggagctggagcttcaactcccagttcatccttcttttgga

SEQ ID NO: 77370 - DNA, 290 bp, Glycine max
ctcgccaattgagaaggaaagctctctctcgtattgaatggctgcaaaaagctgatgtgcctaccatagcacagattgaagagttccattcgatgcagaggatgatgaatgctcctgattcaaatgataatattgatttactggtgagcattgatttgttgggtttacaaggagcaggtaaagcttttccaaacaaaattgtttttgatgataagcttgtgttggctaacacacaagaattctttgatggaaattttccagtggattcttggttaccaatttttgggaat

SEQ ID NO: 77371 - DNA, 210 bp, Glycine max
ccttttccagtagctttactggctgttctttttggcgttaagaatgaaattctgagttctaacgccactaatcctatgctgacgcgacttcttgagaactgtaagagtctcaaatatctggttgatgagtgtccttttgcatttgtgaactagtatgtagtattttattcacttaaataaagcgcattactatgtgcaatgagtgtgttt

SEQ ID NO: 77372 - DNA, 395 bp, Glycine max
cagaaccacattcctgggaattgatcttcccaatagaggtatgtggtcctaataatggttttgaaatgtggagttctgagtgggcaaatcaaacttcatggcatttgagtttccttattgacaatcccaaacagtctacagtttttgatattctcttgggaatctctcaagattttgaaattgctggtaatactcttatgccagctttttctgttccacaggctactgccagatctttttgaaaatgcggaatcctctgcatgatctggaatttgtgttttctttcgcttgttcgtttgtttaattcaataaaggaaattaggcatgacccttttgttgagtatgctctgcctatttgaaaatttccacacctcttttaattgtcgtaatgatgt

SEQ ID NO: 77373 - DNA, 396 bp, Glycine max
atgacttctccctacattaaatgtacagtctctttcttcatagcatttggaaatttggctgatgataccatcaattttgaggcttttccccacaagctggtgcagtttggagagattcaggaaaaagttgtattgaaattttcacaagaggaatttcttacagcttggtcaactcaggtgcgtcctgcaacaactctgttggctgatgggtgtccatatttgtatgcaatggtgcatgatagttcagtgtctacaataccaggtgattttgtcattggtgtcaagttgacaaccataaacaatatgtgtgcatatgggctcaatcctggtatttcaagttctcgtcttttgggcaccattcctcagtccatttcacaacaaactgtttggaatcaa

SEQ ID NO: 77374 - DNA, 258 bp, Glycine max
caagaacttcatgaccctgcccaacatcaaggttcctctcattcttggtatctggggaggcaagggacaaggaaaatctttccaatgtgagcttgtctttgccaagatgggaatcaaccccatcatgatgagtgctggaaagttggaaagtggaaatgcaggagagccagcaaaactgatcaggcagagataccgtgaagccgcagacttgatcaaagaaggaaagatgtgtgctctcttcataaacgatcttgatgc

SEQ ID NO: 77375 - DNA, 202 bp, Glycine max
gaggaatcttagtggacaaaactggagattggatcacccttatacacaattctccaattagtaacttgttgagagttgctgcttggaaaaaaagctgtttaatggtcaagattgtgatgtctgggaatgcaccagtcaaaaggagtgattgggcctcattggtacaagtgttttttacaaacagcaaccgttcagagcattt

SEQ ID NO: 77376 - DNA, 229 bp, Glycine max
caaaaaagctttgacgtcgcttgcccccgtccgtaagctcggatttcggttcagcgccactttcacttttttttttttacaaaatacaatgtgctcccataactacaatctctcaattccccatttatttaaatcaaaatcaaaatcttatctggggttctcccatcagaggacaaagctttcgacttttcgggattcgctcgtatttgtttcacagctctgatatgga

SEQ ID NO: 77377 - DNA, 388 bp, Glycine max
gtgttctgatgcatggagtttggaatttctgaagcgtactggatttcattgcgatatcatttgtgtcactggatggactgccaccccaatgcaggatgttcaggttacaattgattggtttatttcctctcaggaatgtgttcccaggacctattgtgttttaaatccacaaaatccttttgtgttaaataggtggatgggaaaattgactttcccccagggcacttcccgaagtgttaagagaatgcctctttctatagggggaggagctggtgcaaagaatgctattctcatgaatatgccaaatgctgttctttcaatgtggagatattttgttggagatctcgtctttgaagtttctaagatgacttctccctacattaaatgt

SEQ ID NO: 77378 - DNA, 397 bp, Glycine max
gaaatttggctgatgataccatcaattttgaggcttttccccacaagctggtgcagtttggagagattcaggaaaaagttgtattgaaattttcacaagaggaatttcttacagcttggtcaactcaggtgcgtcctgcaacaactctgttggctgatgggtgtccatatttgtatgcaatggtgcatgatagttcagtgtctacaataccaggtgattttgtcattggtgtcaagttgacaaccataaacaatatgtgtgcatatgggctcaatcctggtatttcaggttctcgtcttttgggcaccattcctcagtccatttcacagcaaactgtttggaatcaaatggcaacagtgagaacaccattgaattttgattctagcaagcatagctt

SEQ ID NO: 77379 - DNA, 243 bp, Glycine max
ataaaaaacctttgacgtccattccccccttccttaacctcggattccggttcgggaattgattgcccattctgtaccataggatttctggtttagggttgaatatgtaattggggagggagcctttcctgtttcttgatatttgttcatgcatttgtttctctgtgttaattgctttatcaattgtgttgtgatcttttagctgtaccacaaaattctatacctgtcctacgtttccggggg

SEQ ID NO: 77380 - DNA, 83 bp, Glycine max
ttatggttgccaaacaaatgtgcccccaccaaccttcaagaccaaagggggccttggtcgcattgggcttttaattccaccgg

SEQ ID NO: 77381 - DNA, 278 bp, Glycine max
gaaaaaaggctgcttataccattttgggggcagtgagcgccccccgattagagccaacctccgcgataatgggccatgttgtgaattgggttaatcggcactactaagccatggctggtgactattaggccctggatgttctaccacctgaggtggatgggtaaccaattgttccagcactacgggacttttttgatgatgcacttaattatccggccagggaacttaactcaaaaacactagtggatggcctgggaaacgtttgggatcaatttcca

SEQ ID NO: 77382 - DNA, 123 bp, Glycine max
gacgtcgcttgcccgcgtccgtaagctcggaattcggctcgggccataatcactttttcctactttcttctccatccatcccttgactaattaattatccctcacaactaccaatggccgaag

SEQ ID NO: 77383 - DNA, 143 bp, Glycine max
acctcgcatgcaccccttccttaaccccggattccgctcgagccttttcttttaggcctttccaaataaagacctggttcaatttctcttcgagccagaaaaatggtcctccggaggttcaagggtgggaagccctacccgga

SEQ ID NO: 77384 - DNA, 240 bp, Glycine max
tttgacgtcgcttgcccccttccttaacctcggattccggttcagcctttgtttccctggatttcttgcattttccaaaatttacttttgggggcaccaccctttcaccaggattcctcttcttttgttgcccattaccccttttccaaggccttgtttgtgacctccaaaattttgtttccaaagtctttccctaatttggtaaaaatttgaatttgatcccaagggattgggaaactt

SEQ ID NO: 77385 - DNA, 189 bp, Glycine max
ccgctcacagttatttgcagtaagctctctaatgagatgcttgtctgatataagcttgagagcctaccgtgccacgcttaggctacaagcatgcttttccaatgctgaagaaagctcgtgtctttgagggtggttggggattactgctgaactttggttcattaatatttcaaggcgcacgttaagggt

SEQ ID NO: 77386 - DNA, 396 bp, Glycine max
acctgctgttggcttgttgttcaaggatggcaatttgtaagaaagatgtttggagagttgaatgtggaatcccttctggatttccgctcacagttatttgcaatagcatttttaatgagatgctcattagatatagctatgaaaaattactgcgccaggctaaagctccaagtatgtttttacaatccttcaaaaattttgtttctttgtgtgtgtatggtgatgataacttaattagtgttcatgaatatgtcaagccttactttaatggttctaaattgaaaagctttctagctagtcataacatcaccattactgatggtattgacaaaactagtgcaactttgcaatttagaaagttagcagattgtgattttctcaagagaaactttaagc

SEQ ID NO: 77387 - DNA, 313 bp, Glycine max
caccattgaattttgattctagcaagcagagcttttgtcagttttctattgaccttctcggtggaggaatcttagtggacaaaactggagattggatcacacttatacaaaattctccaattagtaacttattgagagttgctgcttggaagaaaggctgtttaatggtcaagattgtgatgtctgggaatgcagcagtcaaaaggagtgattgggcctcattggtacaagtgtttttaacaaacagcaacagtacagagcattttgatgcatgttagtggacaaaatcagaaccacattcctgggaattgat

SEQ ID NO: 77388 - DNA, 59 bp, Glycine max
ctaattctccaagaataagagaatccaaaagtctttcaaaaaataaccatgatgatgca

SEQ ID NO: 77389 - DNA, 271 bp, Glycine max
caataccaggtgattttgtcattggtgtcaagttgacaaccataaacaatatgtgtgcatatgggctcaatcctggtatttcaggttctcgtcttttgggcaccattcctcagtccatttcacagcaaactgtttggaatcaaatggcaacagtgagaacaccattgaattttgattctagcaagcagagcttttgtcaagtttctattgaccttctcggtggaagaatcttagtggacaaaactggagattggatcacacttatacaaaa

SEQ ID NO: 77390 - DNA, 243 bp, Glycine max
aggatatgggccatcaaccaaaaaaattcgaactccagtagcggatatttaagttgttgaggtgaaactgcgcttcaaagcacggcggcttggacataaatggccggccaggacttatacacatcatctttaccgtctttggtgccatgctctgaggctacacactagcataactcatggtgcgggacagtgacatcatacaaacccacaggctaaatgccagtccaccctattattacatga

SEQ ID NO: 77391 - DNA, 74 bp, Glycine max
caataccaggtgattttgtcattggtgtccagttgacaaccataagcaatatgggtgcatataggctcaatccc

SEQ ID NO: 77392 - DNA, 176 bp, Glycine max
tatgacgtcgcttgcccccgtccgtaacctcggatttcggttcaggaggaacctatcctggccaacccggtaatggggttccagaattggttttgccccatcccaaaggagcccgcccatttggaaaggaagccctctctcggattggatgggcgccaaaagccgatgtgccctcc

SEQ ID NO: 77393 - DNA, 394 bp, Glycine max
tcgagataactagaaacagtgtgatgaaaatgaaggtccttgttttcttcgttgctacaattttggtagcatggcaatgccatgcgtacgatatgttccctctccgaatgaacactggctatggtgcccgtactccggaggtgaaatgcgcaagttggaggcttgctgtggaagcacacaacatctttggctttgagaccattcctgaagagtgcgttgaagcaacaaaggaatacatccatggcgaacaatatagatcagactcaaaacagttaaccaacaagcttacttttatgccagagacctcgaagtccatcccaaggacacatttgtgttcagtatagatggcaccgtactctctaatattccatactacaaaaaacatggatatggg

SEQ ID NO: 77394 - DNA, 142 bp, Glycine max
gctagttttgatgggttggttacccaaccagttattagccagatgggcggaattgttaaccagctttttggggggggttaaaaattggtgccgggaaaggccccccttcttgttgccttgtgttcaaaggttgccatttttt

SEQ ID NO: 77395 - DNA, 58 bp, Glycine max
gatgacttctccctacattaaatgtacaggctctttcttcatagcatttggaaatttg

SEQ ID NO: 77396 - DNA, 390 bp, Glycine max
cctcagtccatttcacagcaaactgtttggaatcaaatggcaacagtgagaacaccattgaattttgattctagcaagcagagcttttgtcagttttctattgaccttctcggtggaggaatcttagtggacaaaactggagattggatcacacttatacaaaattctccaattagtaacttgttgagagttgctgcttggaagaaaggctgtttaatggtcaagattgtgatgtctgggaatgcagcagtcaaaaggagtgattgggcctcattggtacaagtgtttttaacaaacagcaacagtacagagcattttgatgcatgtaagtggacaaaatcagaaccacattcctgggaattgatctttccaatagaggtatgtggtcct

SEQ ID NO: 77397 - DNA, 425 bp, Glycine max
gacgttgcacgccctacgtacgtctggtaattcggttcgaggctaaagctccaagtatgtttttacaatccttcaaaaattttgtttctttgtgtgtgtatggtgatgataacttaattagtgttcatgaatatgtcaagccttactttagtggttctaaattgaaaagctttctagctagtcataacatcaccattactgatggtattgacaaaactagtgcaactttgcaatttagaaagttagcagattgtgattttctcaagagaaactttaagcagatgtctaatgttttgtgggtggctcctgaggacaaggcgagtttatggtcacaacttcattatgtttcgtgtaataatctggaaatgcaagaagcttatcttgtcaatctcgtaaatgtgttacgagaattgtatttgcacagt

SEQ ID NO: 77398 - DNA, 386 bp, Glycine max
aagaaaggctgtttaatggtcaagattgtgatgtctgggaatgcagcagtcaaaaggagtgattgggcctcattggtacaagtgtttttaacaaacagcaacagtacagagcattttgatgcatgtaagtggacaaaatcagaaccacattcctgggaattgatcttcccaatagaggtatgtggtcctaataatggttttgaaatgtggagttctgagtgggcaaatcaaacttcatggcatttgagtttccttattgacaatcccaaacagtctacagtttttgatattctcttgggaatctctcaagattttgaaattgctggtaatactcttatgccagctttttctgttccacaggctactgccagatcttctgaaaatgc

SEQ ID NO: 77399 - DNA, 413 bp, Glycine max
ctcgagccgtgcagattgaaccagacatgaattcaaggtttcagcttttgagtaccactaccaatggtgattttgttcaagggaaagatctcgcaatggttaaagttaatgtagcatgtgctgctgttggcttgacatcaagttacactccaactccattgttggaatctggtttgcaaaaagacagagggttaattgtggagtattttggaaggatgtcttacgttgctcataacgttaatcagccccaagagaaagatttgttggagggaaatttttcctttgatattaaatctcgctctagattggaaaaagtttcctctacaaaagcacaatttgttagtggaaaaaccttcaaatatgatataattggtgctggttcacattcttcagaagattttcctgaaaaggaa

SEQ ID NO: 77400 - DNA, 115 bp, Glycine max
gtgaatagaaaatcttgttttgttcactcatttggtaaaagccaatataccaggcacatgattccacaatgtcaagattctgatctactcatcccgcaccaggcattcaattaac

SEQ ID NO: 77401 - DNA, 397 bp, Glycine max
tgcatgtaagtggacaaaatcggaaccacattcctgggaattgatcttcccaatagaggtatgtggtcctaataatggttttgaaatgtggagttctgagtgggcaaatcaaacttcatggcacttgagtttccttattgacaatcccaaacagtctacagtttttgatattctcttgggaatttctcaagattttgaaattgctggtaatactcttatgccagctttttctgttccacaggctactgccagatcttctgaaaatgcggaatcctctgcatgatctggaatttgtgttttctttcgtttgttcgtttgtttaattcaataaaggaaattagacatgaccctcttgttgagtatgctctgtctatttgaaaatttccacacctctttt

SEQ ID NO: 77402 - DNA, 419 bp, Glycine max
accacataaaagaacacctaagaaagcatcattcaacctctcaaagtctgatgatgacagtgatgaaagtccaaatccaaaggtcttttcaaggaagaagaaaaatgagaaaggaggaaagcagaagactgatgatgatagtgatgaaagtccaaatccaaaggtatttaaaaggaaaaagaaaaaaaatgagaaaacaaaaaaaaaagaaaaaaggaaaaataaagaagagaaaaaatgtgcaaaaaaaaaagaaaagaaagaaggaagaaaaagaagaagaaaggaaaaatagtaaaaaggtaaaattcaaaaacaatgaaaaaaagaaaaagaaaaaagaacgtgaaaaaagaagaaaaaacaaaaaaaagaaagaaaaaagaacgttgaaaaaaaagaagaaaaaacaaaattaa

SEQ ID NO: 77403 - DNA, 81 bp, Glycine max
aaaaaaaaaaataaaaaaaaaaaaaacaaaaaacaaaaaaaaaaaaaaaaaaaaaaaaaaaaaaaaaaacaaaaaaaaaaa

SEQ ID NO: 77404 - DNA, 407 bp, Glycine max
gccttactttagtggttctaaattgaaaagctttctagctagtcataacatcaccattactgatggtattgacaaaactagtgcaactttgcaatttagaaagttagcagattgtgattttctcaagagaaactttaagcagatgtctaatgttttgtgggtggctcctgaggacaaggcgagtttatggtcacaacttcattatgtttcgtgtaataatctggaaatgcaagaagcttatcttgtcaatctcgtaaatgtgttacgagaattgtatttgcacagtccagaggaagctcgccaattgagaaggaaagctctctctcgtattgaatggctgcaaaaagctgatgtgcctaccatagcacagattgaagagttccattcgatgcagaggatgatgaatg

SEQ ID NO: 77405 - DNA, 407 bp, Glycine max
  unsure (1)..(407): unsure at all n locations
aaanaaaaannaaaaaaaaaaaaaaaaaaaaaaaaaaaaaaaaaagaaaaaaaaaaaaaaaaaaaaaaaaaaaaaaaaaaaaaaaaaaaaaaaaaaaaaaaaaaaaaaaaaaaaaaaaaaaaaaaaaaaaaaaaaaaaaagggggggcccccccttaggggcctctcccccccggaattaatttcgggccgggtccctgggggggccccatttttccttttagggggccgtttaaaagttgggggaaaaaagggaaaaaggtgttcccgggggaaaattgttttccgttaaaatttccacaaaaaaaacaacccggaaccataaagggaaaacccggggggccctaagggggggcctaccccacattaatggggtggccctaactgcccgttttcaagggggaaaac

SEQ ID NO: 77406 - DNA, 77 bp, Glycine max
tgagtcttgcaattgaagttgaagtcttgccctttttttttaaactccaaccccaagacatcatattccagggttgc

SEQ ID NO: 77407 - DNA, 408 bp, Glycine max
cggctcgaggtcacaacttcattatgtttcgtgtaataatctggaaatgcaagaagcttatcttgtcaatctcgtaaatgtgttacgagaattgtatttgcacagtccagaggaagctcgccaattgagaaggaaagctctctctcgtattgaatggctgcaaaaagctgatgtgcctaccatagcacagattgaagagttccattcgatgcagaggatgatgaatgctcctgattcaaatgataatattgatttactgttgagcattgatttgttgggtttacaaggagcaggtaaagcttttccaaacaaaattgtttttgatgataagcttgtgttggctaacacacaagaattctttgatggaaattttccagtggattcttggttaccaatttttgtgaattg

SEQ ID NO: 77408 - DNA, 107 bp, Glycine max
aaatatttacctttttaagggtaacaggggcctccctttttaagttgttgccgaacttgccaatgctcaaccttggtggttcaagccggcctttttttttaacaggc

SEQ ID NO: 77409 - DNA, 232 bp, Glycine max
gatttactaatatggaatagactggtacttcactcaagctggacgaagctgcatcattggtgcgcatcgcgcgcacctacaacacccacaagtaggaaaaatgttggccgattgagattgtctcaagtgtaactacattcagagcgctaatgatggagggggtgactgccaaggccaccgcctaaaaatgatatataaataactatggtaatggtacagctcgcaaaaacta

SEQ ID NO: 77410 - DNA, 412 bp, Glycine max
ttttctcaagagaaactttaagcagatgtctaatgttttgtgggtggctcctgaggacaaggcgagtttatggtcacaacttcattatgtttcgtgtaataatctggaaatgcaagaagcttatcttgtcaatctcgtaaatgtgttacgagaattgtatttgcacagtccagaggaagctcgccaattgagaaggaaagctctctctcgtattgaatggctgcaaaaagctgatgtgcctaccatagcacagattgaagagttccattcgatgcagaggatgatgaatgctcctgattcaaatgataatattgatttactgttgagcattgatttgttgggtttacaaggagcaggtaaagcttttccaaacaaaattgtttttgatgataaagctgtgttggctaacaca

SEQ ID NO: 77411 - DNA, 61 bp, Glycine max
atttgaaaatttccacacctcttttaattgtcgtaatgatgtgtgaagtgtgtgttatttt

SEQ ID NO: 77412 - DNA, 397 bp, Glycine max
ataccatcaattttgaggcttttccccacaagctggtgcagtttggagagattcaggaaaaagttgtattgaaattttcacaagaggaatttcttacagcttggtcaactcaggtgcgtcctgcaacaactctgttggctgatgggtgtccatatttgtatgcaatggtgcatgatagttcagtgtctacaataccaggtgattttgtcattggtgtcaagttgacaaccataaacaatatgtgtgcatattggctcaatcctggtatttcaagttctcgtcttttgggcaccattcctcagtccatttcacagcaaactgtttggaatcaaatggcaacagtgagaacaccattgaattttgattctagcaagcagagcttttgtcagttttctat

SEQ ID NO: 77413 - DNA, 412 bp, Glycine max
ctcgagccgggtttgcaaaaagacagagggttaattgtggagtattttggaaggatgtcttacgttgctcataacgttaatcagccccaagagaaagatttgttggagggaaatttttcctttgatattaaatctcgctctagattggaaaaagtttcctctacaaaagcacaatttgttagtggaaaaaccttcaaatatgatataattggtgctggttcacattcttcagaagattttcctgaaaaggaagatcaagaaaaacccaaaaagattgatgccagattgagacaaagaatagatcctcaatacaatgaggttcaggctcagatggaaacaaatttgtttaaattgtctcttgatgatgttgaaactcctaaaggttccatgttggatctgaaaatttctcaat

SEQ ID NO: 77414 - DNA, 409 bp, Glycine max
accaggtgattttgtcattggtgtcaagttgacaaccataaacaatatgtgtgcatatgggctcaatcctggtatttcaggttctcgtcttttgggcaccattcctcagtccatttcacagcaaactgtttggaatcaaatggcaacagtgagaacaccattgaattttgattctagcaagcagagcttttgtcagttttctattgaccttctcggtggaggaatcttagtggacaaaactggagattggatcacacttatacaaaattctccaattagtaacttattgagagttgctgcttggaagaaaggctgtttaatggtcaagattgtgatgtctgggaatgcagcagtcaaaaggagtgattgggcctcattggtacaagtgtttttaacaaacagcaacagt

SEQ ID NO: 77415 - DNA, 115 bp, Glycine max
tttggagagattcaggaaaaagttgtattgaaattttcacaagaaggatttcttaccgcttggtcaacttaagggccttccggcaccaactctgttggctgatgggtgtccatat

SEQ ID NO: 77416 - DNA, 409 bp, Glycine max
cttgtcaacctcgtaaatgtgttacgagaattgtatttgcacagtccagaggaagctcgccaattgagaaggaaagctctctctcgtattgaatggctgcaaaaagctgatgtgcctaccatagcacagattgaagagttccattcgatgcagaggatgatgaatgctcctgattcaaatgataatattgatttactgttgagcattgatttgttgggtttacaaggagcaggtaaagcttttccaaacaaaattgtttttgatgataagcttgtgttggctaacacacaagaattctttgatggaaattttccagtggattcttggttaccaatttttgtgaattgtctttatcctgtaagtcaattaccttcagaagctgtcgttgtaaatgttacatgtggtagtg

SEQ ID NO: 77417 - DNA, 294 bp, Glycine max
ctcgagccgattcggctcgagcaccattcctcagtccatttcacagcaaactgtttggaatcaaatggcaacagtgagaacaccattgaattttgattctagcaagcagagcttttgtcagttttctattgaccttctcggtggaggaatcttagtggacaaaactggagattggatcacacttatacaaaattctccaattagtaacttgttgagagttgctgcttggaagaaaggctgtttaatggtcaagattgtgatgtctgggaatgcagcagtcaaaaagagtgattg

SEQ ID NO: 77418 - DNA, 237 bp, Glycine max
cgcacctgctgttggcttgttgttcaaggatggcaatttgtaagaaagatgtttggagagttgaatgtggaatcccttctggatttccgctcacagttatttgcaatagcatttttaatgagatgctcattagatatagctatgaaaaattactgcgccaggctaaagctccaagtatgtttttacaatccttcaaaaattttggttctttgggtgtgtatggtgatgataacttaa

SEQ ID NO: 77419 - DNA, 409 bp, Glycine max
attttctattgaccttctcggtggaggaatcttagtggacaaaactggagattggatcacacttatacaaaattctccaattagtaacttgttgagagttgctgcttggaagaaaggctgtttaatggtcaagattgtgatgtctgggaatgcagcagtcaaaaggagtgattgggcctcattggtacaagtgtttttaacaaacagcaacagtacagagcattttgatgcatgtaagtggacaaaatcagaaccacattcctgggaattgatcttcccaatagaggtatgtggtcctaataatggttttgaaatgtggagttctgagtgggcaaatcaaacttcatggcatttgagtttccttattgacaatcccaaacagtctacagtttttgatattctcttggga

SEQ ID NO: 77420 - DNA, 410 bp, Glycine max
gttcttttagggggcgcgccagttctgatatttacaccatctgctctcaagactgtgaattgtggaatcctgcttgcacaaaagcaatgactatgtcatttaatccaaacccgtgttctgatgcatggagtttggaatttctgaagcgtactggatttcattgcgatatcatttgtgtcactggatggactgccaccccaatgcaggatgttcaggttacaattgattggtttatttcctctcaggaatgtgttcccaggacctattgtgttttaaatccacaaaatccttttgtgttaaataggtggatgggaaaattgactttcccccagggcacttcccgaagtgttaagagaatgcctctttctatagggggaggagctggtgcaaagaatgctattctcatgaat

SEQ ID NO: 77421 - DNA, 331 bp, Glycine max
  unsure (1)..(331): unsure at all n locations
gcacccgtacgtaagctcgaaattcggttcaagaaaaaataactaagcttagtgtattatttaaagaatgcaataaggtgagactaaaaagaaaaagaaaaaaaacanannanaaaaaaaaaaaaaaaaaaaaaaaaaaaaaaaaaaaaaaataaaaaaaaaaaaaaaaaaaaaaaaaaaaaaaaaaaaaaaaaaaaaaaaaaaaaaaaaaaaaaaaaaaaaaaaaaaaaaataaaaaaaaaaaaaaaaaaaaaaggggggccccccaattaagagattttccaacccgaaaaaaaattcggaacgggatcttggggggaaacaaattttt

SEQ ID NO: 77422 - DNA, 347 bp, Glycine max
tctaagctcgaatcgctcagggactgctctctctaacaatggatgcaggccagaaatgtacagaccaactcacaacacgaggggcttggaggaaaataatgtaacttggggcgagaacagctgaagaactgcagctatgaccatgtagtaaccagttactgaatatagccaatggttgattgcacaggattgaagaaatgtactcatgatgagaatgtaaaatagctcagcattgcaattcatctataattctgatgctgctatacaatggaaacggtgctgatgacctactacatcacaagtgccatgagtcatggattaatggacataaatgctatggcagctct

SEQ ID NO: 77423 - DNA, 377 bp, Glycine max
aaaaattgatgcgtgaaaggacgcacctgctgttggcttgttgttcaaggatggcaatttgtaagaaagatgtttggagagttgaatgtggaatcccttctggatttccgctcacagttatttgcaatagcatttttaatgagatgctcattagatatagctatgaaaaattactgcgccaggctaaagctccaagtatgtttttacaatccttcaaaaattttgtttctttgtgtgtgtatggtgatgataacttaattagtgttcatgaatatgtcaagccttactttagtggttctaaattgaaaagctttctagctagtcataacatcaccattactgatggtattgacaaaactagtgcaactttgcaattt

SEQ ID NO: 77424 - DNA, 385 bp, Glycine max
gggaggagctggtgcaaagaatgctattctcatgaatatgccaaatgctgttctttcaatgtggagatattttgttggagatctcgtctttgaagtttctaagatgacttctccctacattaaatgtacagtctctttcttcatagcatttggaaatttggctgatgataccatcaattttgaggcttttccccacaagctggtgcagtttggagagattcaggaaaaagttgtattgaaattttcacaagaggaatttcttacagcttggtcaactcaggtgcgtcctgcaacaactctgttggctgatgggtgtccatatttgtatgcaatggtgcatgatagttcagtgtctacaataccaagtgattttgtcattggtgtc

SEQ ID NO: 77425 - DNA, 408 bp, Glycine max
atggtcacaacttcattatgtttcgtgtaataatctggaaatgcaagaagcttatcttgtcaatctcgtaaatgtgttacgagaattgtatttgcacagtccagaggaagctcgccaattgagaaggaaagctctctctcgtattgaatggctgcaaaaagctgatgtgcctaccatagcacagattgaagagttccattcgatgcagaggatgatgaatgctcctgattcaaatgataatattgatttactgttgagcattgatttgttgggtttacaaggagcaggtaaagcttttccaaacaaaattgtttttgatgataagcttgtgttggctaacacacaagaattctttgatggaaattttccagtggattcttggttaccaatttttgtgaattgtcttta

SEQ ID NO: 77426 - DNA, 392 bp, Glycine max
aaacagtctttgtggtggtgatgaaaaattgatgcgtgaaaggacgcacctgctgttggcttgttgttcaaggatggcaatttgtaagaaagatgtttggagagttgaatgtggaatcccttctggatttccgctcacagttatttgcaatagcatttttaatgagatgctcattagatatagctatgaaaaattactgcgccaggctaaagctccaagtatgtttttacaatccttcaaaaattttgtttctttgtgtgtgtatggtgatgataacttaattagtgttcatgaatatgtcaagccttactttagtggttctaaattgaaaagctttctagctagtcataacatcaccattactgatggtattgacaaaactagtgcaactt

SEQ ID NO: 77427 - DNA, 429 bp, Glycine max
ccgtccgaaagctcggaattcggttcgggtttcctaactttttttacctaaaacccgcctggatgtccacttccggggtttttccttcattccaatactcgactactaattataacaaatcttctgctcaggaggcccgtgatgaccaattctttgataaagaaaattgcaatgtacatcaacccaaaacttcacagagactgccatttcaacctaaaattatgaacaccagcgctctgtcagagagaatggaagagctttcatatcaatccactatcgattgttctgttgattttgaccaaatctcacgatttagtgaagatttcgcccttccatcaaacttccttgaaccaactggcttgaaagtgtgtcttcatacgaacacaaccacaagaagatgcacctattgcaaagactgtggaatcttta

SEQ ID NO: 77428 - DNA, 401 bp, Glycine max
cttaatttgacgaaagaatggttgggatcatttcatctcgacgccgggagcgttagtgttgttgacttccctgatggacctaaggggaaaggtgtcataaggtgtataaattatactgcacatttggggagatggtccatacccattacaagatcaacagaggatggtgaagagttctaagtgtaaacttgtgattccaaaattgaattgaaatgacacccagcactcaattgaagagtttcagagggttaacgtggtcatgattgttgaaattttaaggcatgatgatagtaaaaatgaaatcttatatggtcatggggttgacctgggaatgggacaacactgtcggttttgcttgccttcctcgtaatgtatttcacttcaaagatatagatattact

SEQ ID NO: 77429 - DNA, 226 bp, Glycine max
aaaaaaaaaataaaacaaactagaaaaaaaaagaataaggtgagaggaggaaaggaaccaccaccaccaacaaagcaaatggctgctaccatagacaaaagacaccaaaaaaaccaaataaggggggcggcccccatctagtgacctcttcaccccgggatttaattccggcccggtccctgcgggcgtcccatttttccttatagggggtcgttttaaacctggg

SEQ ID NO: 77430 - DNA, 408 bp, Glycine max
gaaactttaagcagatgtctaatgttttgtgggtggctcctgaggacaaggcgagtttatggtcacaacttcattatgtttcgtgtaataatctggaaatgcaagaagcttatcttgtcaatctcgtaaatgtgttacgagaattgtatttgcacagtccagaggaagctcgccaattgagaaagaaagctctctctcgtattgaatggctgcaaaaagctgatgtgcctaccatagcacaaattgaagagttccattcgatgcagaagatgatgaatgctcctgattcaaatgataatattgatttactgttgagcattgatttgttgggtttacaaggagcaagtaaagcttttccaaacaaaattgtttttgatgataagcttgtgttggctaacacacaagaat

SEQ ID NO: 77431 - DNA, 263 bp, Glycine max
atttttatgcaacgacgcatgatagttctttctctaccatggctcactttaagggcacaggccatcaatagcctattttcaacactgcgtacatatgcgctctcgggaaggggatttttgcttctggtgaatcaaccaccacaacttggtccattttgggcacactctttgtaataatgtggtaatcatcaaaaattcattcatggaaggacgcatcaaccgttgccgtgctgttaaaaaatttcaaggtgtcatacactttt

SEQ ID NO: 77432 - DNA, 390 bp, Glycine max
attttgttggagatctcgtctttgaagtttctaagatgacttctccctacattaaatgtacagtctctttcttcatagcatttggaaatttggctgatgataccatcaattttgaggcttttccccacaagctggtgcagtttggagagattcaggaaaaagttgtattgaaattttcacaagaggaatttcttacagcttggtcaactcaggtgcgtcctgcaacaactctgttggctgatgggtgtccatatttgtatgcaatggtgcatgatagttcaatgtctacaataccaggtgattttgtcattggtgtcaagttgacaaccataaacaatatgtgtgcatattggctcaatcctggtatttcaagttcttggcttttgggca

SEQ ID NO: 77433 - DNA, 405 bp, Glycine max
gtgcatgatagttcagtgtctacaataccaggtgattttgtcattggtgtcaagttgacaaccataaacaatatgtgtgcatatgggctcaatcctggtatttcaggttctcgtcttttgggcaccattcctcagtccatttcacagcaaactgtttggaatcaaatggcaacagtgagaacaccattgaattttgattctagcaagcagagcttttgtcagttttctattgaccttctcggtggaggaatcttagtggacaaaactggagattggatcacacttatacaaaattctccaattagtaacttgttgagagttgctgcttggaagaaaggctgtttaatggtcaagattgtgatgtctgggaatgcagcagtcaaaaggagtgattgggcctcattg

SEQ ID NO: 77434 - DNA, 409 bp, Glycine max
gaaaagggacaaacttagttgtcaagttggaatcaacccatactccatggaatggactggtttggccaatagattactgagtaagggcaatgatattctgtgttgcgattatgctagttttgatggtttgattaccaagcaagttatgagcaagatggcagaaatgataaacagtctttgtggtggtgatgaaaaattgatgcgtgaaaggacgcacctgctgttggcttgttgttcaaggatggcaatttgtaagaaagatgtttggagagttgaatgtggaatcccttctggatttccgctcacagttatttgcaatagcatttttaatgagatgctcattagatatagctatgaaaaattactgcgccaggctaaagctccaagtatgtttttacaatccttcaaa

SEQ ID NO: 77435 - DNA, 409 bp, Glycine max
atttgtatgcaatggtgcatgatagttcagtgtctacaataccaggtgattttgtcattggtgtcaagttgacaaccataaacaatatgtgtgcatatgggctcaatcctggtatttcaggttctcgtcttttgggcaccattcctcagtccatttcacagcaaactgtttggaatcaaatggcaacagtgagaacaccattgaattttgattctagcaagcagagcttttgtcagttttctattgaccttctcggtggaggaatcttagtggacaaaactggagattggatcacacttatacaaaattctccaattagtaacttgttgagagttgctgcttggaagaaaggctgtttaatggtcaagattgtgatgtctgggaatgcagcagtcaaaaggagtgattg

SEQ ID NO: 77436 - DNA, 389 bp, Glycine max
tgaagtgtgaaatctccatctaacagtttaatttgaatgtgttttaagtttgattaattacaactaagtaatagttagaagttggaatttaggatataggtttttctttgtacactaacacatttgtttggtgaatataaagaaagcgaatgagaatctgtcaatggatttgtataattaatatagatctaacagatttgttttaacttctttgaggggaaaatttgtagtagcggtagagaaaggggcttgtggaatttgcaatgtaattttttttttataatgttcagtttgctgttggtggaattgctgaaaggaaatttgctataagaaagttgttattggcacttgtgttgttattgtcaaggcgtgtgtgattggaacttttt

SEQ ID NO: 77437 - DNA, 378 bp, Glycine max
gaggaatcttagtggacaaaactggagattggatcacacttatacaaaattctgcaattagtaacttgttgagagttgctgcttggaagaaaggctgtttaatggtcaagattgtgatgtctgggaatgcagcagtcaaaaggagtgattgggcctcattggtacaagtgtttttaacaaacagcaacagtacagagcattttgatgcatgtaagtggacaaaatcagaaccacattcctgggaattgatcttcccaatagaagtatgtggtcctaataatggttttgaaatgtggagttctgagtgggcaaatcaaacttcatggcatttgagtttccttattgacaatcccaaacagtctacagtttttgatattc

SEQ ID NO: 77438 - DNA, 108 bp, Glycine max
cgctcgaattcggctcggggggaagacatggaaaagctgggtggccggggtttgctggttgatgcacggcatcgccgacaatgggtcgtaagctggcggcagacatgt

SEQ ID NO: 77439 - DNA, 345 bp, Glycine max
ttacaggatcaacaagtccatggtgccttgtatgtgctgcggattctttctagaaaaaatgagttcaagtcagacgaggaaagggtaccagtttatcgcgttgttgatgagacatttcctcacctgctcaatatatttaacaggcttgtccagattgttaatccatcacttgaagtagctgatttaatcaagcttatctgtaaaatattctggtcctccatatatgtgcgctttctctcctcatatgtattgcttaaatcaagtgaattattttatgcattatgctgttgatcaaaccttgttcaagatgcatgttacatttatcaatattcattctgtttacta

SEQ ID NO: 77440 - DNA, 254 bp, Glycine max
cagccgcatcccccaccactttctctcttctccactccgccacccctttctccttcttcaccgccaccttcgccttccccttcccctcgcgcgtgcagattaccttcttccttcgcgcccgcccgctgtgccgcctgggctttgccgcggcggacccgctgctctcggcgagtgtatcggcgcgcgcggcggcggtgagaggaggaggaaagggcgcgcggggggtggggtctatagcgaaaaaaagcgcgggg

SEQ ID NO: 77441 - DNA, 261 bp, Glycine max
aaagtttttaaattttgtgaggttcattatgaagaaaagggacaaacttagttgtcaagttggaatcaacccatactccatggaatggactggtttggccaatatattactgagtaagggcaatgatattctgtgttgcgattatgctagttttgatggtttgattaccaagcaagttatgagcaagatggcagaaatgataaacagtctttgtggtggtaatgaaaaattgatgcgtgaaaagacgcacctgctgttggc

SEQ ID NO: 77442 - DNA, 176 bp, Glycine max
cttgtaagcctagttttatgcaatgttgctgttctggagcaccaacaatttcttttaaaaagaattctactggaatgggtagtacgcatgggagaacttgcaacactgacttggatttaaatacaggaaaaaagggaaggtcctctgcttttggggtctttaaaaggcgggatgct

SEQ ID NO: 77443 - DNA, 94 bp, Glycine max
tgaccctcttgttgagtatgctctgcctatttgaaaatttccacacctcttttaattgtcgtaatgatgtgtgaagtgtgtgttattttaaaaa

SEQ ID NO: 77444 - DNA, 259 bp, Glycine max
tttgataacacaaaatttccggttgggcctcactcccaaaaggctggctttgttaaaaaagatgggtcatcttctgtttctgctgcagatgttaaacacctgtcaagtgtgacacgaagagaatcaattgctgcatgggagaggagtcattttcataaaaaggctgatggtccctttagtaatgccccaaaacctctgtagaaaatatggacagatgatattttcatgtgcaatacaaatcatattaccctgtgagatg

SEQ ID NO: 77445 - DNA, 407 bp, Glycine max
gtattgacaaaactagtgcaactttgcaatttagaaagttagcagattgtgattttctcaagagaaactttaagcagatgtctaatgttttgtgggtggctcctgaggacaaggcgagtttatggtcacaacttcattatgtttcgtgtaataatctggaaatgcaagaagcttatcttgtcaatctcgtaaatgtgttacgagaattgtatttgcacagtccagaggaagctcgccaattgagaaggaaagctctctctcgtattgaatggctgcaaaaagctgatgtgcctaccatagcacagattgaagagttccattcgatgcagaggatgatgaatgctcctgattcaaatgataatattgatttactgttgagcattgatttgttgggtttacaaggagca

SEQ ID NO: 77446 - DNA, 388 bp, Glycine max
atcctggtcatctcagtggcaacaatagccaatatggtagtggccttggcggtctgggccaccagaaccctgctggtcatcagcagcagagtggttatggcggctacggtggcttcggcggaggctacggtggtggcagctacaaccgtggctggggcggcaattacggccagcactagacgccgctgcctgaccctaatggactgtctggccttgttggtccgccctcacctgatcctgatgaaagctttctgcgttgatggacgataacctaagcagtgctccttcttgggttatgtgttctcgcatgtctgcctcaaagtctctgtattatgacaagtttttttatctttctggtcccttaacatcagttcgcatgtttatgctc

SEQ ID NO: 77447 - DNA, 391 bp, Glycine max
gttgtattgaaattttcacaagaggaatttcttacagcttggtcaactcaggtgcgtcctgcaacaactctgttggctgatgggtgtccatatttgtatgcaatggtgcatgatagttcagtgtctacaataccaggtgattttgtcattggtgtcaagttgacaaccataaacaatatgtgtgcatatgggctcaatcctggtatttcaggttctcgtcttttgggcaccattcctcagtccatttcacagcaaactgtttggaatcaaatggcaacagtgagaacaccattgaattttgattctagcaagcagagcttttgtcagttttctattgaccttctcggtggaggaatcttagtggacaaaactggagattggatcacactta

SEQ ID NO: 77448 - DNA, 180 bp, Glycine max
cagaggcaaaactaaagtatgctgttgttactggagccaacaaagggattggatttgggacttgtaaaaaacttgccttaaatggggtcaagggggggctcaccgcaagggatgagaaaaaagggcctggaaccttttagaggatggaagagggggggttcttttatttgggtatttttc

SEQ ID NO: 77449 - DNA, 165 bp, Glycine max
gaaattctgagttctaacgccactaatcctatgctgacgcgacttcttgagaactgtaagagtctcaaatatctggttgatgagtgtccttttgcatttgtgaactagtatgtagtattttattcacttaaataaagcgcattactatgtgcaatgagtgtgttt

SEQ ID NO: 77450 - DNA, 295 bp, Glycine max
tctcaagactgggaattggggaatcctgcttgcacaaaagcaatgactatgtcatttaatccaaacccgtgttctgatgcatggagtttggaatttctgaagcgtactggatttcattgcgatatcatttgtgtcactggatggactgccaccccaatgcaggatgttcaagttacaattgattggtttatttcctctcaggaatgtgttcccaggacctattgtgttttaaatccacaaaatccttttgtgttaaataggtggatgggaaaattgactttcccccagggcactt

SEQ ID NO: 77451 - DNA, 384 bp, Glycine max
cttcattatgtttcgtgtaataatctggaaatgcaagaagcttatcttgtcaatctcgtaaatgtgttacgagaattgtatttgcacagtccagaggaagctcgccaattgagaaggaaagctctctctcgtattgaatggctgcaaaaagctgatgtgcctaccatagcacagattgaagagttccattcgatgcagaggatgatgaatgctcctgattcaaatgataatattgatttactgttgagcattgatttgttgggtttacaaggagcaggtaaagcttttccaaacaaaattgtttttgatgataagcttgtgttggctaacacacaagaattctttgatggaaattttccagtggattcttggttaccaattttt

SEQ ID NO: 77452 - DNA, 398 bp, Glycine max
  unsure (1)..(398): unsure at all n locations
ggggtgtccatatttgtatccaatggtgcatgatagttcagtgtctacaataccaggtgattntgtcattggtgtcaagttgacaaccataaacaatatgtgtgcatatgggctcaatcctggtatttcaggttctcgtcttttgggcaccattcctcagtccatttcacagcaaactgtttggaatcaaatggcaacagtgagaacaccattgaattttgattctagcaagcagagcttttgtcagttttctattgaccttctcggtggaggaatcttagtggacaaaactggagattggatcacacttatacaaaattctccaattagtaacttgttgagagttgctgctttgaaaaaaagctgtttaatggtcaagattgtgatgtctgggaatg

SEQ ID NO: 77453 - DNA, 64 bp, Glycine max
ctcgagccgaatcggctcgtgaaaaaacataacatgaaaacacaaaaaagctaaaaacaaaaac

SEQ ID NO: 77454 - DNA, 356 bp, Glycine max
attttgttggagatctcgtctttgaagtttctaagatgacttctccctacattaaatgtacagtctctttcttcatagcatttggaaatttggctgatgataccatcaattttgaggcttttccccacaagctggtgcagtttggagagattcaggaaaaagttgtattgaaattttcacaagaggaatttcttacagcttggtcaactcaagtgcgtcctgcaacaactctgttggctgatgggtgtccatatttgtatgcaatggtgcatgatagttcagtgtctacaataccaggtgattttgtcattggtgtcaagttgacaaccataaacaatatgtgtgcatatgggctc

SEQ ID NO: 77455 - DNA, 332 bp, Glycine max
ctctgttggctgatgggtgtccatatttgtatgcaatggtgcatgatagttcaatgtctacaataccaagtgattttgtcattggtgtcaagttgacaaccataaacaatatgtgtgcatatgggctcaatcctggtatttcaggttctcgtcttttgggcaccattcctcagtccatttcacagcaaactgtttggaatcaaatggcaacagtgagaacaccattgaattttgattctagcaagcagagcttttgtcagttttctattgaccttctcggtggaggaatcttagtggacaaaactggagattggatcacacttatacaaaat

SEQ ID NO: 77456 - DNA, 293 bp, Glycine max
atcgctgtcgccgtcgccgtcaaacaccgcccaccgtatccgctcgttttctcggacggactgacacactcgttacgccgtcggcctccaggatccattacggagtatagtgaagccctcgtgacaacacagcaagtcctgtcaatcagttatccggtccaaacccatcaccatgaaaccctcaatccaacaagcgctcctcctagccagcttgttcgcatgcacgaatgctctgaagctccaagtcggctccaactacgacgaaggcgtaaaagtcaacaccctgagcaaaa

SEQ ID NO: 77457 - DNA, 193 bp, Glycine max
aacgccatgtcagcacgttggtcccgacacagcagagggtagaaatctgcgtgaccggacctaatgtggtatccgacactggctgtaacagagaggtggaaactgatgcactacttaagggtgtgaatgggaaagcagagcctgaaatacctgctgctcaccaattacctcgatgagtgaagctattatatta

SEQ ID NO: 77458 - DNA, 385 bp, Glycine max
taaaagccttagccttccctacaactccaaacacaaagacatcatcatccatggctgcctccgtctccactgtcggagctgtcaacagagctcttttgaacctgaatggttctggagctggagcttcagctcccagttcagccttctttgggaccagcttgaagaaggttattgcctcaagggtccccaacagcaaggtttccggtggaagcttcaagattgttgctgtagaagagaagaaagagattgaagagacccagcagaccgacaaggacagatggaagggtcttgcctatgatatctcagacgaccaacaagacatcacaagaggaaagggtttggttgactcccttttccaagctccacaggatgctggaactcacta

SEQ ID NO: 77459 - DNA, 190 bp, Glycine max
aagaggggatcctttgtttctttgaccagtctttttaaaaaaatttctattcggatttttgggccttagggaatttattgtttattacctggggggatttttaaaattagaagggattacctcctttgggtccaccgatttgccctaatattcataggccccttaaatattttttttttccaaccccctt

SEQ ID NO: 77460 - DNA, 271 bp, Glycine max
ctagtttcttacaaggctctactctactgcttcaccttctgctctagaaaattcagtggtgatacatggcttcggctactctctctgtagccaaaccagcccttcaggcaaatgggaaaggcttctctgaattctctggcctccgcagctcatcaggcttccttcccttttctagaaaatcttcagaggatttccattctgtcattgccttccagacctatgcagttggaagcagtggaggatacaagaagggtgtgacagaagcaaaact

SEQ ID NO: 77461 - DNA, 103 bp, Glycine max
tatctccattattttttactggtgtgttggaggctgtggttgctgccctgtttatgaatatttatattgttggtttgaatcaattgtctgatgttgaaataga

SEQ ID NO: 77462 - DNA, 368 bp, Glycine max
attcctcagtccatttcacagcaaactgtttggaatcaaatggcaacagtgagaacaccattgaattttgattctagcaagcagagcttttgtcagttttctattgaccttctcggtggaggaatcttagtggacaaaactggagattggatcacacttatacaaaattctccaattagtaacttattgagagttgctgcttggaagaaaggctgtttaatggtcaagattgtgatgtctgggaatgcagcagtcaaaaggagtgattgggcctcattggtacaagtgtttttaacaaacagcaacagtacaaagcattttgatgcatgtaagtggacaaaatcagaaccacattcctgggaattgat

SEQ ID NO: 77463 - DNA, 173 bp, Glycine max
attttgttggagatctcgtctttgaagtttctaagatgacttctccctacattaaatgtacagtctctttcttcatagcatttggaaatttggctgatgataccatcaattttgaggctttttcccacaagctggtgcagtttggagagattcaggaaaaagttgtttgaaat

SEQ ID NO: 77464 - DNA, 80 bp, Glycine max
ctctgttctgtgtgtgcgagaaaaggcgattgccattgcgcttctcaggcttttatctttaattgacaaggctctgggcc

SEQ ID NO: 77465 - DNA, 225 bp, Glycine max
ggctgaagacaatcacaacttggcagaagaataaacttgagtggaaggtcatgcatggactttcccgaatccgactctgacatatcatttgtaagctctgagaagcccaacagtgtgcgttcatcctctgttttctatgactattttgatcttcatgcccgaaatccacgaacttcaaccagcttaaatcatagcttgggatcaacccgtatgagacccaagttc

SEQ ID NO: 77466 - DNA, 223 bp, Glycine max
gactgaagacagtctaaacttgccagaaaaataaacttgggtggaagggcatgcaccgactacaacaaatccgactctggcatagaatcagttagctcatgtagaactagacaagataaacaagccgcatctttcattaacatctggggaatatatcctcgaaactcacgtaactatagctgcatctattataattctgagtctagctgtatgaaacccaata

SEQ ID NO: 77467 - DNA, 218 bp, Glycine max
gcgttgccattctcatcctcttctttctctctctaccattgccatggatccctacaagcaccggccatccagcgccttcaattctcccttctggactacaaattctggtgctcctatttggaacaacaactcctctttaaccgttggagctagaggtccaattctgctggaggattatcatcttgtggagaagcttgcaaattttgatagggaacgta

SEQ ID NO: 77468 - DNA, 275 bp, Glycine max
aaaagacagagggttaattgtggagtattttggaaggatgtcttacgtttctcataacgttaatcagccccaagagaaagatttgttggagggaaatttttcctttgatattaaatctcgctctagattggaaaaagtttcctctacaaaagcacaatttgttagtggaaaaaccttcaaatatgatataattggtgctggttcacattcttcagaagattttcctgaaaaggaagatcaagaaaaacccaaaaagattgatgccagattgagac

SEQ ID NO: 77469 - DNA, 345 bp, Glycine max
gctactccatagaatagctctgaccttgcccgcgtccgtaagctcggatttcgctcgaggggttcccaggacctattgtgttttaaatccacaaaatccttttgtgttaaataggtggatgggaaaattgactttcccccagggcactttccgaagtgttaagagaatgcctctttctatagggggaggagctggtgcaaagaatgctattctcatgaatatgccaaatgctgttctttcaatgtggagatattttgttggagatctcgtctttgaagtttctaagatgacttctccctacattaaatgtacagtctctttcttcatagcatttggaaatttggc

SEQ ID NO: 77470 - DNA, 381 bp, Glycine max
  unsure (1)..(381): unsure at all n locations
taatgttttgtgggtggctcctgaggacaaggcgagtttatggtcacaacttcattatgtttcgtgtaataatctggaaatgcaagaagcttatcttgtcaatctcgtaaatgtgttacgagaattgtatttgcacagtccagaagaagctcgccaattgagaaagaaagctctctctcgtattgaatggctgcaaaaagctgatgtgcctaccatagcacagattgaagagttccattcgatgcaaaggatgatgaatgctcctgattcaaatgataatattgatttactgttgagcattgatttggtgggtttacaaggagcaagtaaagcttttccaaacaaaantgtttttgatgataagcttgtgtggctaacaca

SEQ ID NO: 77471 - DNA, 331 bp, Glycine max
gcagattgtgattttctcaagagaaactttaagcagatgtctaatgttttgtgggtggctcctgaggacaaggcgagtttatggtcacaacttcattatgtttcgtgtaataatctggaaatgcaagaagcttatcttgtcaatctcgtaaatgtgttacgagaattgtatttgcacagtccagaggaagctcgccaattgagaaggaaagctctctctcgtattgaatggctgcaaaaagcttattttcctaccatagcacagattgaagagttccattcgatgcagaggatgatgaatgctcctgattcaaatgattatattggattac

SEQ ID NO: 77472 - DNA, 317 bp, Glycine max
atttgtaagaaagatgtttggagagttgaatgtggaatcccttctggatttccgctcacagttatttgcaatagcatttttaatgagatgctcattagatatagctatgaaaaattactgcgccaggctaaagctccaagtatgtttttacaatccttcaaaaattttgtttctttgtgtgtgtatggtgatgataacttaattagtgttcatgaatatgtcaagccttactttagtggttctaaattggaaaagctttctagctagtcataacatcaccattactgatggtattgacaaaactagtgcaactttgc

SEQ ID NO: 77473 - DNA, 400 bp, Glycine max
tggaattgatcttcccaaagaggatgtggtcctaaaatggttttgaatgtggagttctgagtgggcaaatcaaacttcatggcatttgagtttccttattgacaatcccaaacagtctacagtttttgatattctcttgggaatctctcaagattttgaaattgctggtaatactcttatgccagctttttctgttccacaggctactgccagatcttctgaaaatgcggaatcctctgcatgatctggaatttgtgttttctttcgcttgttcgtttgtttaattcaataaaggaaattaggcatgaccctttttgtgagtatgctctgcctatttgaaaatttccacacctcttttaattgtcctaaatgatgtttgaagcgtgtgttattttaaaaa

SEQ ID NO: 77474 - DNA, 350 bp, Glycine max
ctcgagccgaatcggctcgagattcctcagtccatttcacagcaaactgtttggaatcaaatggcaacagtgagaacaccattgaattttgattctagcaagcagagcttttgtcagttttctattgaccttctcggtggaggaatcttagtggacaaaactggagattggatcacacttatacaaaattctccaattagtaacttattgagagttgctgcttggaagaaaggctgtttaatggtcaagattgtgatgtctgggaatgcagcagtcaaaaggagtgattgggcctcattggtacaagtgtttttaacaaacagcaacagtacagagcattttgatgcatg

SEQ ID NO: 77475 - DNA, 387 bp, Glycine max
gaggaatcttagtggacaaaactggagattggatcacacttatacaaaattctccaattagtaacttattgagagttgctgcttggaagaaaggctgtttaatggtcaagattgtgatgtctgggaatgcagcagtcaaaaggagtgattgggcctcattggtacaagtgtttttaacaaacagcaacagtacagagcattttgatgcatgtaagtggacaaaatcagaaccacattcctgggaattgatcttcccaatagaggtatgtggtcctaataatggttttgaaatgtggagttctgagtgggcaaatcaaacttcatggcatttgagtttccttattgacaatcccaaacagtctacagtttttgatattctcttgggaa

SEQ ID NO: 77476 - DNA, 124 bp, Glycine max
attgttgctccatagacatggcctccgaatctgctgcaggcggtgctattacctcattcactggccgtaaggcatgcgcaggctgagggagttgccgagacaaagtcttaccttcaaaagccac

SEQ ID NO: 77477 - DNA, 109 bp, Glycine max
accttccattgcacccgtccgtaagctcggatttcggttgggggctttgaaaaattactgggccgggctaaagctccaagtaggtttttaaaatccttcaaaaatttgg

SEQ ID NO: 77478 - DNA, 377 bp, Glycine max
caaaatcagaaccacattcctgggaattgatcttcccaatagaggtatgtggtcctaataatggttttgaaatgtggagttctgagtgggcaaatcaaacttcatggcatttgagtttccttattgacaatcccaaacagtctacagtttttgatattctcttgggaatctctcaagattttgaaattgctggtaatactcttatgccagctttttctgttccacaagctactgccagatcttctgaaaatgcggaatcctctgcatgatctggaatttgtgttttctttcgcttgttcgtttgtttaattcaataaaggaaattaggcatgaccctctttgtgagtatgctctgcctatttgaaaatttccacacc

SEQ ID NO: 77479 - DNA, 373 bp, Glycine max
acaagctggtgcagtttggagagattcaggaaaaagttgtattgaaattttcacaagaggaatttcttacagcttggtcaactcaggtgcgtcctgcaacaactctgttggctgatgggtgtccatatttgtatgcaatggtgcatgatagttcagtgtctacaataccaggtgattttgtcattggtgtcaagttgacaaccataaacaatatgtgtgcatatgggctcaatcctggtatttcaggttctcgtcttttgggcaccattcctcagtccatttcacagcaaactgtttggaatcaaatggcaacagtgagaacaccattgaattttgattctagcaagcagagcttttgtcagttttctattga

SEQ ID NO: 77480 - DNA, 363 bp, Glycine max
  unsure (1)..(363): unsure at all n locations
aaatacttttcttcttgtcactgacacagttgaatcccattgatgatcgtcccatgtctttaatttgatcccaaaactagaaatttcttctagcaaatgatccctctctctttttcttaattttccccagattcctctgtaagaggtagcatttgaaagctatgaagtcgattgaaattccataatcatattcaagcaaatttaaagcaaaagcttgtgtaatttttatacaactctcaaatggattatgaacctccattcctcgagacctacaaggccctngttaaaaccacgtcgatgattcaaagatgactcctctttgtggagagatgtgactaccagtgatcgatcttgcaagtcaac

SEQ ID NO: 77481 - DNA, 168 bp, Glycine max
gttgaaatcgatgaactccctaagcacattgatgatacacagtacccaaaaacattcttctataaagaagaccttcatccaggcaaaacaatgaaagtacaattcaccaagcgtccctatgcacaaccttatggtgtatatacatgggtaacggatattaaagacacc

SEQ ID NO: 77482 - DNA, 296 bp, Glycine max
cgaagtgttaagagaatgcctctttctatagggggaggagctggtgcaaagaatgctattctcatgaatatgccaaatgctgttctttcaatgtggagatattttgttggagatctcgtctttgaagtttctaagatgacttctccctacattaaatgtacagtctctttcttcatagcatttggaaatttggctgatgataccatcaattttgaggcttttccccacaagctggtgcagtttggagagattcaggaaaaagttgtattgaaatttttcacaagaggaatttctta

SEQ ID NO: 77483 - DNA, 366 bp, Glycine max
cggctcgagctcgagccgaatcggctcgaggtttgttcaaaactagcttctcttcaattcactcccaatttttcaccatattaatcttactatatttaatatttctttctttttcttcaatttctgagtttttttgctccagcagcttcgtcttaagaagctggtgttggaagtttgctcgcgatcatgcagaactgcgtgctcgatccacaagatcagagggttacttcctgcatggaggattcctctgcaatgactattgaattcctgcgggcaagggtgcttttctgaaagatccatctcaagaagtgctaaacagagagctgatgaactggcaaaaaaagtcatggaattgaggaacaactt

SEQ ID NO: 77484 - DNA, 230 bp, Glycine max
  unsure (1)..(230): unsure at all n locations
ggaaattaggcatgaccctcttgttgagtatgctctgcctatttgaaaatttccacacctcttttaattgtcgtaatgatgtgtgaagtgtgtgttnnttttaaaaaaaaaaaaatacaattactgagtttttttgctacaacaacttcatcttaagaagctaatgttggaagtttgctagaaaatcatgcagaactgcgtgctctaaccacaatatcaagatggttact

SEQ ID NO: 77485 - DNA, 359 bp, Glycine max
aaagaatgctattctcatgaatatgccaaatgctgttctttcaatgtggagatattttgttggagatctcgtctttgaagtttctaagatgacttctccctacattaaatgtacagtctctttcttcatagcatttggaaatttggctgatgataccatcaattttgaggcttttccccacaagctggtgcagtttggagagattcaggaaaaagttgtattgaaattttcacaagaggaatttcttacagcttggtcaactcaggtgcgtcctgcaacaactctgttggctgatgggtgtccatatttgtatgcaatggtgcatgatagttcaatgtctacaataccaagtgaatttg

SEQ ID NO: 77486 - DNA, 377 bp, Glycine max
tcggggaattccaattccacattttcaagaaataaggaggcaaaaatgttcatatatgaattggaattatttgttttcttattaggcctatcctgaagccaaaggaaatgagatcggaattcctcggggaattccaattccacattttcaagaaataaggaggcaaaaatgttcatatatgaattggaattatttgttttcttattaggcctatcctgaagccaaaggaaatgagatcggaattcctcggggaattccaattccacattttcaagaaataaagaagcaaaaatgttcatatatgaattggaattatttgttttcttattaagcctatcctgaaaccaaaagaaatgagatcggaattccttcggggt

SEQ ID NO: 77487 - DNA, 341 bp, Glycine max
tacaattgattggtttatttcctctcaggaatgtgttcccaggacctattgtgttttaaatccacaaaatccttttgtgttaaataggtggatgggaaaattgactttcccccagggcacttcccgaagtgttaagagaatgcctctttctatagggggaggagctggtgcaaagaatgctattctcatgaatatgccaaatgctgttctttcaatgtggagatattttgttggagatctcgtctttgaagtttctaagatgacttctccctacattaaatgtacagtctctttcttcatagcatttgggaaattggcttgatgataccatcaattttgag

SEQ ID NO: 77488 - DNA, 343 bp, Glycine max
ggatgatgaatgctcctgattcaaatgataatattgatttactgttgagcattgatttgttgggtttacaaggagcaggtaaagcttttccaaacaaaattgtttttgatgataagcttgtgttggctaacacacaagaattctttgatggaaattttccagtggattcttggttaccaatttttgtgaattgtctttatcctgtaagtcaattaccttcagaagctgtcgttgtaaatgttacatgtggtaatggaccgtgtggtttacccaccactgcttggattagttctgcagttaacaatcgctcctcagatatcaacaaaaagattcgcacagcact

SEQ ID NO: 77489 - DNA, 381 bp, Glycine max
aagaaaagggacaaacttagttgtcaagttggaatcaacccatactccatggaatggactggtttggccaatagattactgagtaagggcaatgatattctgtgttgcgattatgctagttttgatggtttgattaccaagcaagttatgagcaagatggcagaaatgataaacagtctttgtggtggtgatgaaaaattgatgcgtgaaaggacgcacctgctgttggcttgttgttcaaggattgcaatttgtaagaaagatgtttggagagttgaatgtggaatcccttctggatttccgctcacagttatttgcaatagcatttttaaatgagatgctcattagatatagctatgaaaaattactgcgccaggctaa

SEQ ID NO: 77490 - DNA, 364 bp, Glycine max
  unsure (1)..(364): unsure at all n locations
cctgaggacaaggcgagtttatggtcacaacttcattatgtttcgtgtaataatctggaaatgcaagaagcttatcttgtcaatctcgtaaatgtgttacgagaattgtatttgcacagtccagaggaagctcgccaattgagaaggaaagctctctctcgtattgaatggctgcaaaaagctgatgtgcctaccatagcacagattgaagagttccattcgatgcagaggatgatgaatgctcctgattcaaatgataatatngatttactgttgagcattgattttgtgggtttacaaagagcaagtaaagcttttccaaaacaaaattgttttgatgataagcttgtgttggcttacacac

SEQ ID NO: 77491 - DNA, 328 bp, Glycine max
gttaatgtagcatgtgctgctgttggcttgacatcaagttacactccaactccattgttggaatctggtttgcaaaaagacagagggttaattgtggagtattttggaaggatgtcttacgttgctcataacgttaatcagccccaagagaaagatttgttggagggaaatttttcctttgatattaaatctcgctctagattggaaaaagtttcctctacaaaagcacaatttgttagtggaaaaaccttcaaatatgatataattggtgctggttcacattcttcagaagattttccttgaaaggaagatcaagaaaaacccaaaa

SEQ ID NO: 77492 - DNA, 401 bp, Glycine max
attgccgttccatgaatggtaatgggtccttaactttaatttaaattccttgggagttccgtatggcattttcatttttggttgatgtaatgtgtgattgggttagcttgtttggaaaaaatgactttgttttttaaaattaatctataaaatattggttgctgattctgaattaaggagaatttgtaacctccgaagagattacactctttggaatttcctatgatttttcatttttgtcgatgtaatgtgtgattggtttagcttggtatgaaaaatatgaaattctttgtttcatttggaacccttgaaagagattatatgaactacttatagaagtagcttataacttcattttaagctcttttcaacatatttcatcatgtgttcaaaatctgaaa

SEQ ID NO: 77493 - DNA, 314 bp, Glycine max
ggaaattaggcatgaccactattgctgagaatgctctgactatgggaaaaatttccacacctctattaattagacgtaatgatgtgtggacgtgtgtgttcattttaaaccaaactagagataaataaaatgcaggggggggcctccaccttgtgtgttttttgcccggggttttatttcggaccgggtccctgcggccgaacctgttttccttaaagggggcggttttaaacttgggcaaaatattggacagggctgttccttggagaaaattttatcccgtttaaaattccacccaaaatcccccccggaac

SEQ ID NO: 77494 - DNA, 402 bp, Glycine max
tgctcattagatatagctatgaaaaattactgcgccaggctaaagctccaagtatgtttttacaatccttcaaaaattttgtttctttgtgtgtgtatggtgatgataacttaattagtgttcatgaatatgtcaagccttactttagtggttctaaattgaaaagctttctagctagtcataacatcaccattactgatggtattgacaaaactagtgcaactttgcaatttagaaagttagcagattgtgattttctcaagagaaactttaagcagatgtctaatgttttgtgggtggcttctgaggacaaggcgagtttatggtcacaacttcattatgtttcgtgtaataatctggaaatgcaagaagcttatcttgtcaatctcgtaaatgtgttac

SEQ ID NO: 77495 - DNA, 359 bp, Glycine max
aagtggacaaaatcagaaccacattcctgggaattgatcttcccaatagaggtatgtggtcctaataatggttttgaaatgtggagttctgagtgggcaaatcaaacttcatggcatttgagtttccttattgacaatcccaaacagtctacagtttttgatattctcttgggaatctctcaagattttgaaattgctggtaatactcttatgccagctttttctgttccacaggctactgccagatcttctgaaaatgcggaatcctctgcatgatctggaatttgtgttttctttcgcttgttcgtttgtttaattcaataaagggaattaggcatgacccctcttgtgagtatgct

SEQ ID NO: 77496 - DNA, 109 bp, Glycine max
cagtgagagtgtcttcgatctgttgaaggctagaaattctgggaggtggattcatgagggaggaagggtcgttttttttttacaacacgaacgtgtttgcggctcttga

SEQ ID NO: 77497 - DNA, 313 bp, Glycine max
gtttggttgggattatttatgggaaaagaataactttttcttctaaagctctttcaagatgaaaaaagtgaatttatttcttcaaaataaactaatccaatcatggctcaaattactcatgttgtcatacattctataagtagcacagattttattctgtaattagtacagatttgatttttttttatttgtacagattttgttccattttatttcttttcttaattaggtcattggcagcttgtaaatgagtcttgtattcactcttcgaaagacagaattacattaatattcagattattatctttcaagt

SEQ ID NO: 77498 - DNA, 352 bp, Glycine max
ctttgcaattaaaaaagttagcaaattgtgattttctcaagagaaactttaagcagatgtctaatgttttgtgggtggctcctgaggacaaggcgagtttatggtcacaacttcattatgtttcgtgtaataatctggaaatgcaagaagcttatcttgtcaacctcgtaaatgtgttacgagaattgtatttgcacagtccagaggaagctcgccaattgagaaggaaagctctctctcgtattgaatggctgcaaaaagctgatgtgcctaccatagcacagattgaagagttccattcgatgcagaggatgatgaatgctcctgattcaaatgataatattgatttact

SEQ ID NO: 77499 - DNA, 368 bp, Glycine max
tcaattttgaggcttttccccacaagctggtgcagtttggagagattcaggaaaaagttgtattgaaattttcacaagaggaatttcttacagcttggtcaactcaggtgcgtcctgcaacaactctgttggctgatgggtgtccatatttgtatgcaatggtgcatgatagttcagtgtctacaataccaggtgattttgtcattggtgtcaagttgacaaccattaacaatatgtgtgcatatgggctcaatcctggtatttcaggttctcgtcttttgggcaccattcctcagtccatttcacagcaaactgtttggaatcaaatggcaacagtgagaacaccattgaatttgattctagcaagc

SEQ ID NO: 77500 - DNA, 138 bp, Glycine max
attcgagtggagctcaaaaaatcattcaggagagggctcgatctgctgaaggataaaaattgaaggaggtcgaaacatgaggagaggtatggtcattggtgtataacaacaccaacgtgtttgctgcgctagatactt

SEQ ID NO: 77501 - DNA, 388 bp, Glycine max
ctcgcaatggttaaagttaatgtagcatgtgctgctgttggcttgacatcaagttacactccaactccattgttggaatctggtttgcaaaaagacagagggttaattgtggagtattttggaaggatgtcttacgttgctcataacgttaatcagccccaagagaaagatttgttggagggaaatttttcctttgatattaaatctcgctctagattggaaaaagtttcctctacaaaagcacaatttgttagtggaaaaaccttcaaatatgatataattggtgctggttcacattcttcagaagattttcctgaaaaggaagatcaagaaaaacccaaaaagattgatgccagattgagacaaagaatagatcctcaatacaatg

SEQ ID NO: 77502 - DNA, 120 bp, Glycine max
gcctaattaagtattatttatggaaaaagaaaaacaagtgaggtctaaagctcttccaaaatgaaaaaaattcaacttttttcatttaaaaaaaaacttattccaacaacctcttaaaaa

SEQ ID NO: 77503 - DNA, 308 bp, Glycine max
  unsure (1)..(308): unsure at all n locations
ctcgagccgaatcggctcgagtggagagattcaggaaaaagttgtattgaaattttcacaagaggaatttcttacagcttggtcaactcaggtgcgttctgcaacaactgtgttggctgatgggtgtgcatatttgtatgcaatggtgcatgatagttcagtgtctacaataccaggtgattttgtcattggtgtcaagttgacaaccataaacaatatgtgtgcatatgggctcaatccttgtatttcangttctcgtctttggggcaccattcctgagtccatttcacagcatactgtttggaatc

SEQ ID NO: 77504 - DNA, 404 bp, Glycine max
aattttcttttccttggtgaggcttggcagtgaaaatagattgggatgcttgaagcccctagggaaaagtaatatccttctctgcgataagaggaagcccaccacctcagaaaacagaaaacagagtgagtgagtgtgttgtgtaatatggataaaagctgtcatccctctagcaatactagtataagcacatcctctgctgccaaccccaacaacaatagcagggatcaatatcttcgccatctcaacaagctctctcaaaagatctccaaacccatcattaagaaacccgtctttgatcctcctcaggcccaagtcccaaacaatcaggtgcagcatcagccgccggtgtacaacatcaacaagaacgacttccgtgatgtggttcagaaactgacgggctc

SEQ ID NO: 77505 - DNA, 285 bp, Glycine max
tgcacgcgacgtactcgaattcggtcgggctcgcgcccatgaagcaaattactatatgtgcagacctagctacgagatgtaacaggtatgagagggtgatataactggtggcctctgacaaatctggggctctaatcatggatgcagaacaggtttttacagttatgagttatccggcttctgacaggactggattatgacggcgagaaaatactatatagtaatactggccagtaaggaagtctggtgtatgtcaaagaactcttacaccacatctacaaagga

SEQ ID NO: 77506 - DNA, 303 bp, Glycine max
caccagctaagacctatgatgcacgcgtacgtcaagcttggaattcggatcgagctagagtgatacgaatgcatctgcagacactacgaacgctcctctggctctccaaaatggtaactcccaggtaaaagacatcccaatcgggatcgggagggatattcaccgcgaagcagttcaacactccaagctctatctaacgaaattcacgggtggcaaacaggaagggcccaaaaccagggtgtgctaactgctgaagaaactgatagacggtacaaaaagcatcggcctggtgctgaaaatgat

SEQ ID NO: 77507 - DNA, 438 bp, Glycine max
caccagctaagagctatgactgcacgctgcacgcgtgcttaagctccgaattcgggtcgagctcagaaaacggtcttgtatgatctcttaccctcactatgagaatctcacggtactaatcgccgagatcttgctatcaattagccttttgaatgctattggacaaattaaatgttgtttaagagaacgatgtcaagcggcgcaccacactggcgttatgcatgcaaacagccaattgtgcttgatgggagagatcccgcttgcccttactgagattgacgagcagtgcaagagctagacgagtagcgaggaattgcacccaaccataaccataccctgtcgtggcagacgggacacactcatccaaagcctgacatttacaatgctgtacatgcttttatggggcagagagggtctgaccatagatatgagcttatg

SEQ ID NO: 77508 - DNA, 371 bp, Glycine max
ctcgcaatggttaaagttaatgtagcatgtgctgctgttggcttgacatcaagttacactccaactccattgttggaatctggtttgcaaaaagacagagggttaattgtggagtattttggaaggatgtcttacgttgctcataacgttaatcagccccaagagaaagatttgttggagggaaatttttcctttgatattaaatctcgctctagattggaaaaagtttcctctacaaaagcacaatttgttagtggaaaaaccttcaaatatgatataattggtgctggttcacattcttcagaagattttcctgaaaaggaagatcaagaaaaacccaaaaagattgatgccagattgagacaaagaat

SEQ ID NO: 77509 - DNA, 394 bp, Glycine max
gaggagctggtgcaaagaatgctattctcatgaatatgccaaatgctgttctttcaatgtggagatattttgttggagatctcgtctttgaagtttctaagatgacttctccctacattaaatgtacagtctctttcttcatagcatttggaaatttggctgatgataccatcaattttgaggcttttccccacaagctggtgcagtttggagagattcaggaaaaagttgtattgaaattttcacaagaggaatttcttacagcttggtcaactcaggtgcgtcctgcaacaactctgttggctgatgggtgtccatatttgtatgcaatggtgcatgataattcagtgtctacaataccaggtgattttgtcattggtgtcaagttgacaac

SEQ ID NO: 77510 - DNA, 385 bp, Glycine max
  unsure (1)..(385): unsure at all n locations
atttcttacagcttggtcaactcaggtgcgtcctgcaacaactctgttggctgatgggtgtccatatttgtatgcaatggtgcatgatagttcagtgtctacaataccaggtgattttgtcattggtgtcaagttgacaaccataaacaatatgtgtgcatatgggctcaatcctggtatttcaggttctcgtcttttgggcaccattcctcagtccatttcacagcaaactgtttggaatcaaatggcaacagtgagaacaccattgaattttgattctagcaagcagagcttttgtcagttttctattgaccttctcngtggaggaatcttagtggacaaaacttgagattggatcacacttatacaaaattcttcaattaat

SEQ ID NO: 77511 - DNA, 363 bp, Glycine max
aatttggctgatgataccatcaattttgaggcttttccccacaagctggtgcagtttggagagattcaggaaaaagttgtattgaaattttcacaagaggaatttcttacagcttggtcaactcaggtgcgtcctgcaacaactctgttggctgatgggtgtccatatttgtatgcaatggtgcatgatagttcagtgtctacaataccaggtgattttgtcattggtgtcaagttgacaaccataaacaatatgtgtgcatatgggctcaatcctggtatttcaggttctcgtcttttgggcaccattcctcagtccatttcacagcaaactgtttggaatcaaatggcaacagtgagaaca

SEQ ID NO: 77512 - DNA, 370 bp, Glycine max
ggaaaaagttgtattgaaattttcacaagaggaatttcttacagcttggtcaactcaggtgcgtcctgcaacaactcttttggctgatgggtgtccatatttgtatgcaatggtgcatgatagttcagtgtctacaataccaggtgattttgtcattggtgtcaagttgacaaccataaacaatatgtgtgcatatgggctcaatcctggtatttcaggttctcgtcttttgggcaccattcctcagtccatttcacagcaaactgtttggaatcaaatggcaacagtgagaacaccattgaattttgattctagcaagcagagcttttgtcagttttctattgaccttctcggtggaggaatcttagtg

SEQ ID NO: 77513 - DNA, 375 bp, Glycine max
caaggatggcaatttgtaagaaagatgtttggagagttgaatgtggaatcccttctggatttccgctcacagttatttgcaatagcatttttaatgagatgctcattagatatagctatgaaaaattactgcgccaggctaaagctccaagtatgtttttacaatccttcaaaaattttgtttctttgtgtgtgtatggtgatgataacttaattagtgttcatgaatatgtcaagccttactttagtggttctaaattgaaaagctttctagctagtcataacatcaccattactgatggtattgacaaaactagtgcaactttgcaatttagaaagttagcagattgtgattttctcaagagaaactttaagc

SEQ ID NO: 77514 - DNA, 372 bp, Glycine max
ctcgagccgctcgagccgattcggctcgaggtttttaacaaacagcaacagtacagagcattttgatgcatgtaagtggacaaaatcagaaccacattcctgggaattgatcttcccaatagaggtatgtggtcctaataatggttttgaaatgtggagttctgagtgggcaaatcaaacttcatggcatttgagtttccttattgacaatcccaaacagtctacagtttttgatattctcttgggaatctctcaagattttgaaattgctggtaatactcttatgccagctttttctgttccacaggctactgccagatcttctgaaaatgcggaatcctctgcatgatctggaatttgtgttttctttcg

SEQ ID NO: 77515 - DNA, 356 bp, Glycine max
  unsure (1)..(356): unsure at all n locations
caccagctaagacgtatgatgcactctgcacgcagctcggaattcggatcgagcgggtgctgcatagatctggtgcgtagaggctcatatctacggggccgcggtgtgtgattcatgttcgacttgcttgtggaatctgaaacggagaaagtcggaaggccatgcatatggcatggttctagaggtattttttggcaggtacatcataaaatcgatgacaggagcagcatatccgacagaagatccagaccgtatcagcttgatccatcgatactagacccctgtatctggatcattaatcatcgtgtgtaagagcaggctacacaatgttgcacgatctgngatgtctgtaaaat

SEQ ID NO: 77516 - DNA, 351 bp, Glycine max
aaaaaaaaaaaaataaaaaaaaaaaaaaaaaaaaaaaaaaaaaagggaaaaaaaaaaaaaaaaaaaaaaaaaaaaaaaaaaaaaaaaaaaaaaaaaaaaaaaaaaaaaaaaaaaaaaaaaaaaaaaaaaaaaaaaaaaaaaaaaaaaaaaaatgggggggccccccctttaaaaaactctccccccccgaaataatttcggacccggtcccttaagggtaaccatttttcttttttggaggttttttaaaacttggccgaaaccagggaaaaacttttttccttgtaaaaattttttccctttacaatttccacaaaaataacaacccgaaaaaaaaaattttaaaccctg

SEQ ID NO: 77517 - DNA, 400 bp, Glycine max
gtttcgtgtaataatctggaaatgcaagaagcttatcttgtcaatctcgtaaatgtgttacgagaattgtatttgcacagtccagaggaagctcgccaattgagaaggaaagctctctctcgtattgaatggctgcaaaaagctgatgtgcctaccatagcacagattgaagagttccattcgatgcagaggatgatgaatgctcctgattcaaatgataatattgatttactgttgagcattgatttgttgggtttacaaggagcaggtaaagcttttccaaacaaaattgtttttgatgataagcttgtgttggctaacacacaagaattctttgatggaaattttccagtggattcttggttaccaatttttgtgaattgtctttatcctgtaagtc

SEQ ID NO: 77518 - DNA, 348 bp, Glycine max
cggctcgagattttaggtgcgtgggtacactttcggcatcaattcaggtgctgttgaagaacttgaacttgattcatttggactatccatcattccgtcaagtttggtaaggggtggcttctttgtacggtaaatagtacaagtacagaactattgattgcatgcaagttttgtgaatttaactggaaacatgtatcttatgcactggtggaggtttcctactaccagttttcacttgaatagtaacaaaaaaaattaagcaaaaccttattattagaatatatgaaaaatgtctcataatattaatattatatcttggaatatttttgagttattggtgcttatctc

SEQ ID NO: 77519 - DNA, 373 bp, Glycine max
aaaagctgatgtgcctaccatagcacagattgaagagttccattcgatgcagaggatgatgaatgctcctgattcaaatgataatattgatttactgttgagcattgatttgttgggtttacaaggagcaggtaaagcttttccaaacaaaattgtttttgatgataagcttgtgttggctaacacacaagaattctttgatggaaattttccagtggattcttggttaccaatttttgtgaattgtctttatcctgtaagtcaattaccttcagaagctgtcgttgtaaatgttacatgtggtagtggacgtggtggtttacccaccactgcttggattagttctgcagttaacaatcgctcctcagatatc

SEQ ID NO: 77520 - DNA, 374 bp, Glycine max
  unsure (1)..(374): unsure at all n locations
attgaagttgaagtcttgcccttctctcttcaactccaaacacaagacatcatcatccatggctgcctccgtctccactgtcggagctgtcaacagagctcttttgaacctgaatgggtctggacctggggtttcagctcccagttcatccttctttgggagcagcttgaagaaggttattggctcaagggtccccaacacaaagatttcctctggaagcttcaagattgttgctgtagaagagaagaaagagattgaagagacccagcagaccgacaaggacagatggaagggtcttgcctatgatatctcagacgaccaacaggacatcacangaggaaagggtttggttgactcccttttccaagctccac

SEQ ID NO: 77521 - DNA, 368 bp, Glycine max
gaaagttagcagattgtgattttctcaagagaaactttaagcagatgtctaatgttttgtgggtggctcctgaggacaaggcgagtttatggtcacaacttcattatgtttcgtgtaataatctggaaatgcaagaagcttatcttgtcaatctcgtaaatgtgttacgagaattgtatttgcacagtccagaggaagctcgtcaattgagaaggaaagctctctctcgtattgaatggctgcaaaaagctgatgtgcctaccatagcacagattgaagagttccattcgatgcagaagatgatgaatgctcctgattcaaatgataatattgatttactgttgagcattgatttgttgggtttacaa

SEQ ID NO: 77522 - DNA, 311 bp, Glycine max
aaaaaaaaacaaataaaaataaaaaacaaaaactactcaaaacagacgaagaatataaaaaaaattaaaaaccacaaaacatcaccaacttaaaaacaaccaccaaaatcttaacaccaataacttaacaaaaaaaaccacaagctaagacctaatcttctcaccatcaaaaatataataggtggggtgccccccaccttataccctcctccccccattattaatttcacccctgtctcctactgatttcccttttttcatttaatggtccactcttaactctagtgaaaatttgcgttccatgctttctt

SEQ ID NO: 77523 - DNA, 378 bp, Glycine max
ctaaaatatcatgaatctctgcaaggctctcagatcccttcctcgctttgtctcccaagtccctaagagaggcttcggaggtggtggacatggttccgaacaccatgcccctccccagaatgaaattacacaagctgatcttgataaatacaactatctcttccctggcccaaccaagtcagaaagcacctttgctttacacaatgttatcggaaaacttcctttcactagatcaaagggcttcatagaattcttggctaccaatttcaatactgatcaagctaatagcactactgaacgtttcgtacctcctaaggtccatgaaaattccgtctttatatatcaatctaaggagcttgctaatgctgttagaggatt

SEQ ID NO: 77524 - DNA, 343 bp, Glycine max
acaaaattctccaattagtaacttattgagagttgctgcttggaagaaaggctgtttaatggtcaagattgtgatgtctgggaatgcagcagtcaaaaggagtgattgggcctcattggtacaagtgtttttaacaaacagcaacagtacagagcattttgatgcatgtaagtggacaaaatcagaaccacattcctgggaattgatcttcccaatagaggtatgtggtcctaataatggttttgaaatgtggagttctgagtgggcaaatcaaacttcatggcatttgagtttccttattgacaataccaaacagtctacagattttgatattctcttggga

SEQ ID NO: 77525 - DNA, 366 bp, Glycine max
ctcaaatcaaacaactctggcggaggatactgctattgctcggcctgaatctgcatggctgatccacagccgctggttgtgaacgattccccgccaactcagtttcaaaacacacggatcgcctaccttgacgtcttgcgcggcctatctgtttttgtaattaactaactctgttagttcgttctttctttgcatactacgcaatcaatactatttctttctctctagaaatggtctcaacttatgatatgggtggatatatgctgattgcatcttccacatcattgatcatgccccctggaatgggattcactcggctgatttccgcatgcacttatacttttagtagctgaattgctcttgccc

SEQ ID NO: 77526 - DNA, 370 bp, Glycine max
gctgatgataccatcaattttgaggcttttccccacaagctggtgcagtttggagagattcaggaaaaagttgtattgaaattttcacaagaggaatttcttacagcttggtcaactcaggtgcgtcctgcaacaactctgttggctgatgggtgtccatatttgtatgcaatggtgcatgatagttcagtgtctacaataccaggtgattttgtcattggtgtcaagttgacaaccataaacaatatgtgtgcatatgggctcaatcctggtatttcaggttctcgtcttttgggcaccattcctcagtccatttcacagcaaactgtttggaatcaaatggcaacagtgagaacaccattgaattttg

SEQ ID NO: 77527 - DNA, 371 bp, Glycine max
  unsure (1)..(371): unsure at all n locations
gccaaatgctgttctttcaatgtggagatattttgttggagatctcgtctttgaagtttctaagatgacttctccctacattaaatgtacagtctctttcttcatagcatttggaaatttggctggtgataccatcaattttgaggcttttccccacaagctggtgcagtttggagagattcaggaaaaagttgtattgaaattttcacaagaggaatttcttacagcttggtcaactcaggtgcgtcctgcaacaactctgttggctgatgggtgtccatatttgtatgcaatggtgcatgatagttcagtgtctacaataccaggtgattntgtcattggtgtcaagttgacaaccataaacaatatgt

SEQ ID NO: 77528 - DNA, 394 bp, Glycine max
tgaaattttcacaagaggaatttcttacagcttggtcaactcaggtgcgtcctgcaacaactctgttggctgatgggtgtccatatttgtatgcaatggtgcatgatagttcagtgtctacaataccaggtgattttgtcattggtgtcaagttgacaaccataaacaatatgtgtgcatatgggctcaatcctggtatttcaggttctcgtcttttgggcaccattcctcagtccatttcacagcaaactgtttggaatcaaatggcaacagtgagaacaccattgaattttgattctagcaagcagagcttttgtcagttttctattgaccttctcggtggaggaatcttagtggacaaaactggagattggatcacacttatacaaaattc

SEQ ID NO: 77529 - DNA, 376 bp, Glycine max
gattgggcctcattggtacaagtgtttttaacaaacagcaacagtacagagcattttgatgcatgtaagtggacaaaatcagaaccacattcctgggaattgatcttcccaatagaggtatgtggtcctaataatggttttgaaatgtggagttctgagtgggcaaatcaaacttcatggcatttgagtttccttattgacaatcccaaacagtctacagtttttgatattctcttgggaatctctcaagattttgaaattgctggtaatactcttatgccagctttttctgttccacaggctactgccagatcttctgaaaatgcggaatcctctgcatgatctggaatttgtgttttctttcgcttgttcgttt

SEQ ID NO: 77530 - DNA, 387 bp, Glycine max
  unsure (1)..(387): unsure at all n locations
cacacactggtccacagtcatggcaaccagctcgacgttcagccagcagctgctgcagaagtatggcgccgaatttgagcgcgcaacgcaacacccgttcctcacggccgccggccagggctcgctagacaagaaagtgctggttgggtggctgcgacaggactatctgtacgcgtacgtggggtacatcaagttcgcttccatcctcatctcgcgcctcccttaccctaccgttccccccacaccatcatcttctggcacagccgacggagcgggcgcgggcgcgccgccgagccgggagcacgtnctgcacaaggccctctcgacgctcatcttttccctgtccaacgtcaagcgcgagacggggtttttcgtcgagacggcacg

SEQ ID NO: 77531 - DNA, 68 bp, Glycine max
aaaaaataaaaaataaaaaaaaaaaaaaaaaaaaaaagaagaaagggaaaaaaaataaagaaaaaaaa

SEQ ID NO: 77532 - DNA, 376 bp, Glycine max
cacaagccaagtgaaagtgagaaaaaataaaaatcaacgagcataatgtcagggatcattcacaagattggggagacccttcatgtgggagggcacaagaaggaggaggagcataagggtgagcaccatgctggagaatacaaaggggagcaccatggtgaacacagtattgagtacaaaggagagcatcatggtgaacacaaagctggagagtaccatggtgagcacaagccagagcacaaagaggggatcctagacaaagtcaaggacaagatccatggtgagggcggcgccgccgatggctagaagaagaagaaggataacaagaaaaacgagcattgccatgagcatggccatgacaacagcatctgcagtg

SEQ ID NO: 77533 - DNA, 395 bp, Glycine max
gtgagaacaccattgaattttgattctagcaagcagagcttttgtcagttttctattgaccttctcggtggaggaatcttagtggacaaaactggagattggatcacacttatacaaaattctccaattagtaacttattgagagttgctgcttggaagaaaggctgtttaatggtcaagattgtgatgtctgggaatgcagcagtcaaaaggagtgattgggcctcattggtacaagtgtttttaacaaacagcaacagtacagagcattttgatgcatgtaagtggacaaaatcagaaccacattcctgggaattgatcttcccaatagaggtatgtagtcctaataatggttttgaaatgtggagttctgagtgggcacatcaaacttcatg

SEQ ID NO: 77534 - DNA, 402 bp, Glycine max
aaagctttctagctagtcataacatcaccattactgatggtattgacaaaactagtgcaactttgcaatttagaaagttagcagattgtgattttctcaagagaaactttaagcagatgtctaatgttttgtgggtggctcctgaggacaaggcgagtttatggtcacaacttcattatgtttcgtgtaataatctggaaatgcaagaagcttatcttgtcaatctcgtaaatgtgttacgagaattgtatttgcacagtccagaggaagctcgccaattgagaaggaaagctctctctcgtattgaatggctgcaaaaagctgatgtgcctaccataacacagattgaagagttccattcgatgcagaggatgatgaatgctcctgattcaaatgataata

SEQ ID NO: 77535 - DNA, 377 bp, Glycine max
cttttgggcaccattcctcagtccatttcacagcaaactgtttggaatcaaatggcaacagtgagaacaccattgaattttgattctagcaagcagagcttttgtcagttttctattgaccttctcggtggaggaatcttagtggacaaaactggagattggatcacacttatacaaaattctccaattagtaacttgttgagagttgctgcttggaagaaaggctgtttaatggtcaagattgtgatgtctgggaatgcagcagtcaaaaggagtgattgggcctcattggtacaagtgtttttaacaaacagcaacagtacagagcattttgatgcatgtaagtggacaaaatcagaaccacattcctgggaatt

SEQ ID NO: 77536 - DNA, 374 bp, Glycine max
gctgatgataccatcaattttgaggcttttccccacaagctggtgcagtttggagagattcaggaaaaagttgtattgaaattttcacaagaggaatttcttacagcttggtcaactcaggtgcgtcctgcaacaactctgttggctgatgggtgtccatatttgtatgcaatggtgcatgatagttcagtgtctacaataccaggtgattttgtcattggtgtcaagttgacaaccataaacaatatgtgtgcatatgggctcaatcctggtatttcaggttctcgtcttttgggcaccattcctcagtccatttcacagcaaactgtttggaatcaaatggcaacagtgagaacaccattgaattttgattc

SEQ ID NO: 77537 - DNA, 246 bp, Glycine max
agacttcatggcatttgagtttccttattgacattcccgaactggatagagttcaggctattctcttgtgaatcttttaagattatggaatggctggtaatactcttatgctcactttttctgtgccacaggctaatgccacatcttttgaaaatgcggaatactctgcatgagcttctgaaaatgcggaatcctctgcgtgatctgggatctgtgaattctttcacttgttcgattgtttaattc

SEQ ID NO: 77538 - DNA, 370 bp, Glycine max
caacaactctgttggctgatgggtgtccatatttgtatgcaagggtgcatgatagttcagtgtctacaataccaggtgattttgtcattggtgtcaagttgacaaccataaacaatatgtgtgcatatgggctcaatcctggtatttcaggttctcgtcttttgggcaccattcctcagtccatttcacagcaaactgtttggaatcaaatggcaacagtgagaacaccattgaattttgattctagcaagcagagcttttgtcagttttctattgaccttctcggtggaggaatcttagtggacaaaactggagattggatcacacttatacaaaattctccaattagtaacttattgagagttgctgc

SEQ ID NO: 77539 - DNA, 139 bp, Glycine max
ctaccccctaaccttttatcaatatacttccacaatctcattcgggggtgtttaatatacattccataaacccactcttcatattttccccagtatttcaagtttacaacctctcttaacacttcttatgtttagagtt

SEQ ID NO: 77540 - DNA, 399 bp, Glycine max
attcctcagtccatttcacagcaaactgtttggaatcaaatggcaacagtgagaacaccattgaattttgattctagcaagcagagcttttgtcagttttctattgaccttctcggtggaggaatcttagtggacaaaactggagattggatcacacttatacaaaattctccaattagtaacttgttgagagttgctgcttggaagaaaggctgtttaatggtcaagattgtgatgtctgggaatgcagcagtcaaaaggagtgattgggcctcattggtacaagtgtttttaacaaacagcaacagtacagagcattttgatgcatgtaagtggacaaaatcagaaccacattcctgggaattgatcttcccaatagaggtatgtggtcctaataat

SEQ ID NO: 77541 - DNA, 370 bp, Glycine max
tgctctcaagactgtgaattgtggaatcctgcttgcacaaaagcaatgactatgtcatttaatccaaacccgtgttctgatgcatggagtttggaatttctgaagcgtactggatttcattgcgatatcatttgtgtcactggatggactgccaccccaatgcaggatgttcaggttacaattgattggtttatttcctctcaggaatgtgttcccaggacctattgtgttttaaatccacaaaatccttttgtgttaaataggtggatgggaaaattgactttcccccagggcacttcccgaagtgttaagagaatgcctctttctatagggggaggagctggtgcaaagaatgctattctcatgaata

SEQ ID NO: 77542 - DNA, 377 bp, Glycine max
ggcagcccaaataacaacgacaacatctcccccacctctcttcccctgtagcaccaaacttaactctcacaacccgcctatacaatatgtccgacgtcgctaagccagaccccgccgcggatcagacggccgcacctggagccactcttgtcaaggacgagaccgcgaaggtcaccaccgacaaactgtccgacaagcctgagaatgcgggggcaacttcgaccgatgacaagcccatcacagagaaggccaccgaggctgccacttctgctgcagcggcagtgaaggacaacgtcttttctatgtttggtggcggccctgcaaaggctaagaaggaggagacagacgatgttgatgagccgtcaggtgccaccaag

SEQ ID NO: 77543 - DNA, 195 bp, Glycine max
ctgaaatcgaactttttcattctgggtcgcattcaatgggagtgggcgggtgattggtgaagccacatacatatatgcatctgctaacgcatgaaacactgtgtttgatgccacgcctgtcattggacgcacacttagcgactaagtcagtaagaaagatgctaaacattttgcatttactatcttacaacgtga

SEQ ID NO: 77544 - DNA, 215 bp, Glycine max
gagaacaccgtttgcgaagtgcttgccaggctccactctttgtggcagtttgatggttggtagcgcgccacttttttcctgcgcccagtcaccacctgtttccatgattaccgtatacaggcttgggtggctaggctgagacgactgctgcgtaatagtataatagcattgtgatccccagtcttgatgatggtagagtaactacttttgctttt

SEQ ID NO: 77545 - DNA, 201 bp, Glycine max
gtttcttacaaggctctactctactgcttcaccttctgctctagaaaattcagtggtgatacatggcttcggctactctctctgtagccaaaccagcccttcaggcaaatgggaaaggcttctctgaattctctggcctccgcagctcatcaggcttccttcccttttctagaaaatcttcagaggatttccattctgtca

SEQ ID NO: 77546 - DNA, 370 bp, Glycine max
gcaacagtacagagcattttgatgcatgtaagtggacaaaatcagaaccacattcctgggaattgatcttcccaatagaggtatgtggtcctaataatggttttgaaatgtggagttctgagtgggcaaatcaaacttcatggcatttgagtttccttattgacaatcccaaacagtctacagtttttgatattctcttgggaatctctcaagattttgaaattgctggtaatactcttatgccagctttttctgttccacaggctactgccagatcttctgaaaatgcggaatcctctgcatgatctggaatttgtgttttctttcgcttgttcgtttgtttaattcaataaaggaaattaagcatgac

SEQ ID NO: 77547 - DNA, 320 bp, Glycine max
gtttcttacaaggctctactctactgcttcaccttctgctctagaaaattcagtggtgatacatggcttcggctactctctctgtagccaaaccagcccttcaggcaaatgggaaaggcttctctgaattctctggcctccgcagctcatcaggcttccttcccttttctagaaaatcttcagaggatttccattctgtcattgccttccagacctatgcagttggaagcagtggaggatacaagaagggtgtgacagaagcaaaactgaaggttgccataaacggatttggaaggattggaaaggacttcttgaggtgc

SEQ ID NO: 77548 - DNA, 263 bp, Glycine max
gatcataacccctttttctttgcattgcagcatcaaacttcaggggcgacattcctcagtccatttgacatcaaactgaatgtaatcaccatacaacatccttaccactattggctcattattctaactagcagatctcatctcttgcgctccattacctaatccatgtcacaatcttctcattcaaatctaaagattagatcgcactcacccataaatcttcattctgacactcatagctactggctgctttctataaaccc

SEQ ID NO: 77549 - DNA, 218 bp, Glycine max
gagaagtcccttttcgctacatcttacaccgatggacaagaaatgccgaggatggtgtttttcctgacatggaatcatggattagctcttaaggacttaaaaattttgttcctttggagtttaagagaaactgcatctaaatccttaattgctgttgcaccatctttggaaagtattaactttgccttcaaattttacgcgagggtgggagaaagctt

SEQ ID NO: 77550 - DNA, 320 bp, Glycine max
gtccccagcagtgtttgtatatctggcacagatggttcaagatgggacactgtcatcatggatgaaagactcgcagtaaaacttgaagtcactatgagaatagcaaataaccaaggtgctagcacagctcgagccaagttgctcttcacaggttctcctacatataagaaaatattcaagagtttaattttgataaactgaaacaattagaattggttcttgatatggcttaattactacaaaagttaacaactttcaattatatgataattcataaaaaaaaaaaaaaaaaaaaaaattataattaatataaatataat

SEQ ID NO: 77551 - DNA, 103 bp, Glycine max
ccaaaaaaattctctataggtcgatactcttgatcgtagcgaatctctgttgtcgactgaacaacacaacgggtgtgcggtcatttattgctcactcaacaat

SEQ ID NO: 77552 - DNA, 367 bp, Glycine max
cggctcgagcggctcgagaaacaatatgtgtgcatatgggctcaatcctggtatttcaggttctcgtcttttgggcaccattcctcagtctatttcacagcaaactgtttggaatcaaatggcaacagtgagaacaccattgaattttgattctagcaagcagagcttttgtcaattttctattgaccttctcggtggaggaattttagtggacaaaactggagattggatcacacttatacaaaattctccaattagtaacttgttgagagttgctgcttggaagaaaggctgtttaatggttaaaattgtgatgtctgggaatgcagcagtcataatgagtgattgagcctcattggtcaagtgt

SEQ ID NO: 77553 - DNA, 284 bp, Glycine max
gccaaatgctgttctttcaatgtggagatattttgttggagatctcgtctttgaagtttctaagatgacttctccctacattaaatgtacagtctctttcttcatagcatttggaaatttggctgatgataccatcaattttgaggcttttccccacaagctggtgcagtttggagagattcacgaaaaagttgtattgaaattttcacaagaggaatttcttacagcttggtcaactcaggtgcgtcctgcaacaactctgttggctgatgggtgtccatatt

SEQ ID NO: 77554 - DNA, 363 bp, Glycine max
ctaatgctatcatcatgatgaccctcacttatacaacgagtgtgcattgtcatctgggcatgcaagatgctgaacaaagtacagctgacgccatagcagctcgaaaggcttatgtgagtacaagtccttcaatgctactgatacacgcttttcgttgaggacacgaaggagtttgacgagatgcgaaaataatccttgtcacaccccacaatatgtctactccatggcatagcgccacgcgtgttatgctttatcgaacacactagctacatgcacggctcaaatttttttatctggtctgggccgataccatggatgactcctacagatcctgtgcaaatctaagatgtactgaacaggatt

SEQ ID NO: 77555 - DNA, 412 bp, Glycine max
gaactttacatacaggtcctaaagccaagataatggcaagttttggaatgtttctctttttgttttggtttgagtgtgtgagcaaatgctcgaaggttgagctagctacctcatttaaaagtgaaggtatgtcacttgcacttttagatagcctaatacgagggattttgagcagtggtgatataaaaataattgaaaatttttgataatgaaaattttttaaatttgtttttttcaagtgttttttgtctttacttttgttgtctggtttgtttccataatatttttttattggtacgggttttttctttttcttttgtttttatttttttttatcttttagtatttattatttcatgtttttttttttatttgttttttatttttctttatttcttatatttttttttct

SEQ ID NO: 77556 - DNA, 231 bp, Glycine max
ctgctggagccggtgttgatgtctttgttatcgacactggagggtacactgagcatcaagagttcagcggaggtcgtgcaactatggtgtacaacgctatcactacagagtcggaccaagatctcaacggacacggaacttactgagcaggaactatcggaggtaccacttatggtgttgctaagaaggacactatcacgggagtgacagtacttgctggtaacggatcag

SEQ ID NO: 77557 - DNA, 145 bp, Glycine max
ctcaaaccaaatatgctaaaagccctacactaaatctgggggggctttatttatagcatttgtaacttaaactgatcataccattatttttcagggtctgaccaaaaaactggtgcaaaaaatagagattcacgaatatggggtg

SEQ ID NO: 77558 - DNA, 320 bp, Glycine max
ccttctttcattttcagatgattgcctgtgtttaagggggatatatcgtgtggtgcacgctcctaaccaaaaaatactaaaggcgcgcttaatgctcagtttcgcggatggcgcaaagtaatagacaactaccgtatacacaaggggctgtgcgccccaaactatttcgggaacccgttaacataatgtggcccatgtcgaccgggtttgcaatcatgctctgattgatggcttacagagcattgcagaatgtaacgaatattgtgggaccaacctataaatggaggtggatataagcccacaccactattcctccaatg

SEQ ID NO: 77559 - DNA, 403 bp, Glycine max
agaagcttatcttgtcaatctcgtaaatgtgttacgagaattgtatttgcacagtccagaggaagctcgccaattgagaaggaaagctctctctcgtattgaatggctgcaaaaagctgatgtgcctaccatagcacagattgaagagttccattcgatgcagaggatgatgaatgctcctgattcaaatgataatattgatttactgttgagcattgatttgttgggtttacaaggagcaggtaaagcttttccaaacaaaattgtttttgatgataagcttgtgttggctaacacacaagaattctttgatggaaattttccagtggactcttggttaccaatttttgtgaattgtctttatcctgtaagtcaattaccttcagaagctgtcgttgtaaat

SEQ ID NO: 77560 - DNA, 404 bp, Glycine max
ctgagtcttgcaattgaagttgaagtcttgcccttctctcttcaactccaaacacaagacatcatcatccatggctgcctccgtctccactgtcggagctgtcaacagagctcttttgaacctgaatgggtctggacctggggtttcagctcccagttcatccttctttgggagcagcttgaagaaggttattggctcaagggtccccaacacaaagatttcctctggaagcttcaagattgttgctgtagaagagaagaaagagattgaagagacccagcagaccgacaaggacagatggaagggtcttgcctatgatatctcagacgaccaacaggacatcacaagaggaaagggtttggttgactcccttttccaagctccacaggatgctggaactcact

SEQ ID NO: 77561 - DNA, 406 bp, Glycine max
aacttcattatgtttcgtgtaataatctggaaatgcaagaagcttatcttgtcaatctcgtaaatgtgttacgagaattgtatttgcacagtccagaggaagctcgccaattgagaaggaaagctctctctcgtattgaatggctgcaaaaagctgatgtgcctaccatagcacagattgaagagttccattcgatgcacaggatgatgaatgctcctgattcaaatgataatattgatttactgttgagcattgatttgttgggtttacaaggagcaggtaaagctcttccaaacaaaattgtttttgatgataagcttgtgttggctaacacacacgaattctttgatggaaattttccagtggattcttggttaccaatatttgtgaattgtctctatcctgt

SEQ ID NO: 77562 - DNA, 179 bp, Glycine max
ggaaggaggttgttatttattatgctttttgcttgcagaaattggctggcctgccaattccctctggcattagaatttgaaattgagacgtcacttattgctttggggcatatgtatattcaggatctagtcggcattcatggctcatgaagtctggtattattgcttttgcacatatt

SEQ ID NO: 77563 - DNA, 407 bp, Glycine max
agcttatcttgtcaatctcgtaaatgtgttacgagaattgtatttgcacagtccagaggaagctcgccaattgagaaggaaagctctctctcgtattgaatggctgcaaaaagctgatgtgcctaccatagcacagattgaagagttccattcgatgcagaggatgatgaatgctcctgattcaaatgataatattgatttactgttgagcattgatttgttgggtttacaaggagcaggtaaagcttttccaaacaaaattgtttttgatgataagcttgtgttggctaacacacaagaattctttgatggaaattttccagtggattcttggttaccaatttttgtgaattgtctttatcctgtaagtcaattaccttcagaagctgtcgttgtaaatgttacat

SEQ ID NO: 77564 - DNA, 403 bp, Glycine max
cttcattatgtttcgtgtaataatctggaaatgcaagaagcttatcttgtcaatctcgtaaatgtgttacgagaattgtatttgcacagtccagaggaagctcgccaattgagaaggaaagctctctctcgtattgaatggctgcaaaaagctgatgtgcctaccatagcacagattgaagagttccattcgatgcagaggatgatgaatgctcctgattcaaatgataatattgatttactgttgagcattgatttgttgggtttacaaggagcaggtaaagcttttccaaacaaaattgtttttgatgataagcttgtgttggctaacacacaagaattctttgatggaaattttccagtggattcttggttaccaatttttgtgaattgtctttatcctg

SEQ ID NO: 77565 - DNA, 398 bp, Glycine max
ggtcaagattgtgatgtctgggaatgcagcagtcaaaaggagtgattgggcctcattggtacaagtgtttttaacaaacagcaacagtacagagcattttgatgcatgtaagtggacaaaatcagaaccacattcctgggaattgatcttcccaatagaggtatgtggtcctaataatggttttgaaatgtggagttctgagtgggcaaatcaaacttcatggcatttgagtttccttattgacaatcccaaacagtctacagtttttgatattctcttgggaatctctcaagattttgaaattgctggtaatactcttatgccagctttttctgttccacaggctactgccagatcttctgaaaatgcggaatcctctgcatgatctggaatttgtg

SEQ ID NO: 77566 - DNA, 403 bp, Glycine max
gagtgattgggcctcattggtacaagtgtttttaacaaacagcaacagtacagagcattttgatgcatgtaagtggacaaaatcagaaccacattcctgggaattgatcttcccaatagaggtatgtggtcctaataatggttttgaaatgtggagttctgagtgggcaaatcaaacttcatggcatttgagtttccttattgacaatcccaaacagtctacagtttttgatattctcttgggaatctctcaagattttgaaattgctggtaatactcttatgccagctttttctgttccacaggctactgccagatcttctgaaaatgcggaatcctctgcatgatctggaatttgtgttttctttcgcttgttcgtttgtttaattcaataaaggaaatta

SEQ ID NO: 77567 - DNA, 306 bp, Glycine max
acaagaacccatcccctccccagccgctcccaaaatctcactctgcttactcttcttgctccaagagaagcaaacatccctgactttcaccacatcagcacacactgacaaagacaaccttgtgcgactccaatctaaacctatcaagcctgcgttcgaaaacctagagatccctgggcgagtaatcaagcccaagagtaggtgtatcatggacgctggtggccctggtgttgtagtctacaactggtggacaccgtggctgtagcctttgctaaaataaagcgagaatgttctatgcacgcttca

SEQ ID NO: 77568 - DNA, 353 bp, Glycine max
cgaagtgttaagagaatgcctctttctatagggggaggagctggtgcaaagaatgctattctcatgaatatgccaaatgctgttctttcaatgtggagatattttgttggagatctcgtctttgaagtttctaagatgacttctccctacattaaatgtacagtctctttcttcatagcatttggaaatttggctgatgataccatcaattttgaggcttttccccacaagctggtgcagtttggagagattcaggaaaaagttgtattgaaattttcacaagaggaatttcttacagcttggtcaactcatgtgcgttctgcaacaactctgttggctgatgggtgtccata

SEQ ID NO: 77569 - DNA, 403 bp, Glycine max
agccttactttagtggttctaaattgaaaagctttctagctagtcataacatcaccattactgatggtattgacaaaactagtgcaactttgcaatttagaaagttagcagattgtgattttctcaagagaaactttaagcagatgtctaatgttttgtgggtggctcctgaggacaaggcgagtttatggtcacaacttcattatgtttcgtgtaataatctggaaatgcaagaagcttatcttgtcaatctcgtaaatgtgttacgagaattgtatttgcacagtccagaggaagctcgccaattgagaaggaaagctctctctcgtattgaatggctgcaaaaagctgatgtgcctaccatagcacagattgaagagttccattcgatgcacaggatgat

SEQ ID NO: 77570 - DNA, 227 bp, Glycine max
attctcaactatcctatttttagcaaccatctaagaagttcagggcctgaattatctctcaccttgcatgagaaaagcattcaaagctaagaacccaatttcactgattgcacctcaaacatctgcatgaagtcccaattgagtctcaattccacatccatccatgcatagttaactgtcacgcactgatacatacatctctgattacactgtccccaagaagttcc

SEQ ID NO: 77571 - DNA, 405 bp, Glycine max
ctcgtctttgaagtttctaagatgacttctccctacattaaatgtacagtctctttcttcatagcatttggaaatttggctgatgataccatcaattttgaggcttttccccacaagctggtgcagtttggagagattcaggaaaaagttgtattgaaattttcacaagaggaatttcttacagcttggtcaactcaggtgcgtcctgcaacaactctgttggctgatgggtgtccatatttgtatgcaatggtgcatgatagttcagtgtctacaataccaggtgattttgtcattggtgtcaagttgacaaccataaacaatatgtgtgcatatgggctcaatcctggtatttcaggttctcgtcttttgggcaccattcctcagtccatttcacagcaaact

SEQ ID NO: 77572 - DNA, 409 bp, Glycine max
atcttagtggacaaaactggagattggatcacacttatacaaaattctccaattagtaacttattgagagttgctgcttggaagaaaggctgtttaatggtcaagattgtgatgtctgggaatgcagcagtcaaaaggagtgattgggcctcattggtacaagtgtttttaacaaacagcaacagtacagagcattttgatgcatgtaagtggacaaaatcagaaccacattcctgggaattgatcttcccaatagaggtatgtggtcctaataatggttttgaaatgtggagttctgagtgggcaaatcaaacttcatggcatttgagtttccttattgacaatcccaaacagtctacagtttttgatattctcttgggaatctctcaagattttgaaattgctggta

SEQ ID NO: 77573 - DNA, 400 bp, Glycine max
gaaatgataaacagtctttgtggtggtgatgaaaaattgatgcgtgaaaggacgcacctgctgttggcttgttgttcaaggatggcaatttgtaagaaagatgtttggagagttgaatgtggaatcccttctggatttccgctcacagttatttgcaatagcatttttaatgagatgctcattagatatagctatgaaaaattactgcgccaggctaaagctccaagtatgtttttacaatccttcaaaaattttgtttctttgtgtgtgtatggtgatgataacttaattagtgttcatgaatatgtcaagccttactttagtggttctaaattgaaaagctttctagctagtcataacatcaccattactgatggtattgacaaaactagtgcaactt

SEQ ID NO: 77574 - DNA, 404 bp, Glycine max
ataccattgtgcttattgaaccagacatgaattcaaggtttcagcttttgagtaccactaccaatggtgattttgttcaagggaaagatctcgcaatggttaaagttaatgtagcatgtgctgctgttggcttgacatcaagtcacactccaactccattgttggaatctggtttgcaaaaagacagagggttaattgtggagtattttggaaggatgtcttacgttgctcataacgttaatcagccccaagagaaagatttgttggagggaaatttttcctttgatattaaatctcgctctagattggaaaaagtttcctctacaaaagcacaatttgttagtggaaaaaccttcaaatatgatataattggtgctggttcacattcttcagaagattttcct

SEQ ID NO: 77575 - DNA, 407 bp, Glycine max
atgggctcaatcctggtatttcaggttctcgtcttttgggcaccattcctcagtccatttcacagcaaactgtttggaatcaaatggcaacagtgagaacaccattgaattttgattctagcaagcagagcttttgtcagttttctattgaccttctcggtggaggaatcttagtggacaaaactggagattggatcacacttatacaaaattctccaattagtaacttgttgagagttgctgcttggaagaaaggctgtttaatggtcaagattgtgatgtctgggaatgcagcagtcaaaaggagtgattgggcctcattggtacaagtgtttttaacaaacagcaacagtacagagcattttgatgcatgtaagtggacaaaatcagaaccacattcctgggaa

SEQ ID NO: 77576 - DNA, 155 bp, Glycine max
tttggaaatattgttaacgctacgataaaatttgtggttctggtggaccaacgggtgcaagttggaaagattaaggaaaaattagctttgaaatgttcacatgtggaactctactcagccgggtcaacgcatgtgcgatttggatcatcaattgt

SEQ ID NO: 77577 - DNA, 69 bp, Glycine max
ctcatactagaatttaaatagacagtggataaaacaaacacaatggtggagtgttattttactattatc

SEQ ID NO: 77578 - DNA, 333 bp, Glycine max
atcaaacttcatggcatttgagtttcctcattgacaatcccaagcgaggggacagtttttgatattctcttgggaatctctcaagattttgaaattgctggtaatactcttatgccagctttttctgttccacaggctactgccagatcttctgaaaatgcggaatcctctgcatgatctggaatttgtgttttcttccgcctgtccggctgtttaattcaataaaggaaattatgcataaccgcttggttgtgtatgctctgcctattttaatatttccacaccttgtttaatcgtcgtaacgatttgtgatgtgagtgtcctttttaaaaa

SEQ ID NO: 77579 - DNA, 407 bp, Glycine max
ctcctgaggacaaggcgagtttatggtcacaacttcattatgtttcgtgtaataatctggaaatgcaagaagcttatcttgtcaatctcgtaaatgtgttacgagaattgtatttgcacagtccagaggaagctcgccaattgagaaggaaagctctctctcgtattgaatggctgcaaaaagctgatgtgcctaccatagcacagattgaagagttccattcaatgcagaggatgatgaatgctcctgattcaaatgataatattgatttactgttgagcattgatttgttgggtttacaaggagcaggtaaagcttttccaaacaaaattgtttttgatgataagcttgtgttggctaacacacaagaattctttgatggaaattttccagtggattcttggtta

SEQ ID NO: 77580 - DNA, 372 bp, Glycine max
acctcatttttcatatttcatggtgttaacaacttcatggcggggtttgttttccaccttatcatcaccatccctcaccattttattactcctttctctccctttattcctgttttccctgtccataagtttctcttgcctatcttatttaatattactttattcttattttattttcttccaattttgctcttttctttcttcctttttcctttctgttttatttcatatccttttaattttattttttgttattaacttccttttatttttttatactttctcttattttttattatatctcttctattcttctttttaatatttgtttttctccctttatttttttcattattaatatttttctctttt

SEQ ID NO: 77581 - DNA, 405 bp, Glycine max
ctggtttgcaaaaagacagagggttaattgtggagtattttggaaggatgtcttacgttgctcataacgttaatcagccccaagagaaagatttgttggagggaaatttttcctttgatattaaatctcgctctagattggaaaaagtttcctctacaaaagcacaatttgttagtggaaaaaccttcaaatatgatataattggtgctggttcacattcttcagaagattttcctgaaaaggaagatcaagaaaaacccaaaaagattgatgccagattgagacaaagaatagatcctcaatacaatgaggttcaggctcagatggaaacaaatttgtttaaattgtctcttgatgatgttgaaactcctaaaggttccatgttggatctgaaaatttctcaat

SEQ ID NO: 77582 - DNA, 409 bp, Glycine max
atgaaggtcttcggtttcctcgctgctgctcttgtcatcgccggcgctgctggccagagcaccaccactcctcccaccaccactggttccccctccactcctaccaactctccctccagcactccctctacttccggaaccccccccactacgggcaatcccaacagtgccactccgtccactccgtccactccgagttcgcctagttctagtactaactcgcccaactccaccccgaacccttccagcacccctactggcacgacgccttccacacccttctctggatccaatggatctaacaatgggttgaacggagctgctttggagactacggacaccaaggaaccgactgacaccaacagtccggatactcccaccaccctcagtaccacggaatcgtcgcact

SEQ ID NO: 77583 - DNA, 330 bp, Glycine max
  unsure (1)..(330): unsure at all n locations
gcagaaagcaagctcatcctagagttttaaaaatggcagcaggctcctccatggctctctcttccccatccttggctggcaatggccgtgaagctgggcccatcagcccccgaagtcgggagggtcagcatgaggaagaccgtcaccaagcaggcctgctccggaagcccatggtacggcccaaaccgcgtcaagtacttgggcccattctctggcgagcccccgtcctaccttactggcgagttcccaggtgactacggctgggacactgctgagctntcggccgacccagaaaccttcgccagaaaccgtgagctcgaagtgatccac

SEQ ID NO: 77584 - DNA, 377 bp, Glycine max
cacgcgcacgcgagctcgggatccggattcagcgagagatgcgtattttcactttcacacacgaagctcgccaatttagaaggaaagcgctctctcgcattgaatggcaaccaaaagctgttgtacctaccccatcacatattgcccagatccatatgcatccattgatgttatacgctcttgagtcagatgataatattgttctactcacccccatggatctgttgttggaacaaccagcgtgtttagctcattacaaacatattaaaattggaaaagccccaccttgtagcgcacacacaactattcttttacggaatttttagtgaccaactttgtttaccgcttatctctaaaaatcgatcattcgttcaatt

SEQ ID NO: 77585 - DNA, 221 bp, Glycine max
ttggttttcatattatcacgtaaaagcctttccaaacaaagagggggtttgattataaaacatgagctgtccatacacaccaccaaattctttgtttcgaaattttttcagacgcttcttttgtcaccaaactttgttaactttcttaatccttttatataattaccttcaaaaacattcctctcaaaacataccatttctctccggactctcctattttt

SEQ ID NO: 77586 - DNA, 281 bp, Glycine max
ctcgaaaccaaatcctccataaaacaaagcatcgtcaaacagtgattcaaaggtgttttccttacaatgactaccactacccaccccctgccccattctacaaccctttctatctacaaaaatttttcttttttctagcccacattttcctgttcttcgcctccctcctttttctctatgtcaccattcttacctgtctttgcttctttcaccaaacagccacccccttcaatcccttcattttcttcatcttttctttgccataccttaataccattttt

SEQ ID NO: 77587 - DNA, 125 bp, Glycine max
gcaaaattcgcagcaaccgagctgctcttgaggacggaaacaataccgtatctaggtttcgctgtagctgaattgccatggtatctacagcgatagccttgtttgccttcattctcgccgtcaac

SEQ ID NO: 77588 - DNA, 305 bp, Glycine max
cccccttccgtaagctcggaattcggcttcgagcttcaaagaccacgtatgcctctctctcttggctaattgggggccccctctcgcaaaaaataactcccggggggggtgcattttcgccgcaatggggcaataaaaaacaccgtacacactttgactggttacaaacaaaagcggcgtgtacggataccagctttttaaatttccacattggccctaattcctgtggataatggtttttaattattggataccatttctaatacattttacaggaaggttggttcaatcctaatgccaaaagc

SEQ ID NO: 77589 - DNA, 308 bp, Glycine max
gctagttttgatggtttgattaccaagcaagttatgagcaagatggcagaaatgataaacagtctttgtggtggtgatgaaaaattgatgcgtgaaaggacgcacctgctgttggcttgttgttcaaggatggcaatttgtaagaaagatgtttggagagttgaatgtggaatcccttctggatttccgctcacagttatttgcaatagcatttttaatgagatgctcattagatatagctatgaaaaattactgcgccaggcttaaagctcaagtatgtttttacaatccttcaaaaaattttgttc

SEQ ID NO: 77590 - DNA, 408 bp, Glycine max
ctcaagagaaactttaagcagatgtctaatgttttgtgggtggctcctgaggacaaggcgagtttatggtcacaacttcattatgtttcgtgtaataatctggaaatgcaagaagcttatcttgtcaatctcgtaaatgtgttacgagaattgtatttgcacagtccagaggaagctcgccaattgagaaggaaagctctctctcgtattgaatggctgcaaaaagctgatgtgcctaccatagcacagattgaagagttccattcgatgcagaggatgatgaatgctcctgattcaaatgataatattgatttactgttgagcattgatttgttgggtttacaaggagcaggtaaagcttttccaaacaaaattgtttttgatgataaacttgtgtttgcttacaca

SEQ ID NO: 77591 - DNA, 347 bp, Glycine max
gattcaggaaaaagttgtattgaaattttcacaagaggaatttcttacagcttggtcaactcaagtgcgtcctgcaacaactctgttggctgatgggtgtccatatttgtatgcaatggtgcatgatagttcagtgtctacaataccaggtgattttgtcattggtgtcaagttgacaaccataaacaatatgtgtgcatatgggctcaatcctggtatttcaggttctcgtcttttgggcaccattcctcagtccatttcacagcaaactgtttggaatcaaatggcaacagtgagaacaccattgaattttgattctagcaagcagagcttttgtcaattttcta

SEQ ID NO: 77592 - DNA, 369 bp, Glycine max
gtaataatctggaaatgcaagaagcttatcttgtcaatctcgtaaatgtgttacgagaattgtatttgcacagtccagaggaagctcgccaattgagaaggaaagctctctctcgtattgaatggctgcaaaaagctgatgtgcctaccatagcacagattgaagagttccattcgatgcagaggatgatgaatgctcctgattcaaatgataatattgatttactgttgagcattgatttgttgggtttacaaggagcaggtaaagcttttccaaacaaaattgtttttgatgataagcttgtgttggctaacacacaagaattctttgatggaaattttccagtggattctttgttaccaaattttt

SEQ ID NO: 77593 - DNA, 340 bp, Glycine max
tttcacagcaaactgtttggaatcaaatggcaacagtgagaacaccattgaattttgattctagcaagcagagcttttgtcagttttctattgaccttctcggtggaggaatcttagtggacaaaactggagattggatcacacttatacaaaattctccaattagtaacttgttgagagttgctgcttggaagaaaggctgtttaatggtcaagattgtgatgtctgggaatgcaccagtcaaaaggagtgattgggcctcattggtacaagtgtttttaacaaacagcaacagtacagagcattttgatgcatgtaagtggacaaaatcagaaccaca

SEQ ID NO: 77594 - DNA, 317 bp, Glycine max
attttgtcattggtgtcaagttgacaaccataaacaatatgtgtgcatatgggctcaatcctggtatttcaggttctcgtcttttgggcaccattcctcagtccatttcacagcaaactgtttggaatcaaatggcaacagtgagaacaccattgaattttgattctagcaagcagagcttttgtcagttttctattgaccttctcggtggaggaatcttagtggacaaaactggagattggatcacacttatacaaaattctccaattagtaacttgttgagaagtgctgcttggaagaaaggctgtttaatggtc

SEQ ID NO: 77595 - DNA, 181 bp, Glycine max
cggctcttcagtccatttatctagcttatcaaaccatggcttgcatgcattttcaattgcaagtataatacacatccatatgctctcctttttttttctcatcttctattccaaaaaaatcatcataaccaaggggcaggaatacagccttttcaggatccacattctcacccttttccaa

SEQ ID NO: 77596 - DNA, 367 bp, Glycine max
atgggctcaatcctggtatttcaggttctcgtcttttgggcaccattcctcagtccatttcacagcaaactgtttggaatcaaatggcaacagtgagaacaccattgaattttgattctagcaagcagagcttttgtcagttttctattgaccttctcggtggaggaatcttagtggacaaaactggagattggatcacacttatacaaaattctccaattagtaacttattgagagttgctgcttggaagaaaagctgtttaatggtcaagattgtgatgtctgggaatgcagcagtcaaaaggagtgattgggcctcattggtacaagtgtttttaacaaacagcaacagtacaaagcattttga

SEQ ID NO: 77597 - DNA, 371 bp, Glycine max
actggatggactgccaccccaatgcaggatgttcaggttacaattgattggtttatttcctctcaggaatgtgttcccaggacctattgtgttttaaatccacaaaatccttttgtgttaaataggtggatgggaaaattgactttcccccagggcacttcccgaagtgttaagagaatgcctctttctatagggggaggagctggtgcaaagaatgctattctcatgaatatgccaaatgctgttctttcaatgtggagatattttgttggagatctcgtctttgaagtttctaagatgacttctccctacattaaatgtacagtctctttcttcatagcatttgaaaatttggctgatgataccatcaa

SEQ ID NO: 77598 - DNA, 190 bp, Glycine max
gaaacacattacagaagaagcttaattattcaactgaggtggtggtggtacctttggtttgtacataaatggagaaactgaaagtgtctgctaagaatgatcctgctggcagcagtgatcaagcagattcattttcaatattcgaactgtgggagagtgaaaatgttggacagaagagcagttgaagaga

SEQ ID NO: 77599 - DNA, 124 bp, Glycine max
aattcggttcgggaaaaaaaaaaaaaaaaaaaaaaaaaaaaaaaaaaaaaaaaaaaaaaaaaaaaaaaaaaaaaaaaaaaaaaaaaaaaaaaaaaaaaaaaaaaaaaaaaaaaagggccgcccc

SEQ ID NO: 77600 - DNA, 328 bp, Glycine max
tcggggaattccaattccacattttcaagaaataaggaggcaaaaatgttcatatatgaattggaattatttgttttcttattaggcctatcctgaagccaaaggaaatgagatcggaattcctcggggaattccaattccacattttcaagaaataaggaggcaaaaatgttcatatatgaattggaattatttgttttcttattaggcctatcctgaagccaaaggaaatgagatcggaattcctcggggaattccaattccacattttcaagaaataaggaggcaaaaatgttcatatatgaattggaattatttgttttcttat

SEQ ID NO: 77601 - DNA, 347 bp, Glycine max
aaagaatgctattctcatgaatatgccaaatgctgttctttcaatgtggagatattttgttggagatctcgtctttgaagtttctaagatgacttctccctacattaaatgtacagtctctttcttcatagcatttggaaatttggctgatgataccatcaattttgaggcttttccccacaagctggtgcagtttggagagattcaggaaaaagttgtattgaaattttcacaagaggaatttcttacagcttggtcaactcaagtgcgtcctgcaaccaactctgttggctgatgggtgtccatatttgtatgcaatggtgcatgataattcagtgtctacaata

SEQ ID NO: 77602 - DNA, 343 bp, Glycine max
  unsure (1)..(343): unsure at all n locations
ccccgtccttaagctcggaattcggttcgagctcgagccgctcgagccgattcggctcgagcgccttccagtaccagctccgtgaagcgcaagtctgacgattcatcctcgtccaacaccccctttaccgcgcccaaggtccgcagggttgccaacatcgacaccggccttgcttcgcgctatcatcacaataaccctcgcgcatctncaggcgcttcatcaacctcgactacctcaccctcgatgcccagcttgagtttccgccaaactgtcgagctttcgcagaagttccagaagtactacaagagatacgaagagctgtactggaagctgactgaagcgg

SEQ ID NO: 77603 - DNA, 145 bp, Glycine max
  unsure (1)..(145): unsure at all n locations
ttcgttaggttgggaattgggttggagttattacaaaatatttataaatgtgactgtaataaactccncttggacactgactttggggtnannnancaaaatctaatgtggaaggtgcttttgtaaggaaagtaattgtatgatg

SEQ ID NO: 77604 - DNA, 317 bp, Glycine max
gttttcttctcgctgtgttcgtttgtttaattcaatgaaaggaaattagcgcatgcaccctcttgttgagtatgcttctgcctatttgaaaatttccacaccttttttaattgtcgtaatgatgtgtgaagtgtgtgttattttaaaaaaaaaaaaaaaaaaaaaaaaaaaaaaaaaaaaaaaaaaaaaaaaaaaaaaaaaaaaaaaaaaaaaaaataaaaaaaaaaaaaaaaaaaaaaaaaaatattaaaaaataataaaaaaaaaaaaaaaacaaaaaaaagggggggcccccccttttggggctttttcccccc

SEQ ID NO: 77605 - DNA, 326 bp, Glycine max
atttaatccaaacccgtgttctgatgcatggagtttggaatttctgaagcgtactggatttcattgcgatatcatttgtgtcactggatggactgccaccccaatgcaggatgttcaggttacaattgattggtttatttcctctcaggaatgtgttcccaggacctattgtgttttaaatccacaaaatccttttgtgttaaataggtggatgggaaaattgactttcccccagggcacttcccgaagtgttaagagaatgcctctttctataaggggaggagctggtgcaaaaaaatgctattctcatgaatatgccaaaatgc

SEQ ID NO: 77606 - DNA, 406 bp, Glycine max
atcaattttgaggcttttccccacaagctggtgcagtttggagagattcaggaaaaagttgtattgaaattttcacaagaggaatttcttacagcttggtcaactcaggtgcgtcctgcaacaactctgttggctgatgggtgtccatatttgtatgcaatggtgcatgatagttcagtgtctacaataccaggtgattttgtcattggtgtcaagttgacaaccataaacaatatgtgtgcatatgggctcaatcctggtatttcaggttctcgtcttttgggcaccattcctcagtccatttcacagcaaactgtttggaatcaaatggcaacagtgagaacaccattgaattttgattctagcaagcagagcttttgtcagttttctattgaccttctcggtg

SEQ ID NO: 77607 - DNA, 84 bp, Glycine max
actataaaatatctatgacgatgcacgcgctcgtaagaaacctaataagtttgtagcgcgcactctttttctttttgggggccc

SEQ ID NO: 77608 - DNA, 337 bp, Glycine max
gacaaaatcagaaccacattcctgggaattgatcttcccaatagaggtatgtggtcctaataatggtttgaaatgtggagttctgagtgggcaaatcaaacttcatggcatttgagtttccttattgacaatcccaaacagtctacagtttttgatattctcttgggaatctcttaagattttgaaattgctggtaatactcttatgccagctttttctgttccacaggctactgccagatcttctgaaaatgcggaatcctctgcatgatctggaatttgtgttttctttcgcttgttcgtttggttaattcaataaaagaaattaagcatgaccc

SEQ ID NO: 77609 - DNA, 132 bp, Glycine max
agggatcaagacaagcctttccacccccaatcttggtgaatgcttgagacacaacctctcacacacgacaaatctttgacagaaatcttccattggcaacttggtgtacacactttgtgaaatgtatcccct

SEQ ID NO: 77610 - DNA, 94 bp, Glycine max
cccgtacgtaagctcggaattcggctcgggaaaaaaaaaaaaaaaattaaaaaaaaaaaaaaaagaaaaaaaaaaaaggaaaaaaaactaaaca

SEQ ID NO: 77611 - DNA, 136 bp, Glycine max
aagagctattaccgcccatgccccccgtccgtaagctcggaattcggctcgggaaagaccaaattttttttttccaaaacaaacccaagatcaatgggtggcacatacaactaaagatcgtaacaaatttcttcac

SEQ ID NO: 77612 - DNA, 250 bp, Glycine max
ctcgagccgtgaaagatgaaccttctacggtggaggcatattattggacaacactggctattggttcacactttttcaaagttctacaattcgcaacttgatgtgaagagctgcttgtgatacaggctgttaatggacaagatgaggtctctcggatgcagcaatctaaaggagcgattggcctattggtacaagcgctgtacatacacaacagccatagctgttgatgcatgtcaggggacaaaataga

SEQ ID NO: 77613 - DNA, 195 bp, Glycine max
gttgacaatggcactctcgtgtctcacactcactggcaacccttcttccatcatctgcaaattcaaagcgttcctacctaccggtgcccacgcccttgaaggcaactaaattcggaggggcggccaacttggcggacaaatcggccggtttaacatccccccaccccaacttgggttgggtaatcggctccccct

SEQ ID NO: 77614 - DNA, 299 bp, Glycine max
actaattacgacgggacaagataacagatgtaggggctacccatcttttattatacagctttgtgaagaatgagggaacactgttgtatgacacttggactgcttgtatatcaggcgattccaaaaccaggtcgagaaataaagactgttgatatggtatagcttgactgaaggtaaatctgcgactgctactacgagatagataaatgtattggatgagcatattaagagcgtaacaacttcaacctagttttagatggtatggtcgcatatgaagcttttctaggaagctcctgggt

SEQ ID NO: 77615 - DNA, 81 bp, Glycine max
attcggttcgagcaagctgggaagcaaggaattatggtgacgtctcagagtcagaaccctatagagcaaatccaagcgcgc

SEQ ID NO: 77616 - DNA, 384 bp, Glycine max
atttacaccatctgctctcaagactgtgaattgtggaatcctgcttgcacaaaagcaatgactatgtcatttaatccaaacccgtgttctgatgcatggagtttggaatttctgaagcgtactggatttcattgcgatatcatttgtgtcactggatggactgccaccccaatgcaggatgttcaggttacaattgattggtttatttcctctcaggaatgtgttcccaggacctattgtgttttaaatccacaaaatccttttgtgttaaataggtggatgggaaaattgactttcccccaaggcacttcccgaagtgttaagagaatgcctctttctatagggggaggagctggtgcaaaaaatgctattctcatgaatatg

SEQ ID NO: 77617 - DNA, 123 bp, Glycine max
cttgcagcaagtccttgttttgcatgggggcatggaggagcccatgcaagactacttttctattggggggaaacagcttacgtgtctaacatgggacaatattgggaaagggcctattactgg

SEQ ID NO: 77618 - DNA, 113 bp, Glycine max
tttggaatttctgaaacgcactggatttcattgcgatatcatttgtgtcactggatggactgccacccccatgcaggatgttcaaggtacaaatgattgggttattttctctc

SEQ ID NO: 77619 - DNA, 99 bp, Glycine max
cctttatctttatcacttggatttttaacgacactaacggctggtcttggtatgcttaatcgcatttcaaaaggattggctaacctgtttccttttctt

SEQ ID NO: 77620 - DNA, 116 bp, Glycine max
tcgagtgcaattgaagttgaagtcttgcccttctctcttcaactcccaacacaagacatcatcattcatgggtggctccgtctccaccgtcggagctgtcaacaaagctcttttta

SEQ ID NO: 77621 - DNA, 229 bp, Glycine max
gtttactcacatttgattttgcaatgattgcttatatgaaacagtagaagatttcatatatgaaaaaacaaaaagctgatatttcaatgaggaagaaaaaaaagatggagaaatagacatatgaagtatataagatgacttctgcaatacattaaaggggcggccgctgtctatagagctctgcgacccggaaattaatgacggaccggaaccttgaggcttaccacct

SEQ ID NO: 77622 - DNA, 56 bp, Glycine max
  unsure (1)..(56): unsure at all n locations
gctgggggatgttaaccaggattttcctagcactggaaagctgcnagtctttgtcc

SEQ ID NO: 77623 - DNA, 310 bp, Glycine max
gctttctattgaccttctcgatggaggtatctctgtggacaaaactggagattggatcacacttatacaaaattctccaattagtaacttgttgagagttgctgcttggaagaaaggctgtttaatggtcaagattgtgatgtctgggaatgcaacagtcaaaaggagtgattgggcctcattggtacaagtgtttttaacaaacagcaacagtacagagcattttgatgcatggtagtggacaaaatcagaaccacattcctgggaattgatctttccaatagaaggatgtggtcctaataatgggttt

SEQ ID NO: 77624 - DNA, 395 bp, Glycine max
ctcgagccgaatcggctcgagccctacattaaatgtacagtctctttcttcatagcatttggaaatttggctgatgataccatcaattttgaggcttttccccacaagctggtgcagtttggagagattcaggaaaaagttgtattgaaattttcacaagaggaatttcttacagcttggtcaactcaggtgcgtcctgcaacaactctgttggctgatgggtgtccatatttgtatgcaatggtgcatgatagttcagtgtctacaataccaggtgattttgtcattggtgtcaagttgacaaccataaacaatatgtgtgcatatgggctcaatcctggtatttcaggttctcgtcttttgggcaccattcctcagtccatttcacagcaaac

SEQ ID NO: 77625 - DNA, 400 bp, Glycine max
cctaaatcgacgcatttgttacttggtttctgtgagtgttcgtgaaccactcagcgaactcgactctgtgtggcacattatctcaatttttaaagcagatcaacagacaatggtgaactccacccccacctccttctaccgcaccaccactctcactccctctactattatctccactcctcttccttcttcttcttcttgcacccatcatcattcatgtgtacacccccgccgcttctgcttacactcacaacctcttcgcctaagcaaccttcggtgccacacccatttgccatcaaccccaaagacattcaaactgaattgttccatcagcgagcctctgaaggtgatgatatcaggtgcacctgcctcgggcaaaggcacgcaatgtgaattgatt

SEQ ID NO: 77626 - DNA, 379 bp, Glycine max
agcttatcttgtcaatctcgtaaatgtgttacgagaattgtatttgcacagtccagaggaagctcgccaattgagaaggaaagctctctctcgtattgaatggctgcaaaaagctgatgtgcctaccatagcacagattgaagagttccattcgatgcagaggatgatgaatgctcctgattcaaatgataatattgatttactgttgagcattgatttgttgggtttacaaggagcaggtaaagcttttccaaacaaaattgtttttgatgataagcttgtgttggctaacacacaagaattctttgatggaaattttccagtggattcttggttaccaatttttgtgaattgtctttatccctgtagtcaattacct

SEQ ID NO: 77627 - DNA, 357 bp, Glycine max
ctcgagccgaatcggctcgagtgcaattgaagttgaagtcttgcccttctctcttcaactccaaacacaagacatcatcatccatggctgcctccgtctccactgtcggagctgtcaacagagctcttttgaacctgaatgggtctggacctggggtttcagctcccagttcatccttctttgggagcagcttgaagaaggttattggctcaagggtccccaacacaaagatttcctctggaagcttcaagattgttgctgtagaagagaagaaagagattgaagagacccagcagaccgacaaggacagatggaagggtcttgcctatgatatctcagacgaccaacaggacatca

SEQ ID NO: 77628 - DNA, 362 bp, Glycine max
acaagagctgcgcccgtgcatgcacccctgcattagcttcgagctcgagccgaggctgcttggagtgcaagctgagtaaaggtcatgaccgtgttgtttgggcttgcaacacacaacatgagtgatcgtggctgattggcgcatgcagtgttaacactcagaaccaagccatatcgtacctgagcgtgtctgggcccagagtttcaaccaccattctatgcatcttcttaccaataggaaagggttctgctcatgggttcccaacgcagagatttgcgtgggcagactaaacattgtggctgttgaatatacttattgacaatgccaaaccgcctacaccttctgggactgtttggaggatc

SEQ ID NO: 77629 - DNA, 268 bp, Glycine max
atcacactttaccgccctttaatcaaaacaggggaggcccttgttaacgacgcgggtatccatttctataagtgcaaccgtcagactctccaacccgggttaaaggaattgtggcaaattgcgcccccctaaatggcgaatttttgggcccccataatgcctgacccggtaaggtaaatggcaattcaatggtcggaacctaaatgccgttcttacttagcgcctggtaaaaaggctttacttaattaaagggcccacccccccggaa

SEQ ID NO: 77630 - DNA, 376 bp, Glycine max
attaaatgtacagcctctttcttcatagcatttggaaatttggctgatgataccatcaattttgaggcttttccccacaagctggtgcagtttggagagattcaggaaaaagttgtattgaaattttcacaagaggaatttcttacagcttggtcaactcaggtgcgtcctgcaacaactctgttggctgatgggtgtccatatttgtatgcaatggtgcatgatagttcagtgtctacaataccaggtgattttgtcattggtgtcaagttgacaaccatcaacaatatgtgtgcatatgggctcaatcctggtatttcaggttctcgacttttgggcaccattcctcagtccatttcacagcaaactgtttgga

SEQ ID NO: 77631 - DNA, 325 bp, Glycine max
caaacttcatggcatttgagtttccttattgacaatcccaaacagtctacagtttttgatattctcttgggaatctctcaagattttgaaattgctggtaatactcttatgccagctttttctgttccacaggctactgccagatcttctgaaaatgcggaatcctctgcatgatctggaatttgtgttttctttcgcttgttcgtttgtttaattcaataaaggaaattaggcatgaccctctttttgagtatgctctgcctatttgaaaatttccacacctcttttaattgtcgtaatgatgtgtgaagtgtgtgttattttt

SEQ ID NO: 77632 - DNA, 202 bp, Glycine max
cgcaattttccagtgggttctagaggaccaagggaagagagtcgtttctatccggcacgtcaattaccgtcaaaagcttgcctttttcaatttacataggagctggtacaaagagtgctactctcacgattattccaaatgctgtgcttttaacgatcgcatatcatgtatcagctctcggatttgaagagcacttgatgac

SEQ ID NO: 77633 - DNA, 298 bp, Glycine max
tctgctctcaagactgtgaattgtggaatcctgcttgcacaaaagcaatgactatgtcatttaatccaaacccgtgttctgatgcatggagtttggaatttctgaagcgtactggatttcattgcgatatcatttgtgtcactggatggactgccaccccaatgcaggatgttcaggttacaattgattggtttatttcctctcaggaatgtgttcccaggacctattgtgttttaaatccacaaaatccttttgtgttaaataggtggatgggaaaattgactttcccccagggcac

SEQ ID NO: 77634 - DNA, 315 bp, Glycine max
agtgaattcaacacagatttaatcactgagcggcctgatcagtggctgcttctatgtgcatgaggcctcaccactattgtgctggatccagtgcttccacaagggggcgtgctgtacggcacatttgtagcggttgctgaacacaatgaacttgctaccaatatcaaggagaaaatgtatcacactcatgatctagaagcacatatgacccttttaaattcaccaactgagtgtcaagatgagtcattctcatacctaatgcataattggtggggaaattggcatgactcatcatctcttgctcaaagagtatat

SEQ ID NO: 77635 - DNA, 382 bp, Glycine max
cttaattagtgttcatgaatatgtcaagccttactttagtggttctaaattgaaaagctttctagctagtcataacatcaccattactgatggtattgacaaaactagtgcaactttgcaatttagaaagttagcagattgtgattttctcaagagaaactttaagcagatgtctaatgttttgtgggtggctcctgaggacaaggcgagtttatggtcacaacttcattatgtttcgtgtaataatctggaaatgcaagaagcttatcttgtcaatctcgtaaatgtgttacgagaattgtatttgcacagtccagaggaagctcgccaattgagaaggaaagctctctctcgtattgaatggctgcaaaaagctgatgtg

SEQ ID NO: 77636 - DNA, 382 bp, Glycine max
ggaaaattgaaatttgaaacagaagatacacataatttatgatgggtgtcagattgaacagaaaaggcacacactctttgtgatatttgattttctagtcttgtgcatggtgatggttgtaatttatgttttctaagcaggataaggtaatcacagtgtgtcagtcgaggaaaatggagaacatagaaggggagagttctgaagaagaagaacagccatcatatggatcttttatgatggagaggttgacaggaagcatgagtggacgaattgatcacatgcttcaggacaagacctttgagcatccatatctgcaagccattggagctcatacaaactattggcgggattatgatactgctcttttcatattgaaacactt

SEQ ID NO: 77637 - DNA, 93 bp, Glycine max
ataatttcaattacttgtgaaaaaaaaaaaaaaaaaaaaaaaaaaaaaaaagatggggataaaatcaagaaaaaagaaaagaaaagggctggg

SEQ ID NO: 77638 - DNA, 294 bp, Glycine max
gattactgagtaagggcaatgatattctgtgttgcgattatgctagttttgatggtttgattaccaagcaagttatgagcaagatggcagaaatgataaacagtctttgtggtggtgatgaaaaattgatgcgtgaaaggacgcacctgctgttggcttgttgttcaaggatggcaatttgtaagaaagatgtttggagagttgaatgtggaatcccttctggatttccgctcacagttatttgcaatagcatttttaatgagatgctcattagatatagctatgaaaaattac

SEQ ID NO: 77639 - DNA, 85 bp, Glycine max
ggggcctatcatatcatatcatacacatttcaattttcacaggtccataatggggcttgttcccaccccctgaaaatggtggatt

SEQ ID NO: 77640 - DNA, 372 bp, Glycine max
gcggagagagactttgaagttgtgtcgtgtggcgtttctggctgcaatcacagtctcttccacttttcaatttcattctttaatcagtcaatcggcatcctcatgtccgacgcttattggagatacgccgccgagtcccggcaggccccctcttccatcgccggcaagcgctctcgttccgactacgatgtttctggcgttcatgacttgcccagttactttccccatgacgatgatagaggagggctccgagtaattagagatactgaatcccttgatgcatcttatgagcgttacctccgtagtgcgcaagtttcatcatatggttcgggacagtctactagaaccattggtgggcgaattcccaatcgt

SEQ ID NO: 77641 - DNA, 268 bp, Glycine max
ctcgcaccgggtatatgggctgccttactatagaggttctaagttgtgagccttgctggttgctcttatcatacccatttcggtgggcagagacaaacctataaccccgttgctgttgataatagaaacgaatcgttatttgatgaacataaacaggcatcagctgttgagtgtcacatgcgtcggcttcttacctcgagggcacggtatggttgcggctcgcttgtatcctgatgcacacacactgaaatacaggcatcttatcttg

SEQ ID NO: 77642 - DNA, 393 bp, Glycine max
ggacctattgtgttttaaatccacaaaatccttttgtgttaaataggtggatgggaaaattgactttcccccagggcacttcccgaagtgttaagagaatgcctctttctatagggggaggagctggtgcaaagaatgctattctcatgaatatgccaaatgctgttctttcaatgtggagatattttgttggagatctcgtctttgaagtttctaagatgacttctctctacattaaatgtacagtctctttcttcatagcatttggaaatttggctgatgataccatcaattttgaggcttttccccacaagctggtgcagtttggagagattcaggaaaaagttgtattgaaattttcacaagaggaatttcttacagcttggtcaactc

SEQ ID NO: 77643 - DNA, 395 bp, Glycine max
  unsure (1)..(395): unsure at all n locations
ctcgagccgaatcggctcgagaattatatataggcagcatacaaagatgctgaaatacagatgcaggaatgaaaataatctaactcagctactactgcattgccaactcagcactcctctaacagaattggttagacaaaatcttctagatgctttggtgggaagatccttcttttgggcctctcattcgtgcctatgtgtgcagtatcttggtgagccattattcccttcataacattttcctattttgaacataactacataaatgccatgctttgtataactcatctaacatactaatgacgaaaagtatttttgggttgtaacccttgtatagtatatacatattctaataatatggtntgttccattgagaagatgtactagaagcaagc

SEQ ID NO: 77644 - DNA, 168 bp, Glycine max
catggaacgcaagtctaagaaatgactttaaaacctcgtgtactgaccaagattcggattgattgggattctggaatgaacgagaccattaaatctcctaattacgtgcagacaggaatggtacctattaattcacctattggcccaatcgtccatatgacaattttg

SEQ ID NO: 77645 - DNA, 377 bp, Glycine max
gtgtttttaacaaacagcaacagtacagagcattttgatgcatgtaagtggacaaaatcagaaccacattcctgggaattgatcttcccaatagaggtatgtggtcctaataatggttttgaaatgtggagttctgagtgggcaaatcaaacttcatggcatttgagtttccttattgacaatcccaaacagtctacagtttttgatattctcttgggaatctctcaagattttgaaattgctggtaatactcttatgccagctttttctgttccacaggctactgccagatcttctgaaaatgcggaatcctctgcatgatctggaatttgtgttttctttcgcttggttcgttgtttaattcaataaaagaaatt

SEQ ID NO: 77646 - DNA, 354 bp, Glycine max
caactctgttggctgatgggtgtccatatttgtatgcaatggtgcatgatagttcagtgtctacaataccaggtgattttgtcattggtgtcaagttgacaaccataaacaatatgtgtgcatatgggctcaatcctggtatttcaggttctcgtcttttgggcaccattcctcagtccatttcacagcaaactgtttggaatcaaatggcaacagtgagaacaccattgaattttgattctagcaagcagagcttttgtcagttttctattgaccttctcggtggaggaatcttagtggacaaaactggagattggatcacacttatacaaaattcttcaattagtaacttat

SEQ ID NO: 77647 - DNA, 364 bp, Glycine max
aacacattgaatcatgtctgtaccgtacgatatgctgagcaacagccagaatggccatattccggctagcgagcggatacccgtcattgccaggccatttgtcagtgagagggcgaagaagaccctggatatcgtagaaaagttcgtcgaagaagaatgcattcccgccgacgccgtatacacacgccaaatcggccaaaccacaaaggagcgcttctcctcgcacccttccatcatcgaagacctgaagaagcgagctcaggagctgggtctctggaacatgttcttgcccaaggcacacttcaaggagggcgctggcttcagcaatctcgagtacggcctcatggctgagtacttgggcaag

SEQ ID NO: 77648 - DNA, 349 bp, Glycine max
tgttgttgtaactcgttcttcttcttttgttgttctgtgtttgtgtttgttttttctctcacctgaaaatgtcttgctgcggtggtaactgtggttgcggaagctcctgcaagtgcggcaacggctgcggaggctgcaagatgtacccagacttgagctacactgagtcaaccaccaccgagaccttggtcatgggagtggcacctgttaaggctcaatttgagggtgctgaaatgggtgtgcccgctgagaacgatggctgcaaatgtggaccaaactgctcctgcaacccctgcacttgcaagtgaggtgttgggagagcaagcttcaagcagagatagcccttaat

SEQ ID NO: 77649 - DNA, 309 bp, Glycine max
ccaaaacaacgccttttctcttctgcttcgactccattctttgcgttagggctttggctgaaagaaggcattcacagggtctttccttgctacatactaatctatgtatctacccaaaactgaacgacctaatggagtctagccgtgataaacagaagtctagttgttataatggtgaaccaattctacacgaaactgccctcagatccaggattgaaaacgtttgaccactctgtggaatcaagaaattcacatctgctgcttactctaaacgaactcgcaaaccatcctgatacacatatccattga

SEQ ID NO: 77650 - DNA, 400 bp, Glycine max
ctcgtaaatgtgttacgagaattgtatttgcacagtccagaggaagctcgccaattgagaaggaaagctctctctcgtattgaatggctgcaaaaagctgatgtgcctaccatagcacagattgaagagttccattcgatgcagaggatgatgaatgctcctgattcaaatgataatattgatttactgttgagcattgatttgttgggtttacaaggagcaggtaaagcttttccaaacaaaattgtttttgatgataagcttgtgttggctaacacacaagaattctttgatggaaattttccagtggactcttggttaccaatttttgtgaattgtctttatcctgtaagtcaattaccttcagaagctgtcgttgtaaatgttacatgtggtagtg

SEQ ID NO: 77651 - DNA, 380 bp, Glycine max
ctcattggtacaagtgtttttaacaaacagcaacagtacagagcattttgatgcatgtaagtggacaaaatcagaaccacattcctgggaattgatcttcccaatagaggtatgtggtcctaataatggttttgaaatgtggagttctgagtgggcaaatcaaacttcatggcatttgagtttccttattgacaatcccaaacagtctacagtttttgatattctcttgggaatctctcaagattttgaaattgctggtaatactcttatgccagctttttctgttccacaggctactgccagatcttctgaaaatgcggaatcctctgcatgatctggaatttgtgttttctttcgcttgttcgtttggttaattcaat

SEQ ID NO: 77652 - DNA, 354 bp, Glycine max
gatgggtgtccatatttgtatgcaatggtgcatgatagttcagtgtctacaataccaggtgattttgtcattggtgtcaagttgacaaccataaacaatatgtgtgcatatgggctcaatcctggtatttcaggttctcgtcttttgggcaccattcctcagtccatttcacagcaaactgtttggaatcaaatggcaacagtgagaacaccattgaattttgattctagcaagcagagcttttgtcagttttctattgaccttctcggtggaggaatcttagtggataaaactggagattggatcacacttatacaaaattctccaattagtaacttattgagagttgctgct

SEQ ID NO: 77653 - DNA, 309 bp, Glycine max
caagagctaggacgcctcatgcacgcgtgcataagctctggattcggctcgaggcatcttatttgtagatataaaacaacttctctggggtatatttgattggtccaaaaacagccccaactatcccggatttatattctggatcggttgcacgtatatttaaaatataaaaatcgtagagaggaaaggctcgttacataaaaaaaatgtcgatttcccatactttattgcgtgtgagagccgaatgcatctgcagattcttatttgtttcgggtcgagggactctacaatgttaaatgtatggaaagt

SEQ ID NO: 77654 - DNA, 380 bp, Glycine max
gatttgttgggtttacaaggagcaggtaaagcttttccaaacaaaattgtttttgatgataagcttgtgttggctaacacacaagaattctttgatggaaattttccagtggattcttggttaccaatttttgtgaattgtctttatcctgtaagtcaattaccttcagaagctgtcgttgtaaatgttacatgtggtagtggacgtggtggtttacccaccactgcttggattagttctgcagttaacaatcgctcctcagatatcaacaaaaggattcgcacagcacttgggaaaggtaagaaaattgtttttcttactagagttgatccttttccagtagctttactggctgttctttttggcgttaagaatgaaat

SEQ ID NO: 77655 - DNA, 115 bp, Glycine max
gaactgtaagagtctcaaatatctggttgatgagtgtccttttgcatttgtgaactagtatgtagtattttattcacttaaataaagcgcattactatgtgcaatgagtgtgttt

SEQ ID NO: 77656 - DNA, 229 bp, Glycine max
agacagaagcaatcgcggaggagcctattgaactggggggaggaggaatgatagcggacaaaaacagagatggacaacactagaaaaataggccgatacagcacgaagagagatgacgcgcgcaacaagaggtgcacggaaaaaacgtgagtctggagacgcagatgaaaaagagcgggggggctggacagacaagtgttttaacaaacacaacagaccgagcaacatg

SEQ ID NO: 77657 - DNA, 343 bp, Glycine max
accattgaattttgattctagcaagcagagcttttgtcagttttctattgaccttctcggtggaggaatcttagtggacaaaactggagattggatcacacttatacaaaattctccaatttgtaacttattgagagttgctgcttggaagaaaggctgtttaatggtcaagattgtgatgtctgggaatgcagcagtcaaaaggagtgattgggcctcactggtacaagtgtttttaacaaacagcaacagtacagagcattttgatgcatgtaagtggacaaaatcagaaccacattcctgggaattgatcttcccaatagaggtatgtggtcctaataat

SEQ ID NO: 77658 - DNA, 496 bp, Glycine max
gtgttcccaggacctattgtgttttaaatccacaaaatccttttgtgttaaataggtggatgggaaaattgactttcccccagggcacttcccgaagtgttaagagaatgcctctttctatagggggaggagctggtgcaaagaatgctattctcatgaatatgccaaatgctgttctttcaatgtggagatattttgttggagatctcgtctttgaagtttctaagatgacttctccctacattaaatgtacagtctctttcttcatagcatttggaaatttggctgatgataccatcaattttgaggcttttccccacaagctggtgcagtttggagagattcaggaaaaagttgtattgaaattttcacaagaggaatttcttacagcttggtcaactcaggtgcgtcctgcaacaactctgttggctgatgggtgtccatatttgtatgcaatggtgcatgatagttcagtgtctacaataccaggtgattt

SEQ ID NO: 77659 - DNA, 420 bp, Glycine max
  unsure (1)..(420): unsure at all n locations
ctccctacattaaatgtacagtctctttcttcatagcatttggaaatttggctgatgataccatcaattntgaggcttttccccacaagctggtgcagtttggagagattcaggaaaaagttgtattgaaattttcacaagaggaatttcttacagcttggtcaactcaggtgcgtcctgcaacaactctgttggctgatgggtgtccatatttgtatgcaatggtgcatgatagttcagtgtctacaataccaggtgattttgtcattggtgtcaagttgacaaccataaacaatatgtgtgcatatgggctcaatcctggtatttcaagttctcgtcttttgggcaccattcctcagtccatttcacagcaaactgtttggaatcaaatggcaacagtgagaacaccattgaattttg

SEQ ID NO: 77660 - DNA, 320 bp, Glycine max
tggcatttgagtttccttattgacaatcccaaacagtctacaggttttgatattctcttgggaatctctcaagattttgaaattgctggtaatactcttatgccagctttttctgttccacaggctactgccagatcttctgaaaatgcggaatcctctgcatgatctggaatttgtgttttctttcgcttgttcgtttgtttaattcaataaaggaaattatgcatgaccctcttgttgagtatgctctgcctatttgaaaatttccacacctcttttaattgtcgcaatgatgtgtgaagtgtgtgctattttaaaaa

SEQ ID NO: 77661 - DNA, 370 bp, Glycine max
tgctattctcatgaatatgccaaatgctgctctttcaatgtggagatattttgttggagatctcgtctttgaagtttctaagatgacttctccctacattaaatgtacagtctctttcttcatagcatttggaaatttggctgatgataccatcaattttgaggcttttccccacaagctggtgcagtttggagagattcatgaaaacattgtattgaaattttcacaagaggaatgtcttacagcttggtcaactcatgtgcgatctgcaacaactctgttggctgatgcgcgtccatatatgcatgcaatggtgcatgatagttcagtgtctacaataccaggtgattttgtcattggcgtcaagttg

SEQ ID NO: 77662 - DNA, 409 bp, Glycine max
ttttgacaatgtcggcggtgatgtgctcaacgaggcgtcgacggtggtgaagcgctatggctgcttctcgatctgaggtgctatcttgggctaccacggggcacccatgacgctcaccaactggcggtaaaccgtttacaacaggctcacgctcaaggggttcatcctctttgaccacctgaaggacctcccgaccgcagggaaggagttggcgggctgggtcaaggaaggcaagctcaacgtctaacaagagacggcggtcgagaccaagtttgatgacatccccaagacgtggatgcgccttttctcgggcgagaacacgggcaagctggtcaccgtattggtataattggctggctagacggcaaacgggaaagagtgcaagagaaaatatggatgtgtagcatat

SEQ ID NO: 77663 - DNA, 421 bp, Glycine max
gccaaaatcagacccacattcttgggaatggatcttcccaatggaggtatgtggtcctaataatggttttgaaatgtggagttctgagtgggcaaatcaaacttcatggcatttgagtttccttattgacaatcccaaacagtctacagtttttgatattctcttgggaatctctcaagattttgaaattgctggtaatactcttatgccagctttttctgttccacaggctactgccagatcttctgaaaatgcggaatcctctgcatgatctggaatttgtgttttctttcgcttgttcgtttgtttaattcaataaaggaaattaggcatgaccctcttgttgagtatgctctgcctatttgaaaatttccacacctcttttaattgtcgtaatgatgtgtgaagtgtgtgttatttt

SEQ ID NO: 77664 - DNA, 71 bp, Glycine max
agaaaaaaaaattataaaaggatgaagagcaaaaaaataaattggcaaaaaatatgataaaaaaagaaaat

SEQ ID NO: 77665 - DNA, 471 bp, Glycine max
  unsure (1)..(471): unsure at all n locations
tgtttttaacaaacagcaacagtacagagcattttgatgcatgtaagtggacaaaatcagaaccacattcctgggaattgatcttcccaatagaggtatgtggtcctaataatggttttgaaatgtggagttctgagtgggcaaatcaaacttcatggcatttgagtttccttattgacaatcccaaacagtctacagtttttgatattctcttgggaatctctcaagattttgaaattgctggtaatactcttatgccagctttttctgttccacaggctactgccagatcttctgaaaatgcggaatcctctgcatgatctggaatttgtgttttctttcgcttgttcgtttgtttaattcaataaaggaaattaggcatgaccctcttgttgagtatgctctgcctatttgaaaatttccacacctcttttaattgtcgtaatgatgtgtgaagtgtgtgttatttnt

SEQ ID NO: 77666 - DNA, 275 bp, Glycine max
aaaaaaaaaacaacaataaaaaaataaaaaatacataataagagcggggaataaaaagagtagtgaaaagactaaaaggcacaaataactgagtccagttcacaagggagtgtctcgcttctgacggcttcaccgagtaccccctcgagttgtgcctcttgtcaatacagaggttcggttatgtatttgatactgttctcctgtactatcttatccgacaaaagtgctaattggatcactcttctacagatttgttcaaccagtaccttaagagg

SEQ ID NO: 77667 - DNA, 449 bp, Glycine max
caacaatgagaacccccattgattttgattctagcaagcagagcttttgtcagttttctattgaccttctcggtggaggaatcttagtggacaaaactggagattggatcacacttatacaaaattctccaattagtaacttgttgagagttgctgcttggaagaaaggctgtttaatggtcaagattgtgatgtctgggaatgcagcagtcaaaaggagtgattgggcctcattggtacaagtgtttttaacaaacagcaacagtacagagcattttgatgcatgtaagtggacaaaatcagaaccacattcctgggaattgatctctccaatagagaggtagtgggccaaataagggttgagaaatgtggagttctgagtgggcaaatcaaacttcatggcatttgagtttccttattgacaatcccaaacagtctacagtttttga

SEQ ID NO: 77668 - DNA, 520 bp, Glycine max
  unsure (1)..(520): unsure at all n locations
gaaactttaagcagatgtctaatgttttgtgggtggctcctgaggacaaggcgagtttatggtcacaacttcattatgtttcgtgtaataatctggaaatgcaagaagcttatcttgtcaatctcgtaaatgtgttacgagaattgtatttgcacagtccagaggaagctcgccaattgagaaggaaagctctctctcgtattgaatggctgcaaaaagctgatgtgcctaccatagcacaaattgaagagttccattcgatgcaaaagatgatgaatgctcctgattcaaatgataatattgatttacttgtgagcattgatttgttgggtttacaaggagcaagtaaaagctttccaaacaaaatngtttttgatgataagcttgtgttggctaacacacaagaattctttgatggaaattttccagtggattcttggttaccaatttttgtgaaattgtctttatccttgtaagtcaattaccttcagaagctgtcgttgtaaatgttacatgtggt

SEQ ID NO: 77669 - DNA, 380 bp, Glycine max
ctaactttggttgatgcgatatgaattattaatttaaagatataaaagctaatcactatatattttaaatctataataagatagtcgaattattggttatctgttcacaattatatatgcaagtatatttaaaattataaaagagattaacaggaaagtgttataaaaaacataggatgagctttgttaagtagtgataatgttccagcccctataaaaaagtaatggtaaagttgtcaaaacaatacgacaaacttaacctacgcccgggggaaagggacttggaataaattgccaaaagggtatgcctctttctttgaaagaaaaagccagttgtcgcggatggctttgccgaaagcaatgaaccgcgttgactctac

SEQ ID NO: 77670 - DNA, 351 bp, Glycine max
tggtccaacaccaagggaatgcccaaagagtccagttggctgacaagaccttgaacaaggctgcccttggaaatcctcacgaggttgattttaacaggggaattttctaacaatctggaatcggaggcaaagcatacttggcaagtgaatatttatgcacctgaaggtagtgctgatccaggtgctagaagttgtgatcggacttgcgtgtgacattcttagaatactaaatgtcataggtgcaaagagaagatgccacgtcagagatgattgtactatatctaccatattgcactggcatcctctataattttgagttaaagtgtgcactttgattgacgtgctttacaa

SEQ ID NO: 77671 - DNA, 585 bp, Glycine max
  unsure (1)..(585): unsure at all n locations
gtcaagttgacaaccataaacaatatgtgtgcatatgggctcaatcctggtatttcaggttctcgtcttttgggcaccattcctcagtccatttcacagcaaactgtttggaatcaaatggcaacagtgagaacaccattgaattttgattctagcaagcagagcttttgtcagttttctattgaccttctcggtggaggaatcttagtggacaaaactggagattggatcacacttatacaaaattctccaattagtaacttattgagagttgctgcttggaagaaaggctgtttaatggtcaagattgtgatgtctgggaatgcagcagtcaaaaggagtgattgggcctcattggtacaagtgtttttaacaaacagcaacagtacagagcattttgatgcatgtaagtggacaaaatcagaaccacattcctgggaattgatcttcccaatagaggtatgtggtcctaataatggttttgaaatgtggagttctgagtgggcaaatcaaacttcatggcanttgagtttccttattgacaaatcccaacagtctacagtttttgatattctcttgggaatc

SEQ ID NO: 77672 - DNA, 344 bp, Glycine max
catggggtagacggtgcgcacatggcgcacatgggtacacacctggtgcttacccaccaccatctggggcataccctacacagcaaggatatgctccagctgggtgtgctacacaacatgggtttactacagctgagtaccctccacatcaaatgcatgctgctgctggttaccccccaactggttatcctggttcatcacatgcaccatgttctcatgcgcaccgtggtatgggagcaatgctcgctagaggtgctgctgcggatgctgctgcttatggtgctcaccatgtctctcaatgctcccatggctcctatggccaatatgcacatggtgctcacatg

SEQ ID NO: 77673 - DNA, 383 bp, Glycine max
gatatatatatatatattattttcgggtattagttgatgtgcctaagaatgatgaggctgtaccaacaaatttaaacatattatttatttacttgagtgggagaaaagtctccgatttgtgcccgataaataaaacaaaccaaaaaaaatgctctcaaaagcaaaatacaaaaaatgacatagacaaaaaaataatattctggaggtctctggcaaccaaatgtcaggaaacatgaaaaaaattggggcggcgcccccttgggaaccccatgcccccggaattaaaatctggcccggaccttgccggattccaagttttacttttatggagtgtattaaacgtttggcgcaaacatggctaaaattgttactgggggaaaatt

SEQ ID NO: 77674 - DNA, 551 bp, Glycine max
atcaaatggaatggaatgacaccatgaatttggtcaaatcagcttgttggttcaagtacttgaaaaacatggaacatagggcacctgaagccaacactgtagatgttgcatacaataattttgaccagcttctggagtttccagcttggttgaatgcgaacgatagctgcttagagcagtgctcggtggattattttcaagagtcttccttgccttgtttggatattggagatattgaaagtatggatgacgattggttagcgtgacaactacaaggatagatagttttcgttaagtcaatcctgtgctgctcccatttttatatttatttcggtaattggggttatcgggcactatcattgtaatcattttagtacccccctccccttttcactgcttttatctatttttgaataataaataagggcttgcaaaatatcagtagaggcaagcaccatcaatgagtgatctacattttttgctcccattgctcctgttatcacaatgcatgttgagatattgaacaatatcaatgtgtaattctctttttt

SEQ ID NO: 77675 - DNA, 505 bp, Glycine max
attggtttatttcctctcaggaatgtgttcccaggacctattgtgttttaaatccacaaaatccttttgtgttaaataggtggatgggaaaattgactttcccccagggcacttcccgaagtgttaagagaatgcctctttctatagggggaggagctggtgcaaagaatgctattctcatgaatatgccaaatgctgttctttcaatgtggagatattttgttggagatctcgtctttgaagtttctaagatgacttctccctacattaaatgtacagtctctttcttcatagcatttggaaatttggctgatgataccatcaattttgaggcttttccccacaagctggtgcagtttggagagattcaggaaaaagttgtattgaaattttcacaagaggaatttcttacagcttggtcaactcaggtgcgtcctgcaacaactctgttggctgatgggtgtccatatttgtatgcaatggtgcatgatagttcagtgtctac

SEQ ID NO: 77676 - DNA, 384 bp, Glycine max
cagtgtctacaataccaggtgattttgtcattggtgtcaagttgacaaccataaacaatatgtgtgcatatgggctcaatcctggtatttcaggttctcgtcttttgggcaccattcctcagtccatttcacagcaaactgtttggaatcaaatggcaacagtgagaacaccattgaattttgattctagcaagcagagcttttgtcagttttctattgaccttctcggtggaggaatcttagtggacaaaactggagattggatcacacttatacaaaattctccaattagtaacttattgagagttgctgcttggaagaaaggcttgttaatggtcaagattgtgatgtcttggaatgccacagtcaaaaggagtgattggg

SEQ ID NO: 77677 - DNA, 395 bp, Glycine max
gatggactgccaccccaatgcaggatgttcaggttacaattgattggtttatttcctctcaggaatgtgttcccaggacctattgtgttttaaatccacaaaatccttttgtgttaaataggtggatgggaaaattgactttccctcagcgcacttaccgaagtgttaagagaatgcctctttctatagggggaggagcttgtgcaaagaatgctattctcatgaatatgccaaatgctgttctttcaatgtggagatattttggtggagatctcgtctttgaagtttctaagatgacttctccctacattaaatgtacagtctgtttcttcatagcatttggaaatttggctgatgataccatcaattatgaggctcttgcccacaagctggtg

SEQ ID NO: 77678 - DNA, 220 bp, Glycine max
gtcctacgctgggcatagtgcagagcattctctgctcccagcttcagtcattcgcaacaacacacgcaagctatttccgcgctctagcctgcgttgtacacgttgcatgtaccatctgacgtgctagcttattgatatatacatgtatatgtattacaggcatcccttgatttagctatatactcagagaggatctgcaaattgataagaagatctagaa

SEQ ID NO: 77679 - DNA, 404 bp, Glycine max
tagctatgaaaaattactgcgccaggctaaagctccaagtatgtttttacaatccttcaaaaattttgtttctttgtgtgtgtatggtgatgataacttaattagtgttcatgaatatgtcaagccttactttagtggttctaaattgaaaagctttctagctagtcataacatcaccattactgatggtattgacaaaactagtgcaactttgcaatttagaaagttagcagattgtgattttctcaagagaaactttaagcagatgtctaatgttttgtgggtggctcctgaagacaaggcgagtttatggtcacaacttcattatgtttcgtgtaataatctggaaatgcaagaagcttatcttgtcaatctcgtaaatgtgttacgagaattgtatttgc

SEQ ID NO: 77680 - DNA, 459 bp, Glycine max
  unsure (1)..(459): unsure at all n locations
gttaatggtcacaacttcattatgtttcgggtaataatctggaaatgcaagaagcttatcttgtcaatctcgtaaatgtgttacgagaattgtatttgcacagtccagaggaagctcgccaattgagaaggaaagctctctctcgtattgaatggctgcaaaaagctgatgtgcctaccatagcacagattgaagagttccattcgatgcagaggatgatgaatgctcctgattcaaatgataatattgatttactgttgagcattgatttgttgggtttacaaggagcaggtaaagcttttccaaacaaaattgtttttgatgataagctngtgttggctaacacacaagaattctttgatggaaattttccagtggattcttggttaccaatttttgtgaattgtctttatcctgtaagtcaattaccttcagaagctgtcgttgtaaatgttacat

SEQ ID NO: 77681 - DNA, 302 bp, Glycine max
tggtaatactcttatgccagctttttctgttccacaggctactgccagatcttctgaaaatgcggaatcctctgcatgatctggaatttgtgttttctttcgcttgttcgtttgtttaattcaataaaggaaattaggcatgaccctcttgttgagtatgctctgcctatttgaaaatttccacacctcttttaattgtcgtaatgatgtgtgaagtgtgtgttattttaaaaaaaaaaaaaaataaaaaaaaaaaaaattctaaaaaaaaatacaattgtaacacttatacacatcatcct

SEQ ID NO: 77682 - DNA, 177 bp, Glycine max
agaaaaaagtgtttctttttcactcctctctgtaaaatccgggggccaaaacctaacaaaggggctgcctctgactgagtcgctattaacaccatcaatacattcctgaccagtacctggcgtcgctccatcttaacctattgtgcttggttttataaccttgtataatgaccacca

SEQ ID NO: 77683 - DNA, 447 bp, Glycine max
ggggtctggaacaacttctgtggctgatgggggtccatatttgtgtgcaatggtgcatgatagttcagtgtctacaataccaggtgattttgtcattggtgtcaagttgacaaccataaacaatatgtgtgcatatgggctcaatcctggtatttcaggttctcgtcttttgggcaccattcctcagtgcatttcacagcaaactgtttggaatcaaatggcaacagtgagaacaccattgaattttgattctagcaagcagagcttttgtcagttttctattgaccttctcggtggaagaatcttagtggacaaaactggagattggatcacacttatacaaaattctccaattagtaacttattgagagttgctgcttggaagaaaggcttgttaatggtcaagattgtgatgtctgggaatgcagcagtcaaaaggagtgattg

SEQ ID NO: 77684 - DNA, 449 bp, Glycine max
cttgacatcaagttacactccaactccattgttggaatctggtttgcaaaaagacagagggttaattgtggagtattttggaaggatgtcttacgttgctcataacgttaatcagccccaagagaaagatttgttggagggaaatttttcctttgatattaaatctcgctctagattggaaaaagtttcctctacaaaagcacaatttgttagtggaaaaaccttcaaatatgatataattggtgctggttcacattcttcacaagattttcctgaaaaggaagatcaagaaaaacccaaaaagattgatgccagattgagacaaagaatagatcctcaatacaatgacgttcaagctcagatggaaacaaatttgtttaaattgcctcttgatgatgttgaaactcctaaaggttccatgttggatctgaaaatttcttaatctaaaa

SEQ ID NO: 77685 - DNA, 176 bp, Glycine max
ctcgacttcaagttgaacttcaactcctgtgcaagcatctggtgtggaacctgacagagggccgattgtgaagtgttatgcaaggatatctcacaatgctcacctacctcatcatcctcaaccgaaacaattgttgatgggcagggcccattcctaaattaaagggccttctagat

SEQ ID NO: 77686 - DNA, 383 bp, Glycine max
cgttaggagtgattctttttcactcctctctgcacgatccggtggccaaacccttgcagacctctatctctgagggagtctagatgaataacatcaacacgcacctgttgatccaccaacatagattattgcgatccagttctactagctatcggaaacatttatgaggaccacctttgagtgtcatggccttgccaaaactcctgctcctggtgttggtggcaatgcttttggttatcaatactaccatatgttgcatgaaagacctgagcttgtgcatacgttgtaccaagatatcagcaaacttgggcgtgctgagcagaatggcataatgggttttacaaccacaacgcttggtattaacaagaaaatactatcattgg

SEQ ID NO: 77687 - DNA, 389 bp, Glycine max
  unsure (1)..(389): unsure at all n locations
gattttctcaagagaaactttaagcagatgtctaatgttttgtgggtggctcctgaggacaaggcgagtttatggtcacaacttcattatgtttcgtgtaataatctggaaatgcaagaagcttatcttgtcaatctcgtaaatgtgttacgagaattgtatttgcacagtccagaggaagctcgccaattgagaaggaaagctctctctcgtattgaatggctgcaaaaagctgatgtgcctaccatagcacagattgaagagttccattcgatgcagaggatgatgaatgctcctgattcaaatgataatattgatttactgttgagcattgatttngtgggtttacaaggagcangtaaagcttttccaaacaaaaatgttttgat

SEQ ID NO: 77688 - DNA, 236 bp, Glycine max
gaagagctatgaccgtacgtacgctcggaattcagctcgaggtttggattcagatggcaacatcgagaacacctttgcattggcatgctgccaggcactgaagaggatgtcccctgatgggatacaatggctctggttggtcttgaccacataactgcacagaaggccacactgacacatgagatgtgagtgcgtgcccacgctatcctacctatgaagcagactgtctcacctgc

SEQ ID NO: 77689 - DNA, 459 bp, Glycine max
  unsure (1)..(459): unsure at all n locations
cacctcgaagagctctcacgtaccatgcactcgtacgtaagctcgagattcggctcgagggaagacgaagtttgtttgtaccagtctttgctgtttgaggtccccttccaagagggagtttctaaccctgccgaagcagacgtcactcttgcacattttgtgaaacccaaaacttcaaccagcaacttcctgcagtcagttgccccttaagtccgtgggaccgtggcaccttaaaccaggttcttccagtgctgctttttcttgctcatcttttgtttatttttctgtatatactagtagtattcaaatgcttgagagtcatgatctttcttctgatacaacccatcgtaagttcattactaacaaaaattaaggtttttgtctacccttcctcgcttctttgaagatgtggtcatcaatcatcattgtgtaatcatgtngtataatttattttattgg

SEQ ID NO: 77690 - DNA, 377 bp, Glycine max
gttaaataggtggatgggaaaattgactttcccccagggcacttcccgaagtgttaagagaatgcctctttctatagggggaggagctggtgcaaagaatgctattctcatgaatatgccaaatgctgttctttcaatgtggagatattttgttggagatctcgtctttgaagtttctaagatgacttctccctacattaaatgtacagtctctttcttcatagcatttggaaatttggctgatgataccatcaattttgaggcttttccccacaagctggtgcagtttggagagattcaggaaaaagttgtattgaaattttcacaagaggaatttcttacagcttggtcaactcaggtgcgttctgcaacaactc

SEQ ID NO: 77691 - DNA, 400 bp, Glycine max
gcaaaaagctgatgtgcctaccatagcacagattgaagagttccattcgatgcataggatgatgaatgctcctgattcaaatgataatattgatttactgttgagcattgatttgttgggtttacaaggagcaggtaaagcttttccaaacaaaattgtttttgatgataagcttgtgttggctaacacacaagaattctttgatggaaattttccagtggattcttggttaccaatttttgtgaattgtctttatcctgtaagtcaattaccttcagaagctgtcgttgtaaatgttacatgtggtagtggacgtggtggtttacccaccactgcttggattagttctgcagttaacaatcgcttcttagatattaacaaaaggattcgcacagtactt

SEQ ID NO: 77692 - DNA, 366 bp, Glycine max
  unsure (1)..(366): unsure at all n locations
acagtacagagcattttgatgcatgtaagtggacaaaatcagaaccacattcctgggaattgatcttcccaatagaggtatgtggtcctaataatggttttgaaatgtggagttctgagtgggcaaatcaaacttcatggcatttgagtttccttattgacaatcccaaacagtctacagtttttgatattctcttgggaatctctcaagattttgaaattgctggtaatactcttatgccagctttttctgttccacaggctactgccagatcttctgaaaatgcggaatcctctgcatgatctggaatttgtgttttctttcgcttgttcgtttgtttaattcaataaaggaaattangcatga

SEQ ID NO: 77693 - DNA, 266 bp, Glycine max
gtttcgattaagcatccatgaagcacaggaagggagaaaagagagtgtttcattaggtgatacccatggtcttactggcatgcaattcagcaagatcagttttcctgatccatgctggtggaccaccacatatttttgatacgatgactgaagcctatatatgtactaatgcagaaagtcttgatcgatacgttgcaacgtatagatgcatgtgctgttaaggctgtaaataccagatttgttaatcagtatattgtagaacctat

SEQ ID NO: 77694 - DNA, 75 bp, Glycine max
ctcgagccggcctatttgaaaatttccacacctcttttaattgtcgtaatgatgtgtgaagtgtgtgttattttt

SEQ ID NO: 77695 - DNA, 168 bp, Glycine max
cactctcacaggaactgatgttgggtacccaggtggtctcagggttgacccactaagctctagaagcggttattctgatacgaccacggagttgataacaactgcgatcactagtgggctgttgctcatgtttgatgggaccgggacatatgtccagcgcatttacac

SEQ ID NO: 77696 - DNA, 299 bp, Glycine max
tctaagtccgacaagaacccatcccctcctgatgggattgacaaaactagcgctacttactcttctaccaagctgggaagtagacatccctcacattcaccacagcagcacacacatacgaagacagccttgcttgtctccactcaaaacctttcaagctggcgctcgaaaaccaagacagccctgttcgagaaatgcagcacacttatcggggcaacatgggagctggaggcccagattatgatgtccacaacacgtaggcagcgtggctgaagcctatgctaaaagaaagtttcttt

SEQ ID NO: 77697 - DNA, 115 bp, Glycine max
gttaactaagttggtggccatgaatgtgggaagccttacttaagtggttctaaattgaagagctttctagctagtcatagcatcaccattactgatggtattgacaaaactagtg

SEQ ID NO: 77698 - DNA, 98 bp, Glycine max
tgagaaacagaaccatcatttttcttttaaacttgtactgagaaacagaaccatggattttctctgccttctcattgtgcaataaaattcttaccttg

SEQ ID NO: 77699 - DNA, 229 bp, Glycine max
gtcgtaacattatcatggctggtgcggtttgaacaaaatgggcaaacttgataagctagtggggagtaacacacactacttgttatggggagatttggccaatgatttatggtttccgggttgtgccaatcggcaatgccatgttactggatcaccttgattaactgctcggcgaaatattagcaatgggagaggactgattggctgactttgcagtggtgatgaaaaa

SEQ ID NO: 77700 - DNA, 113 bp, Glycine max
ctttttctctctctttgccctttgaaagatgcacttcacttctctcttttggcaaagaccagcatccttaattcttcaaaattcttttactatgtaacaccccccccccccca

SEQ ID NO: 77701 - DNA, 396 bp, Glycine max
gccagttctgatatttacaccatctgctctcaagactgtgaattgtggaatcctgcttgcacaaaagcaatgactatgtcatttaatccaaacccgtgttctgatgcatggagtttggaatttctgaagcgtactggatttcattgcgatatcatttgtgtcactggatggactgccaccccaatgcaggatgttcaggttacaattgattggtttatttcctctcaggaatgtgttcccaggacctattgtgttttaaatccacaaaatccttttgtgttaaataggtggatgggaaaattgactttcccccagggcacttcccgaagtgttaagagaatgcctctttctatagggggaggagctggtgcaaaagatgctattctcatgaatatg

SEQ ID NO: 77702 - DNA, 175 bp, Glycine max
tttcgatttagctaccctcaatgagggtgtactctacccctccggcagcttttctgatttttaccaaacaaaattaataagggatcggcacttttcctttgctattatctgcttcattttttaggattaatccatgtcactccacctactaattaacccctgtatatcttcattc

SEQ ID NO: 77703 - DNA, 390 bp, Glycine max
gtcacaacttcattatgtttcgtgtaataatctggaaatgcaagaagcttatcttgtcaatctcgtaaatgtgttacgagaattgtatttgcacagtccagaggaagctcgccaattgagaaggaaagctctctctcgtattgaatggctgcaaaaagctgatgtgcctaccatagcacagattgaagagttccattcgatgcagaggatgatgaatgctcctgattcaaatgataatattgatttactgttgagcattgatttgttgggtttacaaggagcaggtaaagcttttccaaacaaaattgtttttgatgataagcttgtgttggctaacacacaagaattctttgatggaaattttccagtggattcttggttaccaatttt

SEQ ID NO: 77704 - DNA, 370 bp, Glycine max
cctgcaacaactctgttggctgatgggtgtccatatttgtatgcaatggtgcatgatagttcagtgtctacaataccaggtgattttgtcattggtgtcaagttgacaaccataaacaatatgtgtgcatatgggctcaatcctggtatttcaggttctcgtcttttgggcaccattcctcagtccatttcacagcaaactgtttggaatcaaatggcaacagtgagaacaccattgaattttgattctagcaagcagagcttttgtcagttttctattgaccttctcggtggaggaatcttagtggacaaaactggagattggatcacacttatacaaaattcttcaattagtaacttgttgagagttg

SEQ ID NO: 77705 - DNA, 395 bp, Glycine max
atgataaacagtctttgtggtggtgatgaaaaattgatgcgtgaaaggacgcacctgctgttggcttgttgttcaaggatggcaatttgtaagaaagatgtttggagagttgaatgtggaatcccttctggatttccgctcacagttatttgcaatagcatttttaatgagatgctcattagatatagctatgaaaaattactgcgccaggctaaagctccaagtatgtttttacaatccttcaaaaattttgtttctttgtgtgtgtatggtgatgataacttaattagtgttcatgaatatgtcaagccttactttagtggttctaaattgaaaagctttctagctagtcataacatcaccattactgatggtattgacaaaactagtgcaac

SEQ ID NO: 77706 - DNA, 389 bp, Glycine max
ttttgtcattggtgtcaagttgacaaccataaacaatatgtgtgcatgggctcaatcctggtatttcaggaactcgtcttttgggcaccattcctcagtccatttcacagcaaactgtttggaatcaaatggcaacagtgagaacaccattgaattttgattctagcaagcagagcttttgtcagttttctattgaccttctcggtggaggaatcttagtggacaaaactggagattggatcacacttatacaaaattctccaattagtaacttattgagagttgctgcttggaagaaaagctgtttaatggtcaagattgtgatgtctgggaatgcagcagtcaaaaggagtgattgggcctcattggtacaagtgtttttaacaaac

SEQ ID NO: 77707 - DNA, 396 bp, Glycine max
ggatttcattgcgatatcatttgtgtcactggatggactgccaccccaatgcaggatgttcaggttacaattgattggtttatttcctctcaggaatgtgttcccaggacctattgtgttttaaatccacaaaatccttttgtgttaaataggtggatgggaaaattgactttcccccagggcacttcccgaagtgttaagagaatgcctctttctatagggggaggagctggtgcaaagaatgctattctcatgaatatgccaaatgctgttctttcaatgtggagatattttgttggagatctcgtctttgaagtttctaagatgacttctccctacattaaatgtacagtctctttcttcatagcatttggaaatttggctgatgataccatc

SEQ ID NO: 77708 - DNA, 381 bp, Glycine max
attttgttggagatctcgtctttgaagtttctaagatgacttctccctacattaaatgtacagtctctttcttcatagcatttggaaatttggctgatgataccatcaattttgaggcttttccccacaagctggtgcagtttggagagattcaggaaaaagttgtattgaaattttcacaagaggaatttcttacagcttggtcaactcaggtgcgtcctgcaacaactctgttggctgatgggtgtccatatttgtatgcaatggtgcatgatagttcagtgtctacaataccaggtgattttgtcattggtgtcaagttgacaaccataaacaatatgtgtgcatatgggctcaatcctggtatttcaggttctcgtc

SEQ ID NO: 77709 - DNA, 371 bp, Glycine max
atgggctcaatcctggtatttcaggttctcgtcttttgggcaccattcctcagtgcatttcacagcaaactgtttggaatcaaatggcaacagtgagaacaccattgaattttgattctagcaagcagagcttttgtcagttttctattgaccttctcggtggaggaatcttagtggacaaaactggagattggatcacacttatacaaaattctccgatgaatcacattggacagagctgtagattggatcacagttatttaatggtcaagattgtgatgtctgggaatgcagcaatcaaaaagagtgatttggcctcattggtacaagtgtttttaacaaacagcaacagtacagagcattttgatgca

SEQ ID NO: 77710 - DNA, 252 bp, Glycine max
cttgggaatctctcaagattttgaaattgctggtaatactcttatgccagctttttctgttccacaggctactgccagatcttctgaaaatgcggaatcctctgcatgatctggaatttgtgttttctttcgcttgttcgtttgtttaattcaataaaggaaattaggcatgaccctcttgttgagtatgctctgcctatttgaaaatttccacacctcttttaattgtcgtaatgatgtgtgaagtgtgtt

SEQ ID NO: 77711 - DNA, 96 bp, Glycine max
caattctcccaacattttattttttctcaagccaaccaacagtcgcgatattagggatatttactcatactcccatgccataaacactttcagcga

SEQ ID NO: 77712 - DNA, 369 bp, Glycine max
gctcagtatcatagtgatctgtgaccaattactgcgccaggctaaagctccaagtatgtttttacaatccttcaaaaattttgtttctttgtgtgtgtatggtgatgataacttaattagtgttcatgaatatgtcaagccttactttagtggttctaaattgaaaagctttctagctagtcataacatcaccattactgatggtattgacaaaactagtgcaactttgcaatttaaaaagttagcagattgtgattttctcaagagaaactttaagcagatgtctaatgttttgtgggtggcttctgaagacaaggcgagtttatggtcacaacttcattatgtttcgtgtaataatctggaaatgca

SEQ ID NO: 77713 - DNA, 382 bp, Glycine max
ctcgagccgaatcggctcgagcaattttgaggcttttccccacaagctggtgcagtttggagagattcaggaaaaagttgtattgaaattttcacaagaggaatttcttacagcttggtcaactcaggtgcgtcctgcaacaactctgttggctgatgggtgtccatatttgtatgcaatggtgcatgatagttcagtgtctacaataccaagtgattttgtcattggtgtcaagttgacaaccataaacaatatgtgtgcatatgggctcaatcctggtatttcaggttctcgtcttttgggcaccattgctcaatccatttcacagcaaactgtttggaatcaaatggccacagtgagaacaccattgaattttgattct

SEQ ID NO: 77714 - DNA, 370 bp, Glycine max
cattcctcagtccatttcacagcaaactgtttggaatcaaatggcaacagtgagaacaccattgaattttgattctagcaagcagagcttttgtcagttttctattgaccttctcggtggaggaatcttagtggacaaaactggagattggatcacacttatacaaaattctccaattagtaacttgttgagagttgctgcttggaagaaaggctgtttaatggtcaagattgtgatgtctgggaatgcagcagtcaaaaggagtgattgggcctcattggtacaagtgttattaacaaacagctacagtacagagcattttgatgcatgtaagtggacaaaatcagaaccacattcctgggaattgatc

SEQ ID NO: 77715 - DNA, 399 bp, Glycine max
gatctctttggaagtccaagaagcctactgtgtccaaatctgcaatttgcaagtgaactggtgtagctcaaaatgctcattctccattttgaagttcccattcagtacttttcaatgactttttgtgacaattagtcaacacagtgacggatctagaatcctaagctaggaaggacaatttattaaaaaaataaaatttaataattaatattatgaaaggggtaaaaaattagagtgggtgtcaaatacacaaaattaggggggcagggggtgacggacaaaatttctacactcaacatatttatatgttattttaaaaaaatgagggaatgtagcattaatacattataatgtggatctaccactgagttagcgattcatctagcatcgaacatagct

SEQ ID NO: 77716 - DNA, 394 bp, Glycine max
cacaacttcattatgtttcgtgtaataatctggaaatgcaagaagcttatcttgtcaatctcgtaaatgtgttacgagaattgtatttgcacagtccagaggaagctcgccaattgagaaggaaagctctctctcgtattgaatggctgcaaaaagctgatgtgcctaccatagcacagattgaagagttccattcgatgcagaggatgatgaatgctcctgattcaaatgataatattgatttactgttgagcattgatttgttgggtttacaaggagcaagtaaagcttttccaaacaaaattgtttttgatgataagcttgtgttggctaacacacaagaattctttgatggaaattttccagtggattcttggttaccaatttttgtgaa

SEQ ID NO: 77717 - DNA, 369 bp, Glycine max
  unsure (1)..(369): unsure at all n locations
caaccctagtggtttgcaacatattangtgtatataagcattcatgtagaaaactatctcaggtaattaagttgatggacagaaacttgatcaagcatatggacctgcttggaattccgtggttggaaaagactttggatcttgcatcacacatttatgtggaagtaccatattctatcgtgtggagatgatggaatttctgatcttcaaagatgcgaagaatttcacagaaagcagggatgaagctattggcgtgctgcagaaggctagacattgtgattagtaaattccaaaattcttagtgttatagaacaacctaaactctttaatattcctaattaatctaagctaaacatgttcaaattacct

SEQ ID NO: 77718 - DNA, 391 bp, Glycine max
caagttgacaaccataaacaatatgtgtgcatatgggctcaatcctggtatttcaggttctcgtcttttgggcaccattcctcagtccatttcacagcaaactgtttggaatcaaatggcaacagtgagaacaccattgaattttgattctagcaagcagagcttttgtcagttttctattgaccttctcggtggaggaatcttagtggacaaaactggagattggatcacacttatacaaaattctccaattagtaacttgttgagagttgctgcttggaagaaaggctgtttaatggtcaagattgtgatgtctgggaatgcagcagtcaaaaggagtgattgggcctcattggtacaagtgtttttaacaaacagcaacagtacagag

SEQ ID NO: 77719 - DNA, 360 bp, Glycine max
tgaatgtggaatcccttctggatttccgctcacagttatttgcaatagcatttttaatgagatgctcattagatatagctatgaaaaattactgcgccaggctaaagctccaagtatgtttttacaatccttcaaaaattttgtttctttgtgtgtgtatggtgatgataacttaattagtgttcatgaatatgtcaagccttactttagtggttctaaattgaaaagctttctagctagtcataacatcaccattactgatggtattgacaaaactagtgcaactttgcaatttagaaagttagcagattgtgattttctcaagagaaactttaagcagatgtctaatgttttgtgggt

SEQ ID NO: 77720 - DNA, 393 bp, Glycine max
gaaaaattgatgcgtgaaaggacgcacctgctgttggcttgttgttcaaggatggcaatttgtaagaaagatgtttggagagttgaatgtggaatcccttctggatttccgctcacagttatttgcaatagcatttttaatgagatgctcattagatatagctatgaaaaattactgcgccaggctaaagctccaagtatgtttttacaatccttcaaaaattttgtttctttgtgtgtgtatggtgatgataacttaattagtgttcatgaatatgtcaagccttactttagtggttctaaattgaaaagctttctagctagtcataacatcaccattactgatggtattgacaaaactagtgcaactttgcaatttagaaagttagcagat

SEQ ID NO: 77721 - DNA, 389 bp, Glycine max
ggtgtccatatttgtatgcaatggtgcatgatagttcagtgtctacaataccaggtgattttgtcattggtgtcaagttgacaaccataaacaatatgtgtgcatatgggctcaatcctggtatttcaggttctcgtcttttgggcaccattcctcagtccatttcacagcaaactgtttggaatcaaatggcaacagtgagaacaccattgaattttgattctagcaagcagagcttttgtcagttttctattgaccttctcggtggaggaatcttagtggacaaaactggagattggatcacacttatacaaaattctccaattagtaacttattgagagttgctgcttggaagaaagctgtttaatggtcaagattgtgatgtctg

SEQ ID NO: 77722 - DNA, 243 bp, Glycine max
cggccccctcttgattttttagtgtgtataatatttggtgattttgtaattggtgttttgatgagaacgataaacattgtgtgtgcatatggacaaataataataaaaaagggtgttttctttagaaaactatacctcaaggcaaaaatggaaaaatttttgaaattttttgagggcaaggggaaaaaaataaaatttggattcttgccagtttagctctaaaaagctattttttgaaaataa

SEQ ID NO: 77723 - DNA, 388 bp, Glycine max
caagattgtgatgtctgggaatgcagcagtcaaaaggagtgattgggcctcattggtacaagtgtttttaacaaacagcaacagtacagagcattttgatgcatgtaagtggacaaaatcagaaccacattcctgggaattgatcttcccaatagaggtatgtggtcctaataatggttttgaaatgtggagttctgagtgggcaaatcaaacttcatggcatttgagtttccttattgacaatcccaaacagtctacagattttgatattctcttgggaatctctcaagattttgaaattgctggtaatactcttatgccagctttttctgatccacaggctactgccagatcttctgaaaatgcggaatcctctgcatgatctgga

SEQ ID NO: 77724 - DNA, 293 bp, Glycine max
accaggtgattttgtcattggtgtcaagttgacaaccataaacaatatgtgtgcatatgggctcaatcctggtatttcaggttctcgtcttttgggcaccattcctcaatccatttcacagcaaactgtttggaatcaaatggcaacagtgagaacaccattgaattttgattctagcaagcagagcttttgtcagatttctattgaccttctcggtggaggaatcttattggacaaaactggagattggatcacacttatacaaaattcttcaattagtaacttgttgagag

SEQ ID NO: 77725 - DNA, 364 bp, Glycine max
gaaaaaaaaatatctctatgcgtttaaaatataaagttgaggaggatactaaaccatatgaactcggatcataaaaaaataaagttatttgaaaataggggcggccccctatttgtgtgctcgataacccggtaattaatttcgaacgggtccttgatgacgatccagctttgcctatttggagacattttatagctgggctaaactatgggcataacgcattcccggtataaaatgaaacaccgcaagatattcagacaatattgtggtcgaacttataacagtgaaaactgggggcccttaatgggggtggaaaccaacattaattgtgtggctctgactgtccctttacaaggagggaaac

SEQ ID NO: 77726 - DNA, 389 bp, Glycine max
ggagggaatcttcagatgccaatgacccttctgatgttcttcccaacggagtacttgagatagaacctgggagcaataatcctggtgtagctgaatcatcatctccatcatccagtgttgcattaacaaaggatgagcagatagctactgatgagccatcagcatctctcaatgactcaagcattgaaacctctgacagaaacaaggacaaaactgagccaactcaaggagttgaaactccaagcacacgtgcatctgccacttctgtggatgacccagtcaccgaggttggaggagaccgtaacaaggacacaactgacaacaaaaaagctgtggataggcctgtcactgcggtggaaggagacagtaacaaggacacaactaacaac

SEQ ID NO: 77727 - DNA, 390 bp, Glycine max
ctcgagccgatcaattttgaggcttttccccacaagctggtgcagtttggagagattcaggaaaaagttgtattgaaattttcacaagaggaatttcttacagcttggtcaactcaggtgcgtcctgcaacaactctgttggctgatgggtgtccatatttgtatgcaatggtgcatgatagttcagtgtctacaataccaggtgattttgtcattggtgtcaagttgacaaccataaacaatatgtgtgcatatgggctcaatcctggtatttcaggttctcgtcttttgggcaccattcctcagtccatttcacagcaaacttgttggaatcaaatggcaacagtgagaacaccaattgattttgattctagcaagcagagcttttgt

SEQ ID NO: 77728 - DNA, 155 bp, Glycine max
ctcgagccgctcgagccgctcgagccgctcgagccgattcggctcgagtgaattcactggatttggattaatatagcttcattacaaaaacaaaagaacaaaaacaagataaaaaaaaaaaaaaaaaaaactaaaaaaaagaaaaaaaaagaaaa

SEQ ID NO: 77729 - DNA, 272 bp, Glycine max
gtacaggtcccatactacgaatctggatatcttagatgataccgttgaggggtgcgcccgggacttgatttggtctgtgatttaaaaggcttaatgagttgcgcggcccagcaaagacatgactacctagcttgatctattattggaagctctagtcagcgtgtatatcctatgggggggggcactgctacttatcctactaaaacagaccgccaatgtgactgaccagacacactctctatcgtacacagtgactaaaagtgttgatactt

SEQ ID NO: 77730 - DNA, 390 bp, Glycine max
caggaagtgggatataagcagttgcaggcatcggttatttctgctggtgatccaggacgctactcgcagggtattcattctacacaagaattgatgtggaaaaataagcctgcaggagtttgaacatttgatggattgagcttgaggcagcatatacagatgtcgcagcttttaaatggctgtgaaacagaatctcttatttaatgcttcaaggtagggaaccaccgcttcattttgatcccatgtgaccctgtaacaatttatttgcattggcgagttattttggtcctcgttgtcgaggtttcactatcacttactggctcagcactaaggatatgtgggattcaaaatacatggcagggaaatgccctacccagatcgtcctgtacc

SEQ ID NO: 77731 - DNA, 392 bp, Glycine max
gcttttgtcagttttctattgaccttctcggtggaggaatcttagtggacaaaactggagattggatcacacttatacaaaattctccaattagtaacttgttgagagttgctgcttggaagaaaggctgtttaatggtcaagattgtgatgtctgggaatgcagcagtcaaaaggagtgattgggcctcattggtacaagtgtttttaacaaacagcaacagtacagagcattttgatgcatgtaagtggacaaaatcagaaccacattcctgggaattgatcttcccaatagaggtatgtggtcctaataatggttttgaaatgtggagttctgagtgggcaaatcaaacttcatggcatttgagtttccttattgacaatcccaaacag

SEQ ID NO: 77732 - DNA, 283 bp, Glycine max
aacttattgagagttgctgcttggaagaaaggctgtttaatggtcaagattgtgatgtctgggaatgcagcagtcaaaaggagtgattgggcctcattggtacaagtgtttttaacaaacagcaacagtacagagcattttgatgcatgtaagtggacaaaatcagaaccacattcctgggaattgatcttcccaatagaagtatgtggtcctaataatggttttgaaatgtggagttctgagtgggcaaatcaaacttcatggcatttgaagtttcttattg

SEQ ID NO: 77733 - DNA, 327 bp, Glycine max
gggaaaacggacggtcctatccaccacttaccggaaggttgacagaatgccacttactatactcaggtggagctaatgcacagaatgacattgtcatgaatatgccaaaagctgttcaaaaaatgtggacatatcatgcgcggaaatcatgcatctgaggataataagatcacttctccctacattaaaagaacagtgtcgtgcttcaagcatctcgaaaagatgcttcaaacaaaatcgatattcaggctaattccaacacgcttgcgcacaatgaatagatgctggaaaaagttcaattgacacttggacaccaagtattttgta

SEQ ID NO: 77734 - DNA, 401 bp, Glycine max
ctcgagccgcgccagttctgatatttacaccatctgctctcaagactgtgaattgtggaatcctgcttgcacaaaagcaatgactatgtcatttaatccaaacccgtgttctgatgcatggagtttggaatttctgaagcgtactggatttcattgcgatatcatttgtgtcactggatggactgccaccccaatgcaggatgttcaggttacaatcgattggtttatttcctctcaggaatgtgttcccaggacctattgtgttttaaatccacaaaatccttttgtgttaaataggtggatgggaaaattgactttcccccagggcacttcccgaagtgttaagagaatgcctctttctatagggggaggagctggtgcaaagaatgctattctcatga

SEQ ID NO: 77735 - DNA, 389 bp, Glycine max
gaagaacaagtagttgagaactaataaggagaagcaaatggcttcctcaatgatctcttccccagctgttaccactgtcaaccgtgccggtgccggcatggttgctccattcactggcctcaagtccatggctggcttccccaccaggaagaccaacaatgacattacctccattgctagcaacggtggaagagtgcaatgcatgcaggtgtggccaccagttggcaagaagaagtttgagactctttcctacctgccagaccttgatgatgcacaattggcaaaggaagtagaataccttcttaggaagggatggattccttgcttggaattcgagttggagcacggtttcgtgtaccgtgagcacaacaagtcaccaggatactacg

SEQ ID NO: 77736 - DNA, 364 bp, Glycine max
ggctaaagctccaagtatgtttttacaatccttcaaaaattttgtttctttgtgtgtgtatggtgatgataacttaattagtgttcatgaatatgtcaagccttactttagtggttctaaattgaaaagctttctagctagtcataacatcaccattactgatggtattgacaaaactagtgcaactttgcaatttagaaagttagcagattgtgattttctcaagagaaactttaagcagatgtctaatgttttgtgggtggctcctgaggacaaggcgagtttatggtcacaacttcattatgtttcgtgtaataatctggaaatgcaagaagcttatcttgtcaatctcgtaaatgtgtta

SEQ ID NO: 77737 - DNA, 399 bp, Glycine max
ctcgagccgctcgagccgaaaaaaaaaaaaaaaaaaaaaaaaagggatgattacttgaggaggaacgaacttattattaaaaatatacggggctataaatacacaaccagccgccgggaacagaggggctcgggggtgggaactcgtgcgggttccaccactagcagcattctctttgccattgggctcccgggctctattcttggcgtggccaatttatctgcacttccaaagggcgataaactctaccgacactggctttaagagatggcccgaaatgaaccttttatgggacctgaaacatattatggccatgaccatgatggtcaccttgatgtccgcagcgcataggatagtatgggaacttatgtgccggaaaagcctgccctttcacaagct

SEQ ID NO: 77738 - DNA, 313 bp, Glycine max
cagtgttagattgtgtccatgtccaacccagacccctcgtcacacaaggccacaactttactattgaggtgaaaaagaaaaggataaaagaaaagaaaaaaaaaagaagagaaaatccaaattgggaacttactactggtctggggtcagtcaaactaacaaacggacgaaatctttaactagatattctgggctctgactaaaattttaggatcttatataactctgattttattgcttttctgcggttgtggtatatttatgacagcacctattcgtttcttgatttgggatgtattgctatcacatataa

SEQ ID NO: 77739 - DNA, 192 bp, Glycine max
ctcgagccgttttacttcccctatggctcgtcactccttgctcttagccctcctcctcttcgccgccggggccaccggcgcgatggcgggggccgcgtccgacgccgacgacatcctgatcccgcaggtggtgccagatgttggggaagcccaaaaggaaggcaacctggtggacgcccagcaccacttcgc

SEQ ID NO: 77740 - DNA, 409 bp, Glycine max
ctgaggacaaggcgagtttatggtcacaacttcattatgtttcgtgtaataatctggaaatgcaagaagcttatcttgtcaacctcgtaaatgtgttacgagaattgtatttgcacagtccagaggaagctcgccaattgagaaggaaagctctctctcgtattgaatggctgcaaaaagctgatgtgcctaccatagcacagattgaagagttccattcgatgcagaggatgatgaatgctcctgattcaaatgataatattgatttactgttgagcattgatttgttgggtttacaaggagcaggtaaagcttttccaaacaaaattgtttttgatgataagcttgtgttggctaacacacaagaattctttgatggaaattttccagtggattcttggttaccaat

SEQ ID NO: 77741 - DNA, 407 bp, Glycine max
aaacaacttcagcagaaaagatccatgctacattgtaaacaattggtttcaagcagatttaaataagttggcagcacgtatctttcatttcatgggttgtttacacattttttgtgagcactaaagaggatgaaatactcaaggaaattggaaacttgcattaatttctgtattacattgttgtgaaagtgcattcaaagtctgcgcaatggcacggtccaattaactagcttctaccaacttcttagccacccttagtccaaacattgtgtaaatttaagggtttttgatgtcaaggatacaacttaaagtaatttttttcattaaataaaaaacatattatgttaaaaatataaaagctagtatttctctttttaattacgatttttttgttctatattcctata

SEQ ID NO: 77742 - DNA, 179 bp, Glycine max
ctttgggccatgcttatattagaccatagggttcaaattgtgtgcataaaccccccgttaggggaatatcatgtgactgaccctacattaaaatatgtctcaacctgataataccattattaattacacaatccatatttagatgaaaaaactaagataatctaagtttctcacaaaat

SEQ ID NO: 77743 - DNA, 409 bp, Glycine max
  unsure (1)..(409): unsure at all n locations
cacaacttcattatgtttcgtgtaataatctggaaatgcaagaagcttatcttgtcaacctcgtaaatgtgttacgagaattgtatttgcacagtccagaggaagctcgccaattgagaaggaaagctctctctcgtattgaatggctgcaaaaagctgatgtgcctaccatagcacagattgaagagttccattcgatgcagaggatgatgaatgctcctgattcaaatgataatattgatttactgttgagcattgatttgttgggtttacaaggagcaggtaaagcttttccaaacaaaattgtttttgatgataagcttgtgttggctaacacacaagaattctttgatggaaattttccagtggattcttggttaccaatttttgtgaattgtctntatcctgt

SEQ ID NO: 77744 - DNA, 404 bp, Glycine max
cgctgctccagccaccagcccgaacgtggcccaaccgagacgccaagagcctgaaaagcccagcttcatgcagaagctgtccagcattctgtgctgcggtggcggaaaatagtactgctcgaaatatttgcctttgtcatctttgtgttgcatcctggagttcgttcattgagcgacaattttccatcggtcacgtttgcttcctgtataggtatcttgtaatgattgatagacggatcgaaaatctccttccctgggcttgataggcactcgtcacgaccaccagccgaccgatcacatctgcgccaacgtggatctcactccttaccacatcctcgttctcttctctcccgatcccacccaacccgacactttcgcgttgcgcgtatacacgacctggcact

SEQ ID NO: 77745 - DNA, 409 bp, Glycine max
ggagattggatcacacttatacaaaattctccaattagtaacttattgagagttgctgcttggaagaaaggctgtttaatggtcaagattgtgatgtctgggaatgcagcagtcaaaaggagtgattgggcctcattggtacaagtgtttttaacaaacagcaacagtacagagcattttgatgcatgtaagtggacaaaatcagaaccacattcctgggaattgatcttcccaatagaggtatgtggtcctaataatggttttgaaatgtggagttctgagtgggcaaatcaaacttcatggcatttgagtttccttattgacaatcccaaacagtctacagtttttgatattctcttgggaatctctcaagattttgaaattgctggtaatactcttatgccagctt

SEQ ID NO: 77746 - DNA, 124 bp, Glycine max
cttgaaaacttagtccaactttttaccatctaacgacagagtagcattgcatattgagagagacgtctgccagccctatcacggctgtatctactgcacaccataccgttaccatctatcatat

SEQ ID NO: 77747 - DNA, 450 bp, Glycine max
gacaccatacaatagctatgactgcacacgcacgcgtacttaagctccgaatccagctcgagagcgaagctaaaaccaaacatcaaagcatggctgagtagctcagcttgttcgtctgggtgtgcgccatccaccacctcgaccgcatataattcaccgcatacgcgctccaacttcctatatggaaatcatacaaccattctcatgatacactgaggctgtatcaggggcatcattgctgccactgttcgtgcatacttatacacagctcttaatggttacgatcccacagcatcttaatcccattattttgaagtggcttcatgaactagtactggtgagctcatcacttctatgtttggagagcccaactcatagaactgcaatcatgccctctttacttcctatgaagtcctgcaattatacaagaactatttgcctcaaatattt

SEQ ID NO: 77748 - DNA, 82 bp, Glycine max
cattcactgtctagtgatccaccttcactgtccgtttccaatagtttaaatcacactctattcagttctcaggattccggtt

SEQ ID NO: 77749 - DNA, 234 bp, Glycine max
cattgttaaatatttttctggttcaaaaaattggaacctttcactgttgaattttgatgactacacccttggaacatgattacataggcttatcaaaggcgtcatccatggggaaaagctgtgataagatattcttttcattttcctccaatctttcttctgagggtgagaacacaaccttatttcttgaactctaagagaacgaacctgaggcttggcctgccaggttgggat

SEQ ID NO: 77750 - DNA, 304 bp, Glycine max
atataaagatcaaggttgaataatgaaaattttgttacaagaggatttccaaactcttatcaaaagaagattttccgacatgcataaacgcagatcatagtttcatatatatatatttttataaatatcatatggtgatgaaggtggctaggcctcttcattgcagatacacacgacctctaagcatggcccctatagcttccaatgcagaatggtggccacatctttaacctaacaaagaagaaaaatgcagtggtgaaagaccataaaaaaatattgcatgtttctttgatcaaaatggatt

SEQ ID NO: 77751 - DNA, 243 bp, Glycine max
ctcgtctttgaagtttctaagatgacttctccctacattaaatgtacagcctctttcttcatagcatttggaaatttggctggtgataccatcaattttgaggcttttccccacaagctggttcatgttggagagaattaggaaaaaattgtattgaaattttcaccatagggatttcttacagcttggtcaactcaagtgcgccccgcaaccactctggtggctgatgggtggccatatttg

SEQ ID NO: 77752 - DNA, 408 bp, Glycine max
  unsure (1)..(408): unsure at all n locations
cacaaaatccttttgtgttaaataggtggatgggaaaattgactttcccccagggcacttcccgaagtgttaagagaatgcctctttctatagggggaggagctggtgcaaagaatgctattctcatgaatatgccaaatgctggtctttcaatgtggagatattttggtggaaatctcgtctttgaaggttctaaaaatacttctccctaccttaaatggacagtctcttttttcataacatttggaaatttggctgatgataccatcaattttgaggcttttccccacaagctggtgcagtttggagagattcangaaaaagtgtattgaaattttcacaagaggaatttcttacagcttgntcaactcatgtgcgtcctgcaacaactctgttggctgatgggtg

SEQ ID NO: 77753 - DNA, 138 bp, Glycine max
gagtgatcagtcatggcgaaagccgtaatccgagaagaaacgcgactcaaattggcgggggatccgctcaacccatccccaattccatcccaggggggtcttttaatcggaaaggtcaagctccctttgggcccggcc

SEQ ID NO: 77754 - DNA, 319 bp, Glycine max
gtgtgtaccacttttgagtgccacagagttctgagtttcacacgagtaaaattgtgacaggataacataccccaaccgtcgagtcagtatcaggagcacctccaactgctgctgctgatcttcgatttgttcctgccgctgctgttgcatctcatgctcccgaggctcaacaggctgtgactgccgagctgcctgctcacccagcccctcatgctgatggcccgccaatctaaatccaagtcctagctctgtgagtcatgtttccttatgatcgacaaggactgcctcctcgaacatgtacgccaggattctagaatgc

SEQ ID NO: 77755 - DNA, 314 bp, Glycine max
gaacaagtagttgagaactaagaaggagaagcaaatggcttcctcaatgatctcttccccagctgctaccactgtcaaccgtgccggtgccggcatggttgctccattcactggcctcaagtacatggctggcttccccaccaggaagaccaacaatgacattacgtccattgctagcaacggtggaagagtgctatgcatgcaagtgtggccaccagctggcaagaagaagtttgagactctttcctacctgccagaccttgatgatgcacaattggcaaaggatgtagaataccttcttaggaagggatgga

SEQ ID NO: 77756 - DNA, 76 bp, Glycine max
gtggtaccatcttcatctcctgtatcatttccttcattaccggtatctggatggcagctggcgatagctggccaaa

SEQ ID NO: 77757 - DNA, 370 bp, Glycine max
gtcctaataatggttttgaaatgtggagttctgagtgggcaaatcaaacttcatggcatttgagtttccttattgacaatcccaaacagtctacagtttttgatattctcttgggaatctctcaagattttgaaattgctggtaatactcttatgccagctttttctgttccacaggctactgccagatcttctgaaaatgcggaatcctctgcatgatctggaatttgtgttttctttcgcttgttcgtttgtttaattcaataaaggaaattaggcatgaccctcttgttgagtatgctctgcctatttgaaaatttccacacctcttttaattgtcgtaatgatgtgtgaagtgtgtgttattttac

SEQ ID NO: 77758 - DNA, 233 bp, Glycine max
aatctggaaatgcaagaagcttatcttgtcaatctcgcagatgtgttacgagaattgtatttgcacagtccagaggaagctcgccaattgagaaagaaagctctctctcgtattgaatggctgcaaaaagctgatgtgcctaccatagcacagattgaagagttccattcgatgcagaggatgatgaatgctcctgattcaaatgataatattgatttactggtgagcattga

SEQ ID NO: 77759 - DNA, 206 bp, Glycine max
gccttcatcaaaactcaaatccttctccttcaaagtgcgggggggggtatcgatgggggggccgttgtccgtaaaaacaaagatgcctgtcattaactattgatcgtctcacccgagacgtaagcatctctctatgattgggcatttactaacaaatgcttgtgttcgaaatttctacgtcctacgtgaggatcctgagacgagag

SEQ ID NO: 77760 - DNA, 382 bp, Glycine max
ctcgagccgtgaatatgtcaagccttactttagtggttctaaattgaaaagctttctagctagtcataacatcaccattactgatggtattgacaaaactagtgcaactttgcaatttaaaaagttagcagattgggattttctcaagagaaactttaagcagatgtctaatgttttgtgggtggctcctggaggacaggcgaagttatggtcacaacttcattatgtttcgtgtaataatctggaaaatgcaagaagcttatcttgtcaatctcgtaaatgtgttacgagaattgtatttgcacagtccagaaggaagctcgcccattgagaaagaaagctctctctcgtattgaatggctgcaaaaagctgatgtgccta

SEQ ID NO: 77761 - DNA, 120 bp, Glycine max
cttccatctccccagccataacctatctcaagaaggccacattacgcccttccgtttttgcaaccctgcacactcctgcttctgcttactattaatctttcgttccgtatttcattcaag

SEQ ID NO: 77762 - DNA, 188 bp, Glycine max
gttagtggaaaaaccttcaaatatgatataattggtgctggttcacattcttcagaagattgtcctgaaaaggaagatcaagaaaaacccaaaaagattgatgccagattgagacaaagaatagatcctcaatcaatgatgttcaagctcatattgaaacagatacgctaaattgtctcttgatgatg

SEQ ID NO: 77763 - DNA, 251 bp, Glycine max
caggtgcgtcctgcaacaactctgttggctgatgggtgtccatatttgtatgcaatggtgcatgatagttcagtgtctacaataccaggtgattttgtcattggtgtcaagttgacaaccataaacaatatgtgtgcatatgggctcaatcctggtatttcaggttctcgtcttttgggcaccattcctcagtccatttcacagcaaactgtttggaatcaaattgcaacagtgagaacaccatttaattt

SEQ ID NO: 77764 - DNA, 121 bp, Glycine max
acagagagtagaaaagatggcgcggttgatcacagtggtgtggtgcgcggtggcgttcctactgtgcgccccaacaggaacgtccagggtggaggaggcggaaaacccgatacgaataatg

SEQ ID NO: 77765 - DNA, 353 bp, Glycine max
aaatttccacacctcttctaatcgtcgcaatgatgtgtgaagtgtgtgttatttcaacaacaacaaagacttcataaaaaacaaacaaaccaccacaacaaaaaaagctggtcagccctcttctcgtgcgcccacccacccataaatacatccctcacctgctcctgcatgcccaccacctttcctctcaagacaacccttataccctggacatacaatatgcctatacacttcctgtgcaacattaacataccctcacattctcacacatcattcgatccgctatcatacaatgcccacccaccggtgcccaatgattctgctacctaacattaatgacgtagctctcactg

SEQ ID NO: 77766 - DNA, 393 bp, Glycine max
tcggggaattccaattccacattttcaagaaataaggaggcaaaaatgttcatatatgaattggaattatttgttttcttattaggcctatcctgaagccaaaggaaatgagatcggaattcctcggggaattccaattccacattttcaagaaataaggaggcaaaaatgttcatatatgaattggaattatttgttttcttattaggcctatcctgaagccaaaggaaatgagatcggaattcctcggggaattccaattccacattttcaagaaataaggaggcaaaaatgttcatatatgaattggaattatttgttttcttattaggcctatcctgaagccaaaggaaatgagatcggaaatttctcggggtaccgagctcgaattcc

SEQ ID NO: 77767 - DNA, 278 bp, Glycine max
ctcgaacaaaaacaacaatacatcaatcacaaaaaacttgcttggtctgactaaagaaagttatcaaagccaaacaaatacggagctttacccaattttcttgctgctgaattttacactgttcaatcttcaaaatcacatttttctcgatcttcaccttttgggatgctatctttctttttcctccttcttcttcttgtttttttttcactgttgaatctaaaaacccttgctggtttacgctaaggatgcaatctttggttgtcccacaacgccat

SEQ ID NO: 77768 - DNA, 252 bp, Glycine max
ttgggaatctctcaagattttgaaattgctggtaatactcttatgccagctttttctgttccacaggctactgccagatcttctgaaaatgcggaatcctctgcatgatctggaatttgtgttttctttcgcttgttcgtttgtttaattcaataatggaaattaggcatgaccctcttgttgagtatgctctgcctatatgaaaatttccacacctcttttaattgtcagaatgatgtgtgaagtgagtgt

SEQ ID NO: 77769 - DNA, 404 bp, Glycine max
  unsure (1)..(404): unsure at all n locations
tgttctttcaatgtggagatattttgttggagatctcgtctttgaagtttctaagatgacttctccctacattaaatgtacagtctctttcttcatagcatttggaaatttggctgatgataccatcaattttgaggcttttccccacaagctggtgcagtttggagagattcagggaaaagttgtattgaaattttcacaagaggaatttcttacagcttggtcaactcaggtgcgtcctgcaacaactctgttggctgatgggtgtccatatttgtatgcaatggtgcatgatagttcagtgtctacaataccaggtgattttgtcattggtgtcaagttgacaaccatanacaatatgtgtgcatatgggctcaatcctggtatttcaggttctcgtcttt

SEQ ID NO: 77770 - DNA, 271 bp, Glycine max
atcaatttgtccatctgcgcctcgctccaacactacagaactctgatgcgcagtcgcatccacagcacattcaaccacccctaaatcatttccagtgcttccgctgcatggacaccaccgtgccctatgcccaagtctacatacactctcaggttcatttagatctacgtctggcccttggagcatcagcttccattaacattttgaaacaacgtcttagcgcgaatcttaaagtggagtagcaggcgtttttactgagtgaacttactca

SEQ ID NO: 77771 - DNA, 310 bp, Glycine max
  unsure (1)..(310): unsure at all n locations
cttctccctacattaaatgtacagtctctttcttcatagcatttggaaatttggctgatgataccatcaattttgaggcttttccccacaagctggtgcagtttggagagattcaggaaaaagttgtattgaaattttcacaagaggaatttcttacagcttggtcaactcaggtgcgtcctgcaacaactctgttggctgatgggtgtccatatttgtatgcaatggtgcatgatagttcagtgtctacaataccangtgattttgtcattggtgtcaagttgacaaccataaacaatatgtgtgcata

SEQ ID NO: 77772 - DNA, 127 bp, Glycine max
gttcacactttctttgtttcttattgagtttttggcttctcactgctttttttctttcacactctcaacgaaatgatttataacagtgtttaattgaaattccaaacatggattgggttcgaggaga

SEQ ID NO: 77773 - DNA, 292 bp, Glycine max
ctacaacactcatcaagccagacaaccaacaccactaccgcaatcatcatgtctgactacgagccaactgagcactaccgtctccgcatggacggccagccagaccagcttgtctgcaccggacagtttgcagcgagcaaggtggattccgcggaagctagctagttaggcggcaacacctattgaagtggcttcatctatgccaggctgagcagcgtgagtctctacaatccaactgggtatgatacgatacacaagggctgtcttgcctatggtcgtgtccaacgataat

SEQ ID NO: 77774 - DNA, 343 bp, Glycine max
ttttgatgcatgtaagtggacaaaatcagaaccacattcctgggaattgatcttcccaatagaggtatgtggtcctaataatggttttgaaatgtggagttctgagtgggcaaatcaaacttcatggcatttgagtttccttattgacaatcccaaacagtctacagtttttgatattctcttgggaatctctcaagattttgaaattgctggtaatactcttatgccagctttttctgttccacaggctactgccagatcttctgaaaatgcggaatcctctgcatgatctggaatttgtgttttctttccgctggttcgttgtttaaatccaataaaggaa

SEQ ID NO: 77775 - DNA, 386 bp, Glycine max
accattactgatggtattgacaaaactagtgcaactttgcaatttagaaagttagcagattgtgattttctcaagagaaactttaagcagatgtctaatgttttgtgggtggctcctgaggacaaggcgagtttatggtcacaacttcattatgtttcgtgtaataatctggaaatgcaagaagcttatcttgtcaatctcgtaaatgtgttacgagaattgtatttgcacagtccagaggaagctcgccaattgagaaggaaagctctctctcgtattgaatggctgcaaaaagctgatgtgcctaccatagcacagattgaagagttccattcgatgcaaaggatgatgaatgctcctgattcaaatgataatattgatttact

SEQ ID NO: 77776 - DNA, 145 bp, Glycine max
gtaagctcggaaattcggctcgaagggaattactcttttatatagattgaaaaaaaaaaccaactaatgtgtcgaaaactacttttctatgcacaataaatatgtatttagattattttatttttaaaaaaaaaaacatttttat

SEQ ID NO: 77777 - DNA, 345 bp, Glycine max
caagaagcttatcttgtcaatctcgtaaatgtgttacgagaattgtgtttgcacagtccagaggaagctcgccaattgagaaggaaagctctctctcgtattgaatggctgcaaaaagctgatgtgcctaccatagcacagattgaagagttccattcgatgcagaggatgatgaatgctcctgattcaaatgataatattgatttactgttgagcattgatttgttgggtttacaaggagcaggtaaagcttttccaaacaaaattagttttgatgataagcttgtgttggctgacacacaaaaattctttgatggaaattttccaggggattcttgggtacca

SEQ ID NO: 77778 - DNA, 310 bp, Glycine max
ttttgaggcttttccccacaagctggtgcagtttggagagattcaggaaaaagttgtattgaaattttcacaagaggaatttcttacagcttggtcaactcaggtgcgtcctgcaacaactctgttggctgatgggtgtccatatttgtatgcaatggtgcatgatagttcagtgtctacaataccaggtgattttgtcattggtgtcaagttgacaaccataaacaatatgtgtgcatatgggctcaatcctggtatttcaggttctcgtcttttgggcaccattcctcagtccatttcacagcaaact

SEQ ID NO: 77779 - DNA, 383 bp, Glycine max
gtgaaaatggaagacaatcatcatcatcatcatcaggaacttggtttgcctagacagttcttgggggtcaataataaccctagcacaaatgagcaatattggagtggtggtggtggtgccacttctgcttggactgatctttctgctttcagctcttcttccactactagtaataacgcactatagaattttctgctatctctttgtgaagtttctggcttttggttcttctgtttcctttcacaaagtttcaaccaacttggttataattaaccccacgtgaagaagcttcgaggatggttaagtactttggtttcattttaaaatcaaatatgaaaaccctaaggatggtagaacctcttctatggttaatctttatattg

SEQ ID NO: 77780 - DNA, 387 bp, Glycine max
tgaattttgattctagcaagcagagcttttgtcagttttctattgaccttctcggtggaggaatcttagtggacaaaactggagattggatcacacttatacaaaattctccaattagtaacttattgagagttgctgcttggaagaaaggctgtttaatggtcaagattgtgatgtctgggaatgcagcagtcaaaaggagtgattgggcctcattggtacaagtgtttttaacaaacagcaacagtacagagcattttgatgcatgtaagtggacaaaatcagaaccacattcctgggaattgatcttcccaatagaggtatgtggtcctaataatggttttgaaatgtggagttctgagtgggcaaatcaaacttcatggcatt

SEQ ID NO: 77781 - DNA, 372 bp, Glycine max
cgtctttgaagtttctaagatgacttctccctacattaaatgtacagtctctttcttcatagcatttggaaatttggctgatgataccatcaattttgaggcttttccccacaagctggtgcagtttggagagattcaggaaaaagttgtattgaaattttcacaagaggaatttcttacagcttggtcaactcaggtgcgtcctgcaacaactctgttggctgatgggtgtccatatttgtatgcaatggtgcatgatagttcagtgtctacaataccaggtgattttgtcattggtgtcaagttgacaaccataaacaatatgtgtgcatatgggctcaatccctgtatttcaggttctcgtcttttggg

SEQ ID NO: 77782 - DNA, 388 bp, Glycine max
ggatgatgaatgctcctgattcaaatgataatattgatttactgttgagcattgatttgttgggtttacaaggagcaggtaaagcttttccaaacaaaattgtttttgatgataagcttgtgttggctaacacacaagaattctttgatggaaattttccagtggattcttggttaccaatttttgtgaattgtctttatcctgtaagtcaattaccttcagaagctgtcgttgtaaatgttacatgtggtagtggaccgtgtggtttacccaccactgcttggattagttctgcagttaacaatcgctcctcagatatcaacaaaaggattcgcacagcacttgggaaaggtaagaaaattgtttttcttactagagttgatccttt

SEQ ID NO: 77783 - DNA, 380 bp, Glycine max
gaggaagctcgccaattgagaaggaaagctctctctcgtattgaagggctgcaaaaagctgatgtgcctaccatagcacagattgaagagttccattcgatgcagaggatgatgaatgctcctgattcaaatgataatattgatttactgttgagcattgatttgttgggtttacaaggagcaggtaaagcttttccaaacaaaattgtttttgatgataagcttgtgttggctaacacacaagaattctttgatggaaattttccagtggattcttggttaccaatttttgtgaattgtctttatcctgtaagtcaattaccttcagaagctgtcgttgtaaatgttacatgtggtagtggacgtggtggtttacccac

SEQ ID NO: 77784 - DNA, 385 bp, Glycine max
gcctaccatagcacagattgaagagttccattcgatgcagaggatgatgaatgctcctgattcaaatgataatattgatttactgttgagcattgatttgttgggtttacaaggagcaggtaaagcttttccaaacaaaattgtttttgatgataagcttgtgttggctaacacacaagaattctttgatggaaattttccagtggattcttggttaccaatttttgtgaattgtctttatcctgtaagtcaattaccttcagaagctgtcgttgtaaatgttacatgtggtagtggacggtgtggtttacccaccactgcttggattagttctgcagttaacaatcgctcctcagatatcaacaaaaagattcgcacagcactt

SEQ ID NO: 77785 - DNA, 351 bp, Glycine max
gcctattttatattttccacacctcttttaattgtcgtaatgatgtgtgaagtgtgtgttattttaaaaaaaaaaaaaaaaaaaaaaaaaaaaaaaaaaaaaaaaaaaaaaaaaaaaaaaaaaaaaaaataaaaataaaaaataaaaataaaaaatataataaaaaaatataataataattatataactatatttattattaattatatttaataataatttatattaacattatatacccatctttattaaatttttttattattgatttcttttattattactactatataatatttatctttataatttattttaaatcaattatatttaatatatatatttataata

SEQ ID NO: 77786 - DNA, 381 bp, Glycine max
gtcacaacttcattatgtttcgtgtaataatctggaaatgcaagaagcttatcttgtcaatctcgtaaatgtgttacgagaattgtatttgcacagtccagaggaagctcgccaattgagaaggaaagctctctctcgtattgaatggctgcaaaaagctgatgtgcctaccatagcacagattgaagagttccattcgatgcagaggatgatgaatgctcctgattcaaatgataatattgatttactgttgagcattgatttgttgggtttacaaggagcaggtaaagcttttccaaacaaaattgtttttgatgataagcttgtgttggctaacacacaagaattctttgatggaaattttccagtggattcttggtt

SEQ ID NO: 77787 - DNA, 385 bp, Glycine max
attgagagttgctgcttggaagaaaggctgtttaatggtcaagattgtgatgtctgggaatgcagcagtcaaaaggagtgattgggcctcattggtacaagtgtttttaacaaacagcaacagtacagagcattttgatgcatgtaagtggacaaaatcagaaccacattcctgggaattgatcttcccaatagaggtatgtggtcctaataatggttttgaaatgtggagttctgagtgggcaaatcaaacttcatggcatttgagtttccttattgacaatcccaaacagtctacagtttttgatattctcttgggaatctctcaagattttgaaattgctggtaatactcttatgccagctttttctgttccacaggctact

SEQ ID NO: 77788 - DNA, 385 bp, Glycine max
ttggaatcaaatggcttcagtgagaacaccattgaattttgattcgagcaagcagagcttttgtcagttttctattgaccttctcggtggaggaatcttagtggacaaaactggagattggatcacacttatacaaaattctccaattagtaacttattgagagttgctgcttggaagaaaggctgtttaatggtcaagattgtgatgtctgggaatgcagcagtcaaaaggagtgattgggcctcattggtacaagtatttttaacaaacagcaacagtacagagcattttgatgcatgtaagtggacaaaatcagaaccacattcctgggaattgatcttcccaatagaggtatgtggtcctaataatggttttgaaatgtgg

SEQ ID NO: 77789 - DNA, 382 bp, Glycine max
aatcctggtatttcaggttctcgtcttttgggcaccattcctcagtccatttcacagcaaactgtttggaatcaaatggcaacagtgagaacaccattgaattttgattctagcaagcagagcttttgtcagttttctattgaccttctcggtggaggaatcttagtggacaaaactggagattggatcacacttatacaaaattctccaattagtaacttattgagagttgctgcttggaagaaaggctgtttaatggtcaagattgtgatgtctgggaatgcagcagtcaaaaggagtgattgggcctcattggtacaagtgtttttaacaaacagcaacagtacagagcattttgatgcatgtaagtggacaaaatcag

SEQ ID NO: 77790 - DNA, 381 bp, Glycine max
gcaagtgcgagacctattctcctctcgtcgattccaagatagcatggagaagctgccgaacctggtggcggacattgtgcagacgtccttaaacactggtcccaggggtgtccttaggttggctcaaggtgttcaggccttccttggcgttggtcaggagtggttaactgatgtctctaagtcagcaaattcatctactgggttaccgactgaactgaagcttggtttactcttccccttttatttgaggaggctgtttgagcgcatgggtgcaacctatatcaaattgggtcagttcatagcatcagcaccaatgctgttccttttgaggaaattgaatctatattgcgcaaggaattaggaaagccattagaaagcgtt

SEQ ID NO: 77791 - DNA, 380 bp, Glycine max
cagcagtcaaaaggagtgattgggcctcattggtacaagtgtttttaacaaacagcaacagtacagagcattttgatgcatgtaagtggacaaaatcagaaccacattcctgggaattgatcttcccaatagaggtatgtggtcctaataatggttttgaaatgtggagttctgagtgggcaaatcaaacttcatggcatttgagtttccttattgacaatcccaaacagtctacagtttttgatattctcttgggaatctctcaagattttgaaattgctggtaatactcttatgccagctttttctgttccacaggctactgccagatcttctgaaaatgcggaatcctctgcatgatctggaatttgtgttttcttt

SEQ ID NO: 77792 - DNA, 377 bp, Glycine max
gggaaaattgactttcctccaaggcacttcccgaagtgttaagagagtgcctctttctatagggggaggagctggtgcaaagaatgctattctcatgaatatgccaaatgctgttctttcaatgtggagatattttgttggagatctcgtctttgaagtttctaagatgacttctccctacattaaatgtacagtctctttcttcatagcatttggaaatttggctgatgataccatcaattttgaggcttttccccacaagctggtgcagtttggagagattcaggaaaaagttgtgttgaaattttcacaagaggaatttcttacagcttgagcaactcatgtgcgtcctgcaacaactctgttggctgatgggt

SEQ ID NO: 77793 - DNA, 382 bp, Glycine max
gctgatgataccatcaattttgaggcttttccccacaagctggtgcagtttggagagattcaggaaaaagttgtattgaaattttcacaagaggaatttcttacagcttggtcaactcaggtgcgtcctgcaacaactctgttggctgatgggtgtccatatttgtatgcaatggtgcatgatagttcagtgtctacaataccaggtgattttgtcattggtgtcaagttgacaaccataaacaatatgtgtgcatatgggctcaatcctggtatttcaggttctcgtcttttgggcaccattcctcagtccatttcacagcaaactgtttggaatcaaatggcaacagtgagaacaccattgaattttgattctagcaagc

SEQ ID NO: 77794 - DNA, 382 bp, Glycine max
ctcgagccgaatcggctcgagattggtgctggttcacattcttcagaagattttcctgaaaaggaagatcaagaaaaacccaaaaagattgatgccagattgagacaaagaatagatcctcaatacaatgaggttcaggctcagatggaaacaaatttgtttaaattgtctcttgatgatgttgaaactcctaaaggttccatgttggatctgaaaatttctcaatctaaaattgcacttcccaagaacacagttggaggaaccattctgcgtagtgatctattggcaaattttttgacagagggcaattttagagcaagtgttgatttgcagcgcactcatcgtattagaggaatgattaaaatggtggccacagttggta

SEQ ID NO: 77795 - DNA, 128 bp, Glycine max
gtctctttcttcatagcatttggaaatttggctgatgataccgtcaattttgaggcttttccccacaagccggtgccagttggaaaggttcaaggaaaaagtggattggaattttcacaagaaggatt

SEQ ID NO: 77796 - DNA, 383 bp, Glycine max
aaaattactgcgccaggctaaagctccaagtatgtttttacaatccttcaaaaattttgtttctttgtgtgtgtatggtgatgataacttaattagtgttcatgaatatgtcaagccttactttagtggttctaaattgaaaagctttctagctagtcataacatcaccattactgatggtattgacaaaactagtgcaactttgcaatttagaaagttagcagattgtgattttctcaagagaaactttaagcagatgtctaatgttttgtgggtggctcctgaggacaaggcgagtttatggtcacaacttcattatgtttcgtgtaataatctggaaatgcaagaagcttatcttgtcaatctcgtaaatgtgttacgag

SEQ ID NO: 77797 - DNA, 321 bp, Glycine max
agactgcttggtattaaatggctgcagttatatcaccaccgtagtcttgttttcgcacgcgctgctttcgtccattgcctattgtccttctttgtggacgactcattctggacctaacgggtgattgaaccactcttattcaaacgtctgcacttgatgaccagttgtgagtggcggctatgatgaaaggctgaatcatggtcactattgcaaggtacgggtacgcaaacgtgttaaggattgattgggccctattgctacaggtgtttttgacgtaccacatcacatctgatcactgtgatgcacgtatgtggtcaaaac

SEQ ID NO: 77798 - DNA, 383 bp, Glycine max
aaatcattattttttcaggcagagggaagatgacaagtggaaacatgatctctatgaggatgatgaaccccagctctctagtatggattgattaagttattctcatatgcaagtataagttgctgctcttgttggatgccgatagttcattttatgggttttgactgtgtgttaatgacttgtgaagatcgcaaggtcactgctcaagatcttcgtctgaagcttcaaaggaaaggtcttcatcctggaggtcaaactggaaaaagttctgttcatggtgagcgggatctccgtgaaaggctatcagggacaatgactcaacaacctaaaaactatgacccaccaaagcctaaagtggccgctaaacctagcagtaaaagtat

SEQ ID NO: 77799 - DNA, 381 bp, Glycine max
gaaaaattactgcgccaggctaaagctccaagtatgtttttacaatgcttcaaaaattttgtttctttgtgtgtgtatggtgatgataacttaattagtgttcatgaatatgtcaagccttactttagtggttctaaattgaaaagctttctagctagtcataacatcaccattactgatggtattgacaaaactagtgcaactttgcaatttagaaagttagcagattgtgattttctcaagagaaactttaagcagatgtctaatgttttgtgggtggctcctgaggacaaggcgagtttatggtcacaacttcattatgtttcgtgtaataatctggaaatgcaagaagcttatcttgtcaatctcgtaaatgtgtta

SEQ ID NO: 77800 - DNA, 384 bp, Glycine max
aatggttaaagttaatgtagcatgtgctgctgttggcttgacatcaagttacactccaactccattgttggaatctggtttgcaaaaagacagagggttaattgtggagtattttggaaggatgtcttacgttgctcataacgttaatcagccccaagagaaagatttgttggagggaaatttttcctttgatattaaatctcgctctagattggaaaaagtttcctctacaaaagcacaatttgttagtggaaaaaccttcaaatatgatataattggtgctggttcacattcttcagaagattttcctgaaaaggaagatcaagaaaaacccaaaaagattgatgccagattgagacaaagaatagatcctcaatacaatga

SEQ ID NO: 77801 - DNA, 81 bp, Glycine max
ctttgaaggattggaccttggaaagatggacaaagctgatgactctggacttgcttcatatgttgccggtcaaattgatcg

SEQ ID NO: 77802 - DNA, 383 bp, Glycine max
atttgcaatagcatttttaatgagatgctcattagatatagctatgaaaaattactgcgccaggctaaagctccaagtatgtttttacaatccttcaaaaattttgtttctttgtgtgtgtatggtgatgataacttaattagtgttcatgaatatgtcaagccttactttagtggttctaaattgaaaagctttctagctagtcataacatcaccattactgatggtattgacaaaactagtgcaactttgcaatttagaaagttagcagattgtgattttctcaagagaaactttaagcagatgtctaatgttttgtgggtggctcctgaggacaaagcgagtttatggtcacaacttcattatgtttcgggtaataatct

SEQ ID NO: 77803 - DNA, 375 bp, Glycine max
cttctccctacattaaatgtacagtctctttcttcatagcatttggaaatttggctgatgataccatcaattttgaggcttttccccacaagctggtgcagtttggagagattcaggaaaaagttgtattgaaattttcacaagaggaatttcttacagcttggtcaactcaggtgcgtcctgcaacaactctgttggctgatgggtgtccatatttgtatgcaatggtgcatgatagttcagtgtctacaataccaggtgattttgtcattggtgtcaagttgacaaccataaacaatatgtgtgcatatgggctcaatcctggtatttcaggttctcgtcttttgggcaccattcctcagtccatttcacagc

SEQ ID NO: 77804 - DNA, 51 bp, Glycine max
aaaaaaaaaaaattattttaaaaaaaaaaaaaaaaaaaaaaaaaaagagag

SEQ ID NO: 77805 - DNA, 386 bp, Glycine max
caaaactggagattggatcacacttatacaaaattctccaattagtaacttattgagagttgctgcttggaagaaaggctgtttaatggtcaagattgtgatgtctgggaatgcagcagtcaaaaggagtgattgggcctcattggtacaagtgtttttaacaaacagcaacagtacagagcattttgatgcatgtaagtggacaaaatcagaaccacattcctgggaattgatcttcccaatagaggtatgtggtcctaataatggttttgaaatgtggagttctgagtgggcaaatcaaacttcatggcatttgagtttccttattgacaatcccaaacagtctacagtttttgatattctcttgggaatctctcaagattttg

SEQ ID NO: 77806 - DNA, 426 bp, Glycine max
agagctatgacgtgccctgctcccttagctcggaattcggctggagggctgtttaatggtcaagattgtgatgtctgggaatgcaccaggcaacacgagtgattgggcctcattggtacacgtgtttttaacaaacagcatcagtacagagcattttgatgcatgtaagtggacaaaatcagaaccacattcctgggaattgatcttgccaatagaggtatgtggtcctaataatggttgtgaaatgtggagttctgagtgggcaaatcaaacttcatggcatttgagtttccttattgacaatcccaaacagtctacagtttttgatattctcttgggaatctctcaagattttgaaattgctggtaatactcttatgccagctttttctgttccacaggctactgccagatcttctgaaaatgc

SEQ ID NO: 77807 - DNA, 88 bp, Glycine max
aaagtattgagagaatcttttttgttttatatgtctatattattattttgtaagaatactacagttatattgacatttgacttgaacc

SEQ ID NO: 77808 - DNA, 399 bp, Glycine max
gtggatgggaaaattgactttcccccagggcacttcccgaagtgttaagagaatgcctctttctatagggggaggagctggtgcaaagaatgctattctcatgaatatgccaaatgctgttctttcaatgtggagatattttgttggagatctcgtctttgaagtttctaagatgacttctccctacattaaatgtacagtctctttcttcatagcatttggaaatttggctgatgataccatcaattttgaggcttttccccacaagctggtgcagtttggagagattcaggaaaaagttgtattgaaattttcacaagaggaatttcttacagcttggtcaactcaggtgcgtcctgcaacaactctgttggctgatgggtgtccatatttgtatgc

SEQ ID NO: 77809 - DNA, 270 bp, Glycine max
ggacaactctgcttgcaacgatgcaaggtggtctagactgcacgggaccgggtgatcacgttattgttgtcaaaatcacaaccctcaacactaagtgtgcatattggctaacatgccgccttctactttatactatggtgcgcaccattactacgtgcattatactccaaactctttcgaagcaaaaggctaccttgagaacaccaaactacatagagaggggcaagcaaagatcttgactggtgtctgtcgcccttctgcgttggggca

SEQ ID NO: 77810 - DNA, 252 bp, Glycine max
ggtgaacgctggtcaaaaaaatgatgggtgggcatgaatgagggacatggagtgatcgcgcctccttggaccaagtgttgctacccaacaccaacaaattattgctgtttgatgtacgtcggcggacacacactaagcctcatttctgggaatcgatgcttgactattggtaaccaaggacctggagaatgctaccgtaatggcttgttacctactgtgcagaagccaactaagatggacctttgcttttgc

SEQ ID NO: 77811 - DNA, 381 bp, Glycine max
gcagtcaaaaggagtgattgggcctcattggtacaagtgtttttaacaaacagcaacagtacagagcattttgatgcatgtaagtggacaaaatcagaaccacattcctgggaattgatcttcccaatagaggtatgtggtcctaataatggttttgaaatgtggagttctgagtgggcaaatcaaacttcatggcatttgagtttccttattgacaatcccaaacagtctacagtttttgatattctcttgggaatctctcaagattttgaaattgctggtaatactcttatgccagctttttctgttccacaggctactgccagatcttttgaaaatgcggaatcctctgcatgatctggaatttgtgttttctttcgc

SEQ ID NO: 77812 - DNA, 104 bp, Glycine max
ctagagcaggtatttactctgttctgcatgttggttctggcagcgactcctccccgagagaagattattcaatatctttggttggaggaaatccggtatcttag

SEQ ID NO: 77813 - DNA, 398 bp, Glycine max
aagcaacttgtgtttccaggtttgtttacattttcaacgagggacatggttttactttagaatttttttaaaaaaagttatacttttagttttggggattttcagaatagtacgtagagtggtggtggcagtaagtagtaaccttcatgatggctggaatgataaagcgtgaatgtttaatttccaaagaaaggaaagtggatagttctaataattaaaataaaataagaaaaatgttttcttttaggtttaaaattataaagaatgaacatactatgtaaaaattgtcaaatgtgagtaatatttggacattttcagacaactaatttatgttgattaatgttacttccaattgagtaacagtggattaggtaaatggtttctacatgtttaggggt

SEQ ID NO: 77814 - DNA, 205 bp, Glycine max
ctttcttaataatttatgcaaactactctggaatttcaatgaagccaccaaaatgttgaaaaaaaaaaaaaaaaaaaaaaaaaaaaaaaaaaaaaaaaaaaaaaaaaaaaaaaaaaaaaaaaaaaaaaaaaaaacaaaaaaaaaaaaaaaaagggggaaaatgagttaaaataatggtttttaaaggataatgaataacgggcaa

SEQ ID NO: 77815 - DNA, 288 bp, Glycine max
ccatattttcattttgttcaatcttctcttgactttcgggcacgccgcctttgactccatctacactcttttatcactgccatcttttttactctcttaatcccatcatcaaattctaactctacactcaccactttcttttattaatccccccacatcgattgtctcagagggtgtcagtgttaccatattacactccatcgtttatgccatagcatcctgttccactgctgagtataccaccaaattcgcgaaatatccaaatgactctactatttttactaacac

SEQ ID NO: 77816 - DNA, 182 bp, Glycine max
gggaattttgatacggttctgaactatttcctctaagggccgcatcggctacagatcggcagcactagtgcgagtactctcaggctatcgtcgatgatcaaacagaccacaaatagcacttgctcagcgacgacgcttatgaagaagaccgcgatggcgatggccatagctcctttgtcact

SEQ ID NO: 77817 - DNA, 223 bp, Glycine max
ctgctgggcttgatcaaactagtgcagctttgtaatttacaagggttggtgatagtgactatctctagagaaactgttaaaacatggcatatgctagctggcaagcttctgacgacaaggcgagtttaaggccacaccttccttatggtacacgtcaaaatttgcaagtgcaataacctaaaggaggcaatgagctaaataccttaccagaagggtttttgca

SEQ ID NO: 77818 - DNA, 115 bp, Glycine max
gcagatttgcattttgtttactcttgaattcactttcagccacggcgtctttgacggcgtggacacttttttatgagcgtcatcctttttgctctgtgcatgccaatcatcaatg

SEQ ID NO: 77819 - DNA, 383 bp, Glycine max
atcaattttgaggcttttccccacaagctggtgcagtttggagagattcaggaaaaagttgtattgaaattttcacaagaggaatttcttacagcttggtcaactcaggtgcgtcctgcaacaactctgttggctgatgggtgtccatatttgtatgcaatggtgcatgatagttcagtgtctacaataccaggtgattttgtcattggtgtcaagttgacaaccataaacaatatgtgtgcatatgggctcaatcctggtatttcaggttctcgtcttttgggcaccattcctcagtccatttcacagcagactgtttggaataaaatggcgacagtgagaacaccattgaatttgattctagcaagcagagcttttgtcag

SEQ ID NO: 77820 - DNA, 184 bp, Glycine max
caacagcgaaatcactctcatcccaaaaaaaaaaaaaaaattaatagaggggtggggccactaatagggggttctgaaactacaaatctttcacacgcccagtattattttatgcccgtaccatgggggctgactaatatgccctataggcagccgtttttgatcacggcgtgataatgtccaa

SEQ ID NO: 77821 - DNA, 161 bp, Glycine max
aaacaaggaaaaaaaaaaaacccttagccaacacagccatcagggccaccgtgggttcaaataatcccatgcactgggcaaactgcatcgaccgggtactgagctcatgcgcaagaccggtgggccggcaaggtcacttgccgcctgaccgcaagagtggt

SEQ ID NO: 77822 - DNA, 121 bp, Glycine max
acagactacagtttttgatttcttatcagcaatgctctcaatattgtgaaattgacggacatactctgatgccatattttctgttaaccacgctttgccatatcatcaaaatgcctaatct

SEQ ID NO: 77823 - DNA, 218 bp, Glycine max
gctaaatcttattttagcaatagctacccgtatcacaacggtacgtgtattaggcaaaaacacgaaatgggaggggataaagagcagcctaagaatgaatccgtgtggaatcccgaggaggccgccgtatcctccaggaaagacgacagacccattccttactgttacatactcgacttgcatctcacgtgatgcgccatggacatctaacgcacatg

SEQ ID NO: 77824 - DNA, 356 bp, Glycine max
  unsure (1)..(356): unsure at all n locations
ctcgagccgctcgagccgcaccattcctcagtccatttgacagcaaactgtttggaatcaaatggcaacagtgagaacaccattgaattttgattctagcaagcagagcttttgtcagttttctattgaccttctcggtggaggaatcttagtggacaaaactggagattggatcacacttatacaaaattctccaattagtaacttgttgagagttgctgcttggaagaaaggctgtttaatggtcaagattgtgatgtctgggaatgcagcagtcaaaaggagtgattgggcctcattggcacaagtgtttttaacanacagcaacagtgcagagcattttgttgcatgtaagt

SEQ ID NO: 77825 - DNA, 363 bp, Glycine max
gggggaggagctggtgcaaagaatgctattctcatgaatatgccaaatgctgttctttcaatgtggagatattttgttggagatctcgtctttgaagtttctaagatgacttctccctacattaaatgtacagtctctttcttcatagcatttggaaatttggctgatgataccatcaattttgaggcttttccccacaagctggtgcagtttggagagattcaggaaaaagttgtattgaaattttcacaagaggaatttcttacagcttggtcaactcaggtgcgtcctgcaacaactctgttggctgatgggtgtccatatttgtatgcaatggtgcatgatagttcagtgtctacaata

SEQ ID NO: 77826 - DNA, 257 bp, Glycine max
cgaaaatacaatatttaattgctattcatcaatgggtatttctataaacgtagtccgaaaaaaagttgtctgacggtcattcagatttattgactaactgaaacaactgggaaggaaacaatgaatctgatgagtctcacattttttctacaaaagaaaaatgtgtattaatttcgcttagtggatatcattttattaagaagttcgttactaatcattctccaagcgatactggtaacgcttggcaataaaatgat

SEQ ID NO: 77827 - DNA, 304 bp, Glycine max
cctgaatacattatttcatttcttaccatcaatggcttactctgttgagcttgacagccttattatgtatgcctataaaccccaatacctcactctcccactttcaatccaacctttctccttcactacataatcttactttatgaaacaccagaaaataccctctagaatccactctggtgctaccatcacagccacttatatcatgctcaaccccgtccggaaccactgcctaacctaaaggcattaacattaaatcgagtcgcacctaaacgattaatggttacatgactgtaaccaattt

SEQ ID NO: 77828 - DNA, 360 bp, Glycine max
acaaaactggagattggatcacacttatacaaaattctccaattagtaacttattgagagttgctgcttggaagaaaggctgtttaatggtcaagattgtgatgtctgggaatgcagcagtcaaaaggagtgattgggcctcattggtacaagtgtttttaacaaacagcaacagtacagagcattttgatgcatgtaagtggacaaaatcagaaccacattcctgggaattgatcttcccaatagaggtatgtggtcctaataatggttttgaaatgtggagttctgagtgggcaaatcaaacttcatggcatttgagtttccttattgacaatcccaaacagtctacagtttttgata

SEQ ID NO: 77829 - DNA, 331 bp, Glycine max
aattatactactactatagtctatagagatatcaaatggtactgcccaattaaggttgtttttgcttgcttgattttcttttccaatttggttggtgagctgaccctgctgcaacaagccgtgcagagacctctattgaagactttctctttgttctctttttttatgcaatggcttaagtggtggtgggtcttctcttctcagaatcttggtacaaaaacagaagagaaaaacgggatttttggttttgttgaactaagagaagctgacgctttttgggatcaaactatatgtgtttgaacttgagtctatttaaagtcttgttgcaatg

SEQ ID NO: 77830 - DNA, 335 bp, Glycine max
ctgtaactaccgactggcgaccaactccatgtacagcgggcatgggttaccgaggtttggccccaaattttaacgctcatctctacacccgttgctcaccgccgccggccagggctcgctagacaagaacgtgctggttgggtggctgctacaggactatttgtactcgtacgtggggtacatcaagttcgctttcatgctcatatcgcgcctaccttaccctaccgatccacccacaccatcattttctggcacagtctacagagcggacgctgtctcgccgtctaaccgagagcacgttctgcacaaggacctctagacgctcatttttttcc

SEQ ID NO: 77831 - DNA, 386 bp, Glycine max
cgtcttttgggcaccattcctcagtccatttcacagcggactgtttggaatcaaatggcaacagtgagaacaccattgaattttgattctagcaagcagagcttttgtcagttttctattgaccttctcggtggaagaatcttaaaggacaaaactggagattggatcacacttattcaaaattctccaattagtaacttgttgagagttgctgcttgtaagaaaggctgtttaatggtcaagattgtgatgtctgggaatgcagcagtcaaaaggagagattgggcctcattggttcaagtgtttttaacaaacagcaacatttcagagcattttgattcattgtagtggacaaaatcagaaccacatttctgggaattgatctt

SEQ ID NO: 77832 - DNA, 153 bp, Glycine max
cgataaaacaatttttaatgcaccaaatgcaaccaagaataagaggggcgggcgcagacaaaggggctctgcgacccggcaattaattctggaccgaaccctgcaagcgtaccagctttcactatagtgagtcctataaaagcttggagttcg

SEQ ID NO: 77833 - DNA, 168 bp, Glycine max
cgctaatctaatttatgtgtcccctgaagcgtatatgtccaagcgcgacgtagcttgcacatcgacaatgatggctgtcatttctttttattccataccaaacgatgatgtgctttccatataacagattgaagagttccattcaatgcagatagatgactaaatgct

SEQ ID NO: 77834 - DNA, 383 bp, Glycine max
  unsure (1)..(383): unsure at all n locations
cacacannccacctctccctatagacacctagatcgcatcaccatggccgtcaaccgcgctttcatcaaaaagtggctgcctaccgagacctggcccatctttggcatcgtgggcatcgcttgcggcggggccggctactacctgtataagctttcaagnnnncccgaggttgtttgggaccgcaagggcgactggaggccttgggacaaggtcaagcacgaccagaacctcaagttcctctcgtacaaccccgacttttgggccaagcgcaaggaagaggccgccgcgcgcgaaaagcagcgcatggtcgatgccatctagatgtcgtccaaggcggggactaccctggatgtttcttcttgatcgtttctctttttactcg

SEQ ID NO: 77835 - DNA, 381 bp, Glycine max
tccaattagtaacttgttgagagttgctgcttggaagaaaggctgtttaatggtcaagattgtgatgtctgggaatgcagcagtcaaaaggagtgattgggcctcattggtacaagtgtttttaacaaacagcaacagtacagagcattttgatgcatgtaagtggacaaaatcagaaccacattcctgggaattgatcttcccaatagaggtatgtggtcctaataatggttttgaaatgtggagttctgagtgggcaaatcaaacttcatggcatttgagtttccttattgacaatcccaaacagtctacagtttttgatattctcttgggaatctctcaagattttgaaatgctggtaatactcttatgccaactttt

SEQ ID NO: 77836 - DNA, 396 bp, Glycine max
tgtgaattgtggaatcctgcttgcacaaaagcaatgactatgtcatttaatccaaacccgtgttctgatgcatggagtttggaatttctgaagcgtactggatttcattgcgatatcatttgtgtcactggatggactgccaccccaatgcaggatgttcaggttacaattgattggtttatttcctctcaggaatgtgttcccaggacctattgtgttttaaatccacaaaatccttttgtgttaaataggtggatgggaaaattgactttcccccagggcacttcccgaagtgttaagagaatgcctctttctatagggggaggagctggtgcaaagaatgctattctcatgaatatgccaaatgctggtctttcaatgtggagatattttgtt

SEQ ID NO: 77837 - DNA, 294 bp, Glycine max
gaattgtggaatcctgcttgcacaaaagcaatgactatgtcatttaatccaaacccgtgttctgatgcatggagtttggaatttctgaagcgtactggatttcattgcgatatcatttgtgtcactggatggactgccaccccaatgcaggatgttcaggttacaattgattggtttatttcctcttaagaatgggttcccaggacctattgtgttttaaatccacaaaatccttttgtgttaaataggtggatgggaaaattgactttcccccaaggcactttcccaagtgtt

SEQ ID NO: 77838 - DNA, 221 bp, Glycine max
ctagagcacagtctgctttaccattgagctacgtgaattgtagggaacggttatcactgagctcttgcaaagagcctgattttactatcagttcacagattgcattgcacgagcaattacattagtggtaacactacgaattcggggtattacatgtttctcacgggaaaatgctatcaacttgctcaacaagggtgcctcctgcaataacatattcagca

SEQ ID NO: 77839 - DNA, 142 bp, Glycine max
cttttgttgaataggcataccaaagagtagcctcggaccggcttttaaagatagcaggaatagaagatgacaaactcttgataatggctgatgttgatgagatacgttgtgctcacacagttaaccctatcgaggtggtgca

SEQ ID NO: 77840 - DNA, 108 bp, Glycine max
gccaaatttcatatacgtaaaaaatatgaaaatataagaggggggggcatttattttcattgcaaacgaaaataactataatctcaccaactaccatatacaatatcc

SEQ ID NO: 77841 - DNA, 452 bp, Glycine max
gagctatgaccacgcatgcacgcgtcatcgtaagtctcggattgcgactcctgaggtcatttcacagcaaactgtttggaatcaaatggcggcagtgagaacaccattgaattttggttctagcaagcagagcttttgtcagttttctattgaccttctcggtggaggaatcttagtggacaaaactggagattggatcacacttatacaaaattctccaattagtaacttgttgagagttgctgcttggaagaaaggctgtttaatggtcaagattgtgatgtctgggaatgcagcactcaaaaggagtgattgggcctcattggtacaagtgtttttaacaaacagcaacagtacagagcattttgatgcatgtaagtggacaaaatcagaaccacattcctgggaattgatcttcccaatagaggtatgtggtcctaataatggttttg

SEQ ID NO: 77842 - DNA, 326 bp, Glycine max
gtcacaacttcattatgtttcgtgtcataatctggaaatgccagaagctgatcttgtcaatctcgtaaatgtgttacgagaattgttttcgcacagtccaaaggaagctcgccaattgagaaggaaagctctctctcgtcttgaatggctgcaaaaagctgatgttcctaccatagcacagattgaagagttccatactatgcagaggatgatgaatgctcctgattcaaatgattatattgattcactgtcgagcattgatttgtagggtttacaaggagcatgtttagcatttccaaacaaaattgtttttgttgataaacttt

SEQ ID NO: 77843 - DNA, 136 bp, Glycine max
cttaatgtgtgactgctcaagagggactgcgagcatgagggggagcaccatgctcaagaatgcaatggggagcaccgcggtgaacacaatgatggatcaaccgaatcgtccagggtgtcacaaacacacgagatcc

SEQ ID NO: 77844 - DNA, 110 bp, Glycine max
ctctgtttgaactgacgccattggatatattaataggggagagctgtagaaggttgtggaaacacacaataataacttatctgcactaatggaaacataaccaccaaccc

SEQ ID NO: 77845 - DNA, 379 bp, Glycine max
caaatggcaacagtgagaacaccattgaattttgattctagcaagcagagcttttgtcagttttctattgaccttctcggtggaggaatcttagtggacaaaactggagattggatcacacttatacaaaattctccaattagtaacttgttgagagttgctgcttggaagaaaggctgtttaatggtcaagattgtgatgtctgggaatgcagcagtcaaaaggagtgattgggcctcattggtacaagtgtttttaacaaacagcaacagtacagagcattttgatgcatgtaagtggacaaaatcagaaccacattcctgggaattgatcttcccaataaaggtatgtggtcctaataatggttttaaatgtggag

SEQ ID NO: 77846 - DNA, 137 bp, Glycine max
aggctcttttgttcagcggactaaactgcagacaccggatatatgtcttgccaaataatgaaatccctagaggatttgcttttacattatgaatatactgtaagaaatgctggtggctctattgtgcaatattgcta

SEQ ID NO: 77847 - DNA, 285 bp, Glycine max
gggctccttattgactaataagaagtaatgcatttgagggtctatgaaatacatagccttgaaatgggccccacttggcaagggctcaacctattctgcatggactatgttcgttacatccacccttcacgattgctaggcgccaagacgcgtcaccagctgcttcagacaataagtgagccttgcatgtgcccttaagcactctgagaactgttcatggaagaccactgcttatcgtcgcagtcatgctcgaaataaaatggcggcggccaccggataggcacc

SEQ ID NO: 77848 - DNA, 144 bp, Glycine max
ggatcacatagtttccaaggtagcagactacgacctaaacagggaactcttatctatctagaaggaggaccccttccaaagcgaccgagtcttacgagaatggcgcatgctgtactattaatgtgctgatagaaatggaggaga

SEQ ID NO: 77849 - DNA, 117 bp, Glycine max
ctgcacgtgtgtcaattgacaagggaagctctctgtggaggagaactaatgtataaacctgaaaagcgtgccatagggcatgggtcataagcctcatagcatgaaagtgacaagagt

SEQ ID NO: 77850 - DNA, 323 bp, Glycine max
gaggactttataatcatgcctcttttgttaaaaacaactatagccgaaacgaagattgaatagtagtgtttgtgttgtgtgtatgccaatgatttcaatcttggtggtttgttaaactcactttgtgtatgagattcatgctcactattatttgctgaaccaagttttgtgtttggatagcttaaagcatcaatcttctttgcatctttttttttttttgctggtactcctttttatgtatatatacaagaaggtgatcctttttatatatcatgcgtttgtagactttttataaagcttcagctatgtgatgatggggggga

SEQ ID NO: 77851 - DNA, 376 bp, Glycine max
acgatggattcattcttgttcgtgcacgtgtcaaaaatttacgccggcacctcgcgaggatggggatgagtcaaaacgacgacgtggatgataccgtagacgagaagcacgtttacgtaccggttcgggtttgggtggaccccgagataggatccatttattgcgctgggctgatgcttggaccagtccacggacaacaaagagagcgaatgggtaacacaaaagattgtggacggtgattatctggacaacgcagggttctaacgtcaaaactggtgccaactcagtgtagaggacgcgaacatggagctgtacaatggaccaagactcgtgagggaacccggcgatcttctacgacggttggcatgataacact

SEQ ID NO: 77852 - DNA, 338 bp, Glycine max
ctcgagccgtttccaaacaaaattgtttttgatgataagcttggggtggctaacacacaagaattctttgatggaaattttccagtggattcttggttaccaatttttgtgaattgtctttatcctgtaagtcaattaccttcaaaagctgtcgttgtaaatgttacatgtggtagtggacgtggtggtttacccaccactgcttggattagttctgcagttaacaatcgctcctcagatatcaacaaaaggattcgcacagcacttgggaaaggtaagaaaattgtttttcttactaaagttgatccttttccagtagctttactggctgttctttt

SEQ ID NO: 77853 - DNA, 336 bp, Glycine max
aaaaaaaaaaaatatttaaattgaaaacccttcaaactataaacgggggtcaaaaccaatctattgccctaaaacaaaaaaaattgaaatcggattactctattcttggaactccggaatttggaccaaaaaacacttccccaaatcttgctttttgtctcgctcttgaatctaactcgctaatgtcaatgcgaccaaataatctctccctagttgattgcgctatggcccaagtaggatcaaaatcgggcaacatataaactttgattacccaccttcgtggattttcatatctattgcaaccatgataattgttgataccagtgtctaacgtaa

SEQ ID NO: 77854 - DNA, 176 bp, Glycine max
cataaaaacacgaatgcctgaactggtaccgtgaactacatggctgactgaatgatatctaacgcaggtgaacacactgtctatcgggcctgcaccggtatagttgcttcatatactggcctcaagtccatggctggttgactcaccggaaagagcaacattgacatgacctgcat

SEQ ID NO: 77855 - DNA, 172 bp, Glycine max
  unsure (1)..(172): unsure at all n locations
aaaagtttcctctacaaaagcacaatttgntagtgggaaaaaccttcaaatatgatataattggtgctggttcacattcttcagaagattttcctgaaaaggaagatcaagaaaaaccccaaaagattgatgcccgattgagacaaagaatagatcctcaatacaatgaggg

SEQ ID NO: 77856 - DNA, 138 bp, Glycine max
aagctcgaatttcggttcgagaacaagtttttttttgaaacctaaattactttctgattttctccggcacttttatttctctctttctggatgattctctctgagtagattgcggcgtgttctctatgatgatgatga

SEQ ID NO: 77857 - DNA, 374 bp, Glycine max
caaatggcaacagtgagaacaccattgaattttgattctagcaagcagagcttttgtcagttttctattgaccttctcggtggaggaatcttagtggacaaaactggagattggatcacacttatacaaaattctccaattagtaacttgttgagagttgctgcttggaagaaaggctgtttaatggtcaagattgtgatgtctgggaatgcagcagtcaaaaggagtgattgggcctcattggtacaagtgtttttaacaaacagcaacagtacagagcattttgatgccatgtagtggacaaaatcagaaccacattcctgggaaatgatcttcccaatagaggtatgtggtcctaataatggttttgaaat

SEQ ID NO: 77858 - DNA, 339 bp, Glycine max
actgagtaagggcaatgatattctgtgttgcgattatgctagttttgatggtttgattaccaagcaagttatgagcaagatggcagaaatgataaacagtctttgtggtggtgatgaaaaattgatgcgtgaaaggacgcacctgctgttggcttgttgttcaaggatggcaatttgtaagaaagatgtttggagagttgaatgtggaatcccttctggatttccgctcacagttatttgcaatagcatttttaatgagatgctcattagatatagctatgaaaaattactgcgccaggctaaagctccaagtatgtttttacaatccttcaaaaattt

SEQ ID NO: 77859 - DNA, 390 bp, Glycine max
gagattcaggaaaaagttgtattgaaattttcacaagaggaatttggtacagcttggtcaactcaggtgcgtcctgcaacaactctgttggctgatgggtgtccatatttgtatgcaatggtgcatgatagttcagtgtctacaataccaggtgattttgtcattggtgtcaagttgacaaccataaacaatatgtgtgcatatgggctcaatcctggtatttcaggttctcgtcttttgggcaccattcctcagtccatttcacagcaaactgtttggaatcaaatggcaacagtgagaacaccattgaattttgattctagcaagcagagcttttgtcagttttctattgaccttctcggtggaagaatcttagtggacaaaactgga

SEQ ID NO: 77860 - DNA, 232 bp, Glycine max
gattcaggaaaaagttgtattgaaattttcacaagaggaatttcttacagcttggtcaactcaggtgcgtcctgcaacaactctgttggctgatgggtgtccatatttgtatgcaatggtgcatgatagttcagtgtctacaataccaggtgattttgtcattggtgtcaagttgacaaccataaacaatatgtgtgcatatgggctcaatcctggtatttcaggttctcgt

SEQ ID NO: 77861 - DNA, 108 bp, Glycine max
gctccgaattagggttttccaattcgcagagcaactcaacacaacggaccaaaccaacaatgtcgcagccgcagcctcagtcgcagccgcaacacgggcaagcggcgc

SEQ ID NO: 77862 - DNA, 364 bp, Glycine max
tgcaaagaatgctattctcatgaatatgccaaatgctgttctttcaatgtggagatattttgttggagatctcgtctttgaagtttctaagatgacttctccctacattaaatgtacagtctctttcttcatagcatttggaaatttggctgatgataccatcaattttgaggcttttccccacaagctggtgcagtttggagagattcaggaaaaagttgtattgaaattttcacaagaggaatttcttacagcttggtcaactcaggtgcgtcctgcaacaactctgttggctgatgggtgtccatatttgtatgcaatggtgcatgatagttcaatgtctacaataccaagtgattttgtc

SEQ ID NO: 77863 - DNA, 362 bp, Glycine max
gagagattcaggaaaaagttgtattgaaattttcacaagaggaatttcttacagcttggtcaactcaggtgcgtcctgcaacaactctgttggctgatgggtgtccatatttgtatgcaatggtgcatgatagttcagtgtctacaataccaggtgattttgtcattggtgtcaagttgacaaccataaacaatatgtgtgcatatgggctcaatcctggtatttcaggttctcgtcttttgggcaccattcctcagtccatttcacagcaaactgtttggaatcaaatggcaacagtgagaacaccattgaattttgattctagcaagcagagcttttgtcagttttctattgaccttctc

SEQ ID NO: 77864 - DNA, 158 bp, Glycine max
acgatgcacgcgcgcgtaagctcggaattaagctcgagcttgcgggaaaattgtttatattttaaaacacactcccatctcttgggggtggccgcctgaagatacctcgggatgattctcttgttttctggacagacaaaaaacatggtctgggactg

SEQ ID NO: 77865 - DNA, 349 bp, Glycine max
atacacatttttctctatgtggcgatatacgcgagttgaaactacgattctatcaaatcgttttatggacttactttttgctttaacagaaactaacggtctaatcattaattaaacatatcgctgtttatatatatacggaccgatattctatatcgtgtatcctaattaagattagacccctgcctataacgtgttatagacttctttattttttggaacttatccattccttttctaatgagcccgacaatccgaaataattgtgggggaggggtcattgcgtttgtgatctaccatacctagagctctgcgtggtgagctgatttgcacttcccacgtgcaacac

SEQ ID NO: 77866 - DNA, 382 bp, Glycine max
  unsure (1)..(382): unsure at all n locations
cttttgtgttaaataggtggatgggaaaattgactttcccccagggcacttcccgaagtgttaagagaatgcctctttctatagggggaggagctggtgcaaagaatgctattctcatgaatatgccaaatgctgttctttcaatgtggagatattttgttggagatctcgtctttgaagtttctaagatgacttctccctacattaaatgtacagtctctttcttcatagcatttggaaatttggctgatgataccatcaattttgaggcttttccccacaagctggtgcagtttggagagattcangaaaaagttgtattgaaattttcacaagaggaatttcttacagcttggtcaactcaggtgcgtcctgcaacaac

SEQ ID NO: 77867 - DNA, 331 bp, Glycine max
  unsure (1)..(331): unsure at all n locations
tgaaaatgcggaatcctctgcatgatctggaatttgtgtttgctttcgcttgttcgtttgtttaattcaataaaggaaattaggcatgaccctcttgttgagtatgctctgcctatttgaaaatttccacacctcttttaattgtcgtaatgatgtgtgaagtgtgtgttattttaaaaaaaaaagactaaaggaaaccaacaaacaaggtttacagtggaagcttaaaaattgatgctgtaaaaaaagaaaaaagagattgaagagaaccaaacngacctacaaaaaaagggcggcccgcacttagggatcttttctcccccgaaattaa

SEQ ID NO: 77868 - DNA, 393 bp, Glycine max
ctcaatcctggtatttcaggttctcgtcttttgggcaccattcctcagtccatttcacagcaaactgtttggaatcaaatggcaacagtgagaacaccattgaattttgattctagcaagcagagcttttgtcagttttctattgaccttctcggtggaggaatcttagtggacaaaactggagattggatcacacttatacaaaattctccaattagtaacttgttgagagttgctgcttggaagaaaggctgtttaatggtcaagattgtgatgtctgggaatgcagcagtcaaaaggagtgattgggcctcattggtacaagtgtttttaacaaacagcaacagtacagagcattttgatgcatgtaagtggacaaaatcagaaccacat

SEQ ID NO: 77869 - DNA, 305 bp, Glycine max
ttaccaagcaagttatgagcaagatggcagaaatgataaacagtctttgtggtggtgatgaaaaattgatgcgtgaaaggacgcacctgctgttggcttgttgttcaaggatggcaatttgtaagaaagatgtttggagagttgaatgtggaatcccttctggatttccgctcacagttatttgcaatagcatttttaatgagatgctcattaaatatagctattaaaaattactgggccaagcttaagcttcaaatttttttttaccattcttcaaaaaatttggttctttggggggggattgg

SEQ ID NO: 77870 - DNA, 186 bp, Glycine max
tgcaattgaagttaaaagccttagccttccctacaactccaaacacaaagacatcatcatccatggctgcctccgtcttcactgtcggagctgtcaacagagctcttttggacctgaatgggtctggagcttgagcttcaacttccaagtcaagcttctttgggaccaacttggaaaaaggtattg

SEQ ID NO: 77871 - DNA, 396 bp, Glycine max
attgaagagttccattcgatgcagaggatgatgaatgctcctgattcaaatgataatattgatttactgttgagcattgatttgttgggtttacaaggagcaggtaaagcttttccaaacaaaattgtttttgatgataagcttgtgttggctaacacacaagaattctttgatggaaattttccagtggattcttggttaccaatttttgtgaattgtctttatcctgtaagtcaattaccttcagaagctgtcgttgtaaatgttacatgtggtagtggacggtgtggtttacccaccactgcttggattagttctgcagttaacaatcgctcctcagatatcaacaaaaggattcgcacagcacttgggaaaggtaagaaaattgtttttctt

SEQ ID NO: 77872 - DNA, 261 bp, Glycine max
gtcaagttgacaaccataaacaatatgtgtgcatatgggctcaatcctggtatttcaggttctcgtcttttgggcaccattcctcagtccatttcacagcaaactgtttggaatcaaatggcaacagtgagaacaccattgaattttgattctagcaagcagagcttttgtcagttttctattgaccttctcggtggaggaatcttagtggacaaaactggagattggatcacacttatacaaaattctccaattagtaac

SEQ ID NO: 77873 - DNA, 326 bp, Glycine max
gtttatggtcacaacttcattatgtttcgtgtaataatctggaaatgcaagaagcttatcttgtcaatctcgtaaatgtgttacgagaattgtatttgcacagtccagaggaagctcgccaattgagaaggaaagctctctctcgtattgaatggctgcaaaaagctgatgtgcctaccatagcacagattgaagagttccattcgatgcagaggatgatgaatgctcctgattcaaatgataatattgatttactgttgagcattgatttgttgggtttacaaggagcatgtaaagcttttccaacaaaaaatgttttgatgata

SEQ ID NO: 77874 - DNA, 218 bp, Glycine max
ccactactactacgattgtaatatacctatacttaactaccacagtcatgcatcttatgttggtgccggtcccacaagacgcggcgaagcgcatatacacgctcaaaaaggtcatggatggcgaaatcagcatgagcgcgcatccagcgcgcatgtggcctgatgacaagtactcgaggcataaggttacgatccataagagatatcgattgcttttg

SEQ ID NO: 77875 - DNA, 335 bp, Glycine max
atggagttgaagaagaattatgtttcttttggagttccctttttccttcttttctttcttatgttttggtctttcaggctttcctcttgttttagttcataaaagaaaagaaaaaaaaaggagtctaaaactgagatatataatatgtaaattattttgtggtgtagtacaatcaatgtattcaaatttctggcagtgagaaattggttttattaaattcaggtgttcaattcttagtctgtggtttgtgttgttccttttgagaattaaacatggcaaaggaggcaccagggggcaaaacataaaagtcaaaagacaaagtaaaagattttttg

SEQ ID NO: 77876 - DNA, 318 bp, Glycine max
ctttctagctagtcataacatcaccattactgatggtattgacaaaactagtgcaactttgcaatttagaaagttagcagattgtgattttctcaagagaaactttaagcagatgtctaatgttttgtgggtggctcctgaggacaaggcgagtttatggtcacaacttcattatgtttcgtgtaataatctggaaatgcaagaagcttatcttgtcaatctcgtaaatgtgttacgagaattgtatttgcacagtccagtagtagctcgccaattgagaaggaaagctctctctcgtattgaatggctgcaaaaagc

SEQ ID NO: 77877 - DNA, 286 bp, Glycine max
ggagaacattgtggggccaacaagtaatacgccgccatctatgtcgccaatttcgaacgcttcgtcaaatggatcaatccccatgaaagtcaagaggccgagtcttggtagcgcatcacgtgcaactgctggaacagcagcttccgttgcaagagcaacagcaaaattaacagcgcgaggtcagtctatcagtcgttcggcgtcacctggaccaacgaagaagcgcgcaaggtcacacatgagttcatcaggacccggttggcagaaatagcttcatgtacgactc

SEQ ID NO: 77878 - DNA, 220 bp, Glycine max
tgctagttcacctaattaggccagataaattctatagaatgagagagtttaccagagggtaaggatgaagatcacggagttgttggtgcttaaatgcacgggcgatggatccattcctgtgattctggataacccttccagtgtacatcactttcaatacttcggagcccccggaagggttcgtggcgccttcctcctttgacgacgggcctctggagac

SEQ ID NO: 77879 - DNA, 204 bp, Glycine max
tctccgagttggttttgccaaagctgcctaacaagacatgttggagattatatatggcatgttttaataagctcgttattgtattgtaaataaacctttctgtaacctactatggcacaaggtttaacattattagatccctgcggaaatgtaccttggtgaaaaacttattgccaccccctgaatgttatttgtggtggcctt

SEQ ID NO: 77880 - DNA, 69 bp, Glycine max
tctcccagttggttttgccaaagctgccttacaagacatgttggagattatattgggcctgtttttata

SEQ ID NO: 77881 - DNA, 251 bp, Glycine max
gctatatagcataaacatttgagtcttcattgcacaatgtcgacctcttccattaacgggtggtgcctctcttccatctccccagccaaaacctctctcaagaaggccacattaggcccttctgtcttcgcaaccgttagcactccttcttctccttcttcttcttcttcttcttccttcccttctctcattcaagacaggcctgtctttgctgcccctgcccccatcatcaccccaactgtgagagagga

SEQ ID NO: 77882 - DNA, 366 bp, Glycine max
atactcatcatcagggtctctctgtttcggagccaaaccaaaaacacacacacttgttcttctatggctggccttcaacaatacaacttcttccccaccgatctcttgtaccctcgtccacaaccacaacaagcttctcctaagcccactgtgcttcccctccaaacccctaatgttcaagatcacactcagcctcaacaaccacctatgaccaatgccaccccttctacctctgctgttctttctagccaaaagggtcattctattgctgccgttgccaacaagctctccaaattctaatcagacccacttttttggctggcttttggatccactgattgatgaaaaatttttggaattcttccc

SEQ ID NO: 77883 - DNA, 259 bp, Glycine max
gactatgtcatttaatccaaacccgtgttctgatgcatggagtttggaatttctgaagcgtactggatttcattgcgatatcatttgtgtcactggatggactgccaccccaatgcaggatgttcaggttacaattgattggtttatttcctctcaggaatgtgttcccaggacctattgtgttttaaatccacaaaatccttttgtgttaaataggtggatgggaaaattgactttcccccagggcacttcccgaagt

SEQ ID NO: 77884 - DNA, 305 bp, Glycine max
  unsure (1)..(305): unsure at all n locations
ggaatttcttacagcttggtcaactcaggtgcgtcctgcaacaactctgttggctgatgggtgtccatatttgtatgcaatggtgcatgatagttcagtgtctacaataccaggtgattttgtcattggtgtcaagttgacaaccataaacaatatgtgtgcatatgggctcaatcctggtatttcaggttctcgtcttttgggcaccattcctcagtccatttcacagcaaactgtntggaatcaaatggcaacagtgagaacaccattgaattttgattctagcaagcaaagcttttgtcagt

SEQ ID NO: 77885 - DNA, 344 bp, Glycine max
aatccttcaaaaattttgtttctttgtgtgtgtatggtgatgataacttaattagtgttcatgaatatgtcaagccttactttagtggttctaaattgaaaagctttctagctagtcataacatcaccattactgatggtattgacaaaactagtgcaactttgcaatttagaaagttagcagattgtgattttctcaagagaaactttaagcagatgtctaatgttttgtgggtggctcctgaggacaaggcgagtttatggtcacaacttcattatgtttcgtgtaataatctggaaatgcaagaagcttatcttgtcaatctcgtaaatgtgttacgagaa

SEQ ID NO: 77886 - DNA, 150 bp, Glycine max
aaaaaaaaaaattaaaaaaaaaataaaaaaaaaaaaaataaagggaaaaaaaaaaaaaaaataaatataaaaaaaaaaatatataataatattattattaataatatattaatgtatatattataaaaaattatatttggggggggcccc

SEQ ID NO: 77887 - DNA, 143 bp, Glycine max
tgcaattgaagttgaagtcttgcccttctctcttcaactccaaacacaagacatcatcatccatggctgcctccgtctccactgtcggagctgtcaacagagctcttttgaacctgaatgggtctggacctggggtttcagct

SEQ ID NO: 77888 - DNA, 366 bp, Glycine max
gtgagaacaccattgaattttgattctagcaagcagagcttttgtcagttttctattgaccttctcggtggaggaatcttagtggataaaactggagattggatcacacttatacaaaattctccaattagtaacttattgagagttgctgcttggaagaaaggctgtttaatggtcaagattgtgatgtctgggaatgcagcagtcaaaaggagtgattgggcctcattggtacaagtgtttttaacaaacagcaacagtacagagcattttgatgcatgtaagtggacaaaatcagaaccacattcctgggaattgatctttcccatagaagggatgtgggcccaataatggttttgaaaatgt

SEQ ID NO: 77889 - DNA, 107 bp, Glycine max
gtctatcttaaagagatttctccaggagatattccttgtgagggtgaagatcctggattatcccataaaggttgccagccctgtccaggttgaggattgaagaaatc

SEQ ID NO: 77890 - DNA, 67 bp, Glycine max
acaaaactggagattggatcacacttatacaaaattctccaattagtacctggttaaaagtggctgc

SEQ ID NO: 77891 - DNA, 225 bp, Glycine max
ctaataaaaaattaaaaaaaaaaaaaatataaaagaataaaagaaaaaaagaactaagttaattaaatataaaaaacaaaaaaaattattatatgagagtttaaaggtatgagagtacaaaactttgggggcgccgcgacttttattcactccttccccgatattttatacctgccaggttgtggaagggatcataaatttcactttttagggtggttttaaagc

SEQ ID NO: 77892 - DNA, 351 bp, Glycine max
ctcgagccgtgcaaatagctgatgtgcctaccatagcacagattggagagttccattcgatgcagaggatgatgaatgctcctgattcaaatgataatattgatttactgttgagcattgatttgttgggtttacaaggagcaggtaaagcttttccaaacaaaattgtttttgatgataagcttgtgttggctaacacacaagaattctttgatggaaattttccagtggattcttggttaccaatttttgtgaattgtctttatcctgtaagtcaattaccttcagaagctgtcgttgtaaatgttacatgtggtagtggacgtggtggtttacccaccactgcttgga

SEQ ID NO: 77893 - DNA, 352 bp, Glycine max
gcaagaagcttatcttgtcaatctcgtaaatgtgttacgagaattgtatttgcacagtccagaggaagctcgccaattgagaaggaaagctctctctcgtattgaatggctgcaaaaagctgatgtgcctaccatagcacagattgaagagttccattcgatgcagaggatgatgaatgctcctgattcaaatgataatattgatttactgttgagcattgatttgttgggtttacaaggagcaagtaaagcttttccaaacaaaattgtttttgatgataagcttgtgttggctaacacacaaaaattctttgatggaaattttccagtggattcttggttaccaattttt

SEQ ID NO: 77894 - DNA, 244 bp, Glycine max
gcaatggttaaagttaatgtagcatgtgctgctgttggcttgacatcaagttacactccaactccatttttggaatctggtttgcaaaaagacagagggttaattgtggagtattttggaaggatgtcttacgttgctcataacgttaatcagccccaagagaaagatttgttggagggaaatttttcctttgatattaaatctcgctctagattggaaaaagtttcctctacaaaagcacaat

SEQ ID NO: 77895 - DNA, 395 bp, Glycine max
tgcaattgaagttgaagtcttgcccttctctcttcaactccaaacacaagacatcatcatccatggctgcctccgtctccactgtcggagctgtcaacagagctcttttgaacctgaatgggtctggacctggggtttcagctcccagttcatccttctttgggagcagcttgaagaaggttattggctcaagggtccccaacacaaagatttcctctggaagcttcaagattgttgctgtagaagagaagaaagagattgaagagacccagcagaccgacaaggacagatggaagggtcttgcctatgatatctcagacgaccaacaggacatcacaagaggaaagggtttggttgactcccttttccaagctccacaggatgctggaactcac

SEQ ID NO: 77896 - DNA, 260 bp, Glycine max
gaaactgactttcccccagggcacttcccgaagtgttaagagaatggctctttctatagggggaggagctggtgcaaagaatgctattctcatgaatatgccaaatgctgttctttcaatgtggagatattttgttggtgatctcgtcttttgaagattctaagatgacttctccctacattaaatgtacattctttttcttcatatcattctggaaatttggctgatgacaccatctattttgaggcttttccccacaa

SEQ ID NO: 77897 - DNA, 353 bp, Glycine max
gctgatgggtgtccatatttgtatgcaatggtgcatgatagttcagtgtctacaataccaggtgattttgtcattggtgtcaagttgacaaccataaacaatatgtgtgcatatgggctcaatcctggtatttcaggttctcgtcttttgggcaccattcctcagtccatttcacagcaaactgtttggaatcaaatggcaacagtgagaacaccattgaattttgattctagcaagcagagcttttgtcagttttctattgaccttctcggtggaggaatcttagtggacaaaactggagattggatcacacttatacaaaattctccaattagtaacttattgaaagttgc

SEQ ID NO: 77898 - DNA, 109 bp, Glycine max
cacaataaactccttcctcatttctcatttctcattcaacaccatggcaagaaaaaccaagtccattttcttggccttcttactactatgctctttctcactgggggta

SEQ ID NO: 77899 - DNA, 371 bp, Glycine max
atttcaggttctcgtcttttgggcaccattcctcagtccatttcacagcaaactgtttggaatcaaatggcaacagtgagaacaccattgaattttgattctagcaagcagagcttttgtcagttttctattgaccttctcggtggaggaatcttagtggacaaaactggagattggatcacacttatacaaaattctccaattagtaacttattgagagttgctgcttggaagaaaggctgtttaatggtcaagattgtgatgtctgggaatgcagcagtcaaaaagagtgattgggcctcattggtacaagtgtttttaacaaacagcaacagtacagagcattttgatgcatgtaagtggacaaaatc

SEQ ID NO: 77900 - DNA, 171 bp, Glycine max
tgaaaatttccacacctcttttaattgtcgtaatgatgtgtgaagtgtgtgttattttaaaaaaaaaaaaaaaaaaaaaaaaaaaaaaaaaaaaaaaaaaaaaaaaaaaaaaaaaaaaaaaataaaaaaaaaaaaaaaaaaaaaaaaaaataaaaaaaataaaataaataa

SEQ ID NO: 77901 - DNA, 249 bp, Glycine max
cgatgggtcaaaacattggctctcaaactagccaacatggacatgtggacagtaacatgagcttacagggttttcccattcctcatctagatgtaaacggcttgatgccatcagagcatttaaatggtactgaaggctatgtaaatgacaaagagcatccttctgaattggaacgtaatcctcaactagtgttaagatcaaagattaaacttttaacaaacaaatgattccacctggggctctttttta

SEQ ID NO: 77902 - DNA, 345 bp, Glycine max
atcccttctggatttccgctcacagttatttgcaatagcatttttaatgagatgctcattagatatagctatgaaaaattactgcgccaggctaaagctccaagtatgtttttacaatccttcaaaaattttgtttctttgtgtgtgtatggtgatgataacttaattagtgttcatgaatatgtcaagccttactttagtggttctaaattgaaaagctttctagctagtcataacatcaccattactgatggtattgacaaaactagtgcaactttgcaatttagatagttagcagattgtgattttctcaagagaaactttaagcagatgtcttaatggttt

SEQ ID NO: 77903 - DNA, 57 bp, Glycine max
aaaaaaaaaaaaaaaaaaaaaaaaaaaaaaaaaaaaaaaaaaggggaaaaaaagtgg

SEQ ID NO: 77904 - DNA, 338 bp, Glycine max
aactcgttcttcttcttttgttgttctgtgtttgtgtttgttttttctctcacctgaaaatgtcttgctgcggtggtaactgtggttgcggaagctcctgcaagtgcggcaacggctgcggaggctgcaagatgtacccagacttgagctacactgagtcaaccaccaccgagaccttggtcatgggagtggcacctgttaaggctcaatttgagggtgctgaaatgggtgtgcccgctgagaacgatggctgcaaatgtggaccaaactgctcctgcaacccctgcacttgcaagtgaagtgttgggagagcaagcttcaagcagagatagccctta

SEQ ID NO: 77905 - DNA, 329 bp, Glycine max
gcaacagtacagagcattttgatgcatgtaagtggacaaaatcagaaccacattcctgggaattgatcttcccaatagaggtatgtggtcctaataatggttttgaaatgtggagttctgagtgggcaaatcaaacttcatggcatttgagtttccttattgacaatcccaaacagtctacagtttttgatattctcttgggaatctctcaaaattttgaaattgctggtaatactcttatgccagctttttctgttccacaagctactgccagatcttctgaaaatgcggaatcctctgcatgatctggaatttgtgttttctttcgc

SEQ ID NO: 77906 - DNA, 401 bp, Glycine max
acaaaatgtcaacataactctaagtgagcctcttaaaaacaaacataactctaagtgagagtggctttcaaatgagatgttttattaatctgctaatggttacacaaatatggctaaataaagaaaaatataaaatatttttttgtattttcatagcgttaaatatacatttttgatttataaaatattaaaaacattattaagagaattttgtcgcagcatatagcttaacatttaagtacactaattgctcgaagtaatcctatttttgatggctggaccccgaggatgtcggaccaacgagagtaagtgggtatttcttattgggatggataatgctatctattgtgttatctattgcactaaacttgttaagagaaaaccaattctacaatgtttta

SEQ ID NO: 77907 - DNA, 394 bp, Glycine max
gaatgcctctttctatagggggaggagctggtgcaaagaatgctattctcatgaatatgccaaatgctgttctttcaatgtggagatattttgttggagatctcgtctttgaagtttctaagatgacttctccctacattaaatgtacagtctctttcttcatagcatttggaaatttggctgatgataccatcaatattgaggcttttccccacaagctggtgcagtttggagagattcaggaaaaaagtgtattgaaattttcacaagaggaatttcttacagcttggtcaactcaagtgcggtctgcaacaactttgttggctgattggtgtccatatttgtatgcaatggtgcatgataattcaatgtctacaatacacagtgattttgt

SEQ ID NO: 77908 - DNA, 237 bp, Glycine max
ctcgagccgggaaatttggctgatgataccatcaattttgaggcttttccccacaagctggtgcagtttggagagattcaggaaaaagttgtattgaaattttcacaagaggaatttcttacagcttggtcaactcaagtgcgtcctgcaacaactctgttggctgatgggtgtccatatttgtatgcaatggtgcatgatagttcagtgtctacaataccaggtgattttgtcatt

SEQ ID NO: 77909 - DNA, 379 bp, Glycine max
gttattcgaatgagtaaaacaagctttgctagccaacaagagaatggggctgtcgaagctgaagtaataccctcagatcttgattcatgcctgcagcagcattctgtttcatataatgcaagatctgcattcagtaacataactggtttggggtctcttggtcaatctggtctaagtgttgataatcttgcattaatggagcaacaaatcttatcaggcattgggaatcgagataatgttaacccttgtgtaaatgcctcaagttccttgaacatgtctcaactaaaaacagatggagaccatctacttggccacaatatgagttgtgacagtacttcactagtgggaggagtcccactacatggtgggatgagtactc

SEQ ID NO: 77910 - DNA, 374 bp, Glycine max
gagcaagatggcagaaatgataaacagtctttgtggtggtgatgaaaaattgatgcgtgaaaggacgcacctgctgttggcttgttgttcaaggatggcaatttgtaagaaagatgtttggagagttgaatgtggaatcccttctggatttccgctcacagttatttgcaatagcatttttaatgagatgctcattagatatagctatgaaaaattactgcgccaggctaaagctccaagtatgtttttacaatccttcaaaaattttgtttctttgtgtgtgtatggtgatgataacttaattagtgttcatgaatatgtcaagccttactttagtggttctaaattgaaaagctttctaactagtcataaca

SEQ ID NO: 77911 - DNA, 265 bp, Glycine max
gtttttaacaaacagcttctgtacagagcattttgatgcatgtaaggggacaaaatcagaaccacattcctgggaattgatcttgccaatagaggtatgtggtcctaataatggtggtgaaatgtggagttctgagtgggcaaatcaaacttcatggcttttgagtttccttattgacaatttttatcaaacgacagtttttgatattttcttgggaatctttcaagaattccttttagctttttatactcttatgccagctttt

SEQ ID NO: 77912 - DNA, 251 bp, Glycine max
ctcaagccgaatctgttttagctcgagcctgtccagcacgtatatttggggacacgcatgaccgggtctactctcgcatctcctgctacagcataggcgatgcacaacctggccgaacacctcaccggtgcgacggcttaataggagacctgaagaagcccaatcggtgtctggtgcaacgagctgatatacgctcgcgacaacgacgactatgactacaatatcgtcagaggcatgcgtcgcggctctca

SEQ ID NO: 77913 - DNA, 384 bp, Glycine max
ccaggacctattgtgttttaaatccacaaaatccttttgtgttaaataggtggatgggaaaattgactttcccccagggcacttcccgaagtgttaagagaatgcctctttctatagggggaggagctggtgcaaagaatgctattctcatgaatatgccaaatgctgttctttcaatgtggagatattttgttggagatctcgtctttgaagtttctaagatgacttctccctacattaaatgtacagtctctttcttcatagcatttggaaatttggctgatgataccatcaattttgaggcttttccccacaagctggtgcagtttggagagattcaagaaaaagttgtattgaaattttcacaagaggaatttcttacag

SEQ ID NO: 77914 - DNA, 389 bp, Glycine max
gctagtcataacatcaccattactgatggtattgacaaaactagtgcaactttgcaatttagaaagttagcagattgtgattttctcaagagaaactttaagcagatgtctaatgttttgtgggtggctcctgaggacaaggcgagtttatggtcacaacttcattatgtttcgtgtaataatctggaaatgcaagaagcttatcttgtcaacctcgtaaatgtgttacgagaattgtatttgcacagtccagaggaagctcgccaattgagaaggaaagctctctctcgtattgaatggctgcaaaaagctgatgtgcctaccatagcacagattgaagagttccattcgatgcagaggatgatgaatgctcctgattcaaatgataa

SEQ ID NO: 77915 - DNA, 377 bp, Glycine max
caaaatcagaaccacattcctgggaattgatcttcccaatagaggtatgtggtcctaataatggttgtgaaatgtggagttctgagtgggcaaatcaaacttcatggcatttgagtttccttattgacaatcccaaacagtctacagtttttgatattctctagggaatctctcaagattttgaaattgctggtaatactcttatgccagctttttctgttccacaggctactgccagatcttctgaaaatgcggaatcctctgcatgatctggaatttgtgtgttctttcgcttgtctcgttggttaattcaataaatgaaattacgcatgaccctcttgttgagtatgctctgcctatttgaaaatttccacacc

SEQ ID NO: 77916 - DNA, 384 bp, Glycine max
accttttggagcacccttatccgataatacctgctatacaccatatgttccacaacgatgacgactgccgcgcagctccccacaccagcacaccagctgtccgctcccacatcctctgccaccacatcatcatccaagtcagaagacgtcaacttccaaggcctccccatcccccgtggcgctgtcaacgcctctctatccttctacaagagcccggaagatggcgcacctccacacaactacgtcgagccactgccaggtgtaccgcaacgaaactggggcgacaattggcagaatgtaactcataacgacctgcgtggctcagaacaacagtttaccctcgatcacaatgcgttcgatacatactcgaacattcccagcaac

SEQ ID NO: 77917 - DNA, 358 bp, Glycine max
agaagaacaagtttttgagaactaagaaggagaagcaaatggcttcctcaatgatctcttccccagctgttaccactgtcaaccgtgccggtgccggcatggttgctccattcactggcctcaagtccatggctggcttccccaccagaaagaccaacaatgacattacctccattgctagcaacggtggaagagtgcaatgcatgcaggtgtggccaccagttggcaagaagaagtttgagactctttcctacctgccagaccttgatgatgcacaattggcaaaggaagtagaataccttcttaagaagggatggattccttgcttggaattcgagttggagcacggtttcgtgta

SEQ ID NO: 77918 - DNA, 372 bp, Glycine max
gaaatttttcctttgatattaaatctcgctctagattggaaaaagtttcctctacaaaagcacaatttgttagtggaaaaaccttcaaatatgatataattggtgctggttcacattcttcagaagattttcctgaaaaggaagatcaagaaaaacccaaaaagattgatgccagattgagacaaagaatagatcctcaatacaatgaggttcaggctcagatggaaacaaatttgtttaaattgtctcttgatgatgttgaaactcctaaaggttccatgttggatctgaaaatttctcaatctaaaattgcacttcccaagaacacagttggaggaaccattctgcgtagtgatctattggcaaattttt

SEQ ID NO: 77919 - DNA, 383 bp, Glycine max
aaaaaaaaaaataaaaaaaaaaaaaaaaaaaaaaaaaaaaaaaaaaaaaaaaaaaaaaaaaaaaaaaaaaaaaaaaaaaaaaaaaaaaaaaaaaaaaaaaaaaaaaaaaaaaaaaaaaaaaaaaaaaaaaaaaaaaaaaaaaaaaaaggggggggcccccctcttggggtcttttccccccggaatttaatttgggccgggtccttgggggggtccaattttttcttattggggggggtttaaaacctgggggaataaatggttaatgttttttctgggggaaaattttttttcgttaaaaatttcccaaataattcggtcggggactttaaatggtaaatcctgggggcccttttggggggccctcccccatttttttgggg

SEQ ID NO: 77920 - DNA, 274 bp, Glycine max
ccgctcgagcctctcgagcggctcgaggtgacaaaaaaaaattaaaaatatattaaaattaaaataataaaatataaaaaaaaataaatttaaataattaaaaataaaaaaaaaaaattgggctgccccctattttttaactttttcacctcgatataaattccatacctttacctgtaatcttaccaatttttcctttaatgagttttattaaaaatttgctttaaatatagtcatagttgtttcttttttaaaatatttattcctttaaaat

SEQ ID NO: 77921 - DNA, 329 bp, Glycine max
cgagaattgtatttgctcagtccagaggaagctcgccaattgagaaggaaagctctctctcgtattgaatggctgcaaaaagctgatgtgcctaccatagcacagattgaagagttccattcgatgcagaggatgatgaatgctcctgattcaaatgataatattgatttactgttgagcattgatttgttgggtttacaaggagcaggtaaagcttttccaaacaaaattgtttttgatgataagcttgtgttggctaacacacaagaattctttgatggaaattttccagtggattcttggttaccaatttttgtgaattgtcttta

SEQ ID NO: 77922 - DNA, 382 bp, Glycine max
ctcgagccgtgtgaattgtggaatcctgcttgcacaaaagcaatgactatgtcatttaatccaaacccgtgttctgatgcatggagtttggaatttctgaagcgtactggatttcattgcgatatcatttgtgtcactggatggactgccaccccaatgcaggatgttcaggttacaattgattggtttatttcctctcaggaatgtgttcccaggacctattgtgttttaaatccacaaaatccttttgtgttaaataggtggatgggaaaattgactttcccccagggcacttcccgaagtgttaagagaatgcctctttctatagggggaggagctggtgcaaagaatgctattctcatgaatatgccaaatgctggtc

SEQ ID NO: 77923 - DNA, 383 bp, Glycine max
ctcgtcttttgggcaccattcctcagtccatttcacagcaaactgtttggaatcaaatggcaacagtgagaacaccattgaattttgattctagcaagcagagcttttgtcagttttctattgaccttctcggtggaggaatcttagtggacaaaactggagattggatcacacttatacaaaattctccaattagtaacttgttgagagttgctgcttggaagaaaggctgtttaatggtcaagattgtgatgtctgggaatgcagcagtcaaaaggagtgattgggcctcattggtacaagtgtttttaacaaacagcaacagtacagagcattttgatgcatgtaagtggacaaaatcagaaccacattcctgggaattg

SEQ ID NO: 77924 - DNA, 374 bp, Glycine max
ctcattagatatagctatgaaaaattactgcgccaggctaaagctccaagtatgtttttacaatccttcaaaaattttgtttctttgtgtgtgtatggtgatgataacttaattagtgttcatgaatatgtcaagccttactttagtggttctaaattgaaaagctttctagctagtcataacatcaccattactgatggtattgacaaaactagtgcaactttgcaatttagaaagttagcagattgtgattttctcaagagaaactttaagcagatgtctaatgttttgtgggtggctcctgaagacaaggcgagtttatggtcacaacttcattatgtttcgtgtaataatctggaaatgcaagaagctta

SEQ ID NO: 77925 - DNA, 369 bp, Glycine max
ctcgagccgttcaaatatgatataattggtgctggttcacattcttcagaagattttcctgaaaaggaagatcaagaaaaacccaaaaagattgatgccagattgagacaaagaatagatcctcaatacaatgaggttcaggctcagatggaaacaaatttgtttaaattgtctcttgatgatgttgaaactcctaaaggttccatgttggatctgaaaatttctcaatctaaaattgcacttcccaagaacacagttggaggaaccattctgcgtagtgatctattggcaaattttttgacagagggcaattttagagcaagtgttgatttgcagcgcactcatcgtattagaagaatgattaaaatg

SEQ ID NO: 77926 - DNA, 174 bp, Glycine max
gaaaatgcggaatcctctgcatgatctggaatttgtgttttctttcgcttgttcgtttgtttaattcaataaaggaaattaggcatgaccctcttgttgagtatgctctgcctatttgaaaatttccacacctcttttaattgtcgtaatgatgtgtgaagtgtgtgttatttt

SEQ ID NO: 77927 - DNA, 249 bp, Glycine max
cttgttacttaaacaataaccagttgagttaatgattcatgggcaggttcaagtctaaaaaaaaaaaaaaaaaaaaaaaaaaaaaaaaaaaaaaaaaaaaaaaaaaaaaaaaaaaaaaaaaaaaaaaaaaaaaaaaaaaaaaaaaaaaaaaaaaaaaaaaaaaaaaaaaaaaaaaaaaaaaaaaaaaaaaaaaaagggggcccccccaaaaagaaactccacaccccggaaaaaaattcggaaccggac

SEQ ID NO: 77928 - DNA, 255 bp, Glycine max
atgattctatcctacagatactatcaaaatgactgggataaacatgggagtctaattattgaatgtgagtactgaaacaatagaattggatagcccgaatggtattaaaaatatggcgtactaactcacattagtcatttatgataccatttaccgaacagctagcgtcgctatggaacataactttatggtttcaaaaagaagccggaaaaaagttgcttctattgagatatgcgaaatagtcgctatacttct

SEQ ID NO: 77929 - DNA, 293 bp, Glycine max
atgataacttaattagtgttcatgaatatgtcaagccttactttagtggttctaaattgaaaagctttctagctagtcataacatcaccattactgatggtattgacaaaactagtgcaactttgcaatttagaaagttagcagattgtgattttctcaagagaaactttaagcagatgtctaatgttttgtgggtggctcctgaggacaaggcgagtttatggtcacaacttcattatgtttcgtgtaataatctggaaatgcaagaagcttatcttgtcaatctcgtaaat

SEQ ID NO: 77930 - DNA, 94 bp, Glycine max
aaaaaaaaaaaaaaaaaaaaaaaaaaaaattaaaaaaaaaaaaaggaaaaaaaaaaaaaaaaaaaaaaaaaaaaaaaaaaaaaaaaaaaaaaaa

SEQ ID NO: 77931 - DNA, 59 bp, Glycine max
ttgaaaatttccacacctcttttaattgtcgtaatgatgtgtgaagtgtgtgttatttt

SEQ ID NO: 77932 - DNA, 276 bp, Glycine max
aatttagaaagttagcagattgtgattttctcaagagaaactgtaagcagatgtctaatgttttgtgggtggctcctgaggacaaggcgagtttatggtcacaacttcattatgtttcgtgtaataatctggaaatgcaagaagcttatcttgtcaatctcgtaaatgtgttacgagaattgtttttgcacagtccagaggaagctcgccaattgagaaggaaagctctctctcgtattgaatggctgcaaaaagctgatgtgcctaccatagcac

SEQ ID NO: 77933 - DNA, 299 bp, Glycine max
  unsure (1)..(299): unsure at all n locations
caacgcanatagttgaattgataagagcgtcacacttactatatgatattttttatcactgtgatattggtgtggaatattcataaactttactaataattagtttgtgcctaacaattttgtcaatcatctttaatgagattttttctttcaatcaccttttcatatgcaaaactcaaatgaatttgagagaatttgagatcttgcttaggagatctgaacccaatttcacttaagccaatgacatgttgatgcagtgtggcttgatcctaagcataccatngntatatttcataaat

SEQ ID NO: 77934 - DNA, 227 bp, Glycine max
cggctcgagcggctcgaggggccctagtcaaccattgcagggttgagcaaaattgggcaatggtctgagaaattctgctccaattgggttcaacatctagataattttatgaatatgcagatttctgcccaggcagggtttaagagaagtttgtttgaaaggctggttcttttgggtcatgaaaaacaccgtctcaatggtcaatatagagtgcgtccatccattag

SEQ ID NO: 77935 - DNA, 59 bp, Glycine max
aaaaaaaaaaaaaaaaaaaaaaaaaaaaaaaaaaaaaaaaaaaaaaaaaaaaaaaaaaa

SEQ ID NO: 77936 - DNA, 252 bp, Glycine max
aaaatttatctagaaacaaccataaatggcactaatttatggggggcgtgaaaaaaaaaaaaaaaaaaaaaaaaaaaaaaaaaaaaaaagggaagaaaaaaaaaaaaaaaaaaagaaaaaaagggaaaaaaaaaagaaaaaggaaagagaaagaggaaaaaaaaagaaaaaaagagagaaagaaaaagagatggggggaaaaaaaggaaaaaggggagaagaagagagaaaaggtaatgggggggacaggaa

SEQ ID NO: 77937 - DNA, 415 bp, Glycine max
ctaataatggttttgaaatgtggagttctgagtgggcaaatcaaacttcatggcatttgagtttccttattgacaatcccaaacagtctacagtttttgatattctcttgggaatctctcaagattttgaaattgctggtaatactcttatgccagctttttctgttccacaggctactgccagatcttctgaaaatgcggaatcctctgcatgatctggaatttgtgttttctttcgcttgttcgtttgtttaattcaataaaggaaattaggcatgaccctcttgttgagtatgctctgcctatttgaaaatttccacacctcttttaattgtcgtaatgatgtgtgaagtgtgtgttattttaaaaaaaaaaaattttttaaaaaattaaattttgtcttcaaaatttattt

SEQ ID NO: 77938 - DNA, 328 bp, Glycine max
ggcaagcaatatggactagcgacaaacctcaagaccgagatcgaggagaagcaacggcagaaggcggcggagcgcaaggcggcggagaaagaatggaaaccacgattcttcactggagcagtcacacctgtcggcagaccagacctcaccaaggacggcgaggaagctctgaagggtttgcacgcggagaactaccaactgccaccaaacgaggaatacgccgccttttgatcgcatcctctttttctcgaatgttaggaagaaattgcagaataggacgaaccagtacagcaggaccttcactacgatatccactatattttgactc

SEQ ID NO: 77939 - DNA, 360 bp, Glycine max
acaacttcattatgtttcgtgtaataatctggaaatgcaagaagcttatcttgtcaatctcgtaaatgtgttacgagaattgtatttgcacagtccagaggaagctcgccaattgagaaggaaagctctctctcgtattgaatggctgcaaaaagctgatgtgcctaccatagcacagattgaagagttccattcgatgcagaggatgatgaatgctcctgattcaaatgataatattgatttactgttgagcattgatttgttgggtttacaaggagcaggtaaagcttttccaaacaaaattgtttttgatgataagctagtgttggctaacacacaagaattctttgatggaaattt

SEQ ID NO: 77940 - DNA, 398 bp, Glycine max
gttcagtgtctacaataccaggtgattttgtcattggtgtcaagttgacaaccataaacaatatgtgtgcatatgggctcaatcctggtatttcaggttctcgtcttttgggcaccattcctcagtccatttcacagcaaactgtttggaatcaaatggcaacagtgagaacaccattgaattttgattctagcaagcagagcttttgtcagttttctattgaccttctcggtggaggaatcttagtggacaaaactggagattggatcacacttatacaaaattctccaattagtaacttattgagagttgctgcttggaagaaaggctgtttaatggtcaagattgtgatgtctgggaatgcagcagtcaaaaggagtgattgggcctcattggta

SEQ ID NO: 77941 - DNA, 332 bp, Glycine max
ctcgagccgaataaaaaaataaaaaaaaaaaaaaaaaaaaaaagaaaaaaaaaaaaaaaaaaaaaaaaaaaaaaaaaaaaaaaaaaaaaaaaaaaaaaaaaaaaaaaaaaaaaaaaaaaaaaaaaaaaaaaaaaaaaaaaaaaaaaataaaaaaaaaaaaaaaaaaaaaaaaaaaataaatgggggcggcccccctttttttatcctttcccccccctattttttttcgaacccggcccctaagggaaacccattttccttttaaaagacccttttaaaacttggggaaaataaagaaaaaaacatgtcccctgaaaaaaattattcccccc

SEQ ID NO: 77942 - DNA, 311 bp, Glycine max
gcagcttgaagaaggttattggctcaagggtccccaacacaaagatttcctctggaagcttcaagattgttgctgtagaagagaagaaagagattgaagagacccagcagaccgacaaggacagatggaagggtcttgcctatgatatctcagacgaccaacaggacatcacaagaggaaagggtttggttgactcccttttccaagctccacaggatgctggaactcactatgctgtcatgagctcctacgagtaccttaacactggacttcgccagtacttggacaacaacatggatggattttacatt

SEQ ID NO: 77943 - DNA, 391 bp, Glycine max
gttcaaggatggcaatttgtaagaaagatgtttggagagttgaatgtggaatcccttctggatttccgctcacagttatttgcaatagcatttttaatgagatgctcattagatatagctatgaaaaattactgcgccaggctaaagctccaagtatgtttttacaatccttcaaaaattttgtttctttgtgtgtgtatggagatgataacttaattagtgttcatgaatatgtcaagccttactttagtggttctaaattgaaaagctttctagctagtcataacatcaccattactgatggtattgacaaaactagtgcaactttgcaatttagaaagttagcagattgtgattttctcaagagaaactttaagcagatgtctaatgt

SEQ ID NO: 77944 - DNA, 403 bp, Glycine max
gatgtatcgaaggccaatgtttgatttcgatccaatgtagaaaattcacaactccctgacgagtcattgcaacactacgctgcagaagtgcagattagaaagaaaaaatcataatatctaagtaaataaaaaaataaaaaaaatactactgtggtcttatttttatgcactcacaatgctttaacttctgtgtgcttttaataacttaaaaacaacttttatgctctcggtaaacaatcgcgaatgcaagaagcaccattaaaagtgctcacaaagtaggcgctcatttaactcgtcctctgcagtgccgcagctcagtggccgcgtgtcctatggttgccaaatcaatcttaaaagaccactgctatcacatttaaatatttgttaaataaacgtattttct

SEQ ID NO: 77945 - DNA, 411 bp, Glycine max
ctcgagccgctcgagcggctcgagcggctcgagaatgactagctgcatgaatatagaagagctggagtatggtaaaacatcaggagacagttatcacgatttacgctgattttggtggtaatcttattaaatatttcagtacaaatgaagacttaaacttagttaacaaaatggaggttattcttgtttggagaatagttacggaagtggaaataagatttacgctaactgactgtaagtctttacgttagttgtgcctaattaatttttttgtatgattatgtctattaatgacaagaagttgtttgcatcattacgaagctgaaagccctaggattgtattatagatgtgttaattttacgtgctttaatgtccacttcagcatccactcagttcagtcggggatgatg

SEQ ID NO: 77946 - DNA, 397 bp, Glycine max
gtccagaggaagctcgccaattgagaaggaaagctctctctcgtattgaatggctgcaaaaagctgatgtgcctaccatagcacagattgaagagttccattcgatgcagaggatgatgaatgctcctgattcaaatgataatattgatttactgttgagcattgatttgttgggtttacaaggagcaggtaaagcttttccaaacaaaattgtttttgatgataagcttgtgttggctaacacacaagaattctttgatggaaattttccagtggattcttgggtaccaatttttgtgaattgtctttatcctgtaagtcaattaccttcagaagctgtcgttgtaaatgttacatgtggtaatggacgtgggtggttacccaccactgcttggat

SEQ ID NO: 77947 - DNA, 407 bp, Glycine max
gaaaaagttgtattgaaattttcacaagaggaatttcttacagcttggtcaactcaagtgcgtcctgcaacaactctgttggctgatgggtgtccatatttgtatgcaatggtgcatgatagttcagtgtctacaataccaggtgattttgtcattggtgtcaagttgacaaccataaacaatatgtgtgcatatgggctcaatcctggtatttcaggttctcgtcttttgggcaccattcctcagtccatttcacagcaaactgtttggaatcaaatggcaacagtgagaacaccattgaattttgattctagcaagcagagcttttgtcagttttctattgaccttctcggtggaggaatcttagtggacaaaactggagattggatcacacttatacaaaattc

SEQ ID NO: 77948 - DNA, 332 bp, Glycine max
gacaccgctccaatacaagcctcaacaatggctctgaatcttggtatctgacctaactgataatgggctccatccacggcctccttagatagtgcatattctctgagatctccacttggttgttgtttcgctaacataaactttgctcgcaccatgtaaaccgctagctatactgtcgagtctcgtgaagaccgcgagtctaagtgctagacctagcgtggtatcttcggggccgacaattacagtgcaacctgtcactaacgtttacaatgtttcgttctagccaacacataaggctatcggcgatcataccgttcgcttctacatacaca

SEQ ID NO: 77949 - DNA, 345 bp, Glycine max
aaaaaaaaaaattaaaaaaaaaaaaaaaaaaaaaaaaaaaaaggaaaaaaaaaaaaaaaaaaaaaaaaaaaaaaaaaaaaaaaaaaaaaaaaaaaaaaaaaaaaaaaaaaaaaaaaaaaaaaaaaaaaaaaaaaaaaaaaaaaggggggggcccccgttttgggggctcttcacccgggaatttatttcgggccgggtcctggggggggccccatttttccttttgggggggggtttaagggtggggggaaatttgggcaaaagggtttcccgggggaaaatggttttccggaaaaattcccccaaaaattaggggcgggaggtttaagggtaaaagccgggggg

SEQ ID NO: 77950 - DNA, 404 bp, Glycine max
gaaaattgactttctcccagggcacttcccgaagtgttaagagaatgcctctttctatagggggaggagctggtgcaaagaatgctattctcatgaatatgccaaatgctgttctttcaatgtggagatattttgttggagatctcgtctttgaagtttctaagatgacttctccctacattaaatgtacagtctctttcttcatagcatttggaaatttggctgatgataccatcaattttgaggcttttccccacaagctggtgcagtttggagagattcaggaaaaagttgtattgaaattttcacaagaggaatttcttacagcttggtcaactcaagtgcgtactgcaacaactctgttggctgatgggtgtccatatttgtatgcaatggtgcatgat

SEQ ID NO: 77951 - DNA, 410 bp, Glycine max
gcattttgatgcatgttagtggacaaaatcagaaccacattcctgggaattgatcttcccaatagaggtatgtggtcctaataatggttttgaaatgtggagttctgagtgggcaaatcaaacttcatggcatttgagtttccttattgacaatcccaaacagactacagtttttgatattctcttgggaatctctcaagattttgaaattgctggtaatactcttatgccagctttttctgttccacaagctactgccagatcttctgaaaatgcggaatcctctgcatgatctggaatttgtgttttctttcgcttgttcgtttgtttaattcaataaaggaaattaggcatgaccctcttgttgagtatgctctgcctatttgaaaatttccacacctcttttaatt

SEQ ID NO: 77952 - DNA, 179 bp, Glycine max
tggaaatgtttctaggaaaatagcaatctgttattgagccaaccagttagatttgctcttagttggttgttgctgcattatactatcactactaggatttggtcatttgcaatatgtaacaatttgcccaatgtagtttcttggctaaataaaagttaattaaccttgtagtcttgtgc

SEQ ID NO: 77953 - DNA, 413 bp, Glycine max
ggcaacagtgagaacaccattgaattttgattctagcaagcagagcttttgtcagttttctattgaccttctcggtggaggaatcttattggacaaaactggagattggatcacacttatacaaaattctccaattagtaacttattgagagttgctgcttggaagaaaggctgtttaatggtcaagattgtgatgtctgggaatgcagcagtcaaaaggagtgattgggcctcattggtacaagtgtttttaacaaacagcaacagtacagagcattttgatgcatgtaagtggacaaaatcagaaccacattcctgggaattgatcttcccaatagaggtatgtggtcctaataatggttttgaaatgtggagttctgagtgggcaaatcaaacttcatggcatttgagtt

SEQ ID NO: 77954 - DNA, 406 bp, Glycine max
cagaagaacaagtagttgagaactaagaaggagaagcaaatggcttcctcaatgatctcttccccagctgttaccactgtcaaccgtgccggtgccggcatggttgctccattcactggcctcaagtccatggctggcttccccaccagaaagaccaacaatgacattacctccattgctagcaacggtggaagagtgcaatgcatgcaggtgtggccaccagttggcaagaagaagtttgagactctttcctacctgccagaccttgatgatgcacaattggcaaaggaagtagaataccttcttaggaagggatggattccttgcttggaattcgagttggagcacggtttcgtgtaccgtgagcacaacatgtcaccatgatactacgatggacgctactgga

SEQ ID NO: 77955 - DNA, 398 bp, Glycine max
gtttgttgtgagctataagctagtttatcgtgaggagaatatgaagttgtttgttttctttgttgctgcagtagttttggtagcatggccatgccatggcgcaagctaccaaaggttccctctccgaatgaaaactggctatggtgagcgttcttcggaggtaaaatgcgcaagttttaggcttgctgtggaagcacacaacatccgagcctttaaaaccattcctgaagagtgcgttgaaccaacaaaggactacattaatggcgaacaatttagatcagactctaaaacagttaaccaacaagctttcttttatgctagtgaacgcgaagtccatcacaacgacatatttatattcggcataaataacaccgtactctctaatatcccatactatg

SEQ ID NO: 77956 - DNA, 402 bp, Glycine max
ttgcgatatcatttgtgtcactggatggactgccaccccaatgcaggatgttcaggttacaattgattggtttatttcctctcaagaatgtgttcccaggacctattgtgttttaaatccacaaaatccttttgtgttaaataggtggatgggaaaattgactttcccccagggcacttcccgaagtgttaagagaatgcctctttctatagggggaggagctggtgcaaagaatgctattctcatgaatatgccaaatgctgttctttcaatgtggagatattttgttggagatctcgtctttgaagtttctaagatgacttctccctacattaaatgtacagtctctttcttcatagcatttggaaatttggctgatgataccatcaattttgaggcttt

SEQ ID NO: 77957 - DNA, 285 bp, Glycine max
aattagtgttcatgaatatgtcaagccttactttagtggttctaaattgaaaagctttctagctagtcataacatcaccattactgatggtattgacaaaactagtgcaactttgcaatttaaaaagttagcagattgtgattttctcaaaagaaactttaagcagatgtctaatgttttgtgggtggctcctgaggacaaggcgagtttatggtcacaacttcattatgtttcgtgtaataatctggaaatgcaagaagcttatcttgtcaatctcggaaatgt

SEQ ID NO: 77958 - DNA, 343 bp, Glycine max
gtgattttgtcattggtgtcaagttgacaaccataaacaatatgtgtgcatatgggctcaatcctggtatttcaggttctcgtcttttgggcaccattcctcagtccatttcacagcaaactgtttggaatcaaatggcaacagtgagaacaccattgaattttgattctagcaagcagagcttttgtcagttttctattgaccttctcggtggaggaatcttagtggacaaaactggagattggatcacacttatacaaaattctccaattagtaacttgttgagagttgctgcttggaagataggctgtttaatggtcaagattgtgatgtctgggaatgc

SEQ ID NO: 77959 - DNA, 401 bp, Glycine max
  unsure (1)..(401): unsure at all n locations
gctgcttggaagaaaggctgtttaatggtcaagattgtgatgtctgggaatgcagcagtcaaaaggagtgattgggcctcattggtacaagtgtttttaacaaacagcaacagtacagagcattttgatgcatgtaagtggacaaaatcagaaccacattcctgggaattgatcttcccaatagaggtatgtggtcctaataatggttttgaaatgtggagttctgagtgggcaaatcaaacttcatggcatttgagtttccttattgacaatcccaaacagtctacagtttttgatattctcttgggaatctctcaagattttgaaattgctggtaatactcttatgccagctttttctgtccacatgctactgncagatcttctgaaaatgcggaatcc

SEQ ID NO: 77960 - DNA, 508 bp, Glycine max
  unsure (1)..(508): unsure at all n locations
agagctatgtacgtcgcatgcaccgcgtacgtaangctcggaatntcggcttcgagcccttgattacggcgtttgttgagggcctcggccggttacgataaggcaacgttactcggtggatacgaacctcgatgttntgtccggcagagttaaaaatctcttcagggtgctattcnttagaggaaaacgacgctttgcaaagggattgtttgattttgaaaaaatttgctaggagaaacccctggattcaacttggggctgatcttgcagaatttgatgnaatgaggcggcttattctttgcagccaggcgttgacctcaaggggaaataagtgaaagaatgagaatatctgatgnccgcttgaaaggggatcatagnnctggacccganngaagaaaaatgcgtgtanngtctcagaatgagannagaagaaatnntagtagccctattcatnngaggctggcncanntgctcnntagtgggtgccctttaatgcnnctgaatatga

SEQ ID NO: 77961 - DNA, 131 bp, Glycine max
tatataagtatataaattattattactaggggaaagagatccacgtctttctaaaaagaacttctttttttaaataaaacacaaaatgaaaaaggaaaagaacgagagaaagttgaaacaaaaatgatgca

SEQ ID NO: 77962 - DNA, 414 bp, Glycine max
  unsure (1)..(414): unsure at all n locations
cttttgtgttaaataggtggatgggaaaattgactttcccccagggcacttcccgaagtgttaagagaatgcctctttctatagggggaggagctggtgcaaagaatgctattctcatgaatatgccaaatgctgttctttcaatgtggagatattttgttggagatctcgtctttgaagtttctaagatgacttctccctacattaaatgtacagtctctttcttcatagcatttggaaatttggctgatgataccatcaattttgaggcttttccccacaagctggtgcagtttggagagattcangaaaaagttgtattgaaattttcacaagaggaatttcttacagcttggtcaactcaagtgcgtcctgcaacaactctgttggctgatgggtgtccatatttgtatg

SEQ ID NO: 77963 - DNA, 415 bp, Glycine max
gcattttgatgcatgtaagtggacaaaatcagaaccacattcctgggaattgatcttcccaatagaggtatgtggtcctaataatggttttgaaatgtggagttctgagtgggcaaatcaaacttcatggcatttgagtttccttattgacaatcccaaacagtctacagtttttgatattctcttgggaatctctcaagattttgaaattgctggtaatactcttatgccagctttttctgttccacaggctactgccagatcttctgaaaatgcggaatcctctgcatgatctggaatttgtgttttctttcgcttgttcgtttgtttaattcaataaaggaaattaggcatgaccctcttgttgagtatgctctgcctatttgaaaatttccacacctcttttaattgtcgg

SEQ ID NO: 77964 - DNA, 290 bp, Glycine max
gtgggtttaaaaaatgagtttgttgctgagaggtgctaaagaaattctggttttttttcctgttggtgggtcacaactaagtttatccccttgttttgtgctctttttttttctgtccccagccccgttttctctttgccccttctgctcccatcctttttttttttttggttaggttaagcattggatttgatgatcttatgaacagctgcaaattctcttcaccagatgattgtgtgaagtttgttcttggaagttctgttggtgttttagtttccgtttttttcttg

SEQ ID NO: 77965 - DNA, 291 bp, Glycine max
gcaatttcctaccctctaaattccagcagcagcaacagcagcagcagcagcagcagtctggatcaaagaagtggtggcatcttggtctgggcaacaacggcgatggcatggatcaggttccacaaaacggagaccacgccaacgggagcctcggcgtgcggtattgagcagccgccactgctgccacatccatcgcctatcaaatccccactctggaccgccctggaagtttccttgcctcgttggccgtcactatcattccaccgagattccccatttgcatttgcaacg

SEQ ID NO: 77966 - DNA, 328 bp, Glycine max
gttggctgatgggtgtccatatttgtatgcaatggtgcatgatagttcagtgtctacaataccaggtgattttgtcattggtgtcaagttgacaaccataaacaatatgtgtgcatatgggctcaatcctggtatttcaggttctcgtcttttgggcaccattcctcagtccatttcacagcaaactgtttggaatcaaatggcaacagtgagaacaccattgaattttgattctagcaagcagagcttttgtcagttttctattgaccttctcggtggaggaatcttagtggacaaaactggagattggatcacacttatacaaaat

SEQ ID NO: 77967 - DNA, 350 bp, Glycine max
gttcccaggacctattgtgttttaaatccacaaaatccttttgtgttaaataggtggatgggaaaattgactttcccccagggcacttcccgaagtgttaagagaatgcctctttctatagggggaggagctggtgcaaagaatgctattctcatgaatatgccaaatgctgttctttcaatgtggagatattttgttggagatctcgtctttgaagtttctaagatgacttctccctacattaaatgtacagtctctttcttcatagcatttggaaatttggctgatgataccatcaattttgaagcttttccccacaagctggtgcagtttggaaagattcaggaaaa

SEQ ID NO: 77968 - DNA, 232 bp, Glycine max
attacctcagagacgatcttaagatactgcaaacaacttcgcataccaacaaaagatcaaacaagtcatcatgtttgccaccaatctggtcagtgagatcaaccgtaacttcgacaaccataccgtaaccgaccgggttggttacccggcggcgcaacaaaagggttaagggttgcgtgcttaaaggcaacttggcttcaacccttgaaggggtgcgcccaaaggttgggat

SEQ ID NO: 77969 - DNA, 328 bp, Glycine max
ctcatccttcatcaccatgtctcttacgcggttctctgcagtcaccctccgaaaaggcgcgtgcctacggacattacattcaacgctcagcgtgagtaaagatctcgttcaagatttgtatatgaaagagattcgagcttacaaagcgccggctgttgccgccgatgctcatgaaagcgttgtccgcaagttctccgagccttcgaagccctcgatgccgagccttgtcagcgaactacaagctacgctgcctgcgtatattgcgcacgaaccctcatatgtgaccccgactgctaagagtgtggagggctccgacactgaaggacaa

SEQ ID NO: 77970 - DNA, 410 bp, Glycine max
atgggctcaatcctggtatttcaggttctcgtcttttgggcaccattcctcagtccatttcacagcaaactgtttggaatcaaatggcaacagtgagaacaccattgaattttgattctagcaagcagagcttttgtcagttttctattgaccttctcggtggaggaatcttagtggacaaaactggagattggatcacacttatacaaaattctccaattagtaacttgttgagagttgctgcttggaagaaaggctgtttaatggtcaagattgtgatgtctgggaatgcagcagtcaaaaggagtgattgggcctcattggtacaagtgtttttaacaaacagcaacagtacagagcattttgatgcatgtaagtggacaaaatcagaaccacattcctgggaattg

SEQ ID NO: 77971 - DNA, 199 bp, Glycine max
gtgctatatggaaaaatgatactagaacagagaacaggtgagttaaaacaaaaatcttaggggattagtttactcaatgtgactgattctggatgatggataaaagtagggctgtttttactaattactgaaagatttataccagctcatctatgaacctgttgtgtatcattgtaacgagggtacaattttttcctat

SEQ ID NO: 77972 - DNA, 381 bp, Glycine max
tggtgtcaagttgacaaccataaacaatatgtgtgcatatgggctcaatcctggtatttcaggttctcgtcttttgggcaccattcctcagtccatttcacagcaaactgtttggaatcaaatggcaacagtgagaacaccattgaattttgattctagcaagcagagcttttgtcagttttctattgaccttctcggtggaggaatcttagtggacaaaactggagattggatcacacttatacaaaattctccaattagtaacttgttgagagttgctgcttggaagaaaagctgtttaatggtcaagattgtgatgtctgggaatgcaacagtcaaaaggagtgattgggcctcattggtacaagtgtttttaacaaa

SEQ ID NO: 77973 - DNA, 391 bp, Glycine max
gatcttcccaatagaggtatgtggtcctaataatggttttgaaatgtggagttctgagtgggcaaatcaaacttcatggcatttgagtttccttattgacaatcccaaacagtctacagtttttgatattctcttgggaatctctcaagattttgaaattgctggtaatactcttatgccagctttttctgttccacaggctactgccagatcttctgaaaatgcggaatcctctgcatgatctggaatttgtgttttctttcgcttgttcgtttgtttaattcaataaaagaaattaagcatgaccctcttgttgagtatgctctgcctatttgaaaatttccacacctcttttaattgtcgtaatgatgtgtgaagtgtgtgttatttt

SEQ ID NO: 77974 - DNA, 78 bp, Glycine max
gggagagggaaaactaggaaagatcccaaccgggggaaacccaggggatttggttaccttcccagagaagaaaccttt

SEQ ID NO: 77975 - DNA, 370 bp, Glycine max
caaaagtttttaaattttgtgaggttcattatgaagaaaagggacaaacttagttgtcaagttggaatcaacccatactccatggaatggactggtttggccaatagattactgagtaagggcaatgatattctgtgttgcgattatgctagttttgatggtttgattaccaagcaagttatgagcaagatggcagaaatgataaacagtctttgtggtggtgatgaaaaattgatgcgtgaaaggacgcacctgctgttggcttgttgttcaaggatggcaatttgtaagaaagatgtttggagagttgaatgtggaatcccttctggatttccgctcacagttatttgcaatagcaatttttaatgag

SEQ ID NO: 77976 - DNA, 361 bp, Glycine max
caaggctctactctactgcttcaccttctgctctagaaaattcagtggtgatacatggcttcggctactctctctgtagccaaaccagcccttcaggcaaatgggaaaggcttctctgaattctctggcctccgcagctcatcaggcttccttcccttttctagaaaatcttcagaggatttccattctgtcattgccttccagacctatgcagttggaagcagtggaggatacaagaagggtgtgacagaagcaaaactgaaggttgccataaacggatttggaaggattggaaggaacttcttgaggtgctggcacggtcgcaaagactcccctcttgatgtcattgccatcaacgaca

SEQ ID NO: 77977 - DNA, 371 bp, Glycine max
agattggaaaaagtttcctctacaaaagcacaatttgttagtggaaaaaccttcaaatatgatataattggtgctggttcacattcttcagaagattttcctgaaaaggaagatcaagaaaaacccaaaaagattgatgccagattgagacaaagaatagatcctcaatacaatgaggttcaggctcagatggaaacaaatttgtttaaattgtctcttgatgatgttgaaactcctaaaggttccatgttggatctgaaaatttctcaatctaaaattgcactttccaagaacacaattggaggaaccattctgcgtagtgatctattggcaaattttttgacagaaggcaattttagagcaagtgttga

SEQ ID NO: 77978 - DNA, 256 bp, Glycine max
acccagacggatgccctctagctgattggtcggctggatcagttctgtttgggcccattcctatccatttacagaactgtggaataaaggacaggaaacaccatgatttgatttacagcagactttgtcagtttattgacctttggggaggaattatggacaaaactggaatgatcacactatcaaaattcatagtactgtgagagtgtgtgaagaaagtgtaaggcaaatggagttgaatgccatcaaagaggat

SEQ ID NO: 77979 - DNA, 334 bp, Glycine max
gtcaagattgtgatgtctgggaatgcagcagtcaaaaggagtgattgggcctcattggtacaagtgtttttaacaaacagcaacagtacagagcattttgatgcatgtaagtggacaaaatcagaaccacattcctgggaattgatcttcccaatagaggtatgtggtcctaataatggttttgaaatgtggagttctgagtgggcaaatcaaacttcatggcatttgagtttccttattgacaattccaaacagtctacagtttttgatattctcttgggaatcttttaaaattttgaaaattgctggtaaatactcttatgccaaccttttt

SEQ ID NO: 77980 - DNA, 378 bp, Glycine max
aaacactcataacacaaagcacaaagcaaagctcatccttgagttaaaaaatggcagcagcttcttccatggctctctcatccccatccttggctggcaaggccgtgaagctgggcccatcagccccagaagtgggaagggtgagcatgaggaagaccgtcaccaagcaggtctcctcaggaagcccatggtacggcccagaccgagtcaagtacttgggcccattctctggcgagcccccgtcctacctaaccggtgagttcccaggcgactacggctgggacactgctgggctttccgcagaccccgaaacctttgccaagaaccgtgaactcgaagtgatccactccaggtgggccatgctccgagccctgggct

SEQ ID NO: 77981 - DNA, 322 bp, Glycine max
gttggagtgagtttcacggagacgccaaaagaagttcaaagggggccgaaagtaggttgaagacttctaggagttatgtacattgagattgattgtcacataattcgagagaagatgattcaatgactagtgaaatgacttcttgtttcctctgcaaaccagcttgcatatatctacaccaaggctctcatgcctggtgcttttcattttttttcttatattccaagctaggaatgtccaacatccattcctaacttgaagagggctcttagcatagatatagacttgatcatggttattttaacttgatcataatgtaacc

SEQ ID NO: 77982 - DNA, 379 bp, Glycine max
ctcgagccgttccattcctcgacatataatatttatgtttgttttacctcttttttaacgggattgtaaaatttgttctaattaaaaatggcgttaagcaaccctaacccatcttatttctgcaattaatacgtggaatcaatcataataccataatacgtaagccaattgcaccaatcacataagataggttatgtaatctcattttcagttagaataaattagataacttctttttaaaatatttgcggcactctaggacagagattttgctcttttaaaaaataatagaatatcttttttaatgtcattttttttcaaaattaatacaacatggcatctttaaaactactagtattttttaatacaccatttcatg

SEQ ID NO: 77983 - DNA, 388 bp, Glycine max
  unsure (1)..(388): unsure at all n locations
ctcgagccgtttgtaagaaagatgtttggagagttgaatgtggaatcccttctggatttccgctcacagttatttgcaatagcatttttaatgagatgctcattagatatagctatgaaaaattactgcgccaggctaaagctccaagtatgtttttacaatccttcaaaaattttgtttctttgtgtgtgtatggtgatgataacttaattagtgttcatgaatatgtcaagccttactttagtggttctaaattgaaaagctttctagctagtcataacatcaccattactgatggtattgacaaaactagtgcaactntgcaatttagaaagttagcagattgtgattttctcaagagaaactttaagcagatgtctaatggttt

SEQ ID NO: 77984 - DNA, 338 bp, Glycine max
gattcaggaaaaagttgtattgaaattttcacaagaggaatttcttacagcttggtcaactcaggtgcgtcctgcaacaactctgttggctgatgggtgtccatatttgtatgcaatggtgcatgatagttcagtgtctacaataccaggtgattttgtcattggtgtcaagttgacaaccataaacaatatgtgtgcatatgggctcaatcctggtatttcaggttctcgtcttttgggcaccattcctcagtccatttcacagcaaactgtttggaaataaatggcaacagtgagaacaccattgaattttgattctagcaagcagagcttttgtc

SEQ ID NO: 77985 - DNA, 276 bp, Glycine max
agtggttctaaattgaatagctttctagctagtcataacatcaccattggtgatggtattgacaaaactagtgcaactttgcaatttagaaagttagcagattgtgattttctcaagagaaactttaagcagatgtctaatgttttgtgggtggctcctgaggacaaggcgagtttatggtcacaacttcattatgtttcgtgtaataatctggaaatgcaagaagcttatcttgtcaatctcgtaaatgtgttacgagaattgtatttgcacagt

SEQ ID NO: 77986 - DNA, 260 bp, Glycine max
cgagaattgtatttgcacagtccagaggaagctcgccaattgagaagggaagctctctctcgtattgaatggctgcaaaaagctgatgtgcctaccatagcacagattgaagagttccattcgatgcacaggatgatgaatgctcctgattcaaatgataatattgatttactgtggagcatagagttgttgggtttacaaagagcacgttaagcttttccaaaacaaaaaagttttgatgataaacttgtggtggctaa

SEQ ID NO: 77987 - DNA, 181 bp, Glycine max
ctcgagccaatcaagccttttgtaaaattctctcaactaattcgctagcggcttgtattaaacaaagcaagcaagcatatccatttcaacatggccctcaaaactggttcagttgaaatgttcttcttcccctttgtaggatgaggacatcatatttcaatgattgacacagcaagagtgt

SEQ ID NO: 77988 - DNA, 308 bp, Glycine max
ctcgagccgcctaattctcatttcttcatcgttcgattcttctcctcctaaagatgcagatcttcgtgaaaactttgaccggtaagaccatcacccttgaggtggagtcctccgacaccatcgataacgtgaaagctaagattcaagacaaggaagggatcccacctgaccagcagagacttatctttgcgggtaaacagcttgaggatggtcgaacccttgccgactacaacatccaaaaggaatccactctccacctcgtgcttcgcctcaggggtggcatgcaaatctttgtcaagactttgact

SEQ ID NO: 77989 - DNA, 154 bp, Glycine max
  unsure (1)..(154): unsure at all n locations
gaagtngaacagaagagaaaagagaaaacaaaggggagagagatgggaactccaaaaacctcaagggaaccatgttcagaacccattctggacgaaataagccgcgccttccgcattggccccgggggtgggttcccctttcactttcttaaag

SEQ ID NO: 77990 - DNA, 351 bp, Glycine max
gttcccaggacctattgtgttttaaatccacaaaatccttttgtgttaaataggtggatgggaaaattgactttcccccagggcacttcccgaagtgttaagagaatgcctctttctatagggggaggagctggtgcaaagaatgctattctcatgaatatgccaaatgctgttctttcaatgtggagatattttgttggagatctcgtctttgaagtttctaagatgacttctccctacattaaatgtacagtctctttcttcatagcatttggaaatttggctgatgataccatcaattttgaagcttttccccacaagctggtgccagttggaaagattcaagaaaaa

SEQ ID NO: 77991 - DNA, 362 bp, Glycine max
ctcgagccgaatcggctcgagattgcgatatcatttgtgtcactggatggactgccaccccaatgcaggatgttcaggttacaattgattggtttatttcctctcaggaatgtgttcccaggacctattgtgttttaaatccacaaaatccttttgtgttaaataggtggatgggaaaattgactttcccccagggcacttcccgaagtgttaagagaatgcctctttctatagggggaggagctggtgcaaagaatgctattctcatgaatatgccaaatgctgttctttcaatgtggagatattttgttggagatctcgtctttgaaagttctaagatgacttctccctacattaaatgt

SEQ ID NO: 77992 - DNA, 109 bp, Glycine max
tcgaaagattttatccaattgaaattttaaaaatgactgggataaacttaaaaattcaattattggaattgaataaataaccatttaattggattggtcgaatggtatc

SEQ ID NO: 77993 - DNA, 376 bp, Glycine max
ctcgagccgcttgtgttggctaacacacaagaattctttgatggaaattttccagtggattcttggttaccaatttttgtgaattgtctttatcctgtaagtcaattaccttcagaagctgtcgttgtaaatgttacatgtggtagtggacgtggtggtttacccaccactgcttggattagttctgcagttaacaatcgctcctcagatatcaacaaaaagattcgcacagcacttgggaaaggtaagaaaattgtttttcttactagagttgatccttttccagtagctttactggctgttctttttggcgttaagaatgaaattctgagttctaacgccactaatcctatgctgacgcgacttcttgagaact

SEQ ID NO: 77994 - DNA, 158 bp, Glycine max
gcccctttttatctacccttactttggatcggtgcgatccgcttcaaaaaattaaaagggttccttccaacctggaaaccttcttttgaatgggtttcccaaccctggccttcttaaacctaaaccttgtggttgaataaggaggggtttttattgtt

SEQ ID NO: 77995 - DNA, 275 bp, Glycine max
ggtcaagattgtgatgtctgggaatgcagcagtcaaaaggagtgattgggcctcattggtacaagtgtttttaacaaacagcaacagtacagagcattttgatgcatgtaagtggacaaaatcagaaccacattcctgggaattgatcttcccaatagaggtatgtggtcctaataatggttttgaaatgtggagttctgagtgggcaaatcaaacttcatggcatttgagtttccttattgacaatcccaaacagtctacagtttttgatattc

SEQ ID NO: 77996 - DNA, 229 bp, Glycine max
ggctcagatggaaacaaatttgtttaaattgtctcttgatgatgttgaaactcctaaaggttccatgttggatctgaaaatttctcaatctaaaattgcacttcccaagaacacagttggaggaaccattctgcgtagtgatctattggcaaattttttgacagagggcaattttagagcaagtgttgatttgcagcgcactcatcgtattagaggaatgattaaaatg

SEQ ID NO: 77997 - DNA, 280 bp, Glycine max
caaccttccaaagggcctcatagcctcacccgaaagcactaaactttccggcgcgacagcaatcgcaggagcaatattcacaaccctcggaacctgcgacgccgcattcgctgttcaacaaatagccgacatagcagaaggcgacaaccgcggactggcactgttgctgcccataatcccagcaatagggtgggttctgttcaacattctgcagccggcgctgaaccagctgaaccgaatgcgcagcaccaaaggcgtgatcattggcttggggcttggc

SEQ ID NO: 77998 - DNA, 200 bp, Glycine max
ggagcaggtaaagccaacaaatcaatgctcaacagtagatcaatattatcatttgaatcaagagcattgatttgttgggtttacaaggagcaagtaaagcttttccaaacaagattgtttttaatgataagcttgtgttggctaacacacaaaaattctttgatggaaattttccaagggattcttggttaccaattttt

SEQ ID NO: 77999 - DNA, 287 bp, Glycine max
gcaattgaagttaaaagccttagccttccctacaactccaaacacaaagacatcatcatccatggctgcctccgtctccactgtcggagctgtcaacagagctcttttgaacctgaatggttctggagctggagcttcagctcccagttcagccttctttgggaccagcttgaagaaggttattgcctcaagggtccccaacagcaaggtttccggtggaagcttcaagattgttgctgtagaagagaagaaagagattgaagagacccagcagaccgacaaggaca

SEQ ID NO: 78000 - DNA, 354 bp, Glycine max
tggtgcagtttggagagattcaggaaaaagttgtattgaaattttcacaagaggaatttcttacagcttggtcaactcaggtgcgtcctgcaacaactctgttggctgatgggtgtccatatttgtatgcaatggtgcatgatagttcagtgtctacaataccaggtgattttgtcattggtgtcaagttgacaaccataaacaatatgtgtgcatatgggctcaatcctggtatttcaggttctcgtcttttgggcaccattcctcagtccatttcacagcaaacttgttggaatcaaatggcaacagtgagaacaccatttgaatttgattctagcaagcaaagcttttgtc

SEQ ID NO: 78001 - DNA, 270 bp, Glycine max
ctcgatccgctctagccgctcgagccgttcgagccgattcggctcgagggcatttgacattgtctctgttgcaaacatgctgcgctcatgaacatggattgctccatacgcgaaatctcatactttcgaggggctgggtggaatcattgccagagagtgtgagcctgaatagggggcagtgctaccggaagagactatattgctagtggaatgagctggatttgcaattttgagatttgtacaaatattgcgtataatcacgtggatgtt

SEQ ID NO: 78002 - DNA, 383 bp, Glycine max
ctcgagccgattcggctcgagattgaatggctgcaaaaagctgatgtgcctaccatagcacagattgaagagttccattcgatgcagaggatgatgaatgctcctgattcaaatgataatattgatttactgttgagcattgatttgttgggtttacaaggagcaggtaaagcttttccaaacaaaattgtttttgatgataagcttgtgttggctaacacacaagaattctttgatggaaattttccagtggattcttggttaccaatttttgtgaattgtctttatcctgtaagtcaattaccttcagaagctgtcgttgtaaatgttacatgtggtagtggacgtggtggtttacccaccactgcttggattagttctgc

SEQ ID NO: 78003 - DNA, 246 bp, Glycine max
agagctgacgcatgccctcgtaagctcggaattggtgaggagcgagatctaaacatatttcggcccgagagctttggtgggtggggtcttgataaatgtttttcaagctgtttcctttttatttgtattgcacgagggggaagaaaatgatcattagataaaattgaattaatgataattctttttatttgcttattttttttttacatgtatgaatagtggaaagaaagaataggtattggctat

SEQ ID NO: 78004 - DNA, 315 bp, Glycine max
atgaaggcgcacgcacgcgtgcgtgagctcggaattcagctcgaggatgaatgctcctgattcaaatgataatattgatttactgcggagcattgatttgttgggtttacaaggagcaggtaaagcttttccaaacaaaattatttttgatgataagcttgtgttggctaacacacaagaattctttgatggaaattttccagtggattcttggttaccaatttttgtgaattgactttatcctgtaagtcaattaccttcagaagctgtcgttgtaaatgttacatgtggtagtggacgtggtggtttacccac

SEQ ID NO: 78005 - DNA, 181 bp, Glycine max
gtccgtgctctgcacacattttcttagctctttactacaatacatctagaccacactctctgattgtacgaagatgggggctggcggccgctctgatgttcatgccgcaaacaggaagtcataggctgactcttcgaagcagactccagttgtaaaaccgtaacttaggcggacccagatt

SEQ ID NO: 78006 - DNA, 439 bp, Glycine max
atgcacgcgcacgcaagctcggaattcggctccagctccttggttcttacaaacactacttatgatccaacaacaatgcagttgctcaccctcatggccggcgtacgcactctcgctggcttctctgccgccggtccagctgaacctgttcacatacgagcaccttcagatctgcccatcgatgcaagatcagcccaagaaggagctggggacgccaacacctggatcaaagacaggttctgcgcttcaagcttcgcttcttgcggcaaagcaggaactaacggtgacccgggcaaccgatgcgctctggcatgcgaaaatattgctggaggtgttgctctgggccattgccagtgcagcaagggatggtaccctgacgagtgcatcactcttggaaatatgcgggtcgccacaagtgctgagtgaatgagatgcaact

SEQ ID NO: 78007 - DNA, 276 bp, Glycine max
gcaaatcgacgtgaggggtgttattttttttgaattcaacaacatcgtgttggactgcatggaaactcttaaatgagagcgatcttttttgcgtccattaaacccaagacccaattcttacatatattccacccctccctttaattattcccccaaaatgattggctcaaagggcggcagtgttaccgtatgacacgtgtattgtggtgccatagcttgagtgacacttctgagtgtagcacccacatcgcggaaaaatctagtgacgctactatt

SEQ ID NO: 78008 - DNA, 401 bp, Glycine max
acaaaattctccaattagtaacttattgagagttgctgcttggaagaaaggctgtttaatggtcaagattgtgatgtctgggaatgcagcagtcaaaaggagtgattgggcctcattggtacaagtgtttttaacaaacagcaacagtacagagcattttgatgcatgtaagtggacaaaatcagaaccacattcctgggaattgatcttcccaatagaggtatgtggtcctaataatggttttgaaatgtggagttctgagtgggcaaatcaaacttcatggcatttgagtttccttattgacaatcccaaacagtctacagtttttgatattctcttgggaatctctcaagattttgaaattgctggtaatactcttatgccagctttttctgttccac

SEQ ID NO: 78009 - DNA, 217 bp, Glycine max
aaaaaaaaatacaacaaataacaaaaaaaaaaaaaaaaaatagaaaagagaaaaaaaaaaaaaaaaaaaaaaaaaaaaaaataaaaatacaaaaaaaaaaaaaaaaaaaaaaggggcggccccccccttgtgatcttttccccccggtatttttttccgcaccgttccctgtgggcttcccccttttcccttttgggagtccttttaaaccttgccc

SEQ ID NO: 78010 - DNA, 332 bp, Glycine max
aattgaaaagctttctagctagtcataacatcaccattactgatggtattgacaaaactagtgcaactttgcaatttagaaagttagcagattgtgattttctcaagagaaactttaagcagatgtctaatgttttgtgggtggctcctgaggacaaggcgagtttatggtcacaacttcattatgtttcgtgtaataatctggaaatgcaagaagcttatcttgtcaatctcgtaaatgtgttacgagaattgtatttgcacagtccagaggaagctcgccaattgagaaggaaagctctctctcgtattgaatggctgcaaaagctgatg

SEQ ID NO: 78011 - DNA, 397 bp, Glycine max
agattttgtcattggtgtcaagttgacaaccataaacaatatgtgtgcatatgggctcaatcctggtatttcaggttctcgtcttttgggcaccattcctcagtccatttcacagcaaactgtttggaatcaaatggcaacagtgagaacaccattgaattttgattctagcaagcagagcttttgtcagttttctattgaccttctcggtggaagaatcttagtggacaaaactggagattggatcacacttatacaaaattctccaattagtaacttattgaaagttgctgcttggaaaaaaagctgtttaatggtcaaaattgggatgtctgggaatgcaacaatcaaaaagagtgattgggcctcattggtacaagtgttttttacaaacagc

SEQ ID NO: 78012 - DNA, 375 bp, Glycine max
  unsure (1)..(375): unsure at all n locations
gttgtgtatgttatactatctccgatggctctctctgcacatattggccgtttccccgccacacgcgctgacacttntttgccggatagtctcaccacaatccggtgccggaaacctctctccgtacgatgctccggcgattccacttacggctctgatgcttctgagttgacacccctattgttgcgcttgaaccttactccgagcaagaattatcacccgcttggatttgggtacaaagaagagaccctccaactcatgaatcgcgagtacaaaccttgctgcaaaaatacttatcaaaaacattgctttgagggcgcattctttcctgtcccgttgtaaattggtgaagcctatagattttaacgtacgatg

SEQ ID NO: 78013 - DNA, 383 bp, Glycine max
agaacactttccaacttgatcttgaagcatcacgagagtattggcttgcagatgacagattagtaaacgctgtcgagttcctggatctacgcgatggcgctggttgggagttacttcacgctatgcttaacgctgtctttcgaaaaagaccaactgctgaggctgccctcaatcatcggtttatgactggggcaggcctttgaattccaaggtcaacgaacatagtggtttgtggctgttatgaaatatctagcacatggctcactacataatgtcaatctgcttatcagatgccatgacttatttaggatttgtggtatgcgataatgcatggtcatttgttctttagaaaaaaatattctattttggattatcttattgca

SEQ ID NO: 78014 - DNA, 418 bp, Glycine max
tttgtctagttattataaaaaggcatttaatagtatcatttaggaaggaaaaaaaaaaaaaaaaaaaaaagaaaaaaaaaaaaaaaaaaaaaaaaaaaaaaaaaaaaaaaaaaaaaaaaaaaaaaaaaaaaaaaagaaaaaaaaaaaaaaaaaaaaaaaaaaaaaaaaaaaaaaaaaaggggggggggcgccaaaaaagaaccctccaccccggaaaaaaaatgggggcgggggccggggggggaaaaaaattccccttaaggggggggaaataaaaaggggggaaaaaaaggggaaaaaagggtcccggggaaaaaaagggtatgggcaaaaaatcccaaaaaaaaaaaaaggggaaaaaaaaaagggaaaaacggggggggcctaaagggggggcccaccccaattttgggggggg

SEQ ID NO: 78015 - DNA, 227 bp, Glycine max
ctcgagccgattctgttcgtgagatcactcttttgacgtgactaaaagatgaattgattggttacactctcagcaggtgagagtctttcaagccctagcatggctttctctaatgctaacggaatttactcaacacaaaaggccctctccgctaggtttcctgctgtgtcgaggcccatccaaaagtacactggtttggtgaatacacgtcccattcagacaacccc

SEQ ID NO: 78016 - DNA, 251 bp, Glycine max
ctcgagccgaatcggctcgagaaaaaaaaaaaaaaaaaaaaaggaaaaaaaaaaaaaaaaaaaaaaaaaaaaaaaaaaaaaaaaaaaaaaaaaaaaaaaaaaaaaaaaaaaaaaaaaaaaaaaaaaaaaaaaaaaaaaaaaaaaaaagggggggccccctacttttgagcttgtccccccggtatttaattcgggacgggtacctgagggggtcccagtttcccttatagggaggcgttttaaagctgggg

SEQ ID NO: 78017 - DNA, 403 bp, Glycine max
ggacaaaatcagaaccacattcctgggaattgatcttcccaatagaggtatgtggtcctaataatggttttgaaatgtggagttctgagtgggcaaatcaaacttcatggcatttgagtttccttattgacaatcccaaacagtctacagtttttgatattctcttgggaatctctcaagattttgaaattgctggtaatactcttatgccagctttttctgttccacaggctactgccagatcttctgaaaatgcggaatcctctgcatgatctggaatttgtgttttctttcgcttgttcgtttgtttaattcaataaaggaaattaggcatgaccctcttgttgagtatgctctgcctatttgaaaatttccacacctcttttaattgtcgtaatgatgt

SEQ ID NO: 78018 - DNA, 393 bp, Glycine max
tgattaccaagcaagttatgagcaagatggcagaaatgataaacagtctttgtggtggtgatgaaaaattgatgcgtgaaaggacgcacctgctgttggcttgttgttcaaggatggcaatttgtaagaaagatgtttggagagttgaatgtggaatcccttctggatttccgctcacagttatttgcaatagcatttttaatgagatgctcattagatatagctatgaaaaattactgcgccaggctaaagctccaagtatgtttttacaatccttcaaaaattttgtttctttgtgtgtgtatggggatgataacttaattagtgttcatgaatatgtcaagccttactttagtggttctaaattgaaaagctttctagctagtcataaca

SEQ ID NO: 78019 - DNA, 335 bp, Glycine max
gagtgggcaaatcaaacttcatggcatttgagtttccttattgacaatcccaaacagtctacagtttttgatattctcttgggaatctctcaagattttgaaattgctggtaatactcttatgccagctttttctgttccacaagctactgccagatcttctgaaaatgcggaatcctctgcatgatctggaatttgtgttttctttcgcttgttcgtttgtttaattcaataaaggaaattaggcatgaccctcttgttgagtatgctctgcctatttgaaaatttccacacctcttttaattgtcgtaatgatgtgtgaagtgtgtgttattt

SEQ ID NO: 78020 - DNA, 391 bp, Glycine max
gtcattcttcgtttcaacctcgcaaaatgagcacatttgatttagcaattataataattcattgctatcctggacttgttgagatgcgaaacaaagatggagccactcctctcaaagttcttgcctgtaagccttcggccttcaggagtggaatcaatctcccatggtggaagaaaattctttattatggtatactcgtagaacatctagacgctgaaaaagcaataaaatcctatatggataaagttgaaaaatatgatcaggacaatgaactgaaagtcaatatacatttagaaagtagtgaagccaagaaagcacaaatttttgtggaaaaacagtatgccatttctgttcggtttgtaaagagcgcggttcgattagcattcaaagt

SEQ ID NO: 78021 - DNA, 412 bp, Glycine max
atgataccatcaattttgaggcttttccccacaagctggtgcagtttggagagattcaggaaaaagttgtattgaaattttcacaagaggaatttcttacagcttggtcaactcaggtgcgtcctgcaacaactctgttggctgatgggtgtccatatttgtatgcaatggtgcatgatagttcagtgtctacaataccaggtgattttgtcattggtgtcaagttgacaaccataaacaatatgtgtgcatatgggctcaatcctggtatttcaggttctcgtcttttgggcaccattcctcagtccatttcacagcaaactgtttggaatcaaatggcaacagtgagaacaccattgaattttgattctagcaagcagagcttttgtcagttttctattgaccttctcgg

SEQ ID NO: 78022 - DNA, 246 bp, Glycine max
gactccacatcagtgggtgggagatccaaaaaaagacagtggaaaagatggcgcggttgatcacagtggtgtagtgctcggaggctgtgctattatgcacagctggctgatcctcatgggtggaggaagcggctatcccgactcgagtggggtctgacttgtaggcggaggtgcttcttgtgatacgggagtgcctaccggctgctcaacatgttaggttcatgatcacgttcacgaaaatttacc

SEQ ID NO: 78023 - DNA, 405 bp, Glycine max
catgatagttcagtgtctacaataccaggtgattttgtcattggtgtcaagttgacaaccataaacaatatgtgtgcatatgggctcaatcctggtatttcaggttctcgtcttttgggcaccattcctcagtccatttcacagcaaactgtttggaatcaaatggcaacagtgagaacaccattgaattttgattctagcaagcagagcttttgtcagttttctattgaccttctcggtggaggaatcttagtggacaaaactggagattggatcacacttatacaaaattctccaattagtaacttattgagagttgctgcttggaagaaaggctgtttaatggtcaagattgtgatgtctgggaatgcagcagtcaaaaggagtgattgggcctcattggta

SEQ ID NO: 78024 - DNA, 382 bp, Glycine max
ttgggcctcattggtacaagtgtttttaacaaacagcaacagttcagagcattttgatgcatgtaagtggacaaaatcagaaccacattcctgggaattgatcttcccaatagaggtatgtggtcctaataatggttttgaaatgtggagttctgagtgggcaaatcaaacttcatggcatttgagtttccttattgacaatcccaaacagtctacagtttttgatattctcttgggaatctctcaagattttgaaattgctggtaatactcttatgccagctttttctgttccacaggctactgccagatcttctgaaaatgcagaatcctctgcatgatctggaatttgtgtttctttcgcttgttcgcttgtttaattc

SEQ ID NO: 78025 - DNA, 88 bp, Glycine max
  unsure (1)..(88): unsure at all n locations
aaggacgnnngcatgcactgcgtacgctaagctcggaattcggactcgagcttaagtcagagtctcatgtatatgtgcaagcctgtac

SEQ ID NO: 78026 - DNA, 241 bp, Glycine max
ctcgcttcttccttctctcatcaacaacatgcagatcttcgtcaagactttgaccggcaagaccatcaccctcgaggtcgagagcagcgacaccatcgacaacgtcaaggccaagatccaggacaaggaaggtatccctcctgaccagcagaggttgatttttgctggtaagcagctggaagatggtcgcactcttgctgattataacatacaaaaggaatcaacacttcacttggtcttg

SEQ ID NO: 78027 - DNA, 394 bp, Glycine max
ctcgagccgaatcggctcgagtcctgcaacaactctgttggctgatgggtgtccatatttgtatgcaatggtgcatgatagttcagtgtctacaataccaggtgattttgtcattggtgtcaagttgacaaccataaacaatatgtgtgcatatgggctcaatcctggtatttcaggttctcgtcttttgggcaccattcctcagtccatttcacagcaaactgtttggaatcaaatggcaacagtgagaacaccattgaattttgattctagcaagcagagcttttgtcagttttctattgaccttctcggtggaggaatcttagtggacaaaactggagattggatcacacttatacaaaattctccaattagtaactcgttgagagttgct

SEQ ID NO: 78028 - DNA, 392 bp, Glycine max
ctctgttggctgatgggtgtccatatttgtatgcaatggtgcatgatagttcagtgtctacaataccaggtgattttgtcattggtgtcaagttgacaaccataaacaatatgtgtgcatatgggctcaatcctggtatttcaggttctcgtcttttgggcaccattcctcagtccatttcacagcaaactgtttggaatcaaatggcaacagtgagaacaccattgaattttgattctagcaagcagagcttttgtcagttttctattgaccttctcggtggaggaatcttagtggacaaaactggagattggatcacacttatacaaaattctccaattagtaacttattgagagttgctgcttggaagaaaggctgtttaatggtcaag

SEQ ID NO: 78029 - DNA, 342 bp, Glycine max
aaaaaaaaaaaaaaaaaaaaaaaaaaaaaaaaaaaaaaaaaaaggaaaaaaaaaaaaaaaaaaaaaaaaaaaaaaaaaaaaaaaaaaaaaaaaaaaaaaaaaaaaaaaaaaaaaaaataaaaaaatataaagaaagaaaaaaaaattggagaaaaaaaataaaaaaaatgcttcctgtgagaaattgtgatgcggtcacaattccaaacaatataatagccggacgcataaaaggaaaaacttggagagcataataagagagctaacaccaattgatctcgataaggtaactgccggcttttcaatagtaaaacctgatgggccacctttattgaaaaatct

SEQ ID NO: 78030 - DNA, 370 bp, Glycine max
gtcttattgcttccaaaattttctccttgcgagttctcggactctgtatacattgacaaaagttcatgttctggcgtttactacccggtcggcggtcgatcaactgtttttccccgatagaaatctcttgcgtctttgagttttttttccttgatgtttccacgaattaccagtccccaatacgaacacaatacccttcaggaatctggctttttaccctttcctcctgaatctaggggtcctccatagcattgaaagctggcgttcttgtttgtctattttgcatggtcatccactccagcatacaaaaaatccgctggctgctttctctcccctcaggcacaaagcggtacgcctgttcttaccttac

SEQ ID NO: 78031 - DNA, 210 bp, Glycine max
gtgaagaaccccattgttaaattttgataatggcaaatggtaacgcgccgcagtcaagtggctattgaaaagtgtttgcctgctgtgtttgttcgaagctcggtttgcagattcgaccactcaaacccttacgctttcaacttggaaaggcttcggtccacaaaggaatttggtattagaattattattttacgataattcacttattta

SEQ ID NO: 78032 - DNA, 188 bp, Glycine max
ctggtgcacacaatgcttttctcatgaatatgccaaatgctggccctccaatgtggagatattatggtggagagctcgcctgctaagtttgttagaagaccggttcgcacattaaatgtaccaaacccttactcatacaacttggaaagcctgctgttcataccgtcaattgttatgctatttcccac

SEQ ID NO: 78033 - DNA, 332 bp, Glycine max
atccttttgtgttaaataggtggatgggaaaattgactttcccccagggcacttcccgaagtgttaagagaatgcctctttctatagggggaggagctggtgcaaagaatgctattctcatgaatatgccaaatgctgttctttcaatgtggagatattttgttggagatctcgtctttgaagtttctaagatgacttctccctacattaaatgtacagtctctttcttcatagcatttggaaatttggctgatgataccatcaattttgaggctttttcccaccagcctgtgccagttggaaaaaatcaaggaaaaagtggattggaaatt

SEQ ID NO: 78034 - DNA, 259 bp, Glycine max
ccagttctgatatttacaccatctgctctcaagactgtgaattgtggaatcctgcttgcacaaaagcaatgactatgtcatttaatccaaacccgtgttctgatgcatggagtttggaatttctgaagcgtactggatttcattgcgatatcatttgtgtcactggatggactgccaccccaatgcaggatgttcaggttacaattgattggtttatttcctctcaagaatgtgttcccaggacctattgtgttttaaa

SEQ ID NO: 78035 - DNA, 359 bp, Glycine max
ctcgagccgcgagaattgtatttgcacagtccagaggaagctcgccaattgagaaggaaagctctctctcgtattgaatggctgcaaaaagctgatgtgcctaccatagcacagattgaagagttccattcgatgcagaggatgatgaatgctcctgattcaaatgataatattgatttactgttgagcattgatttgttgggtttacaaggagcaggtaaagcttttccaaacaaaattgtttttgatgataagcttgtgttggctaacacacaagaattctttgatggaaattttccagtggattcttggttaccaatttttgtgaattgtctttatcctggtagtcaattaccttc

SEQ ID NO: 78036 - DNA, 380 bp, Glycine max
  unsure (1)..(380): unsure at all n locations
ctcaagaatgtgttcccaggacctattgtgttttaaatccacaaaatccttttgtgttaaataggtggatgggaaaattgactttcccccagggcacttcccgaagtgttaagagaatgcctctttctatagggggaggagctggtgcaaagaatgctattctcatgaatatgccaaatgctgttctttcaatgtggagatattttgttggagatctcgtctttgaagtttctaagatgacttctccctacattaaatgtacagnctctttcttcatagcatttggaaatttggctgatgataccatcaattttgaggcttttccccacaagcttgtgcaagttggagagattcaggaaaaagttgtatcgaaattttca

SEQ ID NO: 78037 - DNA, 353 bp, Glycine max
ggaatcccttctggatttccgctcacagttatttgcaatagcatttttaatgagatgctcattagatatagctatgaaaaattactgcgccaggctaaagctccaagtatgtttttacaatccttcaaaaattttgtttctttgtgtgtgtatggtgatgataacttaattagtgttcatgaatatgtcaagccttactttagtggttctaaattgaaaagctttctagctagtcataacatcaccattactgatggtattgacaaaactagtgcaactttgcaatttaaaaaggtagcaaaatgggattttctcaaaaaaaaccttaaaccaatgtcttatggtttgggggg

SEQ ID NO: 78038 - DNA, 283 bp, Glycine max
ggaatctgtcctctattcaacaccgcagtggttggcaatggcttcattattgatatgctcatcagatctacattgaacatacagaggcgccaggctcaagcttcagccatgaactcaccctcctttgaaacatagctcgcatacggtgcaggaccgagatggacactacactcaatagctcatgatggtggcaagagctcactttagtgcggctaaagagacaggcgttctaaatcatgctaacatcgtcagttcctatggtattgtcgatgatatctcatct

SEQ ID NO: 78039 - DNA, 394 bp, Glycine max
gcagaaaaacaagtagttgagaactaagaagaaggaaatggcttcctcaatgatctcctccccagctgttaccaccgtcaaccgtgccggtgccggcatggttgctccattcaccggcctcaaatccatggctggcttccccacgaggaagaccaacaatgacattacctccattgctagcaacggtggaagagtacaatgcatgcaggtgtggccaccaattggcaagaagaagttcgagactctttcctacttgccagacctcgatgatgcccaattggcaaaggaagtcgaataccttctaaggaaaggatggattccttgcttggaattcgagttggagcacggtttcgtgtaccgtgagcacaacaggtcacctggatactatgatgga

SEQ ID NO: 78040 - DNA, 362 bp, Glycine max
cggctcgagcgccaattgagaaggaaagctctctctcgtattgaatggctgcaaaaagctgatgtgcctaccatagcacagattgaagagttccattcgatgcagaggatgatgaatgctcctgattcaaatgataatattgatttactgttgagcattgatttgttgggtttacaaggagcaggtaaagcttttccaaacaaaattgtttttgatgataagcttgtgttggctaacacacaagaattctttgatggaaattttccagtggattcttggttaccaaattttgtgaatagtctttatcctgtaagtcaattaccttcagaaagctgtcgtgtaaatgtacatgtggtagtgga

SEQ ID NO: 78041 - DNA, 308 bp, Glycine max
gctagggattggaagtggtgacaaggttgctagaaatgttctgtttgtgtttcctgagcagtcaccggaaagaaacataacatttctagcatgggattggaagtggttacaaggttgctattgacttttgacattaagattatatgaagaaatgcttatatgtttcgaatgagatgttcattctttgacatggaaattttagtttaatctcacatcctttgaagatgttcagagcagtggcatatatcagcacacacagaagattcttatggattgctcttttcactgcaaataatagaaatttttgc

SEQ ID NO: 78042 - DNA, 286 bp, Glycine max
atcaccttcacctcacttgcacatcacaatacaccgaataccatcaacacaacctttctctcaccaaaacaaacacactatgacccgttcccacaagtccactgaccgtgaccacgctggtctcgccaacggcactgccgtcccggaggacaacctccccaagtacttcggcaaggccggatacgccggcgagtctccgtccaagaccaagaagcatggcggtggcaagagcaactggtgtgctgtcggactctccgagctcgaaaactacgaactacacgccccc

SEQ ID NO: 78043 - DNA, 299 bp, Glycine max
gtttgcaaaaagacagagggttaattgtggagtattttggaaggatgtcttacgttgctcataacgttaatcagccccaagagaaagatttgttggagggaaatttttcctttgatattaaatctcgctctagattggaaaaagtttcctctacaaaagcacaatttgttagtggaaaaaccttcaaatatgatataattggtgctggttcacattcttcagaagattttcctgaaaaggaagatcaagaaaaacccaaaaagattgatgccagattgagacaaagaatagatcctcaa

SEQ ID NO: 78044 - DNA, 389 bp, Glycine max
tcttagcgttctataatacctgcgctttggtatcgacctcggagacatctgcgcggcgaacaagcacacccattcggagccgctcatcgatcgacccgattcgatggactagacacgcaaccctgttgtctcccgcttcttgacgtctcatctacggcgcatataccccacaccaaccccagtcacgtctgtccgaaccttgcgcgcacctaagacgactcaataggttcgtttggtcgcccgtcatgtccggcacgcaagcggagaagggcaatcacacgctcggccagacggcgacgtaccagtccgtcatcatcgcccttgtcgcaggcgcgatactggtcatcgcgctcttctcgatcatctggcgccggcgccggcgcatgcag

SEQ ID NO: 78045 - DNA, 149 bp, Glycine max
agagctatgacgccccctgccctcaagctcggaattaatttcggggcggtacatgcatgcattccagattttcctatatagagttgtgtcctagcgagtcaccttgctggtcatagatatttcctgcgtctaactgttatacgatctca

SEQ ID NO: 78046 - DNA, 364 bp, Glycine max
gtgattttgtcattggtgtcaagttgacaaccataaacaatatgtgtgcatatgggctcaatcctggtatttcaggttctcgtcttttgggcaccattcctcagtccatttcacagcaaactgtttggaatcaaatggcaacagtgagaacaccattgaattttgattctagcaagcagagcttttgtcagttttctattgaccttctcggtggaggaatcttagtggacaaaactggagattggatcacacttatacaaaattctccaattagtaacttgttgagagttgctgcttggaagaaaggctgtttaatggtcaagattgtgatgtctgggaatgcagcaatcaaaaggagtgattg

SEQ ID NO: 78047 - DNA, 227 bp, Glycine max
gaaaaacccaaaaagattgatgccagattgagacaaagaatagatcctcaatacaatgaggttcaggctcagatggaaacaaatttgtttaaattgtctcttgatgatgttgaaactcctaaaggttccatgttggatctgaaaatttctcaatctaaaattgcacttcccaagaacacagttggaggaaccattctgcgtaatgatctattggcaaattttttgac

SEQ ID NO: 78048 - DNA, 381 bp, Glycine max
tgaaattttcacaagaggaatttcttacagcttgggcaactcaggtgcgtcctgcaacaactctgttggctgatgggtgtccatatttgtatgcaatggtgcatgatagttcagtgtctacaataccaggtgattttgtcattggtgtcaagttgacaaccataaacaatatgtgtgcatatgggctcaatcctggtatttcaggttctcgtcttttgggcaccattcctcagtccatttcacagcaaactgtttggaatcaaatggcaacagtgagaacaccattgaattttgattctagcaagcagagcttttgtcagttttctattgaccttctcggtggaagaatcttagtggacaaaactggagaatggatcacac

SEQ ID NO: 78049 - DNA, 357 bp, Glycine max
  unsure (1)..(357): unsure at all n locations
cccaaacagattcactccgttgtcgtcagctacaacaataacagcatgaacaagttggtactcgcgtgtgttctcttaattgctttcacatatggagcgtatggcacatcatccatcaagtttgttaacaactgttctgctggagtgaatgtgtattctacaaccaataaccaggcctctgtctccgtgtgcggtaccatcgctcatggtggaagctgtgttaagtcctacgcctctggagctatcaacttcaaangtggacctgctggcaaaaccttgtttgagatctctcccaacagctggaacaacctcgacttctatgatctcagtgtaattgttggatttgactctactatg

SEQ ID NO: 78050 - DNA, 333 bp, Glycine max
gagatgtcaggttcggccttctgattttcttccctttttgctgcattttttcagcttagcaaaatttatcctacttcctctttgccaccggtgttctttctgttaccaaaacctgaactcctgcatgacttgagttcattttgctggctttttttgcctgttgattgtcatgcttatcatattatattacagatattttcattcattgatgtggagaagagtgggacaattacgttcagacaggtaactatttgcaataatttaccctgtttctgtgctatattgatcagaagtagcaattgatactacaacatttttactattttgtttttt

SEQ ID NO: 78051 - DNA, 303 bp, Glycine max
gagaaagcaaaaaaaaaaaaaaaaaataaaaaaaaaatacagagaaccgagaccgagattttctcttgtgaggttttgatcactttcattctagttcaacaccgtctcttaattgcaaaaacaagtttttgtgaagtggggtggtggtttaagctttgatccgggggactgatctctagtctcttggaaattgggtctgtgcagatgaagtccactatggctcagaatcagagtaattgggaagctgataaaatgcttgatgtttatatttatgattatttgatgaaaagaaaattacatgct

SEQ ID NO: 78052 - DNA, 353 bp, Glycine max
  unsure (1)..(353): unsure at all n locations
gtccgtaagctcggaattcggttcgagcttttttttcatagcatttggaaatttggctgatgataccatcaattttgaggcttttccccacaagctggtgcagtttggagagattcangaaaaagttgtattgaaattttcacaagaagaatttcttacagcttggtcaactcaagtgcgtcctgcaacaactctgttggttgatgggtgtccatatttgtatgcaatggtgcatgatagttcagtgtctacaataccaagtgattttgtcattggtgtcaagtngacaaccataaacaatatgtgtgcatantggctcaatcctggtattttaaggtctcgtcttttgggca

SEQ ID NO: 78053 - DNA, 383 bp, Glycine max
cggctcgagctgatcctcgctagttcacactagccacaaaagcttcaacccagctgatgacttaaaccttcgacgtccaacctacacggagttccaactatcccaacacgcttcctattccctcgtttgagccacaccgtccggtccctctacccatcatgcctcacggcacgggtcttgtggacggcgcaagtttacgatctctgtctagcttccgggcgttcagagatcgagcggtgtcggtgagaggtacctgggtcggcgtctatcgatgaagttggcggggagagcggtcgtcttcggttcttggttacctccgggtaccgccgtcgattcgcaccctcttcccgtgggcgtttcgaagcgagtctgatgggtccctt

SEQ ID NO: 78054 - DNA, 209 bp, Glycine max
gtcactcgctttgccaatctttttttctttggcagctgtctctcgctttccgacttttgaaacccgccttattcttaattataaatctctgaaagatgcgtttcacagacgtcttttctgtcagtgtgggggcgccttttggggcagctcacgggggggtcccacgagcacctaaaatttttggcctacccacagacttgctcgatgac

SEQ ID NO: 78055 - DNA, 147 bp, Glycine max
aaaaaaaaaaattaaaaaaaaaaaaaaaaaaaaaaaaaaaaagggaaaaaaaaaaaaaaaaaaaaaaaaaaaaaaaaaaaaaaaaaaaaaaaaaataaaaaaaaaaaaaaaagaaaataaagaaaaaaaaggacaagcttaaaacaa

SEQ ID NO: 78056 - DNA, 347 bp, Glycine max
gtttcgtgtaataatctggaaatgcaagaagcttatcttgtcaatctcgtaaatgtgttacgagaattgtatttgcacagtccagaggaagctcgccaattgagaaggaaagctctctctcgtattgaatggctgcaaaaagctgatgtgcctaccatagcacagattgaagagttccattcgatgcagaggatgatgaatgctcctgattcaaatgataatattgatttactgttgagcattgatttgttgggtttacaaggagcaagtaaagcttttccaaacaaaattgtttttgatgataagcttgtgttggctaacacacaagaattctttgatggaaattt

SEQ ID NO: 78057 - DNA, 338 bp, Glycine max
aaaaaaaaaaaaaaaaaaaaaaaaaaaaaaaaaaaaaaaaaagggaaaaaaaaaaaaaaaaaaaaaaaaaaaaaaaaaaaaaaaaaaaaaaaaaaaaaaaaaaaaaaaaaaaaaaaaaaaaaaaaagaaaaaaaaaaaaaaaaaaaaaaaaaaaaaaaaaaaaaaaaaaaaaaaaaaaaaaaaatggggggggggccccacaaaataagtactcgccccccggaaaaaaaaatcgggacggggtcctggggggctccaaattttataaaaaagggggcttaataaacccgggaaaaaaagggggtaaggcttttttcggggaaaaaaggtttctgaaa

SEQ ID NO: 78058 - DNA, 402 bp, Glycine max
ctcgagccgaatcggctcgagcggctcgagcggctcgagtcaattttgaggcttttccccacaagctggtgcagtttggagagattcaggaaaaagttgtattgaaattttcacaagaggaatttcttacagcttggtcaactcaggtgcgtcctgcaacaactctgttggctgatgggtgtccatatttgtatgcaatggtgcatgatagttcagtgtctacaataccaggtgattttgtcattggtgtcaagttgacaaccataaacaatatgtgtgcatatgggctcaatcctggtatttcaggttctcgtcttttgggcaccattcctcagtccatttcacagcaaactgtttggaatcaaatggcaacagtgagaacaccattttgatttgattcta

SEQ ID NO: 78059 - DNA, 294 bp, Glycine max
  unsure (1)..(294): unsure at all n locations
cttgaattataatgtatatatgatgattgagctggaacgcaggtcacagaattatgtttgtactataaaatacgctctgacttgtacactgtaagaatcaataattattttatcaaattcaaggagaaaaaacaattnanaaaaaaaaaaaaaaaaaaaaaaaaaaaaaaaaaaaaaaaaaaaaaaaaaaaaaaaaaaaaaaaaaaaaaaaaaaaaaaaaaaaaaaaaaaaaaaaaaaaaaagggggcggcccccaactagggagcttttcaacccggaaattaatttcggacc

SEQ ID NO: 78060 - DNA, 332 bp, Glycine max
aagaaaggctgtttaatggtcaagattgtgatgtctgggaatgcagcagtcaaaaggagtgattgggcctcattggtacaagtgtttttaacaaacagcaacagtacagagcattttgatgcatgtaagtggacaaaatcagaaccacattcctgggaattgatcttcccaatagaggtatgtggtcctaataatggttttgaaatgtggagttctgagtgggcaaatcaaacttcatggcatttgagtttccttattgacaatcccaaacagtctacagtttttgatattctcttgggaatctctcaagattttgaaattgctggtaatac

SEQ ID NO: 78061 - DNA, 399 bp, Glycine max
gggcgcgccagttctgatatttacaccatctgctctcaagactgtgaattgtggaatcctgcttgcacaaaagcaatgactatgtcatttaatccaaacccgtgttctgatgcatggagtttggaatttctgaagcgtactggatttcattgcgatatcatttgtgtcactggatggactgccaccccaatgcaggatgttcaggttacaattgattggtttatttcctctcaggaatgtgttcccaggacctattgtgttttaaatccacaaaatccttttgtgttaaataggtggatgggaaaattgactttcccccagggcacttcccgaagtgttaagagaatgcctctttctataaggggaggagctggtgcaaagaatgctattctcatgaat

SEQ ID NO: 78062 - DNA, 281 bp, Glycine max
cttttgtgttaaataggtggatgggaaaattgactttcccccagggcacttcccgaagtgttaagagaatgcctctttctatagggggaggagctggtgcaaagaatgctattctcatgaatatgccaaatgctgttctttcaatgtggagatattttgttggagatctcgtctttgaagtttctaagatgacttctccctacattaaatgtacagtctctttcttcatagcatttggaaatttggctgatgataccatcaattttgaagcttttccccac

SEQ ID NO: 78063 - DNA, 83 bp, Glycine max
cttccttctccttctgcctccacacactccgcaaggccacttgccctcttcgcgcttcttcctccctttctactccctccatg

SEQ ID NO: 78064 - DNA, 341 bp, Glycine max
  unsure (1)..(341): unsure at all n locations
cccataatgagtggttgcaaactgttcagtcagagcctgatgtgatctcaatgtcgttcattccaattacgtctctattgaatggagtgccagggagtggattcttgagccatgccataaacctttatttacgatataaaccaccgattgaagagctccaccaattcttggaattccagctgccaaggcagtgggcacctgtattcagtgaccttcctcttggtccacaacggaagcaaaggagttctgcatctttacagtttagcttcatgggcccaaagctttatgttaacaccacacaagttgatgtangtaagaggccagtgactggtctccgtctt

SEQ ID NO: 78065 - DNA, 339 bp, Glycine max
cacgcataccctcttttgtggtttgaggaattgggattctaaaacctgccagctgggttgtatttaaaattaaggcttaatttttcttttaagttcttattttttttttaattttggtcctgtaaatttttgttagtccttttaagcttgtattttttttttttcaattttaatctcttaaagcatgaatttacaaacactagaaatgaaaaaatagaaatttaaagggattaaaattggaaaaaaaaaaaaaaaaataaaaaaaaaataaaaaaaaattaaaaaaaaaatataaaatattttaatatataaaataaatatttaaaaataatataaatt

SEQ ID NO: 78066 - DNA, 390 bp, Glycine max
ttccattcgatgcagaggatgatgaatgctcctgattcaaatgataatattgatttactgttgagcattgatttgttgggtttacaaggagcaggtaaagcttttccaaacaaaattgtttttgatgataagcttgtgttggctaacacacaagaattctttgatggaaattttccagtggattcttggttaccaatttttgtgaattgtctttatcctgtaagtcaattaccttcagaagctgtcgttgtaaatgttacatgtggtagtggacgtggtggtttacccaccactgcttggattagttctgcagttaacaatcgctcctcagatatcaacaaaaagattcgcacagcacttgggaaaggtaagaaaattgtttttcttact

SEQ ID NO: 78067 - DNA, 325 bp, Glycine max
caatcctggaatttcaggttctcgttttttgggcaccattcctcagtggatttcacagcaaactgtttggaatcaaatggcaacagtgagaacaccattgaattttgattctagcaagcagagcttttgtcagttttctattgaccttctcggtggaggaatcttagtggacaaaactggagattggatcacacttatacaaaattctccaattagtaacttgttgagagttgctgcttggaagaaaggctgtttaatggtcaagattgtgatgtctgggaatgcagcagtcaaaaggagtgattgggcctcattggtacaagtg

SEQ ID NO: 78068 - DNA, 378 bp, Glycine max
ggtggaggaatcttagtggacaaaactggagattggatcacacttatacaaaattctccaattagtaacttgttgagagttgctgcttggaagaaaggctgtttaatggtcaagattgtgatgtctgggaatgcagcagtcaaaaggagtgattgggcctcattggtacaagtgtttttaacaaacagcaacagtacagagcattttgatgcatgtaagtggacaaaatcagaaccacattcctgggaattgatcttcccaatagaagtatgtggtcctaataatggttttgaaatgtggagttctgagtgggcaaatcaaacttcatggcatttgagtttccttattgacaatcccaaacagtctacagtttttgat

SEQ ID NO: 78069 - DNA, 376 bp, Glycine max
aggatcccctggggaattccaattccacattttcaagaaataaggaggcaaaaatgttcatatatgaattggaattatttgttttcttattaggcctatcctgaagccaaaggaaatgagatcggaattcctcggggaattccaattccacattttcaagaaataaggaggcaaaaatgttcatatatgaattggaattatttgttttcttattaggcctatcctgaagccaaaggaaatgagatcggaattcctcggggaattccaattccacattttcaagaaataaggaggcaaaaatgttcatatatgaattggaattatttgttttcttattaggcctatcctgaaaccaaaggaaatgaaatcggaattc

SEQ ID NO: 78070 - DNA, 426 bp, Glycine max
tgcacgcgtacgtaagctcggaattcggttcgagaagctgatgtgcctaccatagcacagattgaagagttccattcgatgcagaggatgatgaatgctcctgattcaaatgataatattgatttactgttgagcattgatttgttgggtttacaaggagcaggtaaagcttttccaaacaaaattgtttttgatgataagcttgtgttggctaacacacaagaattctttgatggaaattttccagtggattcttggttaccaatttttgtgaattgtctttatcctgtaagtcaattaccttcagaagctgtcgttgtaaatgttacatgtggtagtggacgtggtggtttacccaccactgcttggattagttctgcagttaacaatcgctccttagatatcaacaaaaagattcgcacagca

SEQ ID NO: 78071 - DNA, 337 bp, Glycine max
cgcaagggcagcaacgcctggcgtgactctcgccgccgcgagtctatcgctaggcgtgcttccatgcctctgggcggtatgcgtgttatcaccaccggtggtgtgactgctgggctcgatgccagcctctacttggtgggttctttggcttcccacgactcggccctggaggtcgctcgtgctatgcagtattcttgggtcaagggtgttacggtcgatgcgatcgatgtttgagctacggctcccgcgcgacaagcgaaggcgtttacgatgaaagggttgaacagtgatcggatcggttatctgaaacatgtcgggaatcttaaggatttaccac

SEQ ID NO: 78072 - DNA, 341 bp, Glycine max
gtaaattccaggtaattgtccagctccatgacctctccaacacggggatgaaactcattgtgcagcgaaacaactagcttccataatactgaccaaaataaagaatctttgatttataacagaaaggcaactgcagaggtatattgcatgcatagaaatccatgatgtatatctgtgaagattcggattgcacaacaattctgagacaagtagcgccagaaaatacttttgacaaaatagatgttggggcaaatcagctcaagcatgatattggttccttatatattaaaacagcaccagcagccaacccttgaccaagtgaagtaacttcaatatttggc

SEQ ID NO: 78073 - DNA, 269 bp, Glycine max
ctgatttattttctaattgttgaatcatggcacctaaaatctatctcacgtggcgcaactcgctgtattggacgctacaccctgtttgcgctgtacaacaagcactgtgagtaccagattgcaggtttagtactgacagaggagaaacgccagtgctgacccgacgctttgatcagagggcggagtcgaattggtggcttggactactacaaaatcctgtaatatgcagcactatacgcagatgcagtaatgtacactgcagatgcatc

SEQ ID NO: 78074 - DNA, 356 bp, Glycine max
gtcctgtatgtgatgagtcaactgctctgaagtttcctgagactaccttaccatatatgcaaccatcggattcaaatttgtggccattgcctcagatggcaatgtctgctattccatcttttccggagaacaatgcggctagtacagtcatgcctctagatgatatttttcgtcatagtggtgaggatcatcgctatattcatgaggctgaagtaatattggaagcaccaaaggaccttaactcttcctttgtttcacctgtgataccgcaacccttcactagtgtgcccatgaatgaaaatgcgacacatgcacctcacggcattactattcctggatttatgaacagtgattac

SEQ ID NO: 78075 - DNA, 298 bp, Glycine max
  unsure (1)..(298): unsure at all n locations
acaaaacnagggcaactgtgcaatttagaaagctagcagattgtgattttctcaagagaaactttaagcagatgtctaatgttttgtgggtggctcctgaggacaaggcgagtttatggtcacaacttcattatgtttcgtgtaataatctggaaatgcaagaagcttatcttgtcaaacctcgaaatgtgttacgagaattgtatttgcacagtccagaggaagctcgccaattgagaaggaaagctctctctcgtatcgaatggctgcaaaaagctgatgtgcctaccatagcaca

SEQ ID NO: 78076 - DNA, 132 bp, Glycine max
cattgaagtggttcccatgccagaccaaaaaagaatgagcttcgtttgggacctttacaggcaacggtattcaaaccggggccgtggagctttacattattgagatttttgagaggaccctttacaattcac

SEQ ID NO: 78077 - DNA, 333 bp, Glycine max
gtgaatcccttatcattggcttcccaacgacatttctcaaaatgggttgataaaccagaatttatttttactcttgtatataaaatcacaagggattatgttgattctatggatgaattgttgcagccattggttgatgaagcaaagttgcttggttacagttgtagagaagaatggatctcagcaatggtaacctctttaaccacatacttggcaaaagaaattttccctagttacattagtcaactagatgaagagagtgttataggaattcagtcatctgctagaatatcatggctacatctcattgatttgacgatagcttttgacaaa

SEQ ID NO: 78078 - DNA, 76 bp, Glycine max
ctcgagccgcatttccattttgagaaactgcactgtgtattaactattaacaaaagttttttttcttcgtaatttc

SEQ ID NO: 78079 - DNA, 415 bp, Glycine max
  unsure (1)..(415): unsure at all n locations
cccgaattcccctccccgcctagtaaatgaattccaaatacttcaccctnnaaaacaccgagaaaaaaaaaaaaaaaacacccccacaaaaaccaaaaaaaaaaaaaaaatccctacaaaaaacacccaaaaaacaaaacccaaccccccaaaaaaaaacaaacccaaaacaacaaaaaaaaaaaaaaaaaccacccccccccccccctaaaaccccccccccccccaaaataattccccccccctccccccaagccccccccctttcccctaaaagaaccccattaaacccccccccaaacccagcccaaccctttccccccggaaaaattttcccccccccccaatccccccccccaacccccccgaacccaaaaagttaaccccccccccccccaaaggggccccacccccc

SEQ ID NO: 78080 - DNA, 272 bp, Glycine max
gaagagctatgacgcacgcgcacgtaagcttgaaattcggatcgagggcttaacaagtagattaacagagcatcaaactggcaagtcgactactaagtcaaaggctggtgatatggttgagtttcgtgtgatcaggctttctaatgagggtcctgaaattaaattaagtgagcaacaacaacaaaaggataactcagctactaaagatgattctgtcaccaatgacgttatatgccattcaaggtctggagttctgtgtagatcaaatgaac

SEQ ID NO: 78081 - DNA, 262 bp, Glycine max
aaaaaaaaaaataaaaaaaaaaaaaaaaaaaaaaaaaaaaaaggaaaaaaaaaaaaaaaaaaaaaaaaaaaaaaaaaaaaaaaaaaaaaaaaaaaaaaaaaaaaaaaaaaaaaaaagggggcggcccccaattagggacctcgtcaccccggaatttaattcgggcccggtccttgggggggtccaatttttccttatagggggccgtttaaaacttgggggaaataagggcaatagttgttccttgggaaaaattgttttc

SEQ ID NO: 78082 - DNA, 227 bp, Glycine max
gaaaaaaaaaaataaaagagagaaaagaaaaaaattagggaagggactaaataactaatagaaaactaaaaaaaaaaaattattataaaatataaaaggatctaagatataaaaaatagggggcgccccatgttaggtgcctgagagacacggtattaaatactggaccggggcctgcggggtttacgttttaccttatagaggaggagtttaaggttggggacatt

SEQ ID NO: 78083 - DNA, 100 bp, Glycine max
ggagcattaagtcttagcatgaactacaactgcgaacaccaagacatcataatctatggctgcaaccgtctacaatgtcagagctgtcaacagagcattg

SEQ ID NO: 78084 - DNA, 152 bp, Glycine max
caatcaatcaacatggcttccgctaaagtctacgtcggtaggtctcactcatccactcgcacaccctctctctctctctccaaccctctcgtcgtcgttggagtgcctcgctttgcgtgtctcaaacgatgcatcttcatgtcatacttaaa

SEQ ID NO: 78085 - DNA, 241 bp, Glycine max
cttcccgaagtgttaagagaatgcctctttctatagggggaggagctggtgcaaagaatgctattctcatgaatatgccaaatgctgttctttcaatgtggagatattttgttggagatctcgtctttgaagtttctaagatgacttctccctacattaaatgtacagtctctttcttcatagcatttggaaatttggctgatgataccatcaattttgaggcttttccccacaagctggt

SEQ ID NO: 78086 - DNA, 370 bp, Glycine max
ctcgagccgctttcaatgtggagatattttgttggagatctcgtctttgaagtttctaagatgacttctccctacattaaatgtacagtctctttcttcatagcatttggaaatttggctgatgataccatcaattttgaggcttttccccacaagctggtgcagtttggagagattcaggaaaaagttgtattgaaattttcacaagaggaatttcttacagcttggtcaactcaagtgcgtcctgcaacaactctgttggctgatgggtgtccatatttgtatgcaatggtgcatgatagttcagtgtctacaataccaagtgattttgtcattggtgtcaagttgacaaccataaacaatatgtgtg

SEQ ID NO: 78087 - DNA, 292 bp, Glycine max
ctaatgctatgtggttggctcctgaggacaaggcaaggaacatggtcacaacttcattatgtgtcgtgtagaatctggaaatgcaagacgcttatctagtcaatctcgacaatgtgttacgagaattgtatttgcacagtccagaggaagctcgccaattgagaaggaaagctctctctcgtattgaatggctgcaaaaagctgatgtgcctaccatagcacagattgaagagttccattcgatgcaaaagatgatgaatgctcctgattcaaatgataatattgatttact

SEQ ID NO: 78088 - DNA, 374 bp, Glycine max
ggctgatgataccatcaattttgaggcttttccccacaagctggtgcagtttggagagattcaggaaaaagttgtattgaaattttcacaagaggaattttttacagcttggtcaactcaggtgcgtcctgcaacaactctgttggctgatgggtgtccatatttgtatgcaatggtgcatgatagttcagtgtctacaataccaagtgattttgtcattggtgtcaagttgacaaccataaacaatatgtgtgcatatgggctcaatcctggtatttcaagttctcgtcttttgggcaccattcctcaatccatttcacagcaaactgtttggaatcaaatggcaacagtgagaacaccattgaatttgattc

SEQ ID NO: 78089 - DNA, 129 bp, Glycine max
aaattttccaggtggtttctgggttaccaattcttttgaattggctgcatcctgtaagtcaattaccttcagaagctgtcgctttaaatgttacatgtggttgtggacgtggtggtccacccaccactg

SEQ ID NO: 78090 - DNA, 223 bp, Glycine max
gctcaatcctggtatttcaggttctcgtcttttgggcaccattcctcagtccatttcacagcaaactgtttggaatcaaatggcaacagtgagaacaccattgaattttgattctagcaagcagagcttttgtcagttttctattgaccttctcggtggaggaatcttaatggacaaaactggagattggatcacacttatacaaaattctccaattagtaac

SEQ ID NO: 78091 - DNA, 300 bp, Glycine max
cctctatcccccctttacttatggctctcttttctgctttcccctttcgctcgtcgtgtggccccgcgacaccatcatcacgcacccttcctgcttccttcatcctcggtattgcaataaatcacacaaatgggtgcttcaaaaaagtcaaagctcgaacctttatgttgctttagctctcgatgcttctctgaaacccgcgttcgcgttgctctttgcgccaatggccgagtcgtccccgccggaaacgccggaactgacaaccgaattcggtgccggatccgggtcgggtcaaaactg

SEQ ID NO: 78092 - DNA, 285 bp, Glycine max
ggcgcacagttcgtcctcggtctttaacgaagctcctgccgccaccgaagctcccgagatggttaccgttaccaagacgtcaagctcctccagtgcgcctaccgatgcgagcgtgtcatcagccagtgccacggccacagccacggcttcctctactgttgtggtgacgacgccaccggcgacctctagcgactgcctcaaggcgtccactgggactctttctacgtccagtgtgatggcttctgcggacgtctcgtcgccgtcgtcaactccaaggtacgcatg

SEQ ID NO: 78093 - DNA, 308 bp, Glycine max
ggttcacattcttcagaagattttcctgaaaaggaagatcaagaaaaacccaaaaagattgatgccagattgagacaaagaatagatcctcaatacaatgaggttcatgctcagatggaaacaaatttgtttaaattgtctcttgatgatgttgaaactcctaaaggttccatgttggatctgaaaatttctcaatctaaaattgcacttcccaagaacacaattggaggaaccattctgcgtagtgatctattggcaaattttttgacagaaggcaattttagagcaagtgttgatttgcagcgcac

SEQ ID NO: 78094 - DNA, 127 bp, Glycine max
ctttgtgacgcctctttcacaggccgaaggcccattaccttgattacatgtgcgaataccatggggcacattgaaccaagcatgaattgacggattcagcttccgagtaccacgtccaatgaccatt

SEQ ID NO: 78095 - DNA, 338 bp, Glycine max
aaatagcttgacgttgcatgcacgcgtacgctcgcactgcatctcgagcctggatttgttgggtttacaaggagcaggtaaagcttttccaaacaaaattgtttttgatgataagcttgtgttggctaacacacaagaattctttgatggaaattttccagtggattcttggttaccaatttttgtgaattgtctttatcctgtaagtcaattaccttcagaagctgtcgttgtaaatgttacatgtggtagtggacgttgtggtttacccaccactgcttggattagttctgcagttaacaatcgctcctcagatatcaacaaaaaggattcgcaca

SEQ ID NO: 78096 - DNA, 379 bp, Glycine max
acaaaatcagaaccacattcctgggaattgatcttcccaatagaggtatgtggtcctaataatggttatgaaatgtggagttctgagtgggcaaatcaaacttcatggcatttgagtttccttattgacaatcccaaacagtctacagtttttgatattctcttgggaatctctcacgattttgaaattgctggtaatactcttatgccagctttttctgttccacaggctactgccagatcttctgaaaatgcggaatcctctgcatgatctggaatttgtgttttctttcgcttgttcgtttgtttaattcaataaaggaaaatacgcatgaccctcttgtgagtatgctctgctattagaaatttcacactcttta

SEQ ID NO: 78097 - DNA, 228 bp, Glycine max
gctactgctacttcttctgctgctactgccacccacccattcactctccgtcatagcactcgccctactctcactctcctgcttgtatataaaatctcctatctgcatatacccgctcaaccatctccggtatctagccggtcaattcgccgccacaactcgccgaccacatcagcgtcatctcacacgctcttcggacccgcacacgcacacgacacctacccgtac

SEQ ID NO: 78098 - DNA, 309 bp, Glycine max
tggtatttcaggttctcgtcttttgggcaccattcctcagtccatttcacagcaaactgtttggaatcaaatggcaacagtgagaacaccattgaattttgattctagcaagcagagcttttgtcagttttctattgaccttctcggtggaggaatcttaatggacaaaactggagattggatcacacttatacaaaattctccaattagtaacttattgagagttgctgcttggaaaaaaagctgtttaatggtcaagattgtgatgtctgggaatgcagcagtcaaaaaggagtgattgggcctcat

SEQ ID NO: 78099 - DNA, 338 bp, Glycine max
gttatgagcaagatggcagaaatgataaacagtctttgtggtggtgatgaaaaattgatgcgtgaaaggacgcacctgctgttggcttgttgttcaaggatggcaatttgtaagaaagatgtttggagagttgaatgtggaatcccttctggatttccgctcacagttatttgcaatagcatttttaatgagatgctcattagatatagctatgaaaaattactgcgccaggctaaagctccaagtatgtttttacaatccttcaaaaattttgtttctttgtgtgtgtatggtgatgataacttaattagtgttcatgaatatgtcaagccttactt

SEQ ID NO: 78100 - DNA, 327 bp, Glycine max
gtcttgcaattgaagttgaagtcttgcccttctctcttcaactccaaacacaagacatcatcatccatggctgcctccgtctccactgtcggagctgtcaacagagctcttttgaacctgaatgggtctggacctggggtttcagctcccagttcatccttctttgggagcagcttgaagaaggttattggctcaagggtccccaacacaaagatttcctctggaagcttcaagattgttgctgtagaagagaagaaagagattgaagagacccagccgaccgacaaggacagatggaaggggtcttgcctatgatatctcagacga

SEQ ID NO: 78101 - DNA, 291 bp, Glycine max
gaaaaaaggctgtttaatggtcaagattgtgatgtctgggaatgcagcagtcaaaaggagtgattgggcctcattggtacaagtgtttttaacaaacagcaacagtacagagcattttgatgcatgtaagtggacaaaatcagaaccacattcctgggaattgatcttcccaatagaagtatgtggtcctaataatggttttgaaatgtggagttctgagtgggcaaatcaaacttcatggcatttgagtttccttattgacaatcccaaacagtctacaagttttgatat

SEQ ID NO: 78102 - DNA, 236 bp, Glycine max
cacataggtagctgatcgcactaatacagcattcttcctaagggctcacatcggcagtggacgatggccagaaaggcagcataatggctaagatcgtgacttgtgggaatgcagcatgcaaaaggagtgattcggactcatcggtacaacgtgtgtttaacatacagcgaccgtacacaccattttgttgcatgtaagtagacaaaatcagaaccacactgctgagaattgatcta

SEQ ID NO: 78103 - DNA, 99 bp, Glycine max
cggagcgtgagcagcctcatcaaggttggacgaatcgagccggtgatggtgctccgtgtcgacaaggaaaagggttacatcgatctcacaagcgcaagg

SEQ ID NO: 78104 - DNA, 197 bp, Glycine max
  unsure (1)..(197): unsure at all n locations
gaagagcangacgtgcacgcgcacgtacgctcgctattcggctcgcgtccgaagggagttgtttgcgctaagactgcagtgttgcttagggctcacacctgcagtggacgatggccatagcagcagcatctctgctcaagtcttcacttgtgctagaccagtctgaaaggggggagggacagcactcattggtcaca

SEQ ID NO: 78105 - DNA, 246 bp, Glycine max
cacgaacctggttgataccgaacaaaacatcagccaatatggacttaatcaagagcgcaatggacacgtaccagaagagccagggacaaggacacactggtcagcagaatccagggaacaaccaggctggaggtgactttggcgtcaccggaggcagtcgctttaatgcgcccaacagcgtcagctatggtcagttcgcatgtgacctggacggtgatggtatcatagacactgccaataacgaca

SEQ ID NO: 78106 - DNA, 341 bp, Glycine max
gttgacaaccataaacaatatgtgtgcatatgggctcaatcctggtatttcaggttctcgtcttttgggcaccattcctcagtccatttcacagcaaactgtttggaatcaaatggcaacagtgagaacaccattgaattttgattctagcaagcagagcttttgtcagttttctattgaccttctcggtggaggaatcttagtggacaaaactggagattggatcacacttatacaaaattctccaattagtaacttgttgagagttgctgcttggaagaaaggcttgttaatggtcaagattgtgatgtctgggaatgcaacaatcaaaaaggagtgat

SEQ ID NO: 78107 - DNA, 284 bp, Glycine max
attgggttttaaatccacacaatccttttgtgttaaataggtggatgggaaaattgactttcccccagggcacttcccgaagtgttaagagaatgcctctttctatagggggaggagctggtgcaaagaatgctattctcatgaatatgccaaatgctgttctttcaatgtggagatattttgttggagatctcgtctttgaagtttctaagatgacttctccctacattaaatgtacagtctctttcttcatagcatttggaaatttggctgatgataccatc

SEQ ID NO: 78108 - DNA, 352 bp, Glycine max
ttgacctttttggtggaggaatcttagtggacaaaactggagattggatcacacttatacaaaattctccaattagtaacttgttgagagttgctgcttggaagaaaggctgtttaatggtcaagattgtgatgtctgggaatgcagcagtcaaaaggagtgattgggcctcattggtacaagtgtttttaacaaacagcaacagtacagagcattttgatgcatgtaagtggacaaaatcagaaccacattcctgggaattgatcttcccaatagaggtatgtggtcctaataatggttttgaaatgtggagttctgagtgggcaaatcaaactttatggcatttgagttt

SEQ ID NO: 78109 - DNA, 337 bp, Glycine max
  unsure (1)..(337): unsure at all n locations
tgaaaactaatatttttcagtangaactggacaatttaagctgtgcacccttgtacttggcgcacttnanaaaaaaaaaaaaaaaaaaaaaaaaaaaaaaaaaaaaaaaaaaaaaaaaaaaaaaaaaaaaaaaaaaaaaaaaaaaaaaaaaaaaaaaaaaaaaaaaaaaaaaaaaaaaaaaaaaaaaaaagggggccccaaattaaaaaatttttaaacccggaaaaaaatttgaaaccggaacttgaagggtaaaaattttttctaaaaaaaaggtaaataaaaaattggggaaaaaaaggaaaaaattgtttcttgggaaaaaatttaatccgtt

SEQ ID NO: 78110 - DNA, 155 bp, Glycine max
atgagatcctcattatatatagctatgaaaaattactgcgccaggctaaagctccaagtatgtttttacaatccttcaaaaattttgtttctttgtgtgtgtatggtgatgataacttaattagtgttcatgaatatgtcaagccttactttagt

SEQ ID NO: 78111 - DNA, 347 bp, Glycine max
ggcgaaacttgaagttatggagagatgaggatgagactaaggcgggaccatatgtcttccatcctagaggcctctatccggctcctgtaagcgcagacgagccagccgtcgggtcatcaggatccaaattgggttggttcaaaactataggccttttcgccggtcgagccctcctcgactcccgaatcatcgatatcaacctgaacaaggtcttcctccgacatgtattgggacaaccagtcaagaagaatatagcctcgctcaagctggtcgaccctacccttgcccgatccatggaaagattacaggcgtatgcagaggcaaggaaagagatcgaggcgatgaca

SEQ ID NO: 78112 - DNA, 115 bp, Glycine max
cggctcgaggagcaatgataaatgctgggaatggatatgctagctgatgctgagacatcttcaaaaatggatatcccggtttctgatttcaatcattccaagcatgaatcatgat

SEQ ID NO: 78113 - DNA, 323 bp, Glycine max
  unsure (1)..(323): unsure at all n locations
gggcaatagtgaccagccatggaccctttcaccaattttgaaggtggcagtgcttatggcgcagaagacgatgccacctcattttattcgaccgcgatctctcaggcgcctgtccccagtgggagtggcaatgggcatggcggtggacaccaaaatggccgcaacggagcgagggccgatactgcgacggtggcggctgcgttggaagacatgtcgttggcttctgcgacgggggctctggacgatgagaatgcangccagatccacgccgctgtccgcaatggatacgaggaggactttgaggatgtcgatggtctgttgaa

SEQ ID NO: 78114 - DNA, 332 bp, Glycine max
gtccatatttgtatgcaatggtgcatgatagttcagtgtctacaataccaggtgattttgtcattggtgtcaagttgacaaccataaacaatatgtgtgcatatgggctcaatcctggtatttcaggttctcgtcttttgggcaccattcctcagtccatttcacagcaaactgtttggaatcaaatggcaacagtgagaacaccattgaattttgattctagcaagcagagcttttgtcagttttctattgaccttctcggtggaagaatcttaatggacaaaactggagattggatcacacttatacaaaattcttcaattagtaactta

SEQ ID NO: 78115 - DNA, 374 bp, Glycine max
gtcaaaaggagtgattgggcctcattggtacaagtgtttttaacaaacagcaacagtacagagcattttgatgcatgtaagtggacaaaatcagaaccacattcctgggaattgatcttcccaatagaggtatgtggtcctaataatggttttgaaatgtggagttctgagtgggcaaatcaaacttcatggcatttgagtttccttattgacaatcccaaacagtctacagtttttgatattctcttgggaatctctcaagattttgaaattgctggtaatactcttatgccagctttttctgttccacaagctactgccagatcttctgaaaatgcggaatcctctgcatgatctggaatttgtgttttctt

SEQ ID NO: 78116 - DNA, 72 bp, Glycine max
tctaaggatgcacaagatatggttgaggaatggttcgattgtgttgatgaggaggattcctttgaggaagtt

SEQ ID NO: 78117 - DNA, 276 bp, Glycine max
atttcttacagcttggtcaactcatgtgcgtcctgcaacaactctgttggctgatgggtgtccatatttgtatgcaatggtgcatgatagttcagtgtctacaataccaggtgattttgtcattggtgtcaagttgacaaccataaacaatatgtgtgcatatgggctcaatcctggtatttcaagttctcgtcttttgggcaccattcctcagtccatttcacagcaaactgtttggaatcaaatggcaacagtgagaacaccattgaattttga

SEQ ID NO: 78118 - DNA, 162 bp, Glycine max
tccctttttttaataatcctttcttctctttctttctctctctctctctcttatcccttgacatgtcttctgccggcggcgacagcggcggcagcgctactttcggcgagcctcgccaatacttctgccaccagtgcaaccgcaccgtcttaatttcccctt

SEQ ID NO: 78119 - DNA, 275 bp, Glycine max
aaatggaaaagttccattcaatgcaaaggatgatgaatgctcctgattcaaatgataatattgatttactggtgagcattgatttgttgggtttacaaggagcaggtaaagcttttccaaacaaaattgtttttgatgataagcttgtgttggctaacacacaagaattctttgatggaaattttccagtggattcttggttaccaatttttgtgaattgtctttatcctgtaagtcaattaccttcaaaagcgtgtcgtgtaaatgttacatgt

SEQ ID NO: 78120 - DNA, 175 bp, Glycine max
cctagatgaagaaatccttcgaagcgaagcacaagattgattgacggatgagcatagatgtgttgggatgacaatgagcatgtaaagcttttccaaacaaaatcgcttaagatgataagctggtgttggctaacacacaagaattctttgatggaaatttgccagtggattcttg

SEQ ID NO: 78121 - DNA, 356 bp, Glycine max
ggctacaataccaggtgattttgtcattggtgtcaagttgacaaccataaacaatatgtgtgcatatgggctcaatcctggtatttcaggttctcgtcttttgggcaccattcctcagtccatttcacagcaaactgtttggaatcaaatggcaacagtgagaacaccattgaattttgattctagcaagcagagcttttgtcagttttctattgaccttctcggtggaagaatcttagtggacaaaactggagattggatcacacttatacaaaattctccaattagtaacttattgagagttgctgcttggaagaaaagcttgttaatggtcaaaattgtgatgtctgggaatg

SEQ ID NO: 78122 - DNA, 406 bp, Glycine max
  unsure (1)..(406): unsure at all n locations
ctgcaatcatgtggaacccattctcttccctcccttcggaccattactctcctcacagatacaccaccttcgaagggtattacagcaagttccgactcccatctggcgcttctatagctttgatcatatcgtggattcccggtgtagcgaaagatcgcgattatcctaaatccgatacttgttcttccttttcttccaaaggtgaatccggtgttacgggtgcgccatacctcatcatcttcgcgtacgttacgaaggattgcagacaatggtttctgaaggagtatacgccggagactntatcgcaaggatcaagtgggaaggaccggagagggttcttgatcaagtgggatcaaggggagttcgaatgggatggacaggatgttatgagatgggatattaacta

SEQ ID NO: 78123 - DNA, 327 bp, Glycine max
gttttctattgaccttctcggtggaggaatcttagtggacaaaactggagattggatcacacttatacaaaattctccaattagtaacttgttgagagttgctgcttggaagaaaggctgtttaatggtcaagattgtgatgtctgggaatgcagcagtcaaaaagagtgattgggccttattggtactagtgtttttaacaaacaggaacagttccgaacattttgatgcatgtaagtggacaaaatccgaaccacattcctgggaatttgactttccaatagaggtatgtggtcctaataatggttttgaaatgtggagttctga

SEQ ID NO: 78124 - DNA, 156 bp, Glycine max
gagaaactttaagcagatgtctaatgttttgtgggtggctcctgaggacaaggcgagtttatggtcacaacttcattatgtttcgggtaataatctggaaatgcaagaagcttatcttgtcaatctcgtaaatgtgttacgagaattgtatttgca

SEQ ID NO: 78125 - DNA, 83 bp, Glycine max
tacaatagctatgacgtcacacgcacgcgtacttcggattcggctccggggtgaaccaaaattaaaaccccaaccccaaaacc

SEQ ID NO: 78126 - DNA, 178 bp, Glycine max
aatagaggtatgtggtcctaataatggttttgaaatgtggagttctgagtgggcaaatcaaacttcatggcatttgagtttccttattgacaatcccaaacagtctacagtttttgatattctcttgggaatctctcaagattttgaaattgctggtaatactcttatgccagctttt

SEQ ID NO: 78127 - DNA, 295 bp, Glycine max
attttatccaattgaaattttaaaaatgactgggataaacttaagaattcaattattgaaattgaataagtaaacaatttaattggattggtcgaatggtatcaaaaaaatggagtactaactcccatttcttatttattattgaattaaccgatcaacttgctttgttatcgaacatttctttttgatttcaaaaattttccggaaaaaatttgaatctatttttatatgcgaatcaatcctactacttctggtcctgaagtttctgcgcttgaaaaaaaaaatctgggacgta

SEQ ID NO: 78128 - DNA, 62 bp, Glycine max
gttgcattgaacgaactgatgttgcagaccacttataggaatacacaaacccaatacaatac

SEQ ID NO: 78129 - DNA, 219 bp, Glycine max
ttcatgtttgaagtgctgtggattaaaatggtttgaagtgctttagcccctcaaacccgggtctctcctgaattaacccagtgagacaggaaatcaagagcactgagctgcttgctagggtttgaaatgggttgagtttttttttttctccttcaagtttggttagtttttataaaaaacttaatttgggcttggggaaaaaaaaaaaaaaaaaatcaa

SEQ ID NO: 78130 - DNA, 189 bp, Glycine max
tgataacttaattagtgttcatgaatatgtcaagccttactttagtggttctaaattgaaaagctttctagctagtcataacatcaccattactgatggtattgacaaaactagtgcaactttgcaatttaaaaaggtagcagattgtgattttctcaagagaaactttaagcagatgtctaatgtttt

SEQ ID NO: 78131 - DNA, 246 bp, Glycine max
ctcttatgccagctttgtctgttccacaggctactgccagatcttctgaaaatgcgggatcctctgcatgatctggaatttgagttttctttcgcttggtcgtttgtttaattcaataaaggaaattaggcatgaccctcttgttgagtatgctctgcctatttgcaaatttccacacctttattaattgtcggtatgatctgtggactgtgtgttattttggacacaacttcattatgtttcgtg

SEQ ID NO: 78132 - DNA, 285 bp, Glycine max
ttgaagttaaaagccttagccttccctacaactccaaacacaaagacatcatcatccatggctgcctccgtctccactgtcggagctgtcaacagagctcttttgaacctgaatggttctggagctggagcttcagctcccagttcagccttctttgggaccagcttgaagaaggttattgcctcaagggtccccaacagcaaggtttccggtggaagcttcaagattgttgctgtagaagagaagaaagagattgaagagacccaacagaccgacaaggacaga

SEQ ID NO: 78133 - DNA, 399 bp, Glycine max
tgaccttctcggtggaggaattttagtggacaaaactggagattggatcacacttatacaaaattctccaattagtaacttgttgagagttgctgcttggaagaaaggctgtttaatggtcaagattgtgatgtctgggaatgcagcagtcaaaaggagtgattgggcctcattggtacaagtgtttttaacaaacagcaacagtacagagcattttgatgcatgtaagtggacaaaatcagaaccacattcctgggaattgatcttcccaatagaagtatgtggtcctaataatggttttgaaatgtggagttctgagtgggcaaatcaaacttcatggcatttgaagttccttattgacaatcccaaacagtctacaagttttgatattctcttggg

SEQ ID NO: 78134 - DNA, 196 bp, Glycine max
aaccggttgggatccaaatggcaccaggggggacaccattgaattttgattctagcaagcagagcttttgtcagttttctattgaccttctcgggggaggaatcttagtggacaaaactggggattggatcacacttatacaaaattctccaattagtaacttgttgagagttgcttctttgaaaaaaaggttttt

SEQ ID NO: 78135 - DNA, 116 bp, Glycine max
tttaaatccacaaaatccttttgtgttaaataggtggatgggaaaattgactttcccccagggcactttccgaagtgttaagagaatgcctttttctataaggggaggagcttgtt

SEQ ID NO: 78136 - DNA, 438 bp, Glycine max
  unsure (1)..(438): unsure at all n locations
ccgaggagggcggcgatcggcgatgagcagcggcggcggatcgtcagaggcggcggcggcggcgaaggagaaggagaaggagaaggcgcgtgtgagtcgaacgtcgctgattctgtggcacgcgcaccaagacgacgccgcagcggtgaggaagcttctggaggaggatccatcgcttgtgaaagcgaaggattaccacagccggaccccgctacatgtggcgtcgcttcattgattggttgaaggtgccaattgcttgatccaattccgggctgacgtcaacgctcaagatcgtggaaaaacacttcttggcttatgcagaagggctaaaagactgcatgatgagctttgagtacatgtggctgcgatgcagatggagcatttgacgatctgtctcncatgctacaagtatgagtaccttactgcttcataatgatg

SEQ ID NO: 78137 - DNA, 92 bp, Glycine max
cgagaattgtatttgcacagtccagaggaagctcgccaattgagaaagaaagctctctctcgtattgaatggctgcaaaaagcttatgtgcc

SEQ ID NO: 78138 - DNA, 66 bp, Glycine max
cttagttgtcaagttggaatcaacccatactccatgtgaatggaccggtttggccaataaattact

SEQ ID NO: 78139 - DNA, 464 bp, Glycine max
gttctttcaatgtggagatattttgttggagatctcgtctttgaagtttctaagatgacttctccctacattaaatgtacagtctctttcttcatagcatttggaaatttggctgatgataccatcaattttgaggcttttccccacaagctggtgcagtttggagagattcaggaaaaagttgtattgaaattttcacaagaagaatttcttacagcttggtcaactcaggtgcgtcctgcaacaactctgttggctgatgggtgtccatatttgtatgcaatggtgcatgatagttcagtgtctacaataccaagtgattttgtcattggtgtcaaagtgacaaccataaacaatatgtgtgcatatgggctcaatcctggtatttcaggttctcgtcttttgggcaccattcctcagtccatttcacagcaaactgtttggaatcaaatggccacagtgag

SEQ ID NO: 78140 - DNA, 180 bp, Glycine max
caacaacacaaggccatcatcatggcagctgcttccccaatggcaagccaactcaagtccaccttcactaggactcttgtagctcccaaaggcctttcttgctttttaacactttaacttgtgccttttaaaaaggcatttaactttactggttaaggccttccatcagaaaaacccacc

SEQ ID NO: 78141 - DNA, 265 bp, Glycine max
ggcacaagtttgagtttgaaagtgggtggttgagggacggggagaataaagtggtgctgagtttgccgcgcggggcgaccaattatgagagtgccgtgtttccggagagtgtgtatttgcaatattattcctttagggtggaggttatgtgaccgcctttaaaaaaggtgttagagagatttattgggtcaaggcttgtgccttggattaatatttgatgtttgtgaattcactgtagcattgataccaaaaggtgtgggttgtt

SEQ ID NO: 78142 - DNA, 121 bp, Glycine max
  unsure (1)..(121): unsure at all n locations
atggcctcagccgcatcccccaccactttctctcttcttcactccgccaccccttccttcttcttcaccggcaccttcgncttccccttccccttgcgcgggcagcttaccttcttccttc

SEQ ID NO: 78143 - DNA, 191 bp, Glycine max
ctcgagccgaatcggctcgagctcattgactaagttcggtgactagcattagctactgtaaaaaaaaaaaaaaaaaaaaaaaaaaaataaaaaaaaaaaataaaaaaaaaaaaaaaaaataaaaaaaaaaaaaataaaaaaatctaataaaaaaaaaaaaaaaaaaaaataataaaaaaaaaaaggggggc

SEQ ID NO: 78144 - DNA, 261 bp, Glycine max
aagttgacaaccataaacaatatgtgtgcatatgggctcaatcctggtatttcaggttctcgtcttttgggcaccattcctcagtccatttcacagcaaactgtttggaatcaaatggcaacagtgagaacaccattgaattttgattctagcaagcagagcttttgtcagttttctattgaccttctcggtggaggaatcttagtggacaaaactggagattggatcacacttatacaaaattcttcaattagtaactta

SEQ ID NO: 78145 - DNA, 199 bp, Glycine max
ctcaagcgtattttgttcaaactcacagccggatcagggtggaggccaaaagaatatgatttcaaaagcacctggttcacattctacaaccgattaatctgatatggaagatgctgagacacctacttcgaaagatgccccattgaggcaaagactagatcctccctacaatgaggttgccgcttagatagaaacaaat

SEQ ID NO: 78146 - DNA, 338 bp, Glycine max
aagtagttgagaactaagaaggagaagcaaatggcttcctcaatgatctcttccccagctgttaccactgtcaaccgtgccggtgccggcatggttgctccattcactggcctcaagtccatggctggcttccccaccagaaagaccaacaatgacattacctccattgctagcaacggtggaagagtgcaatgcatgcaagtgtggccaccagttggcaagaagaagtttgagactctttcctaccttgcagaccttgatgatgcacaattggcaaaagaagtagaataccttcttaggaagggatggattccttgcttggaattcgagttggagca

SEQ ID NO: 78147 - DNA, 381 bp, Glycine max
aattgtatttgcacagtccagaggaagctcgccaattgagaaggaaagctctctctcgtattgaatggctgcaaaaagctgatgtgcctaccatagcacagattgaagagttccattcgatgcagaggatgatgaatgctcctgattcaaatgataatattgatttactgttgagcattgatttgttgggtttacaaggagcaagtaaagcttttccaaacaaaattgtttttgatgataagcttgtgttggctaacacacaagaattctttgatggaaattttccagtggattcttggttaccaatttttgtgaattgtctttatcctgtaagtcaattaccttcagaagctgtcgttgtaaatgttacatgtggtagtg

SEQ ID NO: 78148 - DNA, 84 bp, Glycine max
cttaaagacgtggttgatcctgaacaatattactgaattaagtattgtacctttcactttggcttcaagaaaacaaaattgaat

SEQ ID NO: 78149 - DNA, 109 bp, Glycine max
tggaaatcttgctgctgatgctggcgaagccattatttattatgactttggcattatgggggcgataaaaactttcacccgtgagggaccgcttgaactgttctatgct

SEQ ID NO: 78150 - DNA, 217 bp, Glycine max
gagattttcgtgagtgtaatttcattttctaattatttattttgcttcccctaatgagttttacacctttaacatctctatgtacaagacaaaaagcagcattaaacaaaaacatatacaaaacagattacgccgtgcatcaatatctattttctcttcttttcctctttatctctttcaagtgtaacaggagctgctggtatgctgaaccaccatt

SEQ ID NO: 78151 - DNA, 295 bp, Glycine max
ggatttcattgcgatatcatttgtgtcactggatggactgccaccccaatgcaggatgttcaggttacaattgattggtttatttcctctcaggaatgtgttcccaggacctattgtgttttaaatccacaaaatccttttgtgttaaataggtggatgggaaaattgactttcccccagggcactttccgaagtgttaagagaatgcctctttctataaggggaggagcttgtgcaaaaaatgctattctcatgaatatgccaaatgctgttctttcaatgtggagatattttg

SEQ ID NO: 78152 - DNA, 188 bp, Glycine max
ctcgagccgctgagtcttgcaattgaagttgaagtcttgcccttgtctcttcaactccaaacacaagacatcatcatccatggctgcctccgtctccactgtcggagctgtcaacagagctcttttgaacctgaatgggtctggacctggggtttcagctcccagttcattcttctttgggagcagct

SEQ ID NO: 78153 - DNA, 231 bp, Glycine max
ataattctgctctttcttttctctcaacatgagccggaaggagtagttgaatacctcttcaggcctagaaagcttgaagccttgattggatttcttgagaatgaagaaaatgccaatgtgcagatagctgctgctggtttactggctaacctgccaaaatccgaaagagaactcactatgaagttgattgagttgggtggactcgatgcaatcataagcattttgaaaact

SEQ ID NO: 78154 - DNA, 206 bp, Glycine max
  unsure (1)..(206): unsure at all n locations
ctcgagccgaatcggctcgagcaattttgaggcttttccccacaagctggtgcagtttggagagattcaagaaaaagttgtattgaaattttcacaagaagaatttcttacagcttggtcaactcaggtgcgtcctgcaacaactctgttggctgatgggtgtncatatttgtatgcaatggtgcatgatagttcaagtgtctaca

SEQ ID NO: 78155 - DNA, 206 bp, Glycine max
tgaaaagctttctagctagtcataacatcaccattactgatggtattgacaaaactagtgcaactttgcaatttagaaagttagcagattgtgattttctcaagagaaactttaagcagatgtctaatgttttgtgggtggctcctgaggacaaggcgagtttatggtcacaacttcattatgtttcgtgtaataatctggaaatg

SEQ ID NO: 78156 - DNA, 280 bp, Glycine max
gcttctcccaagagaggagagatatgaaactaattgggagtgcttcatccttggactctcagttactatgtcacttgttgaaatttttggttggtgagaaataagagcctgcattgcacccttggaggtattctggggttcttggccagatctttactagcttcaaagctgagtttgctgtaattaagacatctacacaatctcgacctttcctcaaatgtgataagttggatgagacttgcaatcattattgtgttcaagaaatgagaacattttatat

SEQ ID NO: 78157 - DNA, 253 bp, Glycine max
  unsure (1)..(253): unsure at all n locations
ctgcagttgtttgtaatttgattttgccttttaccaataagatttagagctagttgtttgattggctatatcctgtgtatgtacattatgtgattgaggtgtccatcgtatgtaagatctttaagtggaagagcttcatatgtgttcataaaataaatagggtgttgctaggtgcacccagcatttttttaaaaaannaaaattaaaaaaaaaaatttttaaaaaatanaaaaaaaaaaaatatttatttttt

SEQ ID NO: 78158 - DNA, 121 bp, Glycine max
gggacttgacgagaaaggaatggtgagagaaacaagctttgatatttcaagtgctagtgagattgtggctggtttggcccctgccaccatcctaacttgttttccaaaaaaggctgggaaa

SEQ ID NO: 78159 - DNA, 265 bp, Glycine max
gttatttgcaatagcatttttaatgagatgctcattagatatagctatgaaaaattactgcgccaggctaaagctccaagtatgtttttacaatccttcaaaaattttgtttctttgtgtgtgtatggtgatgataacttaattagtgttcatgaatatgtcaagccttactttagtggttctaaattgaaaagctttctagctagtcataacatcaccattactgatggtattgacaaaactagggcaactttgcaatttaaaa

SEQ ID NO: 78160 - DNA, 286 bp, Glycine max
attttgttggagatctcgtctttgaagtttctaagatgacttctccctacattaaatgtacagtctctttcttcatagcatttggaaatttggctgatgataccatcaattttgaggcttttccccacaagctggtgcagtttggagagattcaagaaaaagttgtattgaaattttcacaagaagaatttcttacagcttggtcaactcaagtgcgtcctgcaacaactctgttggctgatggggtgtcatatttgtatgcaatggtgcatgataagtcaatgtc

SEQ ID NO: 78161 - DNA, 122 bp, Glycine max
ctcgagccgctcgagccgaatgggctcgggcaaaaactggtaaatatatcacgagaattgtgtgtgctcaccccagatgacgatcgccaattcccaaggatcgctctctctcaaattccatg

SEQ ID NO: 78162 - DNA, 291 bp, Glycine max
ctcgagccgcaaaattaaaatggatggtggacaaaaaagggtgaatattgcacaagaattgtgatgtccggaacttgcaatacacaaaacgaatagaccgagcctcattgaatcaaagaattcataacctgggggccccccctcttagcatttcgatccccgcgaatttaattacctgcgggtcctttgggggcgaacagtttttccttatagaggtctgtttaactcatgggcaaatctcgattttgcctttttcctgggcaaaattggtttcctctccaatttaccccc

SEQ ID NO: 78163 - DNA, 107 bp, Glycine max
ctcgagccgctcgttgctgtcgtgcataacacaacgtacctggtcgtctctctcgttcatttcctttatcaacatcaaaatttacgtgcccccagattcgtcatgct

SEQ ID NO: 78164 - DNA, 276 bp, Glycine max
  unsure (1)..(276): unsure at all n locations
aaaaaaaaaaaaaaatttattaaaaaaaaaaaaaaaaaaaaaaatcctggaaattttaaaaattcggttttccaactcataaccccctttatctctccccttcctaatctctttcttctctccctccctcctctcccacattcttcccatccattctacactaaattacttcctacctctctcctctatatttcctttnttttgtccctccccccttttctatacccccccccccctcaatacatatctccccccccctcccctcatactctcccc

SEQ ID NO: 78165 - DNA, 352 bp, Glycine max
ggcaacagtgagaacaccattgaattttgattctagcaagcagagcttttgtcagttttctattgaccttctcggtggaggaatcttagtggacaaaactggagattggatcacacttatacaaaattctccaattagtaacttgttgagagttgctgcttggaagaaaggctgtttaatggtcaagattgtgatgtctgggaatgcagcagtcaaaaggagtgattgggcctcattggtacaagtgtttttaacaaacagcaacagtacagagcattttgatgcatgtaagtggacaaaattagaaccacattcctgggaattgatcttaccaataaaagtatgtggtcct

SEQ ID NO: 78166 - DNA, 444 bp, Glycine max
ctcgagccgaatcggctcgagcagtccctctgagttcttccacctcaccaccaagagcggctgggagttgaggaactagatttgtcgtctacacttcatgcgacactatcttccttgattcacgcgctacgttgcgcgcacatactcaacggatgccacaagcctccagagagcaatgcgcacacgagccgaaaagcatacaccacacaccactttctaaaaagaccttcgaggtcatgacacgattactgcgcacgggttagacggagtttgaggacttgttttgggagcataccacatctgcatttttgcattacgaacggatggtgaaagagagagcattcttgggggaagcatgaaaagcttttgtttttggcatgcgtgcatccggtgaacgcagaactgcgtgccggcgattatagagatatacacaccacacgatgt

SEQ ID NO: 78167 - DNA, 98 bp, Glycine max
gtttgttgctcagttggtgatccttgaattgctagacaatgctatttttactgctgggtacaaggctgttctgcacatccactctgtggttgaagaat

SEQ ID NO: 78168 - DNA, 146 bp, Glycine max
ggcggggataagattaaagattcaacaatggcctctgcttctgctactcttctcaagtcatctcctgttcttgacaagtgcgagtgggtcaaaggccagacccttcgccaacctctcgtgagatgtaacccttcctcagcatcagc

SEQ ID NO: 78169 - DNA, 87 bp, Glycine max
tggaatcaaattacaaggaatctgaaaaaagtagtggtggaagaatgagtttaaaggaagtagtggaagaagtgaagctattttact

SEQ ID NO: 78170 - DNA, 424 bp, Glycine max
aattgttgaaaaattccttgatgggaatcccgaggctataacccatgtcactgacaatcaccatgcatatatcgaccatggctgacaagtatcgacaaacgaaaattgatcgaatcatacagagaaaaggtgcaattgaatcattggatggccaaatctaagacaaatgatgtactattatgcatgaaagtgcaaggatcgatcactacaaaggggaacacttatctggagtggcattccaactacaaaatgagctgcgttggtatgatgaactaacgaagattgatttctaaacactacaacatgcactgagacatagattggcatacacgcaaagatatgttaaaaatggaacatgatggaaatcttcaagacgcaccaaaatggataaagggaacagctcaatcaagctctactggagcta

SEQ ID NO: 78171 - DNA, 340 bp, Glycine max
gatttcattgcgatatcatttgtgtcactggatggactgccaccccaatgcaggatgttcaggttacaattgattggtttatttcctctcaggaatgtgttcccaggacctattgtgttttaaatccacaaaatccttttgtgttaaataggtggatgggaaaattgactttcccccagggcacttcccgaagtgttaagagaatgcctctttctatagggggaggagctggtgcaaagaatgctattctcatgaatatgccaaatgctgttctttcaatgtggagatattttgttggagatctcgtctttgaaagttctaagatgacttcttcctacat

SEQ ID NO: 78172 - DNA, 426 bp, Glycine max
aattgattggtttatttcctctcaggaatgtgttcccaggacctattgtgttttaaatccacaaaatccttttgtgttaaataggtggatgggaaaattgactttcccccagggcacttcccgaagtgttaagagaatgcctctttctatagggggaggagctggtgcaaagaatgctattctcatgaatatgccaaatgctgttctttcaatgtggagatattttgttggagatctcgtctttgaagtttctaagatgacttctccctacattaaatgtacagtctctttcttcatagcatttggaaatttggctgatgataccatcaattttgaggcttttccccacaagctggtgcagtttggagagattcaagaaaaagttgtattgaaattttcacaagaggaatttcttacagcttggtc

SEQ ID NO: 78173 - DNA, 441 bp, Glycine max
  unsure (1)..(441): unsure at all n locations
gtgctgcatgtatagtcaaaggtgtctccacttcccttcttaccattcattatatgataacgcgatgatcaagttgtcgtgttggtttgataccaaaacaagcatagttgtaatattttttcagtatcttttaactgtgtcacctcattttatgggataaggttttgttgtttgtttattttcttcgtacctttcaataataatggtttaaaatagatacaaaccgtaattaatgataacaaactcttaaaattactaggaatctcctaattgtttgtgcctaaaatctcctcatatgactngattgttatttcctaaatatctacaagtatataattacatgaaattcacctaatataatttgaaatgaattgaatgtcattgtaattctgggtgttaacgtgcagaaccaagccatgaatgaatctatttctgagcttc

SEQ ID NO: 78174 - DNA, 163 bp, Glycine max
tgccgcgtccgtaagctcggaattcggtcgggttccttaatgtcaaaatttcaccatttgaccgaattctgatcgcccaaatgacatggtgcgtttaatggctgtattttgtgaatatttgacattaaggaactgaacttgggttttaaaagggtacactggt

SEQ ID NO: 78175 - DNA, 150 bp, Glycine max
aaacgaaaaaaatcataaaaaaaaaaaaaaaaaaaaaaaaaggggagggctgacaaaaacgtggagagaaaaacaacccaaaaattaattaacggaccggaacctgcaggcataccaactttccatataatgagtcaaattacagcttgg

SEQ ID NO: 78176 - DNA, 297 bp, Glycine max
gcttgatgccatgcaacggatactgcaattaaagggttgggctggtctgtacaaggggataatggcgtccactgacaaagctgcacctgctggcgctgagacattgggagcttatgaattgacatcacattggttagagtacactaacaactgattaccatccactttgtactaattactatagatcatatattgtcaagaaataccaattgcatcccactgagtatatcgaagaaagtgagagggacatgccaaatagccgttatgattgcggacgacgatgaaaaacgacttgct

SEQ ID NO: 78177 - DNA, 415 bp, Glycine max
atcagaaccacattcctgggaattgatcttcccaatagaggtatgtggtcctaataatggttttgaaatgtggagttctgagtgggcaaatcaaacttcatggcatttgagtttccttattgacaatcccaaacagtctacagtttttgatattctcttgggaatctctcaagattttgaaattgctggtaatactcttatgccagctttttctgttccacaggctactgccagatcttctgaaaatgcggaatcctctgcatgatctggaatttgtgttttctttcgcttgttcgtttgtttaattcaataaaggaaattaggcatgaccctcttgttgagtatgctctgcctatttgaaaatttccacaccttttttaattgtcgtaatgatgtgtgaagtgtgtgttatttt

SEQ ID NO: 78178 - DNA, 455 bp, Glycine max
  unsure (1)..(455): unsure at all n locations
agctcgaaattcggttcgagcacaaactgcaagatgacggtcgtccacatagtctcgttctcggtcaaggacggctccaagctgcagcctctgaccgacgctctgcgggcactgcaatccagctgcaagaggcccgatggaacatcctacattcgatcgctgaagggcgggaggcagaggagtaacgaaggcaaggacaaaggcatgcaggtcacgttcgtcatggaaatggagaacgacgaggacttgcagtactatctctggaaagaccccgctcatgaagagttcaagaaagccgccggtggcgagtttggcgtgtcggacgtggtcgcgcttgatttcacggacggtgaattcaactttgcgtagccatcctgcgatgcgagacatcggtttgcgcgcttggtcangtatacgagccgcttgatgtangtatgcattaatgtacgtgtatt

SEQ ID NO: 78179 - DNA, 264 bp, Glycine max
ctgatggtcatttgccgcagttaagctcgccggataccgttattccggtgctgctcaaacacattcaacttgatattgaggcaagaaggtagtagatatagacgtgacgtgactccgttagaaaaagagaatctatccctgtgtgtggttggggggtgtttttttttttttttttggattcgcagggggaaataacaactgaaatggggggaataaggtcccttcaactggttctgtatctggggttggtcgattcgaacttgg

SEQ ID NO: 78180 - DNA, 301 bp, Glycine max
cgacaagaagactgcgacctctcacaccagtgcacgcggttacacaggagatcagggagcccagggaatccggagcagtgacgacattcgaagttggtccctaccaagtccctcaactgtggactttcttcagcaccatccatcacaaccagcaacaaagtcatcgagcaaacgtagtgacggttctcgttctcagtgatcatccatcgcatttacacgacccagaaggcaacgctacttgaccgacacatacttgcatcacggaactacgcgcctcgagataatcccgcaacgccagata

SEQ ID NO: 78181 - DNA, 193 bp, Glycine max
gtgcaacttaaccagggatacaaaaccctacttgcttactaaactgccagttcaaaagatccctttggttttgtagtcctggattttgacgtgtctaggttgtaatgatatcccttaaatcctacgtgtatgtgttgtattgatagtgattgacattttactgagccgtaattacaagcacagcgatttcatg

SEQ ID NO: 78182 - DNA, 168 bp, Glycine max
ccttccttaacctcggaattcggttcgagggggagtttttgggaaggttgtcttacgtggctcataacgttaatcagccccaaaaaaaggtttggtgggagggaatttttcctttggttttaaaatttgcttttaaatgggaaaaagtttcctttccaaaaccccatt

SEQ ID NO: 78183 - DNA, 111 bp, Glycine max
attcaataaaggaaattaggcatgaccctcttgttgagtatgctctgcctatttgaaaatttccacacctcttttaattgtcgtaatgatgtgtgaagtgtgtgttatttt

SEQ ID NO: 78184 - DNA, 299 bp, Glycine max
gacaaataatttgctatgtgtacaatactaaacaaaaacaaaacagatccaccaataaggagggtggtttttatcttttttcgaaaaacggaaataatttctacagaaatgacgaggagaaatatgaattaagggttgttaaacaacctctcgtcaaccttctttttaattctaaacgatggcatcgtgcctttcgatatataaaaaatcatcgattacgaaatgacattataaatgaaatttcaaaatctttttttatatacatgtcacagtgattgaaaagaaagaatatctgttat

SEQ ID NO: 78185 - DNA, 161 bp, Glycine max
ggggggtggttgggaaaaagtggaatggcttccattttattccggaattaacaagcgtaccaaaccattttattttcctaagaattaaccagaaaggccttccaattgttgaacaaggccccaggcttttgattgttgcttttattggattcaaaacttta

SEQ ID NO: 78186 - DNA, 399 bp, Glycine max
gggcctcattggtacaagtgtttttaacaaacagcaacagtacagagcattttgatgcatgtaagtggacaaaatcagaaccacattcctgggaattgatcttcccaatagaggtatgtggtcctaataatggttttgaaatgtggagttctgagtgggcaaatcaaacttcatggcatttgagtttccttattgacaatcccaaacagtctacagtttttgatattctcttgggaatctctcaagattttgaaattgctggtaatactcttatgccagctttttctgttccacaggctactgccagatcttctgaaaatgcggaatcctctgcatgatctggaatttgtgttttctttcgcttgttcgtttgtttaattcaataaaggaaattaagca

SEQ ID NO: 78187 - DNA, 355 bp, Glycine max
ctcgagccgttttagcgctgcttcttctagatttaacgaagatgggtaaggaaaaggttcacatcagtattgtggtcattggccatgtcgactctgggaaatccactaccactggtcacctgatttacaagcttggaggcattgacaagcgtgttattgagaggtttgagaaggaagctgctgagatgaacaagaagtctttcaagtatgcctgggtgctggacaaacttaaagctgagcgtgaaagaggaatcaccattgatattgctttgtggaagtttgaacaacaaagtattattgcacaattattgatgcgcctggaccataaggattcattaagaatatgattactggg

SEQ ID NO: 78188 - DNA, 351 bp, Glycine max
caagaagcttatcttgtcaatctcgtaaatgtgttacgagaattgtatttgcacagtccagaggaagctcgccaattgagaaggaaagctctctctcgtattgaatggctgcaaaaagctgatgtgcctaccatagcacagattgaagagttccattcgatgcagaggatgatgaatgctcctgattcaaatgataatattgatttactgttgagcattgatttgttgggtttacaaggagcaggtaaagcttttccaaacaaaattgtttttgatgataagcttgtgttggctaacacacaagaattctttgatggaaattttccagtggattcttggttaccaattttt

SEQ ID NO: 78189 - DNA, 275 bp, Glycine max
  unsure (1)..(275): unsure at all n locations
attaaaagtagtagtagccaaaggcattgccatcctccatcttcatctttgattaatgctgcttcagcttcaaccttaacagtgaagtaaaaagctttgacagaaactcaggttctgaaatataggggtttagaattatgtaagcaacccaagataagcaaaaggaagaaaaatggttgctttgttttgtctctgttcgttgtaaaatgctttctttagtaaatgggaagttcctttgtttctaaaaaaaaaaaaccaaaaataattctttnggg

SEQ ID NO: 78190 - DNA, 359 bp, Glycine max
aaattgaaaagctttctagctggtcataacatcaccattactgatggtattgacaaaactggtgcaactttgcaatttagaaagttagcagattgtgattttctcaagagaaactttaagcagatgtctaatggtttgtgggtggcttctgaagacaaggcgagtttatgggcacaacttcattatgtttcgtgtaataatctggaaatgcaagaagcttatcttgtcaatctcgtaaatgtgttacgagaattgtatttgcacaatccaaaagaagctcgccaattgagaaagaaagctctttctcgtattgaatggctgcaaaaagcttatgtgcctaccatagcacaaattgaaaa

SEQ ID NO: 78191 - DNA, 254 bp, Glycine max
aaacagtctttgtggtggtgatgaaaaattgatgcgtgaaaggacgcacctgctgttggcttgttgttcaaggatggcaatttgtaagaaagatgtttggagagttgaatgtggaatcccttctggatttccgctcacagttatttgcaatagcatttttaatgagatgctcattagatatagctatgaaaaattactgcgccaggcttaagctccaagtattgttttacaatccttcacaaaattttgttctt

SEQ ID NO: 78192 - DNA, 108 bp, Glycine max
aagagtctcaaatatctggttgatgagtgtccttttgcatttgtgaactagtatgtagtattttattcacttaaataaagcgcattactatgtgcaatgagtgtgttt

SEQ ID NO: 78193 - DNA, 85 bp, Glycine max
ccctaagcatcaacggaggggaaaagattggagttgttggtccaacaggaagtggaaaatcaactttaattcaagttttcttcag

SEQ ID NO: 78194 - DNA, 274 bp, Glycine max
gttacatttccgaataccattgtgcaaatggaacccaacattgattcaaagtttcaacttttggagtccacttcccattgggattttggtcaaagggaaaaacttgcaatgggttaaggttatttaacatttgcctcttgtggctttgcattaaagttcccttccacttcatttgttggattttggtttgcaaaaaaccaaagggttatttgtgggtttttttgaaaggatgtttaacgttgttattaacgttaatcagccccaaaagaaaaat

SEQ ID NO: 78195 - DNA, 186 bp, Glycine max
  unsure (1)..(186): unsure at all n locations
agctcgaaattcggttcgagcatcccaatacttggctggggacgcctnaaaacgtttccagaactgggggcttatacatgaccgggagctcttgtgcactcatagacgaagtgcggctgagacttatatctacagacgcaaatcacttggctaaagactggtggaacgtttcagcaggaccacgaa

SEQ ID NO: 78196 - DNA, 333 bp, Glycine max
gaagatatcaacaagcataccgagccttcaatcgtatcaggaacacggagctcatctctgctcgagagctcttctacgctcattgccaaattgtggctgagactgagatcttcggtggcaagtcacttggcagaagagtgttggagcttttcacagtaccacgaatcaagccgtgcgactgtctcttcctctattattgttatcgctcaacagttctctgggatcaacatcatggcgttttatagctcaaccatctttcaagaggcaagttacagcgtgaaacagtcgctgttggcttctttcggctttggactcgtcacattcgtcttcgca

SEQ ID NO: 78197 - DNA, 241 bp, Glycine max
gcaagctaggactcaaagagaaacttacaatggctctcgagtggagtaaattatacaaaacagaccaaaaaactggatttactttgacattgtaataacttttccatcaggtagaataactatgcaatcaatattgcgcgtgggatccactttaaggaatactaaagccgggattaaaatacattctccacacctgaggcctacgattttgacttatagtgggttattatatacgtgaaag

SEQ ID NO: 78198 - DNA, 351 bp, Glycine max
  unsure (1)..(351): unsure at all n locations
caccattgaattttgattctagcaagcagagctnttgtcagttttctattgaccttctcggtggaagaatcttagtggacaaaactggagattggatcacacttatacaaaattctccaattagtaacttgttgagagttgctgcttggaagaaaggctgtttaatggtcaagattgtgatgtctgggaatgcaacattcaaaaagagtgattgggcctcattggtacaaagtgttttaacatacagctacagtacagatcattttgatgcatgttagtggacaaaatcagaaccacattcctgggatttgatctttccaaataaaagtatgtggtccctaatatggtttt

SEQ ID NO: 78199 - DNA, 345 bp, Glycine max
atggacaaaaccatactccagggaatatgcagccttcccagaacctgtctaactcggatgtgttacgagaattgtatttgcacagtccaaaggaagctcgccaattgagaaggaaagctctctctcgtattgaatggctgcaaaaagctgatgtgcctaccatagcacagatagaagagttccattcgatgcagaggatgatgaatgctcctgattcaaatgataatattgatttactgttgagcattgatttgttgggtttacaaagagcaggtaaagcttttccaaacaaaattggttttgatgataaacttgtgttggctaacacacaagaattctttgatg

SEQ ID NO: 78200 - DNA, 328 bp, Glycine max
  unsure (1)..(328): unsure at all n locations
aaagattttatccaattgaaattttaaaaatgactgggataaacttaagaattcaattattgaaattgaataagtaaacaatttaattggattggtcgaatggtatcaaaaaaatggagtactaactcccatttcttatttattattgaattaaccgatcaacttgctttgttatcgaacatttctttttgatttcaaaaattttccggaaaaaatttgaatctatttttatatgcgaatcaatcctactacttctggtcctgaggtttctgcgcttgaaaaaaaaaataattatanaattttttattattttttttattatttttaa

SEQ ID NO: 78201 - DNA, 243 bp, Glycine max
ataaaaaaaaatttattatataaaataaataaaaatttaaaaaaaaataaatttaaaaaaaaaaaaaataaaattaattaaaataaaaataaaataaaaataggggcggccttcttttattaatctcttcaccccggaatttatttccgaaccggtccttgtaggcttaccagttttccttttagtaaattttattaaaacttggcttattaatggtcattgtttttccctgttaaaaattgt

SEQ ID NO: 78202 - DNA, 131 bp, Glycine max
gtgggcaaatcaaacttcatggcatttgagtttccttattgacaatcccaaacagtctacaaggttttgatattctcttgggaatctctcaagattttgaaattgctggtgatactcttatgccagctttt

SEQ ID NO: 78203 - DNA, 468 bp, Glycine max
caacagtacagagcattttgatgcatgttagtggacaaaatcagaaccacattcctgggaattgatcttcccaatagaggtatgtggtcctaataatggttttgaaatgtggagttctgagtgggcaaatcaaacttcatggcatttgagtttccttattgacaatcccaaacagtctacagtttttgatattctcttgggaatctctcaagattttgaaattgctggtaatactcttatgccagctttttttgttcacaagctactggcagattttctgaaaatgccgaaatcgtctcatgatctggaattttcgttttctttcgcttggtcgtttgttaattcaattaaggaatttttgctttcccttttgtttagtttgttttgctttttaaaatttcacacccttttaattgtctattatttgtgaagtgggggtttttttttatttttatttttaattttttt

SEQ ID NO: 78204 - DNA, 325 bp, Glycine max
gttgaatgtggaatcccttctggatttccgctcacagttatttgcaatagcatttttaatgagatgctcattagatatagctatgaaaaattactgcgccaggctaaagctccaagtatgtttttacaatccttcaaaaattttgtttctttgtgtgtgtatggtgatgataacttaattagtgttcatgaatatgtcaagccttactttagtggttctaaattgaaaagctttctagctagtcataacatcaccattactgatggtattgacaaaactagtgcaactttgcaatttagaaagttagcagattgtgattttctca

SEQ ID NO: 78205 - DNA, 329 bp, Glycine max
  unsure (1)..(329): unsure at all n locations
ggcaacagtgagttcaccattgaattttgattctagcaagcagagcttttgtcagttttctattgaccttctcggtggaggaatcttagtggacaaaactggagattggatcacacttatacaaaattctccaattagtaacttattgagagttgctgcttggaagaaaggctagttaatggtcaagattgtgatgtctgggaatgcaacagtcaaaaggagtgattgggcctcattggtacaagtgtttttaacaaacagcaacagtatagagcantttgatgcatgtaagtggacaaaatcaagaccacatttcctggaattgatct

SEQ ID NO: 78206 - DNA, 419 bp, Glycine max
gcagcagtcaaaaggagtgattgggcctcattggtacaagtgtttttaacaaacagcaacagtacagagcattttgatgcatgtaagtggacaaaatcagaaccacattcctgggaattgatcttcccaatagaggtatgtggtcctaataatggttttgaaatgtggagttctgagtgggcaaatcaaacttcatggcatttgagtttccttattgacaatcccaaacagtctacagtttttgatattctcttgggaatctctcaagaatttgaaattgctggtaatactcttatgccaactttttctgttccacaggctactgccagattctttgaaaatgcggaatcctctgcatgatctggaatttgtggtttcttttcgcttggtccgtttagttaattcaaataaaggaaatt

SEQ ID NO: 78207 - DNA, 162 bp, Glycine max
atcagatgctggatccagaatactcggaagctcaacaagctcaacattcagcttcaaagtcaccagctgccattttatcagattctgagagtggagatgccaagttaaatacttcatcaaaggttactgatcatgagacgaacaaaacaatttctgagcacc

SEQ ID NO: 78208 - DNA, 378 bp, Glycine max
  unsure (1)..(378): unsure at all n locations
cgagaattgtatttgcacagtccagaggaagctcgccaattgagaaggaaagctctctctcgtattgaatggctgcaaaaagctgatgtgcctaccatagcacagattgaagagttccattcgatgcagaggatgatgaatgctcctgattcaaatgataatattgatttactgttgagcattgatttgttgggtttacaaggagcaggtaaagcttttccaaacaaaattgtttttgatgataagcttgtgttggctaacacacaagaattctttgatggaaattttccagtggattcttggttaccaatttttgagaattagtcttatcctgtaagtcaattaccttcagaagctgtncgtgtaaatgttacatgt

SEQ ID NO: 78209 - DNA, 258 bp, Glycine max
cgcgtcgctccgcaccagtttcaccgcacgaatatcttgttgtttggagcgatccgagaaaaactctgttaacatgttggtttaccaggacctccttacaggtgatgagcttctctctgacttctttcgttacaaggaaattgagaatggaatgctgtgggaagttgaggggaagtgggttgttaaaggagcagttgatgttgacattggtgcaaacccttctgctgagggtggaagagaagatgagggattttgtga

SEQ ID NO: 78210 - DNA, 164 bp, Glycine max
accgcatatcgtcatttacccatagctcaaatagctcttcaagcaaagtaccatcaaaatggccggagcacaagtcatcgtcgcataccctcgcaaggagggcttcaagttcaacaaggagtactatctgtcaacgcacatgccacttgccgcaaagcactgga

SEQ ID NO: 78211 - DNA, 368 bp, Glycine max
gaaaaattgatgcgtgaaagagacgcacctgctgttggcttgttgttcaagagatggcaatttgtaagaaagatgtttggagagttgaatgtggaatcccttctggatttccgctcacagttatttgcaatagcatttttaatgagatgctcattagatatagctatgaaaaattactgcgccaggctaaagcaccaagtatgtttttacaatccttcaaaaattttgtttctttgtgtgtgtatggtgatgataacttaattagtgttcatgaatatgtcaagccttactttagtggttctaaattgaaaagctttctagctagtcataacatcaccattactgatggtattgacaaaactagtgca

SEQ ID NO: 78212 - DNA, 194 bp, Glycine max
ctcgttaatgctaataactagtttaccttaagcacaaattgttcagcacttgaactctctattctagccaccaacaaagagcaccaaagggactataaagcactaagctagtgtgagcttatgtagaggttgttagctatgttgatcttatttcaaggtttgatcataaatcatgatatacatctttgagcttt

SEQ ID NO: 78213 - DNA, 305 bp, Glycine max
gtttgttgttgtaactcgttcttcttctttagttgttctgagtttgagtttgttttttctctcacctgaaaatgtcttgctgcggtggtaactgtggttgctgaagctcctgcaagtgcggcaacggctgcggaggctgcaagatgtacccagacttgagctacactgagtcaaccaccaccgagaccttggtcatgggagtggcacctgttaaggctcaatttgagggtgctgaaatgggtgtgcccgcttagaacgatggctgcaaatgtggaccaaactgctcctgcaacccctgcacttgc

SEQ ID NO: 78214 - DNA, 169 bp, Glycine max
gttggcttacacacaagaattctttgatggaaattttccagtggattcttggttaccaatttttgtgaattgtctttatcctgtaagtcaattaccttcagaagctgtcgttgtaaatgttacatgtggtagtggacgtggtggcttacccaccattgtttggactatt

SEQ ID NO: 78215 - DNA, 390 bp, Glycine max
  unsure (1)..(390): unsure at all n locations
ggagattggatcacacttatacaaaattctccaattagtaacttgttgagagttgctgcttggaagaaaggctgtttaatggtcaagattgtgatgtctgggaatgcagcagtcaaaaggagtgattgggcctcattggtacaagtgtttttaacaaacagcaacagtacagagcattttgatgcatgtaagtggacaaaatcagaaccacattcctgggaattgatcttcccaatagaggtatgtggtcctaataatggttttgaaatgtggagttctgagtgggcaaatcaaacttcatggcatttgagttttcttattgacaatcccaaacagtctacagnttttgatattctcttgagaatctctcaagattttgaaattgctggt

SEQ ID NO: 78216 - DNA, 163 bp, Glycine max
ctcgagccgggttcttaaagctgatttctatgatttatcgaaacaaatggtccaaatttgtgacaagcgttcattttcctgcataattgagcacaagcattgatgcatgttctggggcggcgcgattcttatataacttcacacccgaaattaaattccgatc

SEQ ID NO: 78217 - DNA, 251 bp, Glycine max
atcatgtggaagttcagtttagatgtcttgtatattctttagagttttcatgctttatagtgaaatttgtcagagacttgtatagtaacatgtttatatatagctttgaactcatttttatgatcatgaatttcataatgtacaagacattacacaaatatttcctttgcttctctaataaaaaaaaaaaataattaaaaaataaaaataaatataaattataaaaataaaaatattaataattaaaataa

SEQ ID NO: 78218 - DNA, 373 bp, Glycine max
ggcaacagtgagaacaccattgaattttgattctagcaagcagagcttttgtcagttttctattgaccttctcggtggaggaatcttagtggacaaaactggagattggatcacacttatacaaaattctccaattagtaacttgttgagagttgctgcttggaagaaaggctgtttaatggtcaagattgtgatgtctgggaatgcagcagtcaaaaggagtgattgggcctcattggtacaagtgtttttaacaaacagcaacagtacagagcattttgatgcatgtaagtggacaaaatcagaaccacattcctaggaatagatcttcccaataaaggtatgtggtcctaataatggttttgaaatgtgg

SEQ ID NO: 78219 - DNA, 296 bp, Glycine max
gtttagttttctgggattggatgaagaatgttgagaattgaattgtggaatatattataggctctagaattatttttttccatgtaaatgaatttctcgtcgtttttatgaaggagagttccactcattcatggcttattcctcttcttgttgtcgtctatcctctctcacacacaagagattttgtttgtgtatagttgctgcttcctagcttcggcaacaagtggctgataagttgatggtgcagtctctttggagcaatggtgattccaatagcagtgtcgctggtagtgatt

SEQ ID NO: 78220 - DNA, 342 bp, Glycine max
  unsure (1)..(342): unsure at all n locations
gtgtttttaacaaacagcaacagtacagagcattttgatgcatgtaagtggacaaaatcagaaccacattcctgggaattgatcttcccaatagaggtatgtggtcctaataatggttttgaaatgtggagttctgagtgggcaaatcaaacttcatggcatttgagtttccttattgacaatcccaaacagtctacagtttttgatattctcttgggaatctctcaagattttgaaattgctggtaatactcttatgccagctttttcttgtccacatgctactgccagatcttctgaaaatgcggaattctctgcatgatctggaanttgtgttttcttt

SEQ ID NO: 78221 - DNA, 379 bp, Glycine max
gaaaaattgatgcgtgaaaagacgcacctgctgttggcttgttgttcaagagattgcaatttgtaagaaagatgtttggagagttgaatgtggaatcccttctggatttccgctcacagttatttgcaatagcatttttaatgagatgctcattagatatagctatgaaaaattactgcgccaggctaaagctccaagtatgtttttacaatccttcaaaaattttgtttctttgtgtgtgtatggtgatgataacttaattagtgttcatgaatatgtcaagccttactttagtggttctaaattgaaaagctttctagctagtcataacatcaccattactgatggtattgacaaaactagtgcaactttgcaattt

SEQ ID NO: 78222 - DNA, 296 bp, Glycine max
  unsure (1)..(296): unsure at all n locations
ctttcttcgccccgtccaacttcgctttccagaagcttggccctcgcatcaacgccttcctcttcagcaagtacggccagaagtacctcaaggctctgcttgagtaccaccttgtccctgacaacaccctctactcagatgccttttacagctcggatagcaagagccaggaaggtgtgcccaaaggatactttcacgttgaccttcctaccttgctcgaagaccgcagcctcagcattgacatcgnccgctacagtggcttcatcagcatcaagatcaatggatttggtcgcgtc

SEQ ID NO: 78223 - DNA, 346 bp, Glycine max
ctgccaccccaatgcaagatgttcaggttacaattgattggtttatttcctctcaagaatgtgttcccaggacctattgtgttttaaatccacaaaatccttttgtgttaaataggtggatgggaaaattgacttttccccagagcacttcccgaagtgttaagagaatgcctctttctataaggggaggagctggtgcaaagaatgctattctcatgaatatgccaaatgctgttctttcaatgtggagatattttgttggaaatctcgtctttgaaatttctaagatgacttctccctacattaaatgtacagtctctttcttcatagcatttggaaatttggc

SEQ ID NO: 78224 - DNA, 271 bp, Glycine max
caccgcacgaatatcttgttgtttggagcgatccgagaaaaactctgtgaacatgttggtttaccaggacctccttacaagtgatgagcttctctctgactccttccgttacaaggaaattgagaatggaatgctgtgggaagttgaagggaagtgggttgttaaaagagcagttgatgttgacattggtgcatacccttctgctgagggtggaggagtagatgaaggagttgattgatcagctgtttaggttgttgacattgttgacaca

SEQ ID NO: 78225 - DNA, 311 bp, Glycine max
gtttttacaatccttcaaaaattttgtttctttgtgtgtgtatggtgatgataacttaattagtgttcatgaatatgtcaagccttactttagtggttctaaattgaaaagctttctagctagtcataacatcaccattactgatggtattgacaaaactagtgcaactttgcaatttaaaaagttagcagattgtgattttctcaagagaaactttaagcagatgtctaatgttttgtgggtggctcctgaggacaaggcgagtttatggtcacaacttcattatgtttcgtgtaataatctggaaatgc

SEQ ID NO: 78226 - DNA, 259 bp, Glycine max
ctcgagccgctcgagccgattcggctcgagcgccggcagcctgtccccctccctctgctccggcgacatgctcctcgacgcactcgtcgcctgttccggggtgactctcaaagccgtcgccaccgcactcgacatccccataatctccgggacggtgagggctgaaggcgatttggattttaaggggacgttgggggtgaagtaaaatgttgcggtggggatgagtgggattcggttggagtttgatttggtatttggg

SEQ ID NO: 78227 - DNA, 296 bp, Glycine max
gttgaatgtggaatcccttctggatttccgctcacagttatttgcaatagcatttttaatgagatgctcattagatatagctatgaaaaattactgcgccaggcttaagctccaagtatgtttttacaatccttcaaaaattttgtttctttgtgtgtgtatggtgatgataacttaattagtgttcatgaatatgtcaagccttactttaagggttctaaattgaaaagctttctagctagtcataacatcaccattactgatggtattgacaaaactagtgcaactttgcaatt

SEQ ID NO: 78228 - DNA, 335 bp, Glycine max
ggcttttccccacaagctggtgcagtttggagagattcaagaaaaagttgtattgaaattttcacaagaggaatttcttacagcttggtcaactcaggtgcgtcctgcaacaactctgttggctgatgggtgtccatatttgtatgcaatggtgcatgatagttcagtgtctacaataccaggtgattttgtcattggtgtcaagttgacaaccataaacaatatgtgtgcatatgggctcaatcctggtatttcaagttctcgtcttttgggcaccattcctcagtccatttcacagcaaactgtttggaatcaaatggcaacagtgagaacac

SEQ ID NO: 78229 - DNA, 215 bp, Glycine max
ataattatgaggctcactttaattactctgaaagaatggctaaataagtgtacccaaaaataaaggacccatatatcattgtatagtcgtatacatggatcttacattattgttctcacttctcatttgattccaatgtcatagatcggtctttatcgtgggacagtaggaggaatagtcatgtagttgagaatgcttcaacgttcattttcaaa

SEQ ID NO: 78230 - DNA, 393 bp, Glycine max
gaaaagctttctagctagtcataacatcaccattactgatggtgttgacaaaactagtgcaactttgcaatttagaaagttagcagattgtgattttctcaagagaaactttaagcagatgtctaatgttttgtgggtggctcctgaggacaaggcgagtttatggtcacaacttcattatgtttcgtgtaataatctggaaatgcaagaagcttatcttgtcaatctcgtaaatgtgttacgagaattgtatttgcacagtccagaggaagctcgccaattgagaaggaaagctctctctcgtatagaatggctgcaaaaagctgatgtgcctaccatagcacagattgaagagtttcattcgatgcagaggatgattgaattgctctgatt

SEQ ID NO: 78231 - DNA, 162 bp, Glycine max
gttggctaacacacaagaattctttggtggaaattttccagtggattcttggttaccaatttttgggaattggctttatcctgtaaggcaattaccttcaaaagctgtcgttgtaaaagttacattttgtagtggacctggtggtttacccaccactgcttg

SEQ ID NO: 78232 - DNA, 129 bp, Glycine max
tgaaaagcttcttagctggtcataacatcaccattactgatggttttgacaaaactagtgcaactttgcaatttagaaagttggcagattgtgattttctcaagagaaactttaagcagatgtctaatg

SEQ ID NO: 78233 - DNA, 381 bp, Glycine max
gggacctaagaaaatatttatctgggttttttgacactacagtggggaacaaaagagagacacgcagttatgttgaaatttctgagtcactcggggttgaaaaaccatcagatattttatttgtcactgatgtatatcaagaagccacagctgcaacggctgcaggtatgaatgtttttcttaatccatcatttaatttttttaagttaaattttatccattatctcttaaacttgttacgttatcaataaacttagtccatgtctggcataggttattttttgaaaaataatctttttattcaaaacttctttttaaagtaactaaaccatatacttaaaagtgtcacatgattatagtaactgagtcttttccatagca

SEQ ID NO: 78234 - DNA, 235 bp, Glycine max
ctccagccctcttttttaatattaaaataatattttttagggtccaattgttaaatgggggtccccttttattataaaacttcccttccattttggtcccctaggaaggccaagattttccggcaattgcaagggctttttatttctttatttttcaaaaaaacaaaatttttttattccaaaaaaacaaagaaaattttgggggttttatttccccacatttattcctaatttc

SEQ ID NO: 78235 - DNA, 175 bp, Glycine max
ctcgagccgctcgagccgattcggctcgagaccaacattccaatgcctcctccataaccatattggagaataagataaatacaacaaaacctctagatggaagaagcacacgtgcacgtattggaagggtatgtatattggggggacacgcccaccctaaaaagaggctatgggg

SEQ ID NO: 78236 - DNA, 260 bp, Glycine max
ctgacactgacatatatgtcacggcctggcgctatacattccattcaatgccataataactccagcgcttatctgttggctgcacaaaaatgtatagggcaatattatgaatcatatattcagtaacaccattgtgcaattgttagaaagcaatagtccattcatttatgattggttgatattctatgaaggcaattatctatcttggataaccaagtgattgaacacaagcgttaatatgcttaagttaagggtgaatc

SEQ ID NO: 78237 - DNA, 389 bp, Glycine max
tggaaatgcaagaagcttatcttgtcaatctcgtaaatgtgttacgagaattgtatttgcacagtccacaggaagctcgccaattgagaaagaaagctctctctcgtattgaatggctgcaaaaagcttgtgtgcctaccatagcacaaattgaagaggtccattctatgcaaaggatgatgaatgctcctgattcaaatgataatattgatttactgttgagcattgatttggtgggtttacaaggagcaagttaagcttttccaaacaaaattgtttttgatgataagcttgtgttggctaacacacaagaattctttgatggaaattttccagaggattcttggttaccaatttttgcgaattgtctttatcctggaagtcaatta

SEQ ID NO: 78238 - DNA, 184 bp, Glycine max
aaaaaaaaaaaaattaaataaaaaaaaaaaaaaaaaaaaaaaaaaaaaaaaaaaaaaaaaaagggcgggcccccactaaagaactctgctaccccggaattaaatactgaccgggaccttcaagcgtaccaacttttcctataaagagtcggattaaaaattggcggaaaaaaagacaaaaata

SEQ ID NO: 78239 - DNA, 90 bp, Glycine max
accgaattcactattacatccacacctccgcaataaaataaaaagggaggttatctccctcagtgcctcgctcatggaagagctctccgc

SEQ ID NO: 78240 - DNA, 174 bp, Glycine max
gcctgaagctgtcttcaatttcaatggcggcgccaaaaaatcgaggccttgaacggactcctttccaactggtttaagaagcaaatcggagccatgcccaaaggttttcagcaccttccgctggccatttggtggaaggtggcacttcctgcattatgttcctgggggctttaa

SEQ ID NO: 78241 - DNA, 62 bp, Glycine max
atcagcaacaaaagctgcaaatgtcagcataaccagagatgctttcccttgcatgtttgatg

SEQ ID NO: 78242 - DNA, 129 bp, Glycine max
ccttcgttcactcatctggtaatgcggctagggataccgcgcagcttcttgtatatttaaagaagatgggtcaggaaaaagagcaccacaaaattgtggttattggacatgtacactatggaaagttca

SEQ ID NO: 78243 - DNA, 203 bp, Glycine max
agcgtttccaaacaaaattgtttttgatgataagcttgtgttggctaacacacaagaattctttgatggaaattttccagtggattcttggttaccaatttttgtgaattgtctttatcctgtaagtcaattaccttcagaagctgtcgttgtaaatgttacatgtggtagtggacgtggtggtttacccaccactgcttgga

SEQ ID NO: 78244 - DNA, 179 bp, Glycine max
cgtcgacccagagatgaaagactttacctagtccttactcactgtttgtgtttgcatcggaaggtagagaagattatttagaatattattgagaaagtgagcgcacttgtagagcgcctgaaaaacaaaagccttgaaaaacggataaagatgatcgaagggattagctccattagttt

SEQ ID NO: 78245 - DNA, 181 bp, Glycine max
  unsure (1)..(181): unsure at all n locations
tcctttggcttttgggaccaattttgtggattttattcaactaaaataaagggctttcttttggcgcatgggggggttaaatttttnaaaaaaaaaaaaaaaaaaaaaaaaaaaaaaaaaaaaaaaaaaaaaaaaaaaaaaaaaaaaaaaaaaaaaaaaaaaaaaaaaggggggggccccc

SEQ ID NO: 78246 - DNA, 139 bp, Glycine max
ggcccagcaataattctcggtgcacaggtggctcctcttttcattcgaaatcatgtcggaacccaagatacccgatgtgcttattaactgcgcccaaaacacacaccaagggtttgtggggcatcttttttaatttttt

SEQ ID NO: 78247 - DNA, 105 bp, Glycine max
gattaaaatggtggccacaggtgggattcctgagaataccaggttattaatggcccgtgctatgaataggtcttttaaggggggcgcccggtcttatatttacac

SEQ ID NO: 78248 - DNA, 160 bp, Glycine max
tcgggaaaaaaaaaaaaaattttttttaaaaaaaaaaaaaaaaaaaaaaggaagggggtattaaaaggggggggggggtaataaatataataaatttaatgataaaatttattaatatttaaaaaaaaaaaaataaaaaaaaaaaaaaaaaggggggccc

SEQ ID NO: 78249 - DNA, 332 bp, Glycine max
  unsure (1)..(332): unsure at all n locations
gttcagnttatgttcagaaatcattcattgattaccatatttccgtttcggtcttcttcctgggcgggctgtccgtccttccacaaatgttgcactctcactctcaccatcaccaccttctcttctccagtctccctctttgtctctcactcaccaccacccatcacaactcttctttaccatctcttcattttcttcacagacccattattaccaccaccaccacaacaacttctgttttagccattctctctactgctgcattgctttgcatagctcacaacacaaagactttgcccacctttgaactctcttccttcccatctttttac

SEQ ID NO: 78250 - DNA, 340 bp, Glycine max
ctcgagccgcaaaactggagattggatcacacttatacaaaattctccaattagtaacttattgagagttgctgcttggaagaaaggctgtttaatggtcaagattgtgatgtctgggaatgcagcagtcaaaaggagtgattgggcctcattggtacaagtgtttttaacaaacagcaacagtacagagcattttgatgcatgtaagtggacaaaatcagaaccacattcctgggaattgatctttccaatagaggtatgtggtcctaataatgggtttgaaatgtggagttctgagtgggcaaatcaaacttcatggcatttgagttttcttattgac

SEQ ID NO: 78251 - DNA, 381 bp, Glycine max
gagtgattgggcctcattggtacaagtgtttttaacaaacagcagcagtacagagcattttgatgcatgtaagtggacaaaatcagaaccacattcctgggaattgatcttcccaatagaggtatgtggtcctaataatggttttgaaatgtggagttctgagtgggcaaatcaaacttcatggcatttgagtttccttattgacaatcccaaacagtctacagtttttgatattctcttgggaatctctcaagattttgaaattgctggtaatactcttatgccagctttttctgttccacaggctactgccagatcttctgaaaatgcggaatcctctgcatgatctggaatttgtgttttctttcgcttgttcgtttg

SEQ ID NO: 78252 - DNA, 352 bp, Glycine max
gggcacttcccgaagtgttaagagaatgcctctttctatagggggaggagctggtgcaaagaatgctattctcatgaatatgccaaatgctgttctttcaatgtggagatattttgttggagatctcgtctttgaagtttctaagatgacttctccctacattaaatgtacagtctctttcttcatagcatttggaaatttggctgatgataccatcaattttgaggctttttcccacaagcttgtgcaatttggagagattcaagaaaaagttgtattgaaattttcacaaaaggaatttcttacaacttggtcaactcaagtgcgttctgcaacaactcttttggctgat

SEQ ID NO: 78253 - DNA, 126 bp, Glycine max
  unsure (1)..(126): unsure at all n locations
ctactcttcnncccattgtttcttctntaaatccctcgcctatatcgttcaganaaattaagatcttgcttcacgatctagaggttgtcccttttcccaaatcacgagtccgttgagttttgattt

SEQ ID NO: 78254 - DNA, 85 bp, Glycine max
tcgagcttgccaaggttagagatgagtttaaaatgtccgactccgattgcggttctgcgcgtgttcaaattgcacaactcacaac

SEQ ID NO: 78255 - DNA, 263 bp, Glycine max
ttaaaatgtccactccgagggcggtctgcgcgtgtgaaagtgcctctcaaacaaaattaagcatctttagcagttctacacaagaaggatgttcattctcgtaaaggtttgctagcaatggttcacaggagaaaaagattactgaaatacctcaaaagaactgattgggattcctattgtttcgtatcttcaagctgggtctacgtgataatcccgatcatttttatagagctcgatctggttccgcgacataggatcacata

SEQ ID NO: 78256 - DNA, 241 bp, Glycine max
aagaaattaataaagaacctactcaaataattgggaaacaaaaacatgcttagtggtgttattagctatgcttacttttccttgtatacatacataaaataagaatttatgtggagggagcctagctgcccgggcaaaattcctctcaaatattggtaatgtttaaaagagatattccttttctgaagatattttactaaaagtaatatgtgaaatgtaatttagagtaaaagctttcatc

SEQ ID NO: 78257 - DNA, 256 bp, Glycine max
  unsure (1)..(256): unsure at all n locations
aaaaaaaaattttttttnnnntntnnnnntaaaaaaaaggagggtaaatatataaaggggggggggttaaatattaggggggttaaataaaagggggggaattttacgacggggggaccgcccccaaccaaactttaacccccagaaataattttttaaccctgaccaataggggggccccccccacttttttgcccccccccccccccaattaaatttcccccccccccccccgggcccccccacctttcctttt

SEQ ID NO: 78258 - DNA, 157 bp, Glycine max
ggttgaggcaatttttttcttcttccgtggcaatccttttatttcatgggttgcaaggcttttaaattcaatgggggtgttcttgagccactttaaaatgggactgtggaaattgagggtggttctttccccggttccttaagtggtggttcttctt

SEQ ID NO: 78259 - DNA, 363 bp, Glycine max
cttgtgcatcgatccatttgaacctttcttgtatttccaaccgtgccatcaacaggtgcaactatgatcaggaacaacaattcaacactgcttaagggtgcaatatcttctgaggaggcaccatgaatatagactgttctgaacaacaaaatagctccaccactgtgcataatctcattaagaccaattaacattaaaacaaccaacttactcacatgtgcgcaactgcactgcattaaaaagattatcaaattggcacttgcagatcaacgcacagcattaacatcaacaacaccaccgccaacaacaacaacaataaggccttctctcttcttagaagcttatgcataaaatctgatcatc

SEQ ID NO: 78260 - DNA, 115 bp, Glycine max
atattaatacctccttttcctttggttccccccttctgtcacaaaaatttttatttggcttgggaaaggggattttgggaaaaaaggggaggcttaattggcctccggggttccg

SEQ ID NO: 78261 - DNA, 307 bp, Glycine max
cccgaagtgttaagagaatgcctctttctatagggggaggagctggtgcaaagaatgctattctcatgaatatgccaaatgctgttctttcaatgtggagatattttgttggagatctcgtctttgaagtttctaagatgacttctccctacattaaatgtacagtctctttcttcatagcatttggaaatttggctgatgataccatcaattttgaggcttttccccacaagctggtgcagtttggagagattcaagaaaaaagtgtattgaaattttcacaagaagaatttcttacagcttggtc

SEQ ID NO: 78262 - DNA, 156 bp, Glycine max
gagcttgacgtcgatgcgcgcgttccttagcttggaatttgggttggggaaataattaattaattggaggtttcaaattattaaattaaggttccaaaattttaatccatggttttagtcgtttttttttcctttccggctcccagataataaatt

SEQ ID NO: 78263 - DNA, 290 bp, Glycine max
  unsure (1)..(290): unsure at all n locations
cccttccttaacctcggaattcggttcgagcttgggaatctttcaagattttgaaattgctggtaatactcttatgccagctttttctgttccacaggctactgccagatcttctgaaaatgcggaatcctctgcatgatctggaatttgggttttctttcgcttgttcgtttgtttaattcaataaaggaaattaggcatgaccctcttgttgagtatgctctgcctatttgaaaatttccacacctcttttaattgtcgtaatgatgtgtgaagtgtgtgttatttnt

SEQ ID NO: 78264 - DNA, 153 bp, Glycine max
gatttcggttcgggtttttttccctaactgggggcttttttccatgggttcttcatctgcatgcacacacttgcatagttttgggaaccaaaaatttttgaagggtagcattaacaagaagttctgggaatggagatcaccaatgtcagcgag

SEQ ID NO: 78265 - DNA, 391 bp, Glycine max
caaaattctccaattagtaacttgttgagagttgctgcttggaagaaaggctgtttaatggtcaagattgtgatgtctgggaatgcagcagtcaaaaggagtgattgggcctcattggtacaagtgtttttaacaaacagcaacagtacagagcattttgatgcatgtaagtggacaaaatcagaaccacattcctgggaattgatcttcccaatagaggtatgtggtcctaataatggttttgaaatgtggagttctgagtgggcaaatcaaacttcatggcatttgagtttccttattgacaatcccaaacagtctacagtttttgatattctcttgggaatctctcaagattttgaaattgctggtaatactcttatgccaacttttt

SEQ ID NO: 78266 - DNA, 395 bp, Glycine max
aaataaataaattaattgaagattcaaaataataaattaagggggggaaattttaatacatcgggatagtcgtttttttttcctttccagctaccagataataaattgatgtaacaaatgtatatgctcctcgttcaataattgcaagatgttttaaaatagtccgtactattttattttgtacaaaatgaatcttaatatttaataattatccatacaaaatgataaagacacaagtaattaatatattgaagttaaagtaatacttgaatttaatttttgatgaaaataatttttgatcagattctatctatttcctgactgaattctaaattagtcagagttaattttctctaatataaactagatcatttagacaaaaattaagcagcaca

SEQ ID NO: 78267 - DNA, 423 bp, Glycine max
gtttggagagattcaggaaaaagttgtattgaaattttcacaagaggaatttcttacagcttggtcaactcaggtgcgtcctgcaacaactctgttggctgatgggtgtccatatttgtatgcaatggtgcatgatagttcagtgtctacaataccaggtgattttgtcattggtgtcaagttgacaaccataaacaatatgtgtgcatatgggctcaatcctggtatttcaggttctcgtcttttgggcaccattcctcagtccatttcacagcaaactgtttggaatcaaatggcaacagtgagaacaccattgaattttgattctagcaagcaaaacttttgtcaagtttctattgaccttctcggtggaggaatcttagtggacaaaactggagaatggatcacacttatacaaaattc

SEQ ID NO: 78268 - DNA, 212 bp, Glycine max
ctcactggtgtctacctctgtgagatctgcttgatcggactgttcgccatctccactgccaacaacatccaggctgtcggtcccctgattatcgaggccatcatgctcgctctcacagttctgttcaccttgagcttgaacagggcccttgcccacgaggaggctcggcttggctataccgaccctttggcaatcaacggtcaccacgagga

SEQ ID NO: 78269 - DNA, 57 bp, Glycine max
aaaaaaaaaaattttttaaaaaaaaaaaaaaaaaaaaaaaaaagggggaaaattaaa

SEQ ID NO: 78270 - DNA, 93 bp, Glycine max
tgttattaaatcttgtttttgttccatggggggtggagcactttttttttttggcggggggggggccattggttaaggtttgacattgccccc

SEQ ID NO: 78271 - DNA, 210 bp, Glycine max
gctttttctgttccacaggctactgccagatcttctgaaaatgcggaatcctctgcatgatctggaatttgtgttttctttcgcttgttcgtttgtttaattcaataaaggaaattaggcatgaccctcttgttgagtatgctctgcctatttgaaaatttccacacctcttttaattgtcgtaatgatgtgtgaagtgtgtgttatttt

SEQ ID NO: 78272 - DNA, 421 bp, Glycine max
gagaattgtatttgcacagtccagaggaagctcgccaattgagaaggaaagctctctctcgtattgaatggctgcaaaaagctgatgtgcctaccatagcacagattgaagagttccattcgatgcagaggatgatgaatgctcctgattcaaatgataatattgatttactgttgagcattgatttgttgggtttacaaggagcaagtaaagcttttccaaacaaaattgtttttgatgataagcttgtgttggctaacacacaagaattctttgatggaaattttccagtggattcttggttaccaatttttgtgaattgtctttatcctgtaagtcaattaccttcagaagctgtcgttgtaaatgttacatgtggtagtggaccttgtggttacccaccactgcttggattagttct

SEQ ID NO: 78273 - DNA, 236 bp, Glycine max
tgatttactgttgagcattgatttgttgggtttacaaggagcaggtgaagcttttccaaacaaaattgtttttgatgataagcttgtgttggctaacacacaagaattctttgatggaaattttccagtggattcttggttaccaatttttgtgaattgtctttatcctgtaagtcaattaccttcagaagctgtcgttgtaaatgttacatgtggtagtggacgcggtggttaac

SEQ ID NO: 78274 - DNA, 345 bp, Glycine max
aaaaaaaaaatttaaaaaaaaaaaaaaaaaaaaaaaaaaaaaggaaaaaaaaaaaaaaaggaaaaaaaaaaaaaaaaaaaaaaaaaaaaaaaaaaaaaaaaaaaaaaaaaaaaaaaaaaaaaaaaaaaaaaggggggggcccccctttaggggctttttcccccgggaattaatttcgggccgggtcctgggggggttccaatttttccttttggggggggttttaaaacttgggggaaaaaagggaaaaagtttttcctggggaaaaatgttttcccgttaaaaattccaaaaaaaaaacaaccgggaagtttaaagggaaaacccggggggccttatgggggg

SEQ ID NO: 78275 - DNA, 111 bp, Glycine max
  unsure (1)..(111): unsure at all n locations
accggggaaaaaatagttacagttttttttttctttttttttttgtccgaaggacagtgtaaggagattaaaaaaaaaagtagactgtagaattcttttgttgnnnaaaaa

SEQ ID NO: 78276 - DNA, 72 bp, Glycine max
gttccttccaccctttttttttaaaataatttcccgaacctttggtttttccccctctttcttgggtctcct

SEQ ID NO: 78277 - DNA, 246 bp, Glycine max
tccttaacttcggatttcggttcagccaaaatccaagttggcccggggggggattggggggccaaatcccgtgggtttggggaattttaaatttgggaaaggaggggaccggattggtgccactgatcgggccggtgaaagggggggccaaaatatttgtgaccttgagaatttgggatcttccaagtgtggggcaaaacaaatgccaaccatttctggttctaaagaatctaattttctgggatt

SEQ ID NO: 78278 - DNA, 421 bp, Glycine max
  unsure (1)..(421): unsure at all n locations
agctggtgcaaagaatgctattctcatgaatatgccaaatgctgttctttcaatgtggagatattttgttggagatctcgtctttgaagtttctaagatgacttctccctacattaaatgtacagtctctttcttcatagcatttggaaatttggctgatgataccatcaattttgaagcttttccccacaagctggtgcagtttggagagattcaagaaaaagttgtattgaaattttcacaagaggaatntcttacagcttggtcaactcaagtgcgtnctgcaacaactctgttggctgatgggtgtccatatttgtatgcaatggtgcatgatagttcagtgtctacaataccaggtgatnttgtcattggtgtcaaagtgacaaccataaacaatatgtgtacatatgggctcaat

SEQ ID NO: 78279 - DNA, 358 bp, Glycine max
ctcgagccgtttaaaaaaaaaataaaaaaaaaaaaccaaaagagaaaaaaaaaaaaaaaaaagaaataaaaaaagaagaataaaaggagagcagaggataaaatactggaaccaaaatgaagaaaaaaaaacaagactaaaaatgaaggggcggcgcacatttattggtcctcatcccacgcggaataaaattccgtccagcttcctgtaagggcacctattttccttaaagggggcaatgataagttcagggaattatcgaatatggatgattctcggtgaaaagttgataacattaaaaattgcataacaaatatgaccctgaaagttaaagttaaaaaccgggggtgcctaaagg

SEQ ID NO: 78280 - DNA, 300 bp, Glycine max
cttattgacaatcccaaacagtctacagtttttgatattctcttgggaatctctcaagattttgaaattgctggtaatactcttatgccagctttttctgttccacaggctactgccagatcttctgaaaatgcggaatcctctgcatgatctggaatttgtgttttctttcgcttgttcgtttgtttaattcaataaaggaaattaggcatgaccctcttgttgagtatgctctgcctatttgaaaatttccacacctcttttaattgtcgtaatgatgtgtgaagtgtgtgttatttt

SEQ ID NO: 78281 - DNA, 365 bp, Glycine max
ttttcaagggccaataattggtttatgccttctttttcccttacaattattaaggttaacctttggcggtggttacctacccccctttcttaatttatatttggaaatattcggaactaattttttgggcaatgggcagtaccccattaaattcaatagtcggggtagcccaccatggtgcattaatgcgaccctatggttggttggatatggctgctgtttaactggctaattcatggactctcttcccatacatggatgaaatatctgagaagctggactatataggcataaactactatgggcaggtttgctttattaaccttgaaagtgcactgtgcatgatatctggcatactcacatga

SEQ ID NO: 78282 - DNA, 253 bp, Glycine max
  unsure (1)..(253): unsure at all n locations
aaaaaaaaaaatttaaaaaaaaaaaaaaaaaaaaaaaaaaaagaaaaaaaaaaaaaaaagggagaaaaaaaaaaaaaaaaaaaaaaaaaaaaaaaaaaaaaaanggggggggcccccaataaaaaactttttaaacccgaaaaaaaattcggaaccgtaccttgaagggtaccaaatttccctaaaagaaagcctattaaaaattggggaaaaaaaaggaaaaactgtttccttgggaaaaaagttaatccct

SEQ ID NO: 78283 - DNA, 330 bp, Glycine max
ctcgtcgccctcctcaatggcaagacaaagccagagtggtacgagtggatgaaggagcgcgtcaagaacaatgttggctactcgacgccgaccgacctgccagacccgtttgcgaatcggggccagcagcaacagcaacagggcggcgcgaggggcgcgctgtccggcccctcgtccttcctttcgaacgccatcaacaacgggacgctgcgcttcgggcggggcgacgacgacgacgatatggagggcgacgattccgaccagtacaacacgacaaaatccgccacgtcgctcgacgaggacgccatgatcgaggacacgtcgtcgtcg

SEQ ID NO: 78284 - DNA, 442 bp, Glycine max
ggcagtggccctgctgaatctggggttatttgcttgtatcaatgttgccctgcatgcctccacagtctccatcacttgacaaagaaaatacttgttgaaaaatggggtttaaacagtgagcagtggacggcagaagatgtccatgatgctgttgcatcattatctgtggatcttatttcagcagttagaaaatgctctatgcctcaagatttcattgattcatcaaataaaacctcaagaaatgaaaagcatggaacatctctcgactgtttgaagctgagaacgtgtaataatggaaaccaaggcaaggatgttgtgccagctgaatgtttttctcacgcagcaagccaacatgcaactgcaatggaagatatggcactgaatgaaaaatcgacgaagcttgatcttaaatttgttttcagagatggtgtactagttcata

SEQ ID NO: 78285 - DNA, 106 bp, Glycine max
ccttccttaacttcggatttcggttcggggtttttttaacttatttatgaaggtagtagagtcatatcataaagaagcaagtctgaatacaagtttccaacaaaaa

SEQ ID NO: 78286 - DNA, 285 bp, Glycine max
tgcaattgaagttgaagtcttgcccttctctcttcaactccaaacacaagacatcatcatccatggctgcctccgtctccactgtcggagctgtcaacagagctcttttgaacctgaatgggtctggacctggggtttcagctcccagttcattcttctttgggagcagcttgaagaaggttattggctcaagggtccccaacacaaagatttcctctggaagcttcaagattgttgctgtagaagagaagaaagagattgaagagacccagcagaccgacaagg

SEQ ID NO: 78287 - DNA, 290 bp, Glycine max
aggacctattgtgttttaaatccacaaaatccttttgtgttaaataggtggatgggaaaattgactttcccccagggcacttcccgaagtgttaagagaatgcctctttctatagggggaggagctggtgcaaagaatgctattctcatgaatatgccaaatgctgttctttcaatgtggagatattttgttggagatctcgtctttgaagtttctaagatgacttctccctacattaaatgtacagtctctttcttcatagcatttggaaatttggctgatgataccat

SEQ ID NO: 78288 - DNA, 67 bp, Glycine max
tcctaacctcggaattcggttcgggggaagttgaagtcttgccctttttttttcaactccaaaccca

SEQ ID NO: 78289 - DNA, 191 bp, Glycine max
ccgtccgtaagctcggaattcggttcggggcgcaacgcccggataccgtcgtcaagacagctacggtgctccctcagtatccgtcaagaacggtgccatctctggtgtccactcctcaacctacaacgaagactacttcttgggcattccttacgcccggcccccactcaatggacttctattcaccgggg

SEQ ID NO: 78290 - DNA, 418 bp, Glycine max
aagctcggaattcggttcgaggtttttaacaaacagcaacagtccagagcattttgatgcatgtaagtggacaaaatcagaaccacattcctgggaattgatcttcccaatagaggtatgtggtcctaataatggttttgaaatgtggagttctgagtgggcaaatcaaacttcatggcatttgagtttccttattgacaatcccaaacagtctacagtttttgatattctcttgggaatctctcaagattttgaaattgctggtaatactcttatgccagctttttctgttccacaggctactgccagatcttctgaaaatgcggaatcctctgcatgatctggaatttgtgttttctttcgcttgttcgtttgtttaattcaataaaagaaattaggcatgacccttcttgtgagt

SEQ ID NO: 78291 - DNA, 315 bp, Glycine max
agagcttgacgtcgatgcccgcctccgtaacctcggaattcggctcgggcggaaccaaagagggaacatgatctgctggatgtgggaggtcaggttaatgaagaggctgagggcattgagaatgctaaatggatttccatcaaagcagttctgcttctgctattgggtactattattgctgctgcgtttgctgatcctctggttgatgcagtggataacttttctgaggctacaagtattcctgctttcttcatttccttcatttttctgcccttagcaaccaattcaagtgaagcaatgtcagctattattttt

SEQ ID NO: 78292 - DNA, 184 bp, Glycine max
aaaactagtgcaactttgcaatttagaaagttagcagattgtgattttctcaagagaaactttaagcagatgtctaatgttttgtgggtggctcctgaggacaaggcgagtttatggtcacaacttcattatgtttcgggtaataatctggaaatgcaagaagcttatcttgtcaatctcgtaa

SEQ ID NO: 78293 - DNA, 308 bp, Glycine max
aaaaaaaaaatttaaaaaaaaaaaaaaaaaaaaaaaaaaaagggaaaaaaaaaaaaaaaaaagaaaaaaaaaaaaaaaaaaaaaaaaaaaaaaaaaaaaaaaaaaaaaaaaaaaaaaaaaaacaaaaaaaaaaaaaaaaaaaaacaaaaaaaaaaaaaaaaagggggggggcccccattttggaatttcttcccccccaaaataatttcgggccgggctcttggggggcaccaatttttcttttttgggggctttttaaaaattgggggaaaaaaggaaaaaagttttttcctgggaaaaattttttt

SEQ ID NO: 78294 - DNA, 55 bp, Glycine max
aaaaaaaaataaaaaaaaaaaaaaaaaaaaaaaaaaagggaaaaaaaaaaaaaaa

SEQ ID NO: 78295 - DNA, 315 bp, Glycine max
atgattcagttgaattttttctgcttctgggcctgggtcggggaaggcactttgtttattctgtctgcctctctctcttataagtattgttacttttttttttttttaattttaaatatcaaatatgtaataaagagccataatgaatggtttttaggtgttttgaattaaaattagaattgagagaggtgttggtatggactaggggtttctcgtgtagagatgtgatagacagtcataacataacaccgccgcacattagcatttttttgaggtggatgtggtatcagtgttactggggtgagggtagttaaa

SEQ ID NO: 78296 - DNA, 274 bp, Glycine max
atctgtttgtgtttcttttggaatctctgccagatgaaaggagtcttccccaacccttgcctgtgcaagggagaaatcaagcggataatgggagtaggtcaagcagttccagtagctccagcagtgattctggttcttcttcaagtgattctgatagtgacaggtcctcaacatctggatctgatgcaaggtcgcaagggacctgactatgctctgtcaaaatctaaatttttagagtaaatagtgtcttgatgccagcctattttggtttttt

SEQ ID NO: 78297 - DNA, 246 bp, Glycine max
  unsure (1)..(246): unsure at all n locations
gtgaattgtggaatactgcttgcacaaaagcaatgactatgtcatttaatccaaacccgtgttctgatgcatggagtttggaatttctgaagcgtactggatttcattgcgatatcatttgtgtcactggatggactgccaccccaatgcangatgttcangttacaattgattggtttatttcctctcangaatgtgttcccnagaccctattgtgtttaaatccacanaaatcttttgtgttaa

SEQ ID NO: 78298 - DNA, 403 bp, Glycine max
ctcattagatatagctatgaaaaattactgcgccaggctaaagctccaagtatgtttttacaatccttcaaaaattttgtttctttgtgtgtgtatggtgatgataacttaattagtgttcatgaatatgtcaagccttactttagtggttctaaattgaaaagctttctagctagtcataacatcaccattactgatggtattgacaaaactagtgcaactttgcaatttagaaagttagcagattgtgattttctcaagagaaactttaagcagatgtctaatgttttgtgggtggctcctgaggacaaagcgagtttatggtcacaacttcattatgtttcgtgtaataatctggaaatgcaagaagcttatcttgtcaatctcgtaaatgtgttacgag

SEQ ID NO: 78299 - DNA, 392 bp, Glycine max
  unsure (1)..(392): unsure at all n locations
gttgtattgaaattttcacaagaggaatttcttacagcttggtcaactcaggtgcgtcctgcaacaactctgttggctgatgggtgtccatatttgtatgcaatggtgcatgatagttcagtgtctacaataccaggtgattttgtcattggtgtcaagttgacaaccataaacaatatgtgtgcatatgggctcaatcctggtatttcaggttctcgtcttttgggcaccattcctcagtccatttcacagcaaactgtttggaatcaaatggcaacagtgagaacaccattgaattntgattctagcangcagagcttttgtcagttttctatttgaccttctcgtggaggaatcttagtggacaaaactggagatnggatcacacttat

SEQ ID NO: 78300 - DNA, 325 bp, Glycine max
tgaaattttcacaagaggaatttcttacagcttggtcaactgaggtgcgtcctgcaacaactctgttggctgatgggtgtccatatttgtatgcaatggtgcatgatagttcagtgtctacaataccaggtgattttgtcattggtgtcaagttgacaaccataaacaatatgtgtgcatatgggctcaatcctggtatttcaggttctcgtcttttgggcaccattcctcagtccatttcacagcaaactgtttggaatcaaatggcaacagtgagaacaccattgaattttgattctaacaagcaaagcttttgtcagttttc

SEQ ID NO: 78301 - DNA, 398 bp, Glycine max
  unsure (1)..(398): unsure at all n locations
ctcgagccgaatcggctcgaggtgttacgagaattgtatttgcacagtccagaggaagctcgccaattgagaaggaaagttctctctcgtattgaatggctgcaaaaagctgatgtgcctaccatagcacagattgaagagttccattcgatgcagaggatgatgaatgctcctgattcaaatgataatattgatttactgttgagcattgatttgttgggtttacaaggagcaggtaaagcttttcaaacaaaattgttttgatgataagcttgtgttgctaacacacaaaaattctttgaggaaaatttccagtggattcttgttaccaattttgtgaattgtcttattctgtaagtcaattaccttcagaagctgtcngtgtaaatgttacatgt

SEQ ID NO: 78302 - DNA, 198 bp, Glycine max
gtaaacttgttcttaggagcatattgatttatttctagttaatgttatcttctagtgagcaattatctttcctgtgaagtggagtacaatttacatttctgaatagaggaaataccttgtttgtcctcttattcctgtgattacaatgttttatttgcaaatatccattcagatactttcatgttgtcacaatagttc

SEQ ID NO: 78303 - DNA, 138 bp, Glycine max
  unsure (1)..(138): unsure at all n locations
tgctaaatcaaattttctcccactgcttctcgtcatatctccgggcggnactagacaaaactaatcacacacccccatcttaccacaaaaatttacttattttttcttgcatcacctcttctcgaatgcatgacacat

SEQ ID NO: 78304 - DNA, 367 bp, Glycine max
cctgcaacaactctgttggctgatgggtgtccatatttgtatgcaatggtgcatgatagttcagtgtctacaataccaggtgattttgtcattggtgtcaagttgacaaccataaacaatatgtgtgcatatgggctcaatcctggtatttcaggttctcgtcttttgggcaccattcctcagtccatttcacagcaaactgtttggaatcaaatggcaacagtgagaacaccattgaattttgattctagcaagcagagcttttgtcagttttctattgaccttctcggtggaggaatcttagtggacaaaactggagattggatcacacttatacaaaattctccaattagtaacttattgagag

SEQ ID NO: 78305 - DNA, 405 bp, Glycine max
gcttttaattataatgttttttagaattaaataaaattttagttctccaaaacttgaaccaaattcaatttaattcttaggaaaaaaatttcttaacatttcatgatcaaaatttacaaaatgctagtgtatttaaccattgaggccgaaaattataatctgtaataaatgttaagggggatcgttacgtaacattataaattattaagttttactcgtctggaacatcattatctctaataatacatgcgatttaaacaaaaataaaataaaacataaatcagtaatttatgttataattataatttaatgaaaccatagtgcatccttttatgtttactgttttttttcttccctgcaaagtgtaaagtgaggactgaggagggatgagttcgtcctctccac

SEQ ID NO: 78306 - DNA, 167 bp, Glycine max
gatcttatgactgactatcgcgaaatccatgcttggacatatgcatggactatgtctgttaatagatactggagatgaggagcatggaggaatgtatggctgaagcgaactggtttgtattggcatatcatacatgacagttgatgtactagcgcctcaatgtatga

SEQ ID NO: 78307 - DNA, 353 bp, Glycine max
caattttgaggcttttccccacaagctggtgcagtttggagagattcaggaaaaagttgtattgaaattttcacaagaggaatttcttacagcttggtcaactcaggtgcgtcctgcaacaactctgttggctgatgggtgtccatatttgtatgcaatggtgcatgatagttcagtgtctacaataccaggtgattttgtcattggtgtcaagttgacaaccataaacaatatgtgtgcatatgggctcaatcctggtatttcaagttctcgtcttttgggcaccattcctcagtccatttcacagcaaactgtttggaatcaaatggcaacagtgagaacaccattgaatt

SEQ ID NO: 78308 - DNA, 411 bp, Glycine max
gtcaagccttactttagtggttctaaattgaaaagctttctagctagtcataacatcaccattactgatggtattgacaaaactagtgcaactttgcaatttagaaagttagcagattgtgattttctcaagagaaactttaagcagatgtctaatgttttgtgggtggctcctgaggacaaggcgagtttatggtcacaacttcattatgtttcgtgtaataatctggaaatgcaagaagcttatcttgtcaatctcgtaaatgtgttacgagaattgtatttgcacagtccagaggaagctcgccaattgagaaggaaagctctctctcgtattgaatggctgcaaaaagctgatgtgcctaccatagcacagattgaagagttccattcgatgcagaggatgatgaat

SEQ ID NO: 78309 - DNA, 270 bp, Glycine max
  unsure (1)..(270): unsure at all n locations
ttccgctcgagattttcttaatgttttggagtagagtattttgggaggggatgatagcaatcttgtgagagatcagtctaaaactcgcacagaaactggattttttaataaaaatgtgtgcctcagagtgtgtcatattcaaatactccgattttgatgatgatgtaataacgacaataccaccccccgttggctgctgcaactgttgtctactacttactacgaagcaccgtggttgggcaaccnnnnnaaaaaaaaaaaatttattat

SEQ ID NO: 78310 - DNA, 400 bp, Glycine max
ctcgagccgctttagccgtggtgatgaaaaattgatgcgtgaaaggacgcacctgctgttggcttgttgttcaaggatggcaatttgtaagaaagatgtttggagagttgaatgtggaatcccttctggatttccgctcacagttatttgcaatagcatttttaatgagatgctcattagatatagctatgaaaaattactgcgccaggctaaagctccaagtatgtttttacaatccttcaaaaattttgtttctttgtgtgtgtatggtgatgataacttaattagtgttcatgaatatgtcaagccttactttagtggttctaaattgaaaagctttctagctagtcataacatcaccattactgatggtattgacaaaactagtgcaactttgcat

SEQ ID NO: 78311 - DNA, 411 bp, Glycine max
caatttgtaagaaagatgtttggagagttgaatgtggaatcccttctggatttccgctcacagttatttgcaatagcatttttaatgagatgctcattagatatagctatgaaaaattactgcgccaggctaaagctccaagtatgtttttacaatccttcaaaaattttgtttctttgtgtgtgtatggtgatgataacttaattagtgttcatgaatatgtcaagccttactttagtggttctaaattgaaaagctttctagctagtcataacatcaccattactgatggtattgacaaaactagtgcaactttgcaatttacaaagttagcagattgtgattttctcaagagaaactttaagcagatgtctaatgttttgtgggtggctcctgaggacaaggcgagtt

SEQ ID NO: 78312 - DNA, 404 bp, Glycine max
  unsure (1)..(404): unsure at all n locations
aaagatttgttggagggaaatttttcctttgatattaaatctcgctctagattggaaaaagtttcctctacaaaagcacaatttgttagtggaaaaaccttcaaatatgatataattggtgctggttcacattcttcagaagattttcctgaaaaggaagatcaagaaaaacccaaaaagattgatgccagattgagacaaagaatagatcctcaatacaatgaggttcaggctcagatggaaacaaatttgtttaaattgtctcttgatgatgttgaaactcctaaaggttccatgttggatctgaaaatttctcaatctaaaattgcacttcccaagaacacaggttgaggaaccattctgcgtaatgatctattggcanatttttgacagagggcaatttt

SEQ ID NO: 78313 - DNA, 258 bp, Glycine max
gtcattgtctgcctacccgaattttacacagggactgtgagtggcgtttatcattacacaattaaataaagtacataattacgtgatctttgtgtttctatatcattcgatcagagatgaaccaaaagaaacatctttgcttaatatgagtctaaagcagaagcaatgggacttaaatctctgaagcagacaaatactcataatggactaaagaattttgaacccggggggatgagctacttaacaaaaaccccgggg

SEQ ID NO: 78314 - DNA, 347 bp, Glycine max
atttactgttgagcattgatttgttgggtttacaaggagcaggtaaagcttttccaaacaaaattgtttttgatgataagcttgtgttggctaacacacaagaattctttgatggaaattttccagtggattcttggttaccaatttttgtgaattgtctttatcctgtaagtcaattaccttcagaagctgtcgttgtaaatgttacatgtggtagtggacgtggtggtttacccaccactgcttggattagttctgcagttaacaatcgctcctcagatatcaacaaaaggattcgcacagcacttgggaaaggtaagaaaattgtttttcttactagagttgat

SEQ ID NO: 78315 - DNA, 399 bp, Glycine max
tcaccattactgatggtattgacaaaactagtgcaactttgcaatttagaaagttagcagattgtgattttctcaagagaaactttaagcagatgtctaatgttttgtgggtggctcctgaggacaaggcgagtttatggtcacaacttcattatgtttcgtgtaataatctggaaatgcaagaagcttatcttgtcaatctcgtaaatgtgttacgagaattgtatttgcacagtccagaggaagctcgccaattgagaaggaaagctctctctcgtattgaatggctgcaaaaagctgatgtgcctaccatagcacagattgaagagttccattcgatgcagaggatgatgaatgctcctgattcaaatgataatattgatttactgttgagcattg

SEQ ID NO: 78316 - DNA, 374 bp, Glycine max
cacaacttcattatgtttcgtgtaataatctggaaatgcaagaagcttatcttgtcaatctcgtaaatgtgttacgagaattgtatttgcacagtccagaggaagctcgccaattgagaaggaaagctctctctcgtattgaatggctgcaaaaagctgatgtgcctaccatagcacagattgaagagttccattcgatgcagaggatgatgaatgctcctgattcaaatgataatattgatttactgttgagcattgatttgttgggtttacaaggagcaggtaaagcttttccaaacaaaattgtttttgatgataagcttgtgttggctaacacacaagaattctttgatggaaattttccagtggattct

SEQ ID NO: 78317 - DNA, 404 bp, Glycine max
gctcattagatatagctatgaaaaattactgcgccaggctaaagctccaagtatgtttttacaatccttcaaaaattttgtttctttgtgtgtgtatggtgatgataacttaattagtgttcatgaatatgtcaagccttactttagtggttctaaattgaaaagctttctagctagtcataacatcaccattactgatggtattgacaaaactagtgcaactttgcaatttagaaaagtagcagattgtgattttctcaaaagaaactttaagcagatgtctaatgttttgtgggtggctcctgaagacaaggcgagtttatggtcacaacttcattatgtttcgtgtaataatctggaaatgcaagaagcttatcttgtcaatctcgtaaatgtgttacgag

SEQ ID NO: 78318 - DNA, 393 bp, Glycine max
  unsure (1)..(393): unsure at all n locations
attctcatgaatatgccaaatgctgttctttcaatgtggagatattttgttggagatctcgtctttgaagtttctaagatgacttctccctacattaaatgtacagtctctttcttcatagcatttggaaatttggctgatgataccatcaattttgaggcttttccccacaagctggtgcagtttggagagattcangaaaaagttgtattgaaattttcacaagaggaatttcttacagcttggtcaactcaagtgcgtactgcaacaactctgttggctgatgggtgtccatatttgtatgcaatggtgcatgatagttcagtgtctacaataccaggtgattttgtcattggtgtcaagttgacaaccataaacaatatgtgtgcatat

SEQ ID NO: 78319 - DNA, 402 bp, Glycine max
gttaaataggtggatgggaaaattgactttcccccagggcacttcccgaagtgttaagagaatgcctctttctatagggggaggagctggtgcaaagaatgctattctcatgaatatgccaaatgctgttctttcaatgtggagatattttgttggagatctcgtctttgaagtttctaagatgacttctccctacattaaatgtacagtctctttcttcatagcatttggaaatttggctgatgataccatcaattttgaggcttttccccacaagctggtgcagtttggagagattcaggaaaaagttgtattgaaattttcacaagaggaatttcttacagcttggtcaactcaagtgcgtcctgcaacaactctgttggctgatgggtgtccatattt

SEQ ID NO: 78320 - DNA, 402 bp, Glycine max
tgatgggtgtccatatttgtatgcaatggtgcatgatagttcagtggctacaataccaggtgattttgtcattggtgtcaagttgacaaccataaacaatatgtgtgcatatgggctcaatcctggtatttcaggttctcgtcttttgggcaccattcctcagtccatttcacagcaaactgtttggaatcaaatggcaacagtgagaacaccattgaattttgattctagcaagcagagcttttgtcagttttctattgaccttctcggtggaggaatcttagtggacaaaactggagattggatcacacttatacaaaattctccaattagtaacttgttgagagttgctgcttggaagaaaggctgtttaatggtcaagattgtgatgtctgtgaatgc

SEQ ID NO: 78321 - DNA, 406 bp, Glycine max
ggatggctggctacactttgtgtgactggtatgacagctattggagtaaggaaagcagtgaagacagagttgatagatgctgagcctatggagaagccctctccattttcttccattgaattgtgggcatggactgggattttccttatatcttttgttgcttcattagtttacccaacagcactggggacacgagccagaacgtatcttccattcttgcttgcttccacggtgttaggctacatgattggttctggattgccatcaagcgtgaagaaggtcctccacccaataattttctgtgcggcatctgcagaagtaacagcagttgtttttgggtttctttccaagtcagggcttgatcctgttctaggatattaccttacaaactcatcatctgatcctg

SEQ ID NO: 78322 - DNA, 65 bp, Glycine max
gtatgactgtacatgttacatacatcattattttactcctccaatgtagttcaatttataatggt

SEQ ID NO: 78323 - DNA, 404 bp, Glycine max
aaatgtgttacgagaattgtatttgcacagtccagaggaagcgcgccaattgagaaggaaagctctctctcgtattgaatggctgcaaaaagctgatgtgcctaccatagcacagattgaagagttccattcgatgcagaggatgatgaatgctcctgattcaaatgataatattgatttactgttgagcattgatttgttgggtttacaaggagcaggtaaagcttttccaaacaaaattgtttttgatgataagcttgtgttggctaacacacaagaattctttgatggaaattttccagtggattcttggttaccaatttttgtgaattgtctttatcctgtaagtcaattaccttcagaagctgtcgttgtaaatgttacatgtggtagtggacgtggtg

SEQ ID NO: 78324 - DNA, 394 bp, Glycine max
ttgaccttctcggtggaggaatcttagtggacaaaactggagattggatcacacttatacaaaattctccaattagtaacttgttgagagttgctgcttggaagaaaggctgtttaatggtcaagattgtgatgtctgggaatgcagcagtcaaaaggagtgattgggcctcattggtacaagtgtttttaacaaacagcaacagtacagagcattttgatgcatgtaagtggacaaaatcagaaccacattcctgggaattgatcttcccaatagaggtatgtggtcctaataatggttttgaaatgtggagttctgagtgggcaaatcaaacttcatggcatttgagtttccttattgacaatcccaaacagtctacagtttttgatattct

SEQ ID NO: 78325 - DNA, 414 bp, Glycine max
ttcaggaaaaagttgtattgaaattttcacaagaggaatgtgttacagcttggtcaactcaggtgcgtcctgcaacaactctgttggctgatgggtgtccatatttgtatgcaatggtgcatgatagttcagtgtctacaataccaggtgattttgtcattggtgtcaagttgacaaccataaacaatatgtgtgcatatgggctcaatcctggtatttcaggttctcgtcttttgggcaccattcctcagtccatttcacagcaaactgtttggaatcaaatggcaacagtgagaacaccattgaattttgattctagcaagcagagcttttgtcagttttctattgaccttctcggtggaagaatcttagtggacaaaactggagattggatcacacttatacaaaattctc

SEQ ID NO: 78326 - DNA, 414 bp, Glycine max
attttgttggagatctcgtctttgaagtttctaagatgacttgtccctacattaaatgtacagtctctttcttcatagcatttggaaatttggctgatgataccatcaattttgaggcttttccccacaagctggtgcagtttggagagattcaggaaaaagttgtattgaaattttcacaagaggaatttcttacagcttggtcaactcaggtgcgtcctgcaacaactctgttggctgatgggtgtccatatttgtatgcaatggtgcatgatagttcagtgtctacaataccaggtgattttgtcattggtgtcaagttgacaaccataaacaatatgtgtgcatatgggctcaatcctggtatttcaggttctcgtcttttgggcaccattcctcagtccatttcacagc

SEQ ID NO: 78327 - DNA, 404 bp, Glycine max
gagaaactttaatcagatgtctaatgttttgtgggtggctcctgaggacaaggcgagtttatggtcacaacttcattatgtttcgtgtaataatctggaaatgcaagaagcttatcttgtcaatctcgtaaatgtgttacgagaattgtatttgcacagtccagaggaagctcgccaattgagaaggaaagctctctctcgtattgaatggctgcaaaaagctgatgtgcctaccatagcacagattgaagagttccattcgatgcagaggatgatgaatgctcctgattcaaatgataatattgatttactgttgagcattgatttgttgggtttacaaggagcaggtaaagcttttccaaacaaaattgtttttgatgataagcttgtgttggctaacacac

SEQ ID NO: 78328 - DNA, 417 bp, Glycine max
aaaaaaaaaaatttatttttaaaaaaaaaaaaaaaaaaaaaagggatggttttataaaaaaaaaaaacaaaaaaaaaaaaaaattaaaaaaatatattaaccaaaaataattaaaaacatttctttaaatttttttactaaacaaaaatttttgtattccctcaccctcttttcttttgcttaatttatatttgttttttcatcctcaaaattataaatttcctcgcattttttattaaccctttattttgttttattcattaatttggtttcatgctctaaattttaagctttggaaaacttttttttttgaaaccactctttgaaaattttttattaacacaaaatattttttttttataagattatttttttataatttaaattttttcccccattttaagttatttttttttt

SEQ ID NO: 78329 - DNA, 400 bp, Glycine max
gttcccaggacctattgtgttttaaatccacaaaatccttttgtgttgaataggtggatgggaaaattgactttcccccagggcacttcccgaagtgttaagagaatgcctctttctatagggggaggagctggtgcaaagaatgctattctcatgaatatgccaaatgctgttctttcaatgtggagatattttgttggagatctcgtctttgaagtttctaagatgacttctccctacattaaatgtacagtctctttcttcatagcatttggaaatttggctgatgataccatcaattttgaggcttttccccacaagctggtgcagtttggagagattcaagaaaaagttgtattgaaattttcacaagaggaatttcttacagcttggtcaactc

SEQ ID NO: 78330 - DNA, 405 bp, Glycine max
aaacgatggaagatgacgcagcgattgaggtgaggaaccatgtttccccagaaccagagccagagtcggaggaggattccagttgttgttgcccaatctgcttgggaccattccttcaactttcctacctcgacaaatgttttcgtatgccctcaccctattttctgttgctcaattttctgtgttttttaatcctaaagtttataaatttgttgcatatgctatagaccctttattgggtttcattcatgaattgggttgcatgctctaatttgtagtcttgggaaacctttttgtttgaaagtaactctcggtaattatatatcaacacaagatttgttttattagaggatcattacttgaaagttcagattttagcaacaattaaaagtaattgtactatat

SEQ ID NO: 78331 - DNA, 403 bp, Glycine max
attgaagttaaaagccttagccttccctacaactccaaacacaaagacatcatcatccatggctgcctccgtctccactgtcggagctgtcaacagagctcttttgaacctgaatggttctggagctggagcttcagctcccagttcagccttctttgggaccagcttgaagaaggttattgcctcaagggtccccaacagcaaggtttccggtggaagcttcaagattgttgctgtagaagagaagaaagagattgaagagacccagcagaccgacaaggacagatggaagggtcttgcctatgatatctcagacgaccaacaagacatcacaagaggaaagggtttggttgactcccttttccaagctccacaggatgctggaactcactatgcagtcatg

SEQ ID NO: 78332 - DNA, 178 bp, Glycine max
  unsure (1)..(178): unsure at all n locations
gggggggggggggaaggggttaaaagaaaaaaaaaaaaaaattttaaaannaaaanaaaaaaccacggggccgttaggtttgtannnnnaattaacacacaaaaaaaaacttcacaaacaaaaaaggggggggggagtctgactttaaataatttccctgggagggcttaacgtctga

SEQ ID NO: 78333 - DNA, 352 bp, Glycine max
ggggaattgaatatatataataagaaaaaggcggaaaaaaaggggaataaaaaccaaaaaaaaacaaaaaaccaaaaaaaaaaaacaacagaaatataaaaatcactcaaaaccttacatcgtttttcccaaaaaactcaaacctctcactcgtttcccatcttttcaacaaaagtcgcagcctttccatcaaaaccagctcttatcgatgcagactcttcacaaacactttctttcgcagaactcaaattactaactgttaaggtcactcacggcctccttcgtctcggagtgaccaaaaacgacatagttctcttcctcgctcccaacgacatccgctacatcgtctgct

SEQ ID NO: 78334 - DNA, 414 bp, Glycine max
ctcgagccgcataacacaaagcacaaagcaaagctcatccttgagttaaaaaatggcagcagcttcttccatggctctctcatccccatccttggctggcaaggccgtgaagctgggcccatcagccccagaagtgggaagggtgagcatgaggaagaccgtcaccaagcaggtctcctcaggaagcccatggtacggcccagaccgagtcaagtacttgggcccattctctggcgagcccccgtcctacctaaccggtgagttcccaggcgactacggctgggacactgctgggctttccgcagacccagaaaccttcgccaagaaccgtgaactcgaagtgatccactccaagtgggccatgctcggagccttgggctgcgtcttcccggagttgctgtcccgcaacggggt

SEQ ID NO: 78335 - DNA, 415 bp, Glycine max
gacctattgtgttttaaatccacaaaatccttttgtgttaaataggtggatgggaaaattgactttcccccagggcacttcccgaagtgttaagagaatgcctctttctatagggggaggagctggtgcaaagaatgctattctcatgaatatgccaaatgctgttctttcaatgtggagatattttgttggagatctcgtctttgaagtttctaagatgacttctccctacattaaatgtacagtctctttcttcatagcatttggaaatttggctgatgataccatcaattttgaggcttttccccacaagctggtgcagtttggagagattcaggaaaaagttgtattgaaattttcacaagaggaatttcttacagcttggtcaactcaggtgcgttctgcaacaactctg

SEQ ID NO: 78336 - DNA, 412 bp, Glycine max
atcaaatggcaacagtgagaacaccattgaattttgattctagcaagcagagcttttgtcagttttctattgaccttctcggtggaggaatcttagtggacaaaactggagattggatcacacttatacaaaattctccaattagtaacttgttgagagttgctgcttggaagaaaggctgtttaatggtcaagattgtgatgtctgggaatgcagcagtcaaaaggagtgattgggcctcattggtacaagtgtttttaacaaacagcaacagtacagagcattttgatgcatgtaagtggacaaaatcagaaccacattcctgggaattgatcttcccaatagaggtatgtggtcctaataatggttttgaaatgtggagttctgagtgggcaaatcaaacttcatggca

SEQ ID NO: 78337 - DNA, 414 bp, Glycine max
attttctcaagagaaactttaagcagatgtctaatgttttgtgggtggctcctgaggacaaggcgagtttatggtcacaacttcattatgtttcgtgtaataatctggaaatgcaagaagcttatcttgtcaatctcgtaaatgtgttacgagaattgtatttgcacagtccagaggaagctcgccaattgagaaggaaagctctctctcgtattgaatggctgcaaaaagctgatgtgcctaccatagcacagattgaagagttccattcgatgcagaggatgatgaatgctcctgattcaaatgataatattgatttactgttgagcattgatttgttgggtttacaaggagcaggtaaagcttttccaaacaaaatttgttttgatgataagcttgtgtttgctaacacac

SEQ ID NO: 78338 - DNA, 371 bp, Glycine max
caataccaggtgattttgtcattggtgtcaagttgacaactataaacaatatgtgtgcatatgggctcaatccaggcatttcaggctctcgtcttttgggcaccattcctcagtccatttcacagcaaactgtctggaatcaaatggcaacagtgagaacaccattgaattttgattctagcaagcagagcttttgtcagttttctattgaccttctcggtggaggaatcttagtggacaaaactggagattggatcacacttatacaaaattctccaattagtaactagtagagagttgctgcttggaagaaaggctgattaatggtcaagattgtgatgtctgggaatgcagcagtcaaaaggagtgat

SEQ ID NO: 78339 - DNA, 412 bp, Glycine max
attttgattctagcaagcagagcttttgtcagttttctattgaccttgtcggtggaggaatcttagtggacaaaactggagattggatcacacttatacaaaattctccaattagtaacttgttgagagttgctgcttggaagaaaggctgtttaatggtcaagattgtgatgtctgggaatgcagcagtcaaaaggagtgattgggcctcattggtacaagtgtttttaacaaacagcaacagtacagagcattttgatgcatgtaagtggacaaaatcagaaccacattcctgggaattgatcttcccaatagaggtatgtggtcctaataatggttttgaaatttggagttctgagtgggcaaatcaaacttcatggcatttgagtttccttattgacaatcccaaaca

SEQ ID NO: 78340 - DNA, 401 bp, Glycine max
ggaatcccttctggatttccgctcacagttatttgcaatagcatttttaatgagatgctcattagatatagctatgaaaaattactgcgccaggctaaagctccaagtatgtttttacaatccttcaaaaattttgtttctttgtgtgtgtatggtgatgataacttaattagtgttcatgaatatgtcaagccttactttagtggttctaaattgaaaagctttctagctagtcataacatcaccattactgatggtattgacaaaactagtgcaactttgcaatttagaaagttagcagattgtgattttctcaagaaaaactttaagcagatgtctaatgttttgtgggtggctcctgaggacaaggcgaagttatggtcacaacttcattatgtttc

SEQ ID NO: 78341 - DNA, 362 bp, Glycine max
atcgccgtgaaacgattgttattattattttcttgttctgcaggttttaatcggtgttttttttatgcctaaaagtcacttgcggaaattaggttaggttcgagcggcactttgccattgttgatggagcggtccgggagcctaaacagcagtcagcatgttatagaaatagctgggagcgccgatgcttccacatcgtctgcatcacatcatgatagacattttaatggcacaaatgtgacgcaccatgaagaaagaattagcggtgcaaggatgcctctttctcagccttcagtttcagcaactagtgtatctaatgggtcaaatagtcgaaactcatcgttcataagacgaggggatac

SEQ ID NO: 78342 - DNA, 345 bp, Glycine max
gttttgaaaactctcttgtaaatctctcaagatttcgaaagagcaggtgatactctaatgccaactttttctgtcccacaagctactgcctcatcttctgaaaacgcggaatgcgctgcatgagctggaattagagctgtctttcgatagagagctagtgttattgaatgtacgaaacatggcatgaccattttggtgagtatgctattcctatgggaaaataacaacacctcttgtaactgtcataatagagcgtgaagtgtgctctattcataaaagaaaataagtttataagttgccataacttatttaggatttgtggcgtgcgccaattaatgagctttt

SEQ ID NO: 78343 - DNA, 409 bp, Glycine max
ctgggaatgcagcagtcaaaaggagtgattgggcctcattggtgcaggtgtttttaacaaacagcaacagtacagagcattttgatgcatgtaagtggacaaaatcagaaccacattcctgggaattgatcttcccaatagaggtatgtggtcctaataatggttttgaaatgtggagttctgagtgggcaaatcaaacttcatggcatttgagtttccttattgacaatcccaaacagtctacagtttttgatattctcttgggaatctctcaagattttgaaattgctggtaatactcttatgccagctttttctgttccacaggctactgccagatcttctgaaaatgcggaatcctctgcatgatctggaatttgtgttttctttcgcttgttcgtttgtttaat

SEQ ID NO: 78344 - DNA, 194 bp, Glycine max
ggtgatgataacttaattagtgttcatgaatatgtcaagcctgactttagtggttctaaattgaaaagctttctagctagtcataacatcaccattactgatggtattgacaaaactagtgcaactttgcaatttagaaagttagcagattgtgattttctcaagagaaactttaagcaaatgtctaatgtttt

SEQ ID NO: 78345 - DNA, 398 bp, Glycine max
gtacaatactatgggatccaaagaggtggcatcgccccactctagaacctatcaggcaacttgactcggtcaaggaaagttcgagggttagcacattgattgagcaggtggttgaagatgaaagtcaaatggagggcttaatgcacaactgctcgagagttatggtctggcagattgatcttgaatcatcttattcatcctatcctcagaaatggattgcaaagaacaacctagatgccattgttcatcttacacttgtgtagaaatcctcagatgcagaagtggagagcagtaaattttcatcctgattggaagattataaagaataggaagtcgcctgctaatgctgttatttatctttacatgctccagtgcctacttcgatattccatttaacg

SEQ ID NO: 78346 - DNA, 385 bp, Glycine max
caattttgaggcttttccccacaagctggtgcagtttggagagattcaggaaaaagttgtattgaaattttcacaagaggaatttcttacagcttggtcaactcaagtgcgtcctgcaacaactctgttggctgatgggtgtccatatttgtatgcaatggtgcatgatagttcagtgtctacaataccaggtgattttgtcattggtgtcaagttgacaaccataaacaatatgtgtgcatatgggctcaatcctggtatttcaggttctcgtcttttgggcaccattcctcagtccatttcacagcaaactgtttggaatcaaatggcaacagtgagaacaccattgaattttgattctagcaagcagagcttttgtcagttt

SEQ ID NO: 78347 - DNA, 413 bp, Glycine max
agcttttgtcagttttctattgaccttctcggtggaggaatcttaggggacaaaactggagattggatcacacttatacaaaattctccaattagtaacttgttgagagttgctgcttggaagaaaggctgtttaatggtcaagattgtgatgtctgggaatgcagcagtcaaaaggagtgattgggcctcattggtacaagtgtttttaacaaacagcaacagtacagagcattttgatgcatgtaagtggacaaaatcagaaccacattcctgggaattgatcttcccaatagaggtatgtggtcctaataatggttttgaaatgtggagttctgagtgggcaaatcaaacttcatggcatttgagtttccttattgacaatcccaaacagtctacagtttttgatattct

SEQ ID NO: 78348 - DNA, 410 bp, Glycine max
gaaaaattgatgcgtgaaaggacgcacctgctgttggcttgttgttcaaggatggcaatttgtaagaaagatgtttggagagttgaatgtggaatcccttctggatttccgctcacagttatttgcaatagcatttttaatgagatgctcattagatatagctatgaaaaattactgcgccaggctaaagctccaagtatgtttttacaatccttcaaaaattttgtttctttgtgtgtgtatggtgatgataacttaattagtgttcatgaatatgtcaagccttactttagtggttctaaattgaaaagctttctagctagtcataacatcaccattactgatggtattgacaaaactagtgcaactttgcaatttagaaagttagcagattgtgattttctcaagag

SEQ ID NO: 78349 - DNA, 325 bp, Glycine max
tcaaacttcatggcatttgagtttccttattgacaatcccaaacagtctacagtttttgatattctcttgggaatctctcaagattttgaaattgctggtaatactcttatgccagctttttctgttccacaggctactgccagatcttctgaaaatgcggaatcctctgcatgatctggaatttgtgttttctttcgcttgttcgtttgtttaattcaataaaggaaattaggcatgaccctcttgttgagtatgctctgcctatttgaaaatttccacacctcttttaattgtcgtaatgatgtgtgaagtgtgtgttatttt

SEQ ID NO: 78350 - DNA, 383 bp, Glycine max
gcagcagtcaaaaggagtgatagggcctcattggtacaagtgtttttaacaaacagcaacagtgcagagcattttgatgcatgtaagtggacaaaatcagaaccacattcctgggaattgatcttcccaatagaggtatgtggtcctaataatggttttgaaatgtggagttctgagtgggcaaatcaaacttcatggcatttgagtttccttattgacaatcccaaacagtctacagtttttgatattctctagagaatctctcaagattttgaaattgctggtaatactcttatgccagctttttctgttccacaggctactgccagatcttctgaaaatgcggaatcctctgcatgatctggaaatttgtgtttctttcg

SEQ ID NO: 78351 - DNA, 403 bp, Glycine max
ctggtgcagtttggagagattcaggaaaaagttgtattgaaagtttcacaagaggaatttcttacagcttggtcaactcaggtgcgtcctgcaacaactctgttggctgatgggtgtccatatttgtatgcaatggtgcatgatagttcagtgtctacaataccaggtgattttgtcattggtgtcaagttgacaaccataaacaatatgtgtgcatatgggctcaatcctggtatttcaggttctcgtcttttgggcaccattcctcagtccatttcacagcaaactgtttggaatcaaatggcaacagtgagaacaccattgaattttgattctagcaagcagagcttttgtcagttttctattgaccttctcggtggaagaatcttagtggacaaaactg

SEQ ID NO: 78352 - DNA, 410 bp, Glycine max
gtttggaatcaaatggcaacagtgagaacaccattgaattttgattctagcaagcagagcttttgtcagttttctattgaccttctcggtggaggaatcttagtggacaaaactggagattggatcacacttatacaaaattctccaattagtaacttattgagagttgctgcttggaagaaaggctgtttaatggtcaagattgtgatgtctgggaatgcagcagtcaaaaggagtgattgggcctcattggtacaagtgtttttaacaaacagcaacagtacagagcattttgatgcatgtaagtggacaaaatcagaaccacattcctgggaattgatcttcccaatagaggtatgtggtcctaataatggttttgaaatgtggagttctgagtgggcaaatcaaac

SEQ ID NO: 78353 - DNA, 335 bp, Glycine max
  unsure (1)..(335): unsure at all n locations
ttatcaaccttactcgaatcaatggccctcccaaacctcattcccttttattaaaaataccgggacaaggccaatttttaaaggggtacaaatagcttggctttaaatcctcctttatcggctgttggttacccgggtatctctatcacaactactcttattccttgagttagtgccttttatgtgagtcgtaggtcaccttctcttggtttttaaccctaccactcaatggagtncagcagtaactaaaacctacccacatcgtctcttgcatagtgtggaagagcttncaccagtggatttgtttgtgacaacagcagatcctgaacttgaac

SEQ ID NO: 78354 - DNA, 354 bp, Glycine max
  unsure (1)..(354): unsure at all n locations
gagacccgttatagcggttccagctactgctgcgctcgtatgcagagcgtactcgcgaaagtcactgaccccaatcggacttcttgcagcgttcgtgacagcagttgtacacgcgttacatccgtggagagtattctttgctcttcttgcagtcttcttcttggctggcagtaccgcaacgaaggtcaagcatgatatcaaagtgaaattgacacagtcagcgacaggtgcatctggtggagaaggcactcgcaaccatgttcaagttattgcgaactccggcgtagcctcggtgctaatattactacacctctggcagctaanggaaagatgggagatatggtgaccagggtc

SEQ ID NO: 78355 - DNA, 407 bp, Glycine max
ctgctgtgttcactcccactctcaaccttgccatttcatccagcacatactgttgtagaagaagaacatcatctaccacaagaagagttgttacagtgagagctagctccacagagaaggatgaatccaaggacaaagatgcttcagcattcaacccttttgggtttgtcactgacaacccttctagccgaaatgccattcaactgcctgaaaaccctgctgaggatggcaacgttggccaaatgctatatggtcagcaaatggcagaagaggaacaattgtcttccttcatggggccccaacgcaatcttttagctaccgagttgttatgtctcagttgtcggatgccgggttccactgctttgcaccagactggataggatttggtttcagtgacaaaccacaac

SEQ ID NO: 78356 - DNA, 77 bp, Glycine max
aaaaaaaaaattttaaaaaaaaaaaaaaaaaaaaaaaaggagagaaaaaaaaaaaaaaaaaaaaaaaaaaaaaaaaa

SEQ ID NO: 78357 - DNA, 395 bp, Glycine max
caagttatgagcaagatggcagaaatgataaacagtctttgtggtggtgatgaaaaattgatgcgtgaaaggacgcacctgctgttggcttgttgttcaaggatggcaatttgtaagaaagatgtttggagagttgaatgtggaatcccttctggatttccgctcacagttatttgcaatagcatttttaatgagatgctcattagatatagctatgaaaaattactgcgccaggctaaagctccaagtatgtttttacaatccttcaaaaattttgtttctttgtgtgtgtatggtgatgataacttaattagtgttcatgaatatgtcaagccttactttagtggttctaaattgaaaagctttctagctagtcataacatcaccattactga

SEQ ID NO: 78358 - DNA, 365 bp, Glycine max
ctataaaaatatattatttttaaagataaaagatgaaaacaaagtgtgattaaaagataaaacaaaaacatatttgaacctaatttttataataactactgtcaacattatatttcaaatgatttctaaacgaatgacgactgtaaaaatgtttagtctggagaatcatgaaattaaactcatttatttttcattaaaaaaactcatttatttttttagatcgatttttaattcaagaccacgtcacaatatcttagttgcggtcctgcggatttttgttaaatggcgcagggagtattttctggtcaacatatatagtaatagggataattgttagcaagttagcattttaaaattttaacgat

SEQ ID NO: 78359 - DNA, 275 bp, Glycine max
cagtttttgatattctcttgggaatctctcaagattttgaaattgcgggtgatactcttatgccagctttttctgttccacatgctactgccagatcttctgaaaatgcggaatcctctgcatgatctggaatttgtgttttctttcgcttgttcgcttgtttaattcaataaaggaaattaggcatgaccctcttagtgagtatgctctgcctatttgaaaatttccacacctcttttaattgctcgaatgatgtgtgaaaggtgtgttatttt

SEQ ID NO: 78360 - DNA, 147 bp, Glycine max
gcttgactgatgcacctactagctgaattggtgagggaatgctcaccatcggtcggtcagaaggacgttatgggacgcaaattagcgtggtaccataacactggtgtgcacgttatggacgcagttacgacaatcggaaaagatgct

SEQ ID NO: 78361 - DNA, 418 bp, Glycine max
cacagattgaagagttccattcgatgcagaggatgatgaatgctccggattcaaatgataatattgatttactgttgagcattgatttgttgggtttacaaggagcaggtaaagcttttccaaacaaaattgtttttgatgataagcttgtgttggctaacacacaagaattctttgatggaaattttccagtggattcttggttaccaatttttgtgaattgtctttatcctgtaagtcaattaccttcagaagctgtcgttgtaaatgttacatgtggtagtggacgtggtggtttacccaccactgcttggattagatctgcaattaacaatcgctcctcagatatcaacaaaaggattcgcacagcacttgggaaaggtaagaaaattgtttttcttactaaagttgatccttt

SEQ ID NO: 78362 - DNA, 411 bp, Glycine max
ctcaggtgcgtcctgcaacaactctgttggctgatgggtgtggatatttgtatgcaatggtgcatgatagttcagtgtctacaataccaggtgattttgtcattggtgtcaagttgacaaccataaacaatatgtgtgcatatgggctcaatcctggtatttcaggttctcgtcttttgggcaccattcctcagtccatttcacagcaaactgtttggaatcaaatggcaacagtgagaacaccattgaattttgattctagcaagcagagcttttgtcagttttctattgaccttctcggtggaggaatcttagtggacaaaactggagattggatcacacttatacaaaattctccaattagtaacttgttgagagttgctgcttggaagaaaggcttgttaatggtca

SEQ ID NO: 78363 - DNA, 398 bp, Glycine max
ctcgagccgaatcggctcgagggtggaggaatcttagtggacaaaactggagattggatcacacttatacaaaattctccaattagtaacttgttgagagttgctgcttggaagaaaggctgtttaatggtcaagattgtgatgtctgggaatgcagcagtcaaaaggagtgattgggcctcattggtacaagtgtttttaacaaacagcaacagtacagagcattttgatgcatgtaagtggacaaaatcagaaccacattcctgggaattgatcttcccaatagaggtatgtggtcctaataatggttttgaaatgtggagttctgagtgggcaaatcaaacttcatggcatttgagtttccttattgacaatcccaaacagtctacagtttttga

SEQ ID NO: 78364 - DNA, 276 bp, Glycine max
ggtcaagattgtgatgtctgggaatgcagcagtcaaaatgagtgattgggcctcattggtacaagtgtttttaacaaacaacaacagttcaaaccattttgatgcatgtaagtggacaaaatcagaaccacattcctgggaattgatcttcccaatagaggtatgtggtcctaataatggttttgaaatgaggagttctgagtgggcaaatcaaacttcatgggatttgagtttccttattgacaatgccaaacagtctacagtttttgatattct

SEQ ID NO: 78365 - DNA, 124 bp, Glycine max
gtgcatatgggctcaatcctggtatttcaagttctcgtcttgggggcaccattcctcagtccatttcacaacaaactgtttggaatcaaatggccacaggggggacaccattggattttgattc

SEQ ID NO: 78366 - DNA, 238 bp, Glycine max
gaaaattgtttttcttactagagttgatccttttccagtagctttactggctgttctttttggcgttaagaatgaaattctgagttctaacgccactaatcctatgctgacgcgacttcttgagaactgtaagagtctcaaatatctggttgatgagtgtccttttgcatttgtgaactagtatgtagtattttattcacttaaataaagcgcattactatgtgcaatgagtgtgttt

SEQ ID NO: 78367 - DNA, 78 bp, Glycine max
  unsure (1)..(78): unsure at all n locations
tatgacgncgcatgcacgcgnacgnaagcncggaatncggcncgagagcaaaagcaagcacaccaaancancgcaaaa

SEQ ID NO: 78368 - DNA, 246 bp, Glycine max
atgggctcaatcctggtatttcaggttctcgtcttttgggcaccattcctcaggccatttcacagcaaactgtttggaatcaaatggcaacagtgagaacaccattgaattttgattctagcaagcagagcttttgtcagttttctattgaccttctcggtggaggaatcttagtggacaaaactggagattggatcacacttatacaaaattcttcaattagtaacttggtgagagttgctgctt

SEQ ID NO: 78369 - DNA, 206 bp, Glycine max
caatgcaggatgttcaggttacaattgattggtttatttgctctcaggaatgtgttcccaggacctattgtgttttaaatccacaaaatccttttgtgttaaataggtggatgggaaaattgactttcccccagggcacttcccgaagtggtaagaagaatgcctttttctatagggggaggagctgggtccaaaaatgctttttt

SEQ ID NO: 78370 - DNA, 89 bp, Glycine max
ctcgagccgaatcggctcgagcggctcgagatgaaatttaaggaaaaaaaaaaataataataaaataaaattataaataaaataaataa

SEQ ID NO: 78371 - DNA, 192 bp, Glycine max
gtacgtagctcggaatcggtcgagctgactgtcgtgtcttcttggctttcttgctcaggaacaacatggatattgtatcacgagcgttggcatatatcgtggctatacgtgggcccaaatttaacacaccttggtcaagtgctttttggaaaaggcggaccaatgtggaaaccgctctttgtctgtaccccc

SEQ ID NO: 78372 - DNA, 336 bp, Glycine max
gtcaagccttactttagtggttctaaattgaaaagcttggtagctagtcataacatgaccattactgatggtattgacaaaactagtgcaactttgcaatttagaaagttagcagattgtgattttctcaagagaaactttaagcagatgtctaatgttttgtgggtggctcctgaggacaaggcgagtttatggtcacaacttcattatgtttcgtgtaataatctggaaatgcaagaagcttatcttgtcaatctcgtaaatgtgttacgagaattgtatttgcacagtccagaggaagctcgcctattgagaaagaaagctctctcttgtatt

SEQ ID NO: 78373 - DNA, 215 bp, Glycine max
attcacagtttatcaaaactatcatacccacatggattggcgatgaatgtgagagagtccaattattcaaacgctttgtgatgcttgtgagagcgcccaggctatagttatttgcgcctctgataaggctgcactttgtctagcctgtgatgagaagattaatctttttgagcttacaggatcacatgtgcaacaagctatctcgtacgtatgtt

SEQ ID NO: 78374 - DNA, 404 bp, Glycine max
gaaaagctttctagctagtcataacatcaccattactgatggtattgacaaaactagtgcaactttgcaatttagaaagttagcagattgtgattttctcaagagaaactttaagcagatgtctaatgttttgtgggtggctcctgaggacaaggcgagtttatggtcacaacttcattatgtttcgtgtaataatctggaaatgcaagaagcttatcttgtcaatctcgtaaatgtgttacgagaattgtatttgcacagtccagaagaagctcgccaattgagaaggaaagctctctctcgtattgaatggctgcaaaaagctgatgtgcctaccatagcacagattgaagagttccattcaatgcaaaggatgatgaatgctcctgattcaaatgataata

SEQ ID NO: 78375 - DNA, 331 bp, Glycine max
gcaatttgtaagaaagatgtttggagagttgaatgtggaatcccttctggatttccgctcacagttatttgcaatagcatttttaatgagatgctcattagatatagctatgaaaaattactgcgccaggctaaagctccaagtatgtttttacaatccttcaaaaattttgtttctttgtgtgtgtatggtgatgataacttaattagtgttcatgaatatgtcaagccttactttagtggttctaaattgaaaagctttctagctagtcataacatcaccattactgatggtattgacaaaaactagtgccaacttttgcaattttaaa

SEQ ID NO: 78376 - DNA, 371 bp, Glycine max
gaaagatgtttggagagttgaatgtggaatcccttctggatttccgctcacagttatttgcaatagcatttttaatgagatgctcattagatatagctatgaaaaattactgcgccaggctaaagctccaagtatgtttttacaatccttcaaaaattttgtttctttgtgtgtgtatggtgatgataacttaattagtgttcatgaatatgtcaagccttactttagtggttctaaattgaaaagctttctagctagtcataacatcaccattactgatggtattgacaaaactagtgcaactttgcaatttagaaaggttgcagattgtgattttttcaagagatactttaagcagatgtcttatgttt

SEQ ID NO: 78377 - DNA, 128 bp, Glycine max
ctctgatcctcaagaggaactagccgacagggggacacaactctgataatgtataaacggagacataattggtactgatggcattgccatgggtgctcaccaaaaggccatcgttcattggtgggctc

SEQ ID NO: 78378 - DNA, 125 bp, Glycine max
atgagaactgttgctgctgttgacatggaatttagtgggacggctaaaactggtgtggcagccactgatttaaatgttgcaaagcttaaaatgatccttgatgagtatcaattatgatttcgttt

SEQ ID NO: 78379 - DNA, 327 bp, Glycine max
attgaagagttccattcgatgcagaggatgatgaatgctcctgattcaaatgataatattgatttactgttgagcattgatttgttgggtttacaaggagcaggtaaagcttttccaaacaaaattgtttttgatgataagcttgtgttggctaacacacaagaattctttgatggaaattttccagtggattcttggttaccaatttttgtgaattgtctttatcctgtaagtcaattaccttcagaagctgtcgttgtaaatgttacatgtggtagtggacgtggtggtttacccaccactgcttggattagttctgcagttaac

SEQ ID NO: 78380 - DNA, 184 bp, Glycine max
ctcgagccgccaaaataaaaaaacttccttttttgcaattggcatttgtcaccaaacaattgttggtaggtcttacaagcaagctttagcaacgacaatgaagaaaggggtcttacagctggacttacatgggggtagaatcaagccaaaagcttttgaaaccgcatcttggcctttaaggggt

SEQ ID NO: 78381 - DNA, 200 bp, Glycine max
ctagactcgctgcacgcaacgaagctcgtttcggctcgaggaatatgatattgttcatgaccataataaccctcagcggggattcactctggggaaagtgctacataaaacacacccatacatatacagtaatattgttttcatgtctttactaataattgtattaaaaaatacttttttctaagaagaattctttcaaa

SEQ ID NO: 78382 - DNA, 396 bp, Glycine max
  unsure (1)..(396): unsure at all n locations
gatgtctgggaatgcagcagtcaaaaggagtgattgggcctgagtggtacaagtgtttgtagacaaacagcaacagtacagagcattttgatgcatgtaagtggacaaaatcagaaccacattcctgggaattgatcttcccaatagaggtatgtggtcctaataatggttttgaaatgtggagttctgagtgggcaaatcaaacttcatggcatttgagtttccttattgacaatcccaaacagtctacagtttttgatattctcttgggaatctctcaagattttgaaattgctggtaatactcttatgccagctttttctgttccacaggctactgccagatcttctgaaaatgcggaatcctttgcatgatctggaanttgtgttttctttc

SEQ ID NO: 78383 - DNA, 70 bp, Glycine max
ctttccacatacaccatttttgtattacaaagccggcgaacacggcaacaacgccaatggaactttactt

SEQ ID NO: 78384 - DNA, 199 bp, Glycine max
gccactaatcctatgctgtctcgacttcttgagaactgaaagagtctcaaatatctggttgatgagtgtccttttgcatttgtgaactagtatgtagtattttattcacttaaataaagcgcattactatgtgcaatgagtgtgtttaaattttaaataaaattttattaaaattataataatttttacttatattttt

SEQ ID NO: 78385 - DNA, 169 bp, Glycine max
gaattctttgatggaaattttccagtggattcttggttaccaatttttgtgaattgtctttatcctgtaagtcaattaccttcagaagctgtcgttgtaaatgttacatgtggtagtggacgtggtggttttctttctattgttttgatttatctttatcttatttttc

SEQ ID NO: 78386 - DNA, 159 bp, Glycine max
cacgcgtacgtaagcttgaatacggctcgagatttcaccatcttttcttaagacagagaattgtgggatccggcttgcacaaaagcgatggctttgtcatataatccaaacctttgatttgattcatggagattggtatctttgatgccccctggatat

SEQ ID NO: 78387 - DNA, 202 bp, Glycine max
agacaatgcagcactctgacagtggggctgtcatctcgggacacaaaggttttctacaccaatccactgcccggttcttgtaacacagtggcttttgccaaactctaaaaaagattcgctctgaagcgcatttcgagaaaaatggatttgatgggattcccagttgttctggaagaaatgtgtcttaagtattttgatatat

SEQ ID NO: 78388 - DNA, 147 bp, Glycine max
ctcgagccgctttttcatttgatatatatatatatatatatgaattaattaatatatattattggaggaggagaatgcatgtgtgttgcagttattatagtactatatattgatatacaagtgcgttaggattattattatgcatgt

SEQ ID NO: 78389 - DNA, 377 bp, Glycine max
tgatggtattgacaaaactagtgcaactttgcaatttagaaagttagcagattgtgattttctcaagagaaactttaagcagatgtctaatgttttgtgggtggctcctgaggacaaggcgagtttatggtcacaacttcattatgtttcgtgtaataatctggaaatgcaagaagcttatcttgtcaatctcgtaaatgtgttacgagaattgtatttgcacagtccagaggaagctcgccaattgagaaggaaagctctctctcgtattgaatggctgcaaaaagctgatgtgcctaccatagcacagattgaagagttccattcgatgcagaggatgatgaatgctcctgattcaaatgataatattgatttac

SEQ ID NO: 78390 - DNA, 294 bp, Glycine max
cttccctacaactccaaacacaaagacatcatcatccatggctgcctccgtctccactgtcggagctgtcaacagagctcttttgaacctgaatggttctggagctggagcttcagctcccagttcagccttctttgggaccagcttgaagaaggttattgcctcaagggtccccaacagcaaggtttccggtggaagcttcaagattgttgctgttgaagagaagaaagagatttgagagacccatcagaccgacaaggacagatggaaagggcttgcctatgatatctcaga

SEQ ID NO: 78391 - DNA, 90 bp, Glycine max
ggagatttagctgcagatgttacagatagtttgttgcatgaaacttttgctagagtatatccttctggtaaagctgcaaaagttgttttt

SEQ ID NO: 78392 - DNA, 303 bp, Glycine max
aacaactaaatcatatcccataatgcaaggttggctacattcatggatggaatgaaatcattaaagggaaccgacactaaatgtattactatcttttaatcagataaaaaaagttcacctgtcatgctctttgtcagtttgattaatgctaaaaaaaatcggttaatacctaccatttacattttttatcagaatgctgtatacagttcttaacctcgtaaacttgcaggttattagatggtgcatagcagattttcacctttttgtgcttttcaaaagttaaaccatttttctgggaacaca

SEQ ID NO: 78393 - DNA, 410 bp, Glycine max
caagattgtgatgtttgggaatgcagcagtcaaaaggagtgattgggcctcattggtacaagtgtttttaacaaacagcaacagtacagagcattttgatgcatgtaagtggacaaaatcagaaccacattcctgggaattgatcttcccaatagaggtatgtggtcctaataatggttttgaaatgtggagttctgagtgggcaaatcaaacttcatggcatttgagtttccttattgacaatcccaaacagtctacagtttttgatattctcttgggaatctctcaagattttgaaattgctggtaatactcttatgccagctttttctgttccacaggctactgccagatcttttgaaaatgcggaatcctctgcatgatctggaatttgtgttttctttcgcttgt

SEQ ID NO: 78394 - DNA, 318 bp, Glycine max
ctcgagccgtggagattggatcacacttatacaaaattctccaattagtaacttattgagagttgctgcttggaagaaaggctgtttaatggtcaagattgtgatgtctgggaatgcagcagtcaaaaggagtgattgggcctcattggtacaagtgtttttaacaaacagcaacagtacagagcattttgatgcatgtaagtggacaaaatcagaaccacattcctgggaattgatcttcccaatagaggtatgtggtcctaataatggttttgaaatgtggagttctgagtgggcaaatcaaacttcatggcattt

SEQ ID NO: 78395 - DNA, 422 bp, Glycine max
ccgtccgtaagctcggaattcggttcgagcgtctttgaagtttttaagatgacttctccctacattaaatgtccagtctctttcttcatagcatttggaaatttggctgatgacaccatcaattttgaggcttttccccacaagctggtgcagtttggagagattcaggaaaaagttgtattgaaattttcacaagaggaatttcttacagcttggtcaactcaggtgcgtcctgcaacaactctgttggctgatgggtgtccatatttgtatgctatggtgcatgatagttcagtgtctacaataccaggtgattttgtcattggtgttaagttgacaaccataaacaatatgtgtgcatatgggctcaatcctggtatttcaggttctcgtcttttgggcaccattcctcagtctatttc

SEQ ID NO: 78396 - DNA, 390 bp, Glycine max
caaatggcaacagtgagaacaccattgaattttgattctagcaagcagagcttttgtcagttttctattgaccttctcggtggaggaatcttagtggacaaaactggagattggatcacacttatacaaaattctccaattagtaacttattgagagttgctgcttggaagaaaggctgtttaatggtcaagattgtgatgtctgggaatgcagcagtcaaaaggagtgattgggcctcattggtacaagtgtttttaacaaacagcaacagtacagagcattttgatgcatgtaagtggacaaaatcagaaccacattcctgggaattgatcttcccaatagaggtatgtggtcctaataatggttttgaaatgtggagttctgagtgg

SEQ ID NO: 78397 - DNA, 321 bp, Glycine max
aaaaaaaaaaaataaaaaaaaaaaaaaaaaaaaaaaaaaaaaaaaaaaaaaaaaaaaaaaaaaaaaaaaaaaaaaaaaaaaaaaaaaaaaaaaataaataaaaaaaaaaaatagattaaaaaaaaaaattaataaaaaaactctaataagaaaaattatataatagttaagccaaaaaaaaaagcttggcggtaccaactatattggcttcttgccctccatatttttttgctatggctcatgaggggtaagtgtctttaactttagaggacactgttaaagacgacagggttacaaggctaaacattttctttggataaa

SEQ ID NO: 78398 - DNA, 299 bp, Glycine max
aattgaagttaaaagccttagcctttcctacaacttcaaacacaaagacatcattatccatgggtgccttcggctccactgtcggagctggcaacaaaactcttttgaacccgaatgggtctggggctggggctttagcttccaatttagccttcttttggacccacttggaaaaaggtattggctttagggttcccaacaacaaaggtttcgggggaagctttaaaaatgttgctttttaaaaaaaaaaagagattggagagacccacccaacccaccagggccgattggaagggctt

SEQ ID NO: 78399 - DNA, 382 bp, Glycine max
ctcgagccgctccaagtatgtttttacaatccttcaaaaattttgtttctttgtgtgtgtatggtgatgataacttaattagtgttcatgaatatgtcaagccttactttagtggttctaaattgaaaagctttctagctagtcataacatcaccattactgatggtattgacaaaactagtgcaactttgcaatttagaaagttagcagattgtgattttcttaagagaaactttaagcagatgtctaatgttttgtgggtggcttctgaggacaaggcgagtttatggtcacaacttcattatgtttcgtgtgataatctggaaatgcaagaagcttatcttgtcaatctcgtaaatgtgttacgagaattgtatttgca

SEQ ID NO: 78400 - DNA, 213 bp, Glycine max
gagctatgaccgtcgcatgcaccgcgtacccgtaagctcggaatttcggcttcgagcaatggacaacccacgacgggtttttgctttctacaaaggatcaccttcacaacacaagggttcccaatacaaggcgctttcacatctttcctcaacccaatgcgccactaaaagagaacttgagagtgacaagagattcttctgaggcttaagatc

SEQ ID NO: 78401 - DNA, 238 bp, Glycine max
  unsure (1)..(238): unsure at all n locations
gcattttgatgcatgtaagtggacanaatcagaaccacattcctgggaattgatcttcccaatagaggtatgtggtcctaataatggttttgaaatgtggagttctgagtgggcaaatcaaacttcatggcatttgagtttccttattgacaatcccaaacagtctacagtttttgatattctcttgggaatctctcaagattttgaaattgctggtaatactcttatgccagctttt

SEQ ID NO: 78402 - DNA, 318 bp, Glycine max
caccgccctttaggggacaccaaaccgaaatccccttaggatccaaaaaatccgaaagggaagtgggggaaaaaagggagaggaagaggtccgagaggaagaagaagaagaagagggggacgaggaaaaagaggaggaggaagaagaagaagaagaagaaaacgacgtcgtcaaacaacagcagcagcaacagcaagacgaagacgacattccgatatcgaaacttctggaaccgttgggcaaggaccagcttctgaaccttctttgcgacgcggcggcgaagcaccgcgatgtggaggagaggatccgaaaggcggc

SEQ ID NO: 78403 - DNA, 350 bp, Glycine max
gcagaaagcaagctcatcctagagttttaaaaatggcagcagcctcctccatggctctctcttccccatccttggctggcaaggccgtgaagctgggcccatcagcccccgaagtcgggagggtcagcatgaggaagaccgtcaccaagcaggcctcctccggaagcccatggtacggcccagaccgcgtcaagtacttgggcccattctctggcgagcccccgtcctacctcactggcgagttcccaggtgactacggctgggacactgctgggctttcggccgacccagaaaccttcgccagaaaccgtgagctcgaagtgatccactccaggtgggccatgctcggg

SEQ ID NO: 78404 - DNA, 391 bp, Glycine max
ctcgagccgctcgagccgattcggctcgaggctcaatcctggtatttcaggttctcgtcttttgggcaccattcctcagtccatttcacagcaaactgtttggaatcaaatggcaacagtgagaacaccattgaattttgattctagcaagcagagcttttgtcagttttctattgaccttctcggtggaggaatcttagtggacaaaactggagattggatcacacttatacaaaattctccaattagtaacttgttgagagttgctgcttggaagaaaggctgtttaatggtcaagattgtgatgtctgggaatgcaacagtcaaaaagagtgattgggcctcattggtacaagtgtttttaacaaacagcaacagtacagagcatttt

SEQ ID NO: 78405 - DNA, 348 bp, Glycine max
gagagagtatagagagaagtgtgtgcgtgcgtgcgtgtgtgtgcagcgttttcttttgcatcaaccaacccaagtacaaccgccaactacgtcattttaatccaacaaaaattcccattcagcttcttttagagagagaaaagattcgaattttaacggagaaaaatagcgaaaagacttcaaatattcttaattgtgcgactacaaacgtcggactagtaactcaaagaaagaagggaaacaaaatgcatctatctttgacggctgtctatgaaactatcatattgtgaaaacgcaccaaggaaacacatcaggcgctttcgaacatacacattactgtgcagattt

SEQ ID NO: 78406 - DNA, 388 bp, Glycine max
cttgttgagagttgttgcttggaagaaaggctgtttaatggtcaagattgtgatgtctgggaatgcagcagtcaaaaggagtgattgggcctcattggtacaagtgtttttaacaaacagcaacagtacagagcattttgatgcatgtaagtggacaaaatcagaaccacattcctgggaattgatcttcccaatagaggtatgtggtcctaataatggttttgaaatgtggagttctgagtgggcaaatcaaacttcatggcatttgagtttccttattgacaatcccaaacagtctacagtttttgatattctcttgggaatctctcaagattttgaaattgctggtaatactcttatgccagctttttctgttccacaggctact

SEQ ID NO: 78407 - DNA, 381 bp, Glycine max
ctggtgcaaagaatgctattctcatgaatatgccaaatgctgttctttcaatgtggagatattttgttggagatctcgtctttgaagtttctaagatgacttctccctacattaaatgtacagtctctttcttcatagcatttggaaatttggctgatgataccatcaattttgaggcttttccccacaagctggtgcagtttggagagattcaggaaaaagttgtattgaaattttcacaagaggaatttcttacagcttggtcaactcaggtgcgtcctgcaacaactctgttggctgatgggtgtccatatttgtatgcaatggtgcatgatagttcagtgtctacaataccaggtgattttgtcattggtgtcaagt

SEQ ID NO: 78408 - DNA, 393 bp, Glycine max
ggttaattgtggagtattttggaaggatgtcttacgttgctcataacgttaatcagccccaagagaaagatttgttggagggaaatttttcctttgatattaaatctcgctctagattggaaaaagtttcctctacaaaagcacaatttgttagtggaaaaaccttcaaatatgatataattggtgctggttcacattcttcagaagattttcctgaaaaggaagatcaagaaaaacccaaaaagattgatgccagattgagacaaagaatagatcctcaatacaatgaggttcaggctcagatggaaacaaatttgtttaaattgtctcttgatgatgttgaaactcctaaaggttccatgttggatctgaaaatttctcaatctaaaattg

SEQ ID NO: 78409 - DNA, 419 bp, Glycine max
tgcacccgtccgtaagctcggaattcggttcgggaaacacaatgtcatgagagggaatggcatggtatttattatattatatatctggcaacaatatatattatatattggaactatttgataggtacccttaatagagagattaaacagactcactatacagctccaaaagatttgtattttggttaataaacttagtaaaggaccatatgatcagcagttattagtaatttgggttagttattgtgctaatatgcatcttgcattttatggggaaagatagaggtaaggcttaagaatttgatatacctttatatgggggggtttttgtcataggcattggctttcattataatatgcattaattttaaaaaattactagtcattttgatgtttcttgttgaagaaaccacatattt

SEQ ID NO: 78410 - DNA, 393 bp, Glycine max
ccccttccgtaggttcggatttcggttcgggcttttttttccccattcccaaaccaaacttaaccggggtttggccttggttctttttttttttcattacccattttaaaaggtaaaaccccccccaccctttttttttttttgtttttgggagtagctttacctgcccaggtttaatgggaccgcaccatgggggttggttggggcccccaattaaaggctgaaggccatattacactggggtcaattcaaaggttgtgagtaccgatggaaatgatttcggcagcacaaacgataaggtttcagcaaactcaattcctcaaactcctcggagtgagggtgagatcttgcggtcatccaatttgaagagctttcccttgtcagaacttaaga

SEQ ID NO: 78411 - DNA, 424 bp, Glycine max
ccgtccgtaggctcggaattcggttcgagaggaaagtgaaagaaagtggacacagccaactgccccagttcctagttgttttagctcacattttacggcgtttaaatttagagagtttgggggctccaaatccgagttggaacttacaaagtatattctaaagaatgcaaaggtcctcaagacagtgacagtaaagatggcgaagtggttggagccaaataaaacaagtcatgctatgacaaaattggattcgttactatcatcctcaaagtattgtcgtttggcaaattatcaaattctgtgccaagattttccttgatgtatgcaattcgttcaggttgatgacaagcgatgatcactatgcggtgacaatttgaatggtaaaagagtgtttgacatcaatgatgttagtagtagtttctgt

SEQ ID NO: 78412 - DNA, 131 bp, Glycine max
cccccgtccgtaggttgggatttcggttggggttttgagcaaatgttttttcagcgggggttttcaaaacaaggcaaggttgtggtggtttaattccaataccaggaattttaacaaggatttcccctggc

SEQ ID NO: 78413 - DNA, 61 bp, Glycine max
gaactgggtccggtacggtccaacagtggcagatttgcaattcaattcaatttatttgttt

SEQ ID NO: 78414 - DNA, 204 bp, Glycine max
ctgaagccaaatttgctagagcgattaaggagggccacgttctattaatagatgttgaatggggcgcgccagtgattgtatttacaccatgtagtctcaagactgagaattgggcaatcgcgcttgcacaaaaacgagcactatatcagtcaatactaacccctgtattggtgcaaacgatttggaatttatgcagcactctgg

SEQ ID NO: 78415 - DNA, 297 bp, Glycine max
cgagatcctaactagttccctatcaaaacttactgcgccagggtcaaggtccaaatatgttctgacaatcctacataaatcgtgaaaatacgcacaaccgtcttgactatatcttaacaggagtgagatgcactgcacacgatttatttgatcgcatcatgatagaatagttgagcagctagaactaacctcaccgtccatgttacaatggacacaactcaaacaatgtgactaccgatggaaatcatttatggcgctcacaccatcaggaacgagcaaactcaatatctcaaactc

SEQ ID NO: 78416 - DNA, 385 bp, Glycine max
ccttccttccccccttccttagcttcggtttctccttcccgaaaaaaaaaaaaaattttttttaaaaaaaaaaaaaaaaaaaaaggagaaatattttattatattatataaaatttaaaaaaaaaaaaattataaataaaaataattaaatttaattttttttatttttttagggcccccccccccctttttgccttttccccccccgtttttttttcccccccgtcccttggggcttccccctttttcttttttggggccctttttaacctttcccttttcttggcctttcctttttcctttttgaattttttttcccttcccatttccccccccctttccaccccgaaccttttttttttaacccttgggtcccttttggggg

SEQ ID NO: 78417 - DNA, 330 bp, Glycine max
ccgaagtgttaagagaattcctctttctatagggggaggagctggtgcaaagaatgctattctcatgaatatgccaaatgctgttctttcaatgtggagatattttgttggagatctcgtctttgaagtttctaagatgacttctccctacattaaatgtacagtctctttcttcatagcatttggaaatttggctgatgataccatcaattttgaggcttttccccacaagctggtgcagtttggagagattcaagaaaaagttgtattgaaattttcacaagaggaatttcttacagcttggtcaacttaagtgcgttctgcaacaac

SEQ ID NO: 78418 - DNA, 147 bp, Glycine max
aaaaaaaaaaaaaaaaaaaaaaaaaaaaaaaaaaaaaaaaaaaaaaaaaaaaaaaaaaaaaaaaaaaaaaaaaaaaaaaaaaaaaaaaaaaaaaaaaaaaaaaaaaaaaaaaacaaaaacaaaaaaaaaaaaaaaaaaaaaaaaaaa

SEQ ID NO: 78419 - DNA, 349 bp, Glycine max
tcaagagaaactttatgcagatgtctaatgttttgtgggtggctcctgaggacaaggcgagtttatggtcacaacttcattatgtttcgtgtaataatctggaaatgcaagaagcttatcttgtcaatctcgtaaatgtgttacgagaattgtatttgcacagtccagaggaagctcgccaattgagaaggaaagctctctctcgtattgaatggctgcaaaaagctgatgtgcctaccatagcacagattgaagagtttcattcgatgcagaggatgatgaatgctcctgattcaaatgataatattgatttactgttgagcattgatttgttgggtttacaaggagc

SEQ ID NO: 78420 - DNA, 342 bp, Glycine max
agagcttgacctcgatgcaccccttccttagcttcggatttcgcttgaggccaaagcctttggtactttattcccccagggagggccctaagtttctctctcttcaacttaaaagttcaccctcacccctcttcttcttcttcttcaacccttccggaccggggcggtttttccagggtccaccaaaatggggggctttcggttaaccggggttttttcccccagggcttaccttaggggggggggggggtaaaaccaaggccccttggtgggtttcctaatcaacccccatggaaagggggggtttaaagagcttaaaatttaaagggcccacctccttgg

SEQ ID NO: 78421 - DNA, 91 bp, Glycine max
aaacaaagaaaaaaaaaaacccttagccaacacaaccatcatggccacctctgctattcagcaatcagcattcactggtcaaactgctctg

SEQ ID NO: 78422 - DNA, 360 bp, Glycine max
gggtgcagctaagaagctcaaaaagattcaatttcaaggttcgtagtggaagttatgatgatggttatgtgattggcgaagaggaagcaagggatatttcagggttagaggagcctgtaacaaccaaggatctgattccagggctgcctgatgattcaaaaggcgaatctggggctgcaataagtagttgattttggcgatggaaacctacactcaatgtgcactatgagaacgccggttgcgaaaacgtcaatgatttgcctcgtgttctctatttaccaggctttggtgtaggctctttccattatgagaagcaacttaaggatatgtggcgtgactacaaaatgagggctctggatt

SEQ ID NO: 78423 - DNA, 352 bp, Glycine max
gcaaaagcttcagttccttaatgccaaacggaagggacatggtgttctttcttttgaacaaacagtttcaatatgcctctcattcatggtgtaatcgatcatttctgatctgtgctgcattgtcacgggcgcaacaaaagtgggtgctcaccgcttaactgagatgactacgccagtgcttaccatagggcaggaggacggtaaaagcaatgtcactttgaaggcttacgcaacaaccacgacggaaagtgagtggctaccgagctcagaagtctaagagccccgctacacggggccatatgattggtcgtctgtgcacaggtagggtacactcttgtttgcagcgactaaa

SEQ ID NO: 78424 - DNA, 256 bp, Glycine max
gggaatctctcaagattttgaaattgctggtaatactcttatgccagctttttctgttccacaggctactgccagatcttctgaaaatgcggaatcctctgcatgatctggaatttgggttttctttcgcttgttcgtttgtttaattcaataaaggaaattaggcatgaccctctttgttgagtatgctctgcctatttgaaaatttccacacactctttaattgtcgtaatgatgtgtgaagtgtgtgttattt

SEQ ID NO: 78425 - DNA, 209 bp, Glycine max
cagattttgatattctttagggaaggtttcaagattggggaatagctggtgatactcttatgccaactttttgtgcttcacaggctactgctagatcttctgaaaaatgcgagcatgctctgcatgatctggaatttgtgattgcttgcgctagctcgtttggttaattcaataaaggaaaggaggcatgactctcttgttgagtatgc

SEQ ID NO: 78426 - DNA, 336 bp, Glycine max
gggaaaattgactttcccccagggcacttcccgaagtgttaagagaatgcctctttctatagggggaggagctggtgcaaagaatgctattctcatgaatatgccaaatgctgttctttcaatgtggagatattttgttggagatctcgtctttgaagtttctaagatgacttctccctacattaaatgtacagtctctttcttcatagcatttggaaatttggctgatgataccatcaattttgaggcttttccccacaagctggtgcagtttggagagattcaagaaaaagttgtattgaaattttcacaagaggaatttcttacagcttggtc

SEQ ID NO: 78427 - DNA, 290 bp, Glycine max
gtgatggagaaaattgtgtataaagacgacgagggcgcaggaactgaggtttgtttttatatccaaattgcagaacctgtaataaatcatttaaagccattggtcctttattattcattctttgttcaatacttttaccacgtcttgattgtgagtatcgaggattattcatgatcacaaagcatatgccaaactcagatgaaagagttatcaaattgagcatttgccaaactgaaatgcaagtgttatcaaattactatacttgtgatgatactctgcggtaatgtatg

SEQ ID NO: 78428 - DNA, 349 bp, Glycine max
cgaggttatgctgtactgattgacctgaaggtctagaaatacgatggtaatacatggtttgtggtactgtatttaaaggcaaaccaggccttgaaggatatgggaaaggctgctctggatattatgacctacgatgctgatcaggctggctatggttatgtagaagatcttgacaggaatactattctgatattggcttacagacctatacagatggaaacaattgacgatacaactagggtgtgacttgagcaagaatgcaagttgtcataaactgattatgcaggattggaaagaactatttgaggcgctcgcacggtcgcagagactttcttttagatgtcattgc

SEQ ID NO: 78429 - DNA, 422 bp, Glycine max
tgcacccgtccgtaagctcggaattcggttcgagcaacagtgagaacaccattgaattttgattctagcaagcagagcttttgtcagttttctattgaccttctcggtggaggaatcttagtggacaaaactggagattggatcacacttatacaaaattctccaattagtaacttattgagagttgctgcttggaagaaaggctgtttaatggtcaagattgtgatgtctgggaatgcagcagtcaaaaggagtgattgggcctcattggtacaagtgtttttaacaaacagcaacagtacagagcattttgatgcatgtaagtggacaaaatcagaaccacattcctgggaattgatcttcccaatagaggtatgtggtcctaataatggttttgaaatgtggagttctgagtgggcaaa

SEQ ID NO: 78430 - DNA, 358 bp, Glycine max
tccatctttgccttctgcatgttgggtctctgtaaacagatactgcaaaagaagaataatattgaatatttggttggggtgaattcctggggtgaagcgttgcagacattacggctattctaagagtgtctcgctctcttattcatgttccaactggaccaccggggacaaggtgcgtaactggcaccaacccttcgccggacggtgggcgtggtgctttggcttctggaagggggaggccttcaaacttggtcttcttaacttgtggggggtctgctggcttctaacctcttcttaactcttttttctttttactacttttaaactaccttggtttcaaaataacaaaaacaaacac

SEQ ID NO: 78431 - DNA, 311 bp, Glycine max
gcttttccaaacaaaattgtttttgatgataagcttgtgttggctaacacacaagaattctttgatggaaattttccagtggattcttggttaccaatttttgtgaattgtctttatcctgtaagtcaattaccttcagaagctgtcgttgtaaatgttacatgtggtagtggacgttgtggtttacccaccactgcttggattaggtctgcagtgtacaatcgctcctgagatgtcaacaaaaggattcgtacagtacttgtggaagggaagaaaattgtttttcttactagagtagatccttttccagt

SEQ ID NO: 78432 - DNA, 223 bp, Glycine max
tcacacttatacaaaattctccaattagtaacttgttgagagttgctgcttggaaagaaggctgtttaatggtcaagattgtgatgtctggggaatgcaacaagtcaaaaggagtgattggggccttattgggtacaagtgtttttaacaaacagcaacagttcagagcattttgatgcatgtaagtggacaaaatcagaaccacattcctgggaattgatct

SEQ ID NO: 78433 - DNA, 346 bp, Glycine max
ccatatttgtatgcaatggtgcatgatagttcagtgtctacagtaccaggtgattttgtcattggtgtcaagttgacaaccataaacaatatgtgtgcatatgggctcaatcctggtatttcaggttctcgtcttttgggcaccattcctcagtccatttcacagcaaactgtttggaatcaaatggcaacagtgagaacaccattgaattttgattctagcaagcagagcttttgtcagttttctattgaccttcttggtggatgaatcttagttgacaaatctggagattggatcacacttattcataattttacattttgttaacttgttgagagttgttgtt

SEQ ID NO: 78434 - DNA, 406 bp, Glycine max
  unsure (1)..(406): unsure at all n locations
gtgattgggcctcattggtacaagtgtttttaacaaacagcagcagtacagagcattttgatgcatgtaagtggacaaaatcagaaccacattcctgggaattgatcttcccaatagaggtatgtggtcctaataatggttttgaaatgtggagttctgagtgggcaaatcaaacttcatggcatttgagtttccttattgacaatcccaaacagtctacagtttttgatattctcttgggaatctctcaaggattttgaaattgctggtaatactcttatgccagctttttctgttccacaggctactgccagatcttctgaaaatgcggaatcctctgcatgatctggaattgtgttttctttcgcttgttcgtttgttaattcaatanaggaaattaggcatg

SEQ ID NO: 78435 - DNA, 74 bp, Glycine max
  unsure (1)..(74): unsure at all n locations
gtacgtaagctcgaatttctgctcgagctcgagccgaatcgtctcgagaaagatagngtagatatttcttgaga

SEQ ID NO: 78436 - DNA, 361 bp, Glycine max
attttgtaactctggcttcaagtttgatgcaattattaatggtaatgcaagtagatgaatgcctcatttagaacatgattgatgatagttctaaataacagtggcgtggtttataaagttgatatactttggctaagatttcaaaatctttctttttgcaatagtggtctttgcacagttttttggtttagtaactagtgataacatgctaatttaagtctaagtatactagatgtaatcttttgttatgtttgaaatggaatgatatatttgctattttctgcttgaagctaattatgtttaaacaaaaccaacacaagtagcaaggagcttggttaaagcaaggttttggttttgagtt

SEQ ID NO: 78437 - DNA, 408 bp, Glycine max
tgttattgaagttgaagtcttgcccttctctcttcaactccagagcacaagacatcatcatccatggctgcctccgtctccactgtcggagctgtcaacagagctcttttgaacctgaatgggtctggacctggggtttcagctcccagttcatccttctttgggagcagcttgaagaaggttattggctcaagggtccccaacacaaagatttcctctggaagcttcaagattgctgctgtagaagagaagaaagagattgaagagacccagcagaccgacaaggacagatggaagggtcttggcctatgatatctcagacgaccaacaggacatcacaagaggaaagggtttggttgactcccttttccaagctccacaggatgctggaactcactatgctgtcat

SEQ ID NO: 78438 - DNA, 182 bp, Glycine max
agagttatgacaggcgcccgcaccctaagctcggaattcttttcgagcaccatgtgcacgttagcacaaactatcatggccacggaaacggcaggggcctcctcgggcgtgggggggacgcgtctccttgaggcttactcctgagcggtgcgagtgcactccccattcagcttctgcaagaa

SEQ ID NO: 78439 - DNA, 153 bp, Glycine max
accatacgtaagctcttattcgctctagattttcatacactttggggattaacttctggaggctattttacttaggggcgtagtcctactatcctattattacttcctttaatcttatttttctaacatagtatttataaccctctacttatt

SEQ ID NO: 78440 - DNA, 181 bp, Glycine max
gcttataataccatcaattttgaggcttttccccacaggctggtgcattttggagagattcaggaaaaagttgtattgaaattttcacaagatgaatttcttacagcttggtcaactcaggtgcgtcctgcaacaactctgttggctgatgggtgtccatatttgtatgcaatggtgcttg

SEQ ID NO: 78441 - DNA, 78 bp, Glycine max
tcgcatgcacgcgtacgtaaagctcgtattcggctcgagcgtctttgcgccgattcactaactaatagctacctcacc

SEQ ID NO: 78442 - DNA, 399 bp, Glycine max
gttgaacgcagatgtttggaaaagatcatgtgccttacaattttggtggaagatgggcaattcaatgaaaggtacattgtatggttaaattttggaagctatgacgtaaacactattcactattatttggccagtatgaaccttaggactgcagcaagaggttattttcctggaagaataaacgggagataaagtagttaagaacagttagagccattaatttaaggagactctattggatagacgggcaaataagggtagaaaggaggtatacaggaagctgtatttgtgtgaactaagcaagtgctcaatcgtaaaaggtaaatccatggaggagagtttctctctttgttcttgtcaatttcagttaatctgttaaatcatctttttttttctttc

SEQ ID NO: 78443 - DNA, 245 bp, Glycine max
  unsure (1)..(245): unsure at all n locations
gataagctttctagctagtcataacatcaccattactgatggtattgacaaaactagtgcgactttgcaatttagaaagttagcagattgtgattttctcaagagaaactttaagcagatgtctaatgttttgtgggtggctcctgaggacaaggcgagtttatggtcacaacttcattatggttcgngtaataatctggaaatgcaagaagcttatcttgtcaatctcgtaaatggtgtacgag

SEQ ID NO: 78444 - DNA, 122 bp, Glycine max
  unsure (1)..(122): unsure at all n locations
gtttttcaccttttttattggtgggaaacacacaagaaaccggggggttggatttggagtgagatcgaaagcaaaagaaggcntcgacctcggcggcggagaaggagaaccggaataagcat

SEQ ID NO: 78445 - DNA, 386 bp, Glycine max
cacacaaacgtttacaaaacatgaaaggaaaattgatgtcgacgccttgccattttggcaggtacttttgccttgatggtgaatgccactttggtggaagttcaccctaaataccactgcgcatttgccaacaaagaatgcagcggacacgattgggcctctactgtaagagcctcacctcaatctactcacactgtcttcattgccgtttccctcaaagaaaacgccgcagccacttgcgattctctcatctaccaatctgcttccaacttaactgctgctcatttgactttggaacaaatcaacaagatctttagaagcaatgaaaacatgaacgcagtcactttcttcttggaagaagaggattgattacgtcatcatggaga

SEQ ID NO: 78446 - DNA, 394 bp, Glycine max
accagctgggtaaattaaggtccttcctgcaccacctggtgtgcttgatgggggtccatatttgtatgcaatggggcatgatagttcagtgtctacaataccaggtgattttgtcattggtgtcaagttgacaaccataaacaatatgtgtgcatatgggctcaatccttggatttcaggctctcgtcttttgggcaccattcctcagtccatttcacagcaaactgtttggaatcaaatggcaacagtgagaacaccattgaattttgattctagcaagcagagcttttgtcagttttctattgaccttctcggtggaggaatcttagtggacaaaactggagattggatcacacttatacaaaattcttcaattagtaaacttgtgagagtt

SEQ ID NO: 78447 - DNA, 236 bp, Glycine max
aatggcctcagccgcatcccccaccactttctctctcctccggtccgccaccccttcctgggtgcgccaccgccacctccgcctccccctccccctcgcgcgtgcagctcacctcctccctccgcgcccgcccgctgcgccgcctgggcttcgccgcggcggacccgctgctcgcggcgagtgtagcggcgcgcgtggcggcggtgagaggaggaggaaagggcgcgaggggggtg

SEQ ID NO: 78448 - DNA, 349 bp, Glycine max
  unsure (1)..(349): unsure at all n locations
ctcgagccttatcttttcgagctgattacaaggccagggtagggtcacaacttcaggagggggcgtgtaataatctggaaatgcaagaagcttatcttgtcaatctcgtaaatgtgttactagaattgtatttgcacagtccatttgtagctcgccaatttgtgaaggaaagctctctctctnnttcaactgcttctaaaagtttaatttcctaccatatctacatattgtagagttccatcctatgcataggatgattaaatgctccttcttcaaatgataatacttgatttactgttgaacattttatcttttttcgttttacaatcgagcatgataaaaccttttt

SEQ ID NO: 78449 - DNA, 402 bp, Glycine max
agaaaattgaaggaggtaaacctaacatccctgaccttaatggtgtttctaataatggggttctaaataaaaatatactattgactgttgagaccatatgatgaaagaggagcagaagaagatagaatgaagctctcaaaggaagagcaaacttttctagaaggattgatgttaaacatggcacaaaatgttgatccacagccaaaaaaagttgttgagcaaggtcaggtggaccagattgctcaagataaagaaatcaacatcctgaatctgcatgtgacctcaaatatcaggttccatgtccttatggagatggaaatctccgtgaaagttactcctatcctaactcctcaagtagcaacttctgatgccacctttggcacaaaaagtattaataggttc

SEQ ID NO: 78450 - DNA, 288 bp, Glycine max
  unsure (1)..(288): unsure at all n locations
gacacctatagaaagnnagctatgacnngtcgcatgcagcgcgnntacgtaagctcnnggaattcggcttcgaggtgttcagaaccttgcaattggtgagttnaaaaatagcaagcnnctcaagctgactgtcaatgcattgtnngggagcgtatagannaattatcaattgnnatagtttcgcaaggtccctgattggcaacccatagttggtgccaatgctttttggtgtgataccttaatcataccaatcctgaaaatgcagttctgtagtattttntgttgcgc

SEQ ID NO: 78451 - DNA, 165 bp, Glycine max
gttatcatacacatactactactcgtttcatttgcctctggtgggagccaatagccatggggtttcaaacaagcaataattcccatttactattgtatcccctaatatgtcaacgccacatcatccttttgattgacattgaacctctatcgttgcctcacaatc

SEQ ID NO: 78452 - DNA, 399 bp, Glycine max
gataactagaaacagtgtgatgaaaatgaaggtccttgtttgcttggttgctacaattttggtaggcatggcaatgccatgcgtacgatatgttccctctccgaatgaacactggctatggtgcccgtactccggaggtgaaatgcgcaagttggaggcttgctgtggaagcacacaacatctttggctttgagaccattcctgaagagtgcgttgaagcaacaaaggaatacatccatggcgaacaatttagatcagactccaaaacaggtaaccaacaagcttacttttatgccagagacctcgaagtccatcccaaggacacatttgtgttcagtatagatggcaccgtactctctaatattcatactacaaaaaacattgatttggggggagaaa

SEQ ID NO: 78453 - DNA, 112 bp, Glycine max
acactcatgcctgttatacacacagacacaccagccaggaggtgttttataaaatgtgggggagcactacctctaacactcctctacactatcatttcccccaccactttta

SEQ ID NO: 78454 - DNA, 369 bp, Glycine max
  unsure (1)..(369): unsure at all n locations
aaacactcataacacanagcacanagcaaagctcatccttgagttaaaaaatggcagcagcttcttccatggctctctcatccccatccttggctggcaaggccgtgaagctgggcccatcagccccagaagtgggaagggtgagcatgaggaagaccgtcaccaagcaggtctcctcaggaagcccatggtacggcccagaccgagtcaagtacttgggcccattctctggcgagcccccgtcctacctaaccggtgagttcccaggcgactacggctgggacactgctgggctttccgcagacccagaaaccttcgccaagaaccgtgaactcgaagtgatcccactcaggtgggccatgctcggag

SEQ ID NO: 78455 - DNA, 123 bp, Glycine max
tgcttctttattttatgcgttaactctttctctttctgtgtgctgttcaaaaaatgtaagagagtaatttgaatgtcttaactctatgaatttgaatgtttatttattttcctatgtattctt

SEQ ID NO: 78456 - DNA, 377 bp, Glycine max
caagcttgtggcaggtgcttgagggtgacaaacactagaacaaaggcgtcaggaaacggggagagttgtagatcagtgcataaacgggggcttgcggtgactaaattttctatagccagagctggattagttcctactagttatattacatgctctactcagtcacaaaaggaattcaataaagaaagccatacaagtgcttcattgctgaatgataataaaataaataaagcgatgctatttggctgttcttgatttgaaaggagtaattaatagtattaccatgctgcatacatttttatatcatgtaatagccgaaatggctgactgttgtgttgcgtgtctaaagctgccattctaagcggtttgagtaccgt

SEQ ID NO: 78457 - DNA, 409 bp, Glycine max
gcaacaactctgttggctgatgggtgtccatatttgtatgcaatggtgcatgatagttcagtgtctacaataccaggtgattttgtcattggtgtcaagttgacaaccataaacaatatgtgtgcatatgggctcaatcctggtatttcaggttctcgtcttttgggcaccattcctcagtccatttcacagcaaactgtttggaatcaaatggcaacagtgagaacaccattgaattttgattctagcaagcagagcttttgtcagttttctattgaccttctcggtggaggaatcttagtggacaaaactggagattggatcacacttatacaaaattctccaattagtaacttgttgagagttgctgcttggaagaaaggctgtttaatggtcaagattgtgatgt

SEQ ID NO: 78458 - DNA, 125 bp, Glycine max
actaacagtatactttctctctccataacattactaagtgtctgctgataataccaatggagtttgaggcatttatcactcatccttgctcatattgtatagattcaaaaaaaaattgtattcaa

SEQ ID NO: 78459 - DNA, 80 bp, Glycine max
catgatgcatgcaggctttatgttttatctgctattacgctggcaagcaaatatgtttggactgtgtttgatgctcaaaa

SEQ ID NO: 78460 - DNA, 411 bp, Glycine max
gtcaagattgtgatgtctgggaatgcagcagtcaaaaggagtgattgggcctcattggtacaagtgtttttaacaaacagcaacagtacagagcattttgatgcatgtaagtggacaaaatcagaaccacattcctgggaattgatcttcccaatagaggtatgtggtcctaataatggttttgaaatgtggagttctgagtgggcaaatcaaacttcatggcatttgagtttccttattgacaatcccaaacagtctacagtttttgatattctcttgggaatctctcaagattttgaaattgctggtaatactcttatgccagctttttctgttccacaggctactgccagatcttctgaaaatgcggaatcctctgcatgatctggaatttgtgttttctttcgcttg

SEQ ID NO: 78461 - DNA, 388 bp, Glycine max
  unsure (1)..(388): unsure at all n locations
gttgaatgtggaatcccttctggatttccgctcacagttatttgcaatagcatttttaatgagatgctcattagatatagctatgaaaaattactgcgccaggctaaagctccaagtatgtttttacaatccttcaaaaattttgtttctttgtgtgtgtatggtgatgataacttaattagngttcatgaatatgtcaagccttactttagtggttctaaattgaaaagctttctagctagtcataacatcaccattactgatggtattgacaaaactagtgcaactttgcaatttagaaagttagcagattgtgattttctcaagagaaactttaagcagatgtctaatgttttgtgggtggctcctgaggacaaggcgagtctat

SEQ ID NO: 78462 - DNA, 135 bp, Glycine max
gcacgcgtcgtaagctcgtaattttgctcgagcactatttttttgcaatactttcatcacagacatattcattagatagggctctcaaaaatgagtgcgcggcgctaaagctccaattttctttttacactactt

SEQ ID NO: 78463 - DNA, 371 bp, Glycine max
gtgttcccaggacctattgtgttttaaatccacaaaatccttttgtgttaaataggtggatgggaaaattgactttcccccagggcacttcccgaagtgttaagagaatgcctctttctatagggggaggagctggtgcaaagaatgctattctcatgaatatgccaaatgctgttctttcaatgtggagatattttgttggagatctcgtctttgaagtttctaagatgacttctccctacattaaatgtacagtctctttcttcatagcatttggaaatttggctgatgataccatcaattttgaggcttttccccacaagctggtgcagtttggagagattcaggaaaaaggtgtattgaaatttcac

SEQ ID NO: 78464 - DNA, 109 bp, Glycine max
caacgatataaaacaagaaagcaaaggaggttaattaagggcggcgaaaggcattatggtgggtggtcatcccataatccctaacaagaaatatgaattatgctcttct

SEQ ID NO: 78465 - DNA, 106 bp, Glycine max
gcttctttatccactcatttatcccgctattaaaatcatcaaggggtgggtgacctcagtgggcggcagcaacaaatcattataccatatgttgattaaattggca

SEQ ID NO: 78466 - DNA, 395 bp, Glycine max
attttgttggagatctcgtctttgaagtttctaagatgacttctccctacattaaatgtacagtctctttcttcatagcatttggaaatttggctgatgataccatcaattttgaggcttttccccacaagctggtgcagtttggagagattcaggaaaaagttgtattgaaattttcacaagaggaatttcttacagcttggtcaactcaggtgcgtcctgcaacaactctgttggctgatgggtgtccatatttgtatgcaatggtgcatgatagttcagtgtctacaataccaggtgattttgtcattggtgtcaagttgacaaccataaacaatatgtgtgcatatgggctcaatcctggtatttcaggttctcgtcttttgggcaccatt

SEQ ID NO: 78467 - DNA, 379 bp, Glycine max
tgtcattggtgccaagttgacaaccataaacaatatgtgtgcgtaggggctcaatcctggtattgcaggttctcgtcttttgggcaccattcctcagtccatttcacagcaaactgtttggaatcaaatggcaacagtgagaacaccattgaattttgattctagcaagcagagcttttgtcagttttctattgaccttctcggtggaggaatcttagtggacaaaactggagattggatcacacttatacaaaattctccaagtagtaacttatttagagttgctgcttggaagaaaggctgtttaatggtcaagattgtgatgtctgtgaatgcagcattcaaaaggagtgattgggcctcatttggacaagtgttt

SEQ ID NO: 78468 - DNA, 419 bp, Glycine max
ttctagctagtcataacatcaccattactgatggtattgacaagaactagtgcaactttgcaatggagaaagttagcagattgtgattttctcaagagaaactttaagcagatgtctaatgttttgtgggtggctcctgaggacaaggcgagtttatggtcacaacttcattatgtttcgtgtaataatctggaaatgcaagaagcttatcttgtcaatctcgtaaatgtgttacgagaattgtatttgcacagtccagaggaagctcgccaattgagaaggaaagctctctctcgtattgaatggctgcaaaaagctgatgtgcctaccatagcacagattgaagagttccattcgatgcagaggatgatgaatgctcctgattcaaatgataatattgatttactggtgagcattga

SEQ ID NO: 78469 - DNA, 418 bp, Glycine max
tgcatgtaagtggacaaaatcagaaccacattcctgggaattgatcttcccaatagaggtatgtggtcctaataatggttttgaaatgtggagttctgagtgggcaaatcaaacttcatggcatttgagtttccttattgacaatcccaaacagtctacagtttttgatattctcttgggaatctctcaagattttgaaattgctggtaatactcttatgccagctttttctgttccacaggctactgccagatcttctgaaaatgcggaatcctctgcatgatctggaatttgtgttttctttcgcttgttcgtttgtttaattcaataaaggaaattaggcatgaccctcttgttgagtatgctctgcctatttgaaaatttccacaacctctttaattgtcgtaatgatgtgtga

SEQ ID NO: 78470 - DNA, 399 bp, Glycine max
catcaaactgtttggaatcaaatggcaacagtgagaacaccattgaattttgattctagcaagcagagcttttgtcagttttctattgaccttctcggtggaggaatcttagtggacaaaactggagattggatcacacttatacaaaattctccaattagtaacttgttgagagttgctgcttggaagaaaggctgtttaatggtcaagattgtgatgtctgggaatgcagcagtcaaaaggagtgattgggcctcattggtacaagtgtttttaacaaacagcaacagtacagagcattttgatgcatgtaagtggacaaaatcagaaccacattcctgggaaatgatcttcccaatagaggtatgtgggcctaataatgattttgaaatgtggagt

SEQ ID NO: 78471 - DNA, 143 bp, Glycine max
gttgattcttggttaccaatttttgtgaattgtctttatcctgtaagtcaattaccttgagaagctgtcgttgtaaatgttacatgtggtagtggacgtggtggatattatcttacataactgtaaattgttttatatttata

SEQ ID NO: 78472 - DNA, 54 bp, Glycine max
aattattcatggtttttattaactaccctaaatgttaaaatcgctgggcatact

SEQ ID NO: 78473 - DNA, 298 bp, Glycine max
ggaatttcttacagcttggtcaactcaggtgcgtcctgcaacaactctgttggctgatgggtgtccatatttgtatgcaatggtgcatgatagttcagtgtctacaataccaggtgattttgtcattggtgtcaagttgacaaccataaacaatatgtgtgcatatgggctcaatcctggtatttcaggttctcgacttttgggcaccattcctcagtccatttcacagcaaactgtttggaatcaaatggcaacagtgagaacaccattgaattttgattctagcaagcagagcttt

SEQ ID NO: 78474 - DNA, 168 bp, Glycine max
gttcttagtgtgacacagaatcatacccaagcttacgaatacgcggagtactgtgaatgagcgggggactctcccctcttgctgttgaacggcgagggaacgcaacaaaggaaataaagcgtgaccttcttggcggggatgctcctgctatatgaaaatatccacacc

SEQ ID NO: 78475 - DNA, 348 bp, Glycine max
atttcttaagcgtcctggattccattgcgatatcatttgtgtgactggatggactgccaccccaatgcaggatgttcaggttacaattgattggtttatttcctctcaggaatgtgttcccaggacctattgtgttttaaatccacaaaatccttttgtgttaaataggtggatgggaaaattgactttcccccagggcactttccgaagtgttaagagaatgcctctttctatagggggaggagctggtgcaaagaatgctattctcatgaatatgccaaatgctgttctttcaatgtggagatattttgttggagttttcgttttttgagttttctaagatgactt

SEQ ID NO: 78476 - DNA, 167 bp, Glycine max
gcatgatgttcaggttacaattgattggtttatttcctctcaggagtgtgttcccaggacgtatggtgttttaaatccacaaaatccttttgtgttaaataggtggatgggaaaattgtctttcccccatggcacttcccgaagtgttaatagaatgcctctttcta

SEQ ID NO: 78477 - DNA, 327 bp, Glycine max
caaaaggagtgattgggcctcattggtacaagtgtttgtaacggacagcaacagtgcagagcattttgatgcatgtaagtggacaaaatcagaaccacattcctgggaattgatcttcccaatagaggtatgtggtcctaataatggttttgaaatgtggagttctgagtgggcaaatcaaacttcatggcatttgagtttccttattgacaatcccaaacagtctacagtttttgatatttttttgggaatttttcatgatttttaaattgctggtaatacttttatgccatctttttctgttccacaggctattgtcagattttt

SEQ ID NO: 78478 - DNA, 154 bp, Glycine max
ctattattcctccttttttcacatcccatacttattcctccgaccgggtatattttagccggcagtgcaaaaaatcccttcaaccatctctcttattaactactgttctctcctcatcatacattgcaccttatgatctctctatcattcgtca

SEQ ID NO: 78479 - DNA, 276 bp, Glycine max
cctcaatcacacttaatctctctctcctgcccaaaactcatggtcatgaatcacatagttggcaggcgtacccatctctctatactgtacacttatgactcactccttcataggaaatacccactctttctgcatctctcctcaaaacactgacacaaaataatgcttccccattaaaccctccagcattcttaccaccattgtcccacattctaccaaataatcttcccgacccatatcctattgctaataatatggtatctccatacctttaca

SEQ ID NO: 78480 - DNA, 294 bp, Glycine max
cattgatcctataacaactgcacctatagtaactcacacggcgtatgttaggaggtggtggaattgatcatcgataacacttatgaataaaacagcgatggctattgcgattgctactttttcacttgcaatgaaaatcaaaagcaaaaggggtggcattaggtgcgaggtggctattaatgcgctggatgaggagtcgaggacgtcaccggaggagacgaaaatcggagcgcgtgttaaggtgaaggaggcggttttgaaggtgtaccacgtccccaaagttggggtgcttga

SEQ ID NO: 78481 - DNA, 123 bp, Glycine max
atatgctttaccggataaacattcctgctcatacaatgtagagttggaagatcaagctgttttcacttgtcagactaatatgctatcaatagtaactcatacacgaatgaagaaaacaaacca

SEQ ID NO: 78482 - DNA, 188 bp, Glycine max
ctcgagttcgaagaattctttgatggaaattttccagtggattgttggttaccaatttttgtgagttgggtttatcctgtaagtcaattaccttcagaagctgtcgttgtaaatgttacatgtggtagtggacgtgtgtgatttcctctcacgaatttttttccagtatctaatgtgttttaaattca

SEQ ID NO: 78483 - DNA, 404 bp, Glycine max
ggatcacacttatacaaaattctccaattagtaacttgttgagagttgctgcttggaagaaaggctgtttaatggtcaagattgtgatgtctgggaatgcagcagtcaaaaggagtgattgggcctcattggtacaagtgtttttaacaaacagcaacagtacagagcattttgatgcatgtaagtggacaaaatcagaaccacattcctgggaattgatcttcccaatagaggtatgtggtcctaataatggttttgaaatgtggagttctgagtgggcaaatcaaacttcatggcatttgagtttccttattgacaatcccaaacagtctacagtttttgatattctcttgggaatctctcaagattttgaaattgctggtaatactcttatgccagctttt

SEQ ID NO: 78484 - DNA, 403 bp, Glycine max
  unsure (1)..(403): unsure at all n locations
cattttgatgcatgtaagtggacaaaatcagaaccacattcctgggaattgatcttcccaatagaggtatgtggtcctaataatggttttgaaatgtggagttctgagtgggcaaatcaaacttcatggcatttgagtttccttattgacaatcccaaacagtctacagattttgatattctcttgggaatctctcaagattttgaaattgctggtgatactcttatgccagctttttctgttccacaggctactgccagatcttctgaaaatgcggaatcctctgcatgatctggnaatnntgtgtttctttcgcttgttcgtttggttaattcaataaaggaaataggcatgaccttttgttgggttgctctgcctatttgaaaatttcacacctttttaa

SEQ ID NO: 78485 - DNA, 403 bp, Glycine max
ctcgagccgaatcggctcgagggctcctgaggacaaggcgagtttatggtcacaacttcattatgtttcgtgtaataatctggaaatgcaagaagcttatcttgtcaatctcgtaaatgtgttacgagaattgtatttgcacagtccagaggaagctcgccaattgagaaggaaagctctctctcgtattgaatggctgcaaaaagctgatgtgcctaccatagcacagattgaagagttccattcgatgcagaggatgatgaatgctcctgattcaaatgataatattgatttactgttgagcattgatttgttgggtttacaaggagcaggtaaagcttttccaaacaaaattgtttttgatgataagcttgtgttggctaacacacaagaattctttgat

SEQ ID NO: 78486 - DNA, 164 bp, Glycine max
gccaaatgctgttctttcaatgtggagatattttgttggagatctcgtgttttaagtttctaagatgactctctactacattaaatgtacagtctctttcttcatagcatttggaaatgcggctgatgataccatcaattatgatgctttttcccacaagctgg

SEQ ID NO: 78487 - DNA, 115 bp, Glycine max
gtgaaagagaatcctaggcgaagagaagagaaaaattaagatggaggggaaggagcaggatgtgtctcctttacctaacaaattcccggagagacagcccattgggaccgcttcc

SEQ ID NO: 78488 - DNA, 317 bp, Glycine max
cgtcgaatgcacgcgtccgtaagctgggaattcggttcgaggagcttcccctgtttcaagctccaaacaaaatcaatctaacttggggtataatgtaacagcgacgcgagatttggatggtggaccagatactccttcatttggtcactcaggcatggacaaaaattccttggagaaactgagggaagcatcagctgctgaagctgaggcagcggttgctgtctggcaagctgtgcagtctatatcaagtaatccagctgaagaaacatctctgtcagttgaaaactcacacgctgtcaaaacagtttcagatggaa

SEQ ID NO: 78489 - DNA, 411 bp, Glycine max
ctttatttgtatgctatggtgcatgatagttcagtgtctacaataccaggtgattttgtcattggtgtcaagttgacaaccataaacaatatgtgtgcatatgggctcaatcctggtatttcaggttctcgtcttttgggcaccattcctcagtccatttcacagcaaactgtttggaatcaaatggcaacagtgagaacaccattgaattttgattctagcaagcagagcttttgtcagttttctattgaccttctcggtggaggaatcttagtggacaaaactggagattggatcacacttatacaaaattctccaattagtaacttattgagagttgctgcttggaagaaaggctgtttaatggtcaagattgtgatgtctgggaatgcagcagtcaaaagagtgatt

SEQ ID NO: 78490 - DNA, 300 bp, Glycine max
  unsure (1)..(300): unsure at all n locations
tcggtaattcggactcgaggtctttgtcttcaacctatagctgtgcttannatctaagcnnaattgttccgtctttgtggaagattttgaagcttaganngtgtgccgagattgaccccagtctnnattccttnncagtcttgncaacaaattaannngaggaagctnnngttgaggcttgcttatantnncaaaatgcactttatgctgnnngagactcnnttgatnngttcgctttttctgtccannaagagtaagnnctcaatgaagcnnatgggaaggaaattgggggtgcaagca

SEQ ID NO: 78491 - DNA, 314 bp, Glycine max
gataacttaattagtgttcatgaatatgtcaagccttactttagtggttctaaattgaaaagctttctagctagtcataacatcaccattactgatggtattgacaaaactagtgcaactttgcaatttagaaagttagcagattgtgattttctcaagagaaactttaagcagatgtctaatgttttgtgggtggctcctgaggacaaggcgagtttatggtcacaacttcattatgtttcgtgtaataatctggaaatgcaagaagcttatcttgtcaatctcgtaaatgtgttacgagaattgtatttgca

SEQ ID NO: 78492 - DNA, 382 bp, Glycine max
gtcacaacttcattatgtttcgtgtaataatctggaaatgcaggaagcttatcttgtcaatctcgtaaatgtgttacgagaattgtatttgcacagtccagaggaagctcgccaattgagaaggaaagctctctctcgtattgaatggctgcaaaaagctgatgtgcctaccatagcacagattgaagagttccattcgatgcagaggatgatgaatgctcctgattcaaatgataatattgatttactgttgagcattgatttgttgggtttacaaggagcaggtaaagcttttccaaacaaaattgtttttgatgataagcttgtgttggctaacacacaagaattctttgatggaaattttccagtggattcttggtta

SEQ ID NO: 78493 - DNA, 224 bp, Glycine max
gaagaccaagactgtatagcccgccattcaggagtatgataagaacctgttatgaatagacatgagctggaacacccctgatgactgattcccaccataggtctatgacactggtgagagcggaagctctgctgtacaaaatgaccgactgactgatctaactcaaaccctcgttttcatgcatgtcgtcaacaattcttgaagcgtgctggatcacattgcga

SEQ ID NO: 78494 - DNA, 387 bp, Glycine max
atttgtaagaaagatgtttggagagttgaatgtggaatcccttctggatttccgctcacagttatttgcaatagcatttttaatgagatgctcattagatatagctatgaaaaattactgcgccaggctaaagctccaagtatgtttttacaatccttcaaaaattttgtttctttgtgtgtgtatggtgatgataacttaattagtgttcatgaatatgtcaagccttactttagtggttctaaattgaaaagctttctagctagtcataacatcaccattactgatggtattgacaaaactagtgcaactttgcaatttagaaagttagcagattgtgattttctcaagagaaactttaagcagatgtctaatggtttgtgggtg

SEQ ID NO: 78495 - DNA, 402 bp, Glycine max
ccaccggcggcagtatggcttcaaatagaatcgaaatcatggggagctggggtgactgtccctgaaggacgatgtgtagtcaatctggacgacagtgccctgcggatgctcgagccagcgcaacatcgcaagaatccagctcagagcacgtttcatagtttcaaggacccactttaagcccgaatcgattgatattcggaaaccgggcaaggttcagacgcctaatccaccaaaggcagccggagatggtggagcgtcactggatgtagagctgttgggacccaacagcgaggataaacatcttttcacggctgttgaacaggcgacgaaagacttggatgtatttatgatatttgaccccgtaaccaggacttttactatgtacgaagccgatagcagcgt

SEQ ID NO: 78496 - DNA, 304 bp, Glycine max
gtgttcttatttgctcgtccttactgagagctgaatttaccggctaacaaaaacaggtttttgctgtgcacaagatcaataaaagcaatatcgaacaagccttgatcaacgaatgcgacattgatggccctgaacagtgcaggagttgaaacagaaatggtggatgcttggacgggttaggatgacatcgaaaagactcacacgtacaaccatgagctatacgtggaacttgtacagacattgctactgtattatttaaagctggacatgatgctgtcattaactacatgttagcctacaaatc

SEQ ID NO: 78497 - DNA, 344 bp, Glycine max
ctcgagccgaatctgctcgaggaaaaacccaaaaagattgatgccagattgagacaaagaatagatcctcaatacaatgaggttcaggctcagatggaaacaaatttgtttaaattgtctcttgatgatgttgaaactcctaaaggttccatgttggatctgaaaatttctcaatctaaaattgcacttcccaagaacacagttggaggaaccattctgcgtagtgatctattggcaaattttttgacagagggcaattttagagcaagtgttgatttgcagcgcactcatcgtattagaggaatgattaaaatggtggccacagttggtattcctgagaatac

SEQ ID NO: 78498 - DNA, 415 bp, Glycine max
aaagctccaagtatgtttttacaatccttcaaaaattttgtttctttgtgtgtgtatggtgatgataacttaattagtgttcatgaatatgtcaagccttactttagtggttctaaattgaaaagctttctagctagtcataacatcaccattactgatggtattgacaaaactagtgcaactttgcaatttagaaagttagcagattgtgattttctcaagagaaactttaagcagatgtctaatgttttgtgggtggctcctgaggacaaggcgagtttatggtcacaacttcattatgtttcgtgtaataatctggaaatgcaagaagcttatcttgtcaatctcgtaaatgtgttacgagaattgtatttgcacagtccagaagaagctcgccaattgagaaagaaagctc

SEQ ID NO: 78499 - DNA, 340 bp, Glycine max
tgaaaagctttctagctagtcataacatcaccattactgatggtattgacaaaactagtgcaactttgcaatttagaaagttagcagattgtgattttctcaagagaaactttaagcagatgtctaatgttttgtgggtggctcctgaggacaaggcgagtttatggtcacaacttcattatgtttcgtgtaataatctggaaatgcaagaagcttatcttgtcaatctcgtaaatgtgttacgagaattgtatttgcacagtccagaggaagctcgccaattgagaaggaaagctctctctcgtattgaatggctgcaaaaagctgatgtgcctaccat

SEQ ID NO: 78500 - DNA, 102 bp, Glycine max
ccgtccgtaagctcggaattcggctcgggagtggctaatctccaagattctagggggggatccctcgaagaggaccgctatttccgccatagctcgcgtgtc

SEQ ID NO: 78501 - DNA, 393 bp, Glycine max
  unsure (1)..(393): unsure at all n locations
gttaaaagccttagccttccctacaactccaaacacaaagacatcatcatccatggctgcctccgtctccactgtcggagctgtcaacagagctcttttgaacctgaatggttctggagctggagcttcagctcccagttcagccttctttgggaccagcttgaagaaaggttattgcctcaagggtccccaacagcaaggtttccggtggaagcttcaagattgttgctgtagaagagaagaaagagattgaagagacccagcagaccgacaaggacagatggaagggtcttgcctatgatatctcagacgaccaacangacatcacaaggaggaaaggntttggttgactcccttttccaagctccacaggatgctggaactcactatgca

SEQ ID NO: 78502 - DNA, 229 bp, Glycine max
aacaaggagtgacagcttattatagattgaaaaacgtgatacatttttcaagtgcattttgagtgcaagcacgtaaatcttattttagaccgcgcaaacatctttgtaatgttcaaattcaagtttctgttttaaagaatataaaatacgtttttgagctgtcaaagaataaaatacacccattaaaaacttaggtaaaatgaagagcaacctcatatgtgaagacctt

SEQ ID NO: 78503 - DNA, 427 bp, Glycine max
  unsure (1)..(427): unsure at all n locations
cgcgcagacctagctttctctttctcttcatcgctcagactcgcaactccgtcatctcgcgacccaacaagtacaactcgaccgtctacaatccactcgtcagacctctaaaacccacgcgatccgcgcaaactcatacatcaaaatgcctgcctccacaaactccgtctcctcggccgctggctctatcgtcaagcctcagggggggcaagtgcagctgcatcagcacagacgactgcagttgctgctgcattccttgcacggtcatgtaaacgcgacagtaaaaataccacatacggcggtatatgagtcccatcgatgacagcgcatgcgtgtgcgaaagcggagacatgccacacgcggnctacaacgcanacgataagggaacagcgatcggattaaggtgttttgggacattttgagcgag

SEQ ID NO: 78504 - DNA, 312 bp, Glycine max
gtttccttattgacaatcccaaacagtctacagtttttgatattctcttgggaatctctcaagagtttgaaattgctggtaatactcttatgccagctttttctgttccacaggctactgccagatcttctgaaaatgcggaatcctctgcatgatctggaatttggggttctcttttcgcttgttcgtttgtttaattcaataaaggaaattaggcatgaccctcttgttgagtatgctctgcctatttgaaaatttccacacctcttttaattgtcgtaatgatgtgtgaagtgtgtgttattttaaaac

SEQ ID NO: 78505 - DNA, 410 bp, Glycine max
ctcgagccgaatctgctcgagagttgctgcttggaagaaaggctgtttaatggtcaagagtgtgatgtctgggaatgcagcactcaaaaggagtgattgggcctcattggtacaagtgtttttaacaaacagcaacagtacagagcattttgatgcatgtaagtggacaaaatcagaaccacattcctgggaattgatcttcccaatagaggtatgtggccctaataatggttttgaaatgtggagttctgagtgggcaaatcaaacttcatggcatttgagtttccttatttgcatttccaaacagtctacagtttttgatattcttcttggaatctctcaagattttgaaattgcttggtaatactcttttgccttctttttctgtttcacaggctactgccagattt

SEQ ID NO: 78506 - DNA, 219 bp, Glycine max
gcaacagtacagagcattttgatgcatgtaagtggacgagaatgagaaccacattcctgggaattgatcttcccaatagaggtatgtggtcctaataatggttttgaaatgtggagttctgattgggcaaatcaaacttcatggcatttgagttatcttattgacaattccaaacagtttacagtttttgatatatttttttggaatctttcaagattt

SEQ ID NO: 78507 - DNA, 205 bp, Glycine max
gttccacaggctactgccagatcttctgaaaatgcggaatcctctgcatgatctggaatttgtgttttctttcgcttgttcgtttgtttaattcaataaaggaaattaggcatgaccctcttgttgagtatgctctgcctatttgaaaatttccacacctcttttaattgtcgtaatgatgtgtgaagtgtgtgttattttaaaa

SEQ ID NO: 78508 - DNA, 64 bp, Glycine max
aaatttccacacctcttttaattgtcgtaatgatgtgtgaagggtgtgttattttaaaagggag

SEQ ID NO: 78509 - DNA, 87 bp, Glycine max
tccatttagcttttttgtcaactcgcaaaatcacgtcagatggctgtgattgacgcttgggacaatcaccactcacacccaacttca

SEQ ID NO: 78510 - DNA, 52 bp, Glycine max
aaaaaaaaaaaaaaaaaaaaaaaaaaaaaaaaaaaaaaaaaaagaaaaaaaa

SEQ ID NO: 78511 - DNA, 376 bp, Glycine max
agattactgagtaagggcaatgatattctgtgttgcgattatgctagttttgatggtttgattaccaagcaagttatgagcaagatggcagaaatgataaacagtctttgtggtggtgatgaaaaattgatgcgtgaaaggacgcacctgctgttggcttgttgttcaaggatggcaatttgtaagaaagatgtttggagagttgaatgtggaatcccttctggatttccgctcacagttatttgcaatagcatttttaatgagatgctcattagatatagctatgaaaaattactgcgccaggctaaagctccaagtatgtttttacaatccttcaaaaattttgtttcttttgtgtgtgtatgggggatgataa

SEQ ID NO: 78512 - DNA, 401 bp, Glycine max
cccctgtattattcttgcttgcaattagcacattttttactaatttttataattaaagatttaactcttattataactcaccaattttgaatgttcagcataatttatccgactaattaacaagagacataatttatccatactcttattataaactctctctcacattattcttgattatgatgatggtatattgatttctaaagtgagtgggagagaatagagtatatactgggaatatgccttatggcacattacatggttggatccaagcataactaaccaagacagtcgattccaaatcctaatcaatctggttccagtttgagttgcgattatggcaaaccaggcagtgttttcggtgtgggcgattccacccggaagacgtgggcgccagatgc

SEQ ID NO: 78513 - DNA, 365 bp, Glycine max
gccattcgcaacggttaaagaaagagagaccgagagcgagcgagagagaaagagagagagagagcccgaccttcctctatcgagctctgaacctttctcccccctttaagaaacgtgatatgctcaatgctcgcagaatccaaaacgagtgcgtacgttagagtccccctcacatcacgagttgctgagagaaacaagctgggtctgtaggaacacggaaaaagagagcgcctaccataccacgaagaggagtccattcaggcaaaggatgagaaagctcctgaccaaaagaaaaattgattactgtgagcattgaattgtgggttacaaggagcacgaaagcttttccaaaccaaatgttttga

SEQ ID NO: 78514 - DNA, 403 bp, Glycine max
agaaactttaagcagatgtctaatgttttgtgggtggctcctgaggacaaggcgagtttatggtcacaacttcattatgtttcgtgtaataatctggaaatgcaagaagcttatcttgtcaatctcgtaaatgtgttacgagaattgtatttgcacagtccagaggaagctcgccaattgagaaggaaagctctctctcgtattgaatggctgcaaaaagctgatgtgcctaccatagcacagattgaagagttccattcgatgcagaggatgatgaatgctcctgattcaaatgataatattgatttactgttgagcattgatttgttgggtttacaaggagcaagtaaagcttttccaaacaaaattgtttttgatgataagcttgtgttggctaacacac

SEQ ID NO: 78515 - DNA, 92 bp, Glycine max
gagatgcatcataggaacattgttaggttgcaggatgtactgcacagtgtgaagcgatagtatccggttattgagactctggacttggatct

SEQ ID NO: 78516 - DNA, 413 bp, Glycine max
tttcactctagtttctctttctgtttcacgggttgcaacagaaccaacaagtttcaggaaggagatgcaaggagaacatgacacgtctccttaaacctgctggtcaaaggataatcttgatcggtcaatggtgaaaacagacccaagcctgtaaactgtaaagtgtttttgtaacagtttcactttcatgttgatataaaaaagaaccaaaatgatgaattagccgtgagttctgttccgccaggggtttgaaagagcaatcagtgtacgatggcgatggtgctccctgaggagctgatagtggagattctgtcatgggttccggtgaagcctctgagacttggaatttccttatcttccggtgtacgatagcaatcagtttcactttcaatgacggttactcttttataagt

SEQ ID NO: 78517 - DNA, 148 bp, Glycine max
tttttgccactaccttatagcaattcacacaacacaacacaggcgaataatcttcaaccacatcctccttttctttcttccttaacccaaaaggttgggggtactgggccgattaatggggagggtggtccccccccctttacctccc

SEQ ID NO: 78518 - DNA, 225 bp, Glycine max
gggtgtaccatattaaattattacattacactctttttactttcttggactgaggctactgcatttgaaaataagcaatacagacaatgaacaaggaaactaagaaataatatatgccaaactagagagtttctttgggtggatgcgtggatatatcaagcctcaagttgaaagctgcacattcaagcgtattttcttaggaaccttttcttcaccttgggtgta

SEQ ID NO: 78519 - DNA, 274 bp, Glycine max
ttaattgttttttttaacgcgcacgaatatgtgagggcgttctttagtggttgtagagtgaaaagctttctaactagtcataacatcaccattactgatggtattgacaaaactagtgcaactttgcaatttagaaagttagcagattgtgattttctcaagagaaactttaagcagatgtctaatgttttgtgggtggctcctgaggacaaggcgagtttatggtcacaactacattatgtttcgtgtaataatctggaaatgcaataaactt

SEQ ID NO: 78520 - DNA, 107 bp, Glycine max
gcctaatcaagaggcccaagccagaactaaatcaaacaatgtcaatgccatagtgttgtattatgaatcatgtttatagtttatagacaaactattgaccccttttt

SEQ ID NO: 78521 - DNA, 141 bp, Glycine max
  unsure (1)..(141): unsure at all n locations
tttgggttttataaaagggggggggggtnngggaacctaataaaaaccggagtattaccactataatacaaaaatggacattggaactgaaacatcaccggcaaaactggaaaccctaatcgaagctgaattgccaacaaa

SEQ ID NO: 78522 - DNA, 260 bp, Glycine max
cccaatttgtaaaataattacccatatcataaaaatgctatctttcgccataaccacacatgctttcctcgttattaccattaacaaatgaaagcagagacatatgcaaaggcaaaggcaaagggtgtcactttcactttcagcttccattcaccatgacagcttgagagtgctcgaatgggacaagctatgctacttggtcgcttcctttgcttgcacttccttgggccgcaaagccctcaaggtcaaaacttccattc

SEQ ID NO: 78523 - DNA, 429 bp, Glycine max
  unsure (1)..(429): unsure at all n locations
acaccanagaagagctatgacatcacatccacccgtacctaagctcgcaattcgagtcgggaattttagaatgtgtgtgcagaccataatttaccgaaagagatggaatctataaccactcgggcgtgttttgactcatataaaaaaaaaaaattatcaaaaataattccaatattatactaaataaaaaagtggccccccccacctagtgaacccgctccccccgatactaatccttacccttatcctttatgctcccattttttcctttttatgagtcttataaaatcttgacatattcttggctatgctttttccctttttaaaaatttttcccttttaaaattttccccattattcatactctgttgcttattggtaaaaccctttggtccctatatttccccccttacaattttttttcttttt

SEQ ID NO: 78524 - DNA, 91 bp, Glycine max
aaaaaaaaaaaaaaaaaaaaaaaaaaaaaaaaaaaaaaaaagaaaggaaaaaaaaaaaaaaaaaaaaaaaaaaaaaaaaaaaaaaaaaaaa

SEQ ID NO: 78525 - DNA, 376 bp, Glycine max
catatttgtatgcaatggtgcatgatagttcagtgtctacaatgccaggtgattttgtcattggtgtcaagttgacaaccataaacaatatgtgtgcatatgggctcaatcctggtatttcaggttctcgtcttttgggcaccattcctcagtccatttcacagcaaactgtttggaatcaaatggcaacagtgagaacaccattgaattttgattctagcaagcagagcttttgtcagttttctattgaccttctcggtggaggaatcttagtggacaaaactggagattggatcacacttatacaaaattcttcaattagtaacttgttgagagttgctgcttggaagaaaggctgtttaatggtcaagattgt

SEQ ID NO: 78526 - DNA, 146 bp, Glycine max
cttattctaaggcaaacattaatatacaaaaactgaggaagggggctggaacacacaaggggggctgatgtgaactaatggtaacatatccttcaacccacgggtttaatgaggaaggtattgacgtaatttttcaatattattca

SEQ ID NO: 78527 - DNA, 386 bp, Glycine max
gccaagtttggcaagccgctgtactccacgcgcatcatcctcggcgaggtcaacccggtcttcgaggagacgacggtcttaatggtgtcgatggacgaggtcaagtctaaggaggaccttgcggcgatgctttgggacagtgacaagatgagcgccgatgaccttgttggacgggtgcagatcccggtcacggagctcatgagcaagccgaaccagatgcaccgtcgtgaggacagcctcatgggctttgaggacgccaatgacatgcccggtaaactcgtctggtccatcggatacttcgagaaggtgccgctcaggaaagagctcgaacgagcgccaacagccgaagaggtcaaggtcacccctgagccatcaaagaccgtgcc

SEQ ID NO: 78528 - DNA, 403 bp, Glycine max
tcaattttgaggcttttccccacaagctggtgcagtttggagagattcaggaaaaagttgtagtgaaattttcacaagaggaatttcttacagcttggtcaactcaggtgcgtcctgcaacaactctgttggctgatgggtgtccatatttgtatgcaatggtgcatgatagttcagtgtctacaataccaggtgattttgtcattggtgtcaagttgacaaccataaacaatatgtgtgcatatgggctcaatcctggtatttcaggttctcgtcttttgggcaccattcctcagtccatttcacagcaaactgtttggaatctaatggcaacagtgagaacaccattgtattttgattctagcaagcagagcttttgtcagatttctattgaccttctcgt

SEQ ID NO: 78529 - DNA, 360 bp, Glycine max
gcatactgtttggaatcaaatggcaacagtgagaacaccattgagtggggattctagcaagcagagcttttgtcagttttctattgaccttctcggtggaggaatcttagtggacaaaactggagattggatcacacttatacaaaattctccaattagtaacttgttgagagttgctgcttggaagaaaggctgtttaatggtcaagattgtgatgtctgggaatgcaccagtcaaaaggagtgattgggcctcattggtacaagtgtttttaacaaacagcaacagttcagagcattttgatgcatgtaagttgacaatattagaaccccattccttgtaaatgaatctttccaatat

SEQ ID NO: 78530 - DNA, 335 bp, Glycine max
gggttttcctcatgtgctttcacccaaaaatggtgaaaaagggggagggagattagaaatggggggggggaataaaaacacttttttttaaaaaaatattaattttattctctattatttatcattatttatactacaaaaaaaaataattttaaaattaatatatttaatttttttattaattataaaatttaaatagtggttacacggaacgatgcgctgagatgttttcttggagatggccttagccatatctgagaaggatagtaaacgtgtttatgatatgactttaaacctattccatattctatttataataaaaatttttttaaaat

SEQ ID NO: 78531 - DNA, 295 bp, Glycine max
aaaagctgatgtgcctaccatagcacagattgaagagttccattcaatgcagaggatgatgaatgctcctgattcaaatgataatattgatttactgttgagcattgatttgttgggtttacaaggagcaggtaaagctttttcaaacaaaattgtttttgatgataagcttgtgttggctaacacacaagaattctttgatggaaattttccagtggattcttggttaccaatttttgtgatattggttttatcctgttatgtcaactattttcatattctacttgttttaatt

SEQ ID NO: 78532 - DNA, 407 bp, Glycine max
gttgagcttgtgtcgttgaataattaataaaccaatcaaattcaccatccaataatatttggaatcaaataaatcaaccttgccaatcaaataacttctattcaccatctaaccaaatttatcaaagatcattagaagataattcgactattcattcgatgacgcctatgaatcctcaacatattcagcaaactaaccagcatcaagcacaatattatgaacagatcaatagcttgccctcttcagaatttatgaatcaacagctaaacactcttcatacatcgaattctcaatcatctaatcaacaatctaatgctcaatatggcacaaactctacaaatattcaatcgaatcaagagtataattatgttaatgatcttataaatataggacaagttgatgagcta

SEQ ID NO: 78533 - DNA, 218 bp, Glycine max
ttctatatgcctggggcgaaaaaaaaaagccgggctctccaaaaaaacaactactactaaagatacacattttccccctaacacacaatacattttacttctaactttatctcactatctcacacatccactaataataaattaccacatatcatcacatctaccacctttcattattttcattataactctcacttcctctttaacctttttatcct

SEQ ID NO: 78534 - DNA, 398 bp, Glycine max
tcggggaattcctattccacattttcaagaaataaggaggcaaaaatgttcagatatgaattggaattatgtgttttcttattaggcctatcctgaagccaaaggaaatgagatcggaattcctcggggaattccaattccacattttcaagaaataaggaggcaaaaatgttcatatatgaattggaattatttgttttcttattaggcctatcctgaagccaaaggaaatgagatcggaattcctcggggaattccaattccacattttcatgaaatatggaggcaaaaatgttcatatatgaattggaattttttgttttcttattaggcctatcttgaagccaaaggtaatgttatcggaatttctttggagttccgagctctataatttttta

SEQ ID NO: 78535 - DNA, 137 bp, Glycine max
attccgctctatctctataacacattttataaacccaagctcatcctttagttgagggagatcaaagaatggtgggtggctctctcatacccatccttcgctgccaagaccacgaatctgtgcccatcatccccaca

SEQ ID NO: 78536 - DNA, 297 bp, Glycine max
tgccgtcgcatgcacccgtccgtagcctcggaatccgcttcagcctcagcccgttaaccccacccccattttagcgctttccaaaagggtgggccgcgccttggttttcctttcattgttcaatgctttctttcttggttcaacccacctgccttgccggattttagttttcccggcggattaaaaaggggggcctttacccctcaccaatcaatgggtattccgaatggacctttaggaggatttacctattggggccctcttaggggaccttaagagcttgtttaatgatggtgg

SEQ ID NO: 78537 - DNA, 149 bp, Glycine max
tttctgctttggaagcgatcaggcagaactctgctggagagaggactgccagattggagtgggcggggagacactgtaacgatgaaccaatggtgcaacattaagaacacgactatcaagcaaatgtgaataggcttgagttagcactt

SEQ ID NO: 78538 - DNA, 397 bp, Glycine max
aattgattggtttatttcctctcaggaatgtgttcccaggacctattgtgttttaaatccacaaaatccttttgtgttaaataggtggatgggaaaattgactttcccccagggcacttcccgaagtgttaagagaatgcctctttctatagggggaggagctggtgcaaagaatgctattctcatgaatatgccaaatgctgttctttcaatgtggagatattttgttggagatctcgtctttgaagtttctaagatgacttctccctacattaaatgtacagtctctttcttcatagcatttggaaatttggctgatgataccatcaattttgaggctttttcccacaagctggtgcagtttggagagattcaggaaaaagttgttttgaaattt

SEQ ID NO: 78539 - DNA, 191 bp, Glycine max
catgcacccctacctaaacttcgaaatccgctcttgccactacaacaacatttattcattcacacctttcacaccgcgagccgaaaatatcaacggggggacgcacatttccccctataacacaatgcaacagaacgacaccctgcgcgtctgttgccgcccacctctacagtactctcctcattttccct

SEQ ID NO: 78540 - DNA, 136 bp, Glycine max
aacacacaagaattctttgatggaaattttccagtggatgcttggttaccaatttttgtgaattgtctttatcctgtaagtcaattaccttcagaagctgtcgttgtaaatgttacatgtggtagtggacgtggtg

SEQ ID NO: 78541 - DNA, 92 bp, Glycine max
ggggataagattaaagattcaacaatggcctctgcttctgctacgcttctcaagacatgctgcgtgggcttgacaagatgcgagtgggtcaa

SEQ ID NO: 78542 - DNA, 288 bp, Glycine max
  unsure (1)..(288): unsure at all n locations
aaagccaatggttggggtttaatttcaaaaacaaattccccagagaggcttttactgatggtaaatatgggtcaagtttacaatgtagttgatgattatgagcaacanagaatctgtagtgcagttgctagtggcaatactggatcataagaggcatcgtgaggacgaaatgacagctagcataactcacacaagtactgacagagagaatcgttgcaaggtcacatgtaatagacggaaggagtgccagaagtttcaaacgatgtggagattgtgtagcgggcaaat

SEQ ID NO: 78543 - DNA, 200 bp, Glycine max
gtcgaatgcacccgtccgtaagctcggaattcggttcgggggttaatttaaaaatttttcaaaacaactgaaatctccaaaaactggggataaaaggcgggccgcggctaagtaaccttttttccacaagaattaattttcgacccgttcctgacgggattccaacttttccttatagggaggctattaaaacttggcca

SEQ ID NO: 78544 - DNA, 160 bp, Glycine max
ggttaacttttacatttttttaacaccactgaaatcctcaaatagtgtggtatatacaagcagagaggcttatttagtttatttcaaaacaattactatagagcttttacttattttaatatcctttatgcctacaatgaatctgatgattattagcaac

SEQ ID NO: 78545 - DNA, 399 bp, Glycine max
ggagaatgggaaatagaccctattctctcagcaaattaaaagacgacagcctttgatttgcatgaggagaatggggtcacatgagaaatcaaacaagataaaagtggaagaaaaaagagggtgagattagtaaggagtgtggataaaacatgtactccaccacccaatcagaactcagagaaatcctactctttcaaatccgtccaaatccttttcctttcgccacatctcttgcaccatttccacataggcccaaacccaaatcaaaacccaaacattcactaagaaagaaagaaagaggttttaatttttttagcttatgcacaccaactaactcctcctaacttctttctcttgggttctttttcatttaattggttttaaagacaccaacccaat

SEQ ID NO: 78546 - DNA, 393 bp, Glycine max
aattagtgttcatgaatatgtcaagccttactttagtggggctgaattgaaaagctgtctagctagtcataacatcaccattactgatggtattgacaaaactagtgcaactttgcaatttagaaagttagcagattgtgattttctcaagagaaactttaagcagatgtctaatgttttgtgggtggctcctgaggacaaggcgagtttatggtcacaacttcattatgtttcgtgtaataatctggaaatgcaagaagcttatcttgtcaatctcgtaaatgtgttacgagaattgtatttgcacagtccagaggaagcttgccaattgagaaggaaagctctatctcgtattgaatggctgcaaaaagctgatgttcctaccatagtaca

SEQ ID NO: 78547 - DNA, 316 bp, Glycine max
gggaaaaagttaaaaaaagaatggccggaaaaattaaaaaaaggtttgcgtgggatattatgaatggggatgatcctatccaaaagccacctgaaaaaccaattacctttttctttgagaaccttgttgttaaaaggaggaggagccctcaaattaaggagattgaggaccaaagccttgaaaagattgatggcctaaacaaagcaagcaaaaaggacctggaactgctccttgctgatgataaggggacagatcctgttgtcaaggaatataatctaaaatttaaaaaaggcaagggaaaaaaatggagaaagat

SEQ ID NO: 78548 - DNA, 194 bp, Glycine max
ggatcaggtaaagcttttccaaacaaaattgtttttgatgataagcttgtgttggctaacacacaagaattctttgatggaaattttccagtggattcttggttaccaatttttgtgaattgtctttatcctgtaagtcaattaccttcagaagctgtcgttgtaaatgttacatgtggtagtggacgtggggt

SEQ ID NO: 78549 - DNA, 363 bp, Glycine max
aagctcgccaattgagaaggaaagctctctctcgtattgaatgggtgcaaaaagctgatgtgcctaccatagcacagattgaagagttccattcgatgcagaggatgatgaatgctcctgattcaaatgataatattgatttactgttgagcattgatttgttgggtttacaaggagcaggtaaagcttttccaaacaaaattgtttttgatgataagcttgtgttggctaacacacaagaattctttgatggaaattttccagtggattcttggttaccaatttttgtgaattgtctttatcctgtaagtcaattaccttcagaagctgtcgttgtaaatgttacatgtggtagtggacgtg

SEQ ID NO: 78550 - DNA, 404 bp, Glycine max
cttgtcaatctcgtaaatgtgttacgagaattgtatttgcacaggccagaggaagctcgccaattgagaaggaaagctctctctcgtattgaatggctgcaaaaagctgatgtgcctaccatagcacagattgaagagttccattcgatgcagaggatgatgaatgctcctgattcaaatgataatattgatttactgttgagcattgatttgttgggtttacaaggagcaggtaaagcttttccaaacaaaattgtttttgatgataagcttgtgttggctaacacacaagaattctttgatggaaattttccagtggattcttggttaccaatttttgtgaattgtctttatcctgtaagtcaattaccttcagaagctgtcgtttgaaatgttacatgtgg

SEQ ID NO: 78551 - DNA, 203 bp, Glycine max
gcattattgttgttcccaggacctaatggggtttaaaatccacaaaaggccggttgggttaaataagggggatgggaaaattgactttcccccagggcacttcccgaagtgttaagagaatgcctctttctatagggggaggagctggttgcaaagaatgctattctcatgaatatgccagacgctgttctttcaatgtggag

SEQ ID NO: 78552 - DNA, 542 bp, Glycine max
  unsure (1)..(542): unsure at all n locations
agagctatgacgtgcgcatgcaccgcgtacgtaagactcggaatntcggcttcgagcctctggcaaactattcataaagnnagtttcttctccttttctttccgatcgtnngccacggcgaacgatgagaggagtagcgtggctttttctgctgctttcctnnnctggtatnncagtgtccccgttcaagggtttggnnngccctgnataatcgcnncgtttcnnacccgcgaggacgtacccttcctctnggcttcccaaaccagnnttgtcgtggcccccatccttcaatcgcnnctccacagcnngcggtggagtctcctcnncccgtcttcnngtcggcgccgcctttcttctccggacccgacaatctcaagtggagaaggtgccatgcccttctacgagaacccaaagcctggatggtggtttcacnaacaaggagcggcacttcannatttggcggtggaaccccttctacctaaagggttagcaatgcttcacagttggacatgcatnggatcttttatatnttttgccacccc

SEQ ID NO: 78553 - DNA, 405 bp, Glycine max
caaaactggagattggatcacacttatacaaaattctccaattagtaacttgttgagagttgctgcttggaagaaaggctgtttaatggtcaagattgtgatgtctgggaatgcagcagtcaaaaggagtgattgggcctcattggtacaagtgtttttaacaaacagcaacagtacagagcattttgatgcatgtaagtggacaaaatcagaaccacattcctgggaattgatcttcccaatagaggtatgtggtcctaataatggttttgaaatgtggagttctgagtgggcaaatcaaacttcatggcatttgagtttccttattgacaatcccaaacagtctacagtttttgatattctcttgggaatctttcaagattttgaaattgctggtaatactct

SEQ ID NO: 78554 - DNA, 410 bp, Glycine max
acataggacaacagcctgatatagagatagcggcggaatggacattcaaccttcaaaaagacgatcgagggaaaaaaaaaaaaaaaaaaaaaaaaaaaaaaaaaaaaaaatcgcagaaagtgcaaaacaaaaaatggcataaaaaaaaaaaaaaaaaaacaacgaaaaaaaaaaaaacaaaaaaaaaaaaaaaaaagagggggggcctccacttagagttccccccacccccgttttaatttaccccccgttcccaatcgtgggacaaatttcccattaagggaacttaaataaaattcggtgaaatccctgcccaaacctttatccggggaaaaatttgtttcttggcttttttaacccaacagaattctttgcggaaaaaaaaaggtttactcctgggggcccaaaag

SEQ ID NO: 78555 - DNA, 275 bp, Glycine max
cgaatactagaggccagggactcggagtgtttggatttgtttatttgagacaccacgtgctgagctgacatgtgtataacacaaagctacaaaatatggctgaagactcatcactgatgatggcaactcctactcttatcaacctcattgggcttgacatacgaccagcacatcaccagtctctttatggtactcttcatgctatgatgtcctggaccgttgtatcactctatgacgctggtgtcacctgtgacactcctttgggagcacaagaa

SEQ ID NO: 78556 - DNA, 204 bp, Glycine max
cgagtaatgagtgactcattggttgccttgatcttaaactgtttggatggtgactcttgctgcaactgattgtcttgattttttactgattggaaggggaacatctgttggtactgccagattgggggtgcagctctcaccttgtgcgtcgtagtaattcatttagacaacagagaatttgtacaggttgtggagagggggagg

SEQ ID NO: 78557 - DNA, 55 bp, Glycine max
aaaaaagaaaaaataaacaaaagaaagagaaaaataggcaaatacaataaaaaaa

SEQ ID NO: 78558 - DNA, 336 bp, Glycine max
ctcgagccgaatcggctcgagggcgcgccagttctgatatttacaccatctgctctcaagactgtgaattgtggaatcctgcttgcacaaaagcaatgactatgtcatttaatccaaacccgtggtctgatgcatggagtttggaatttctgaagcgtactggatttcattgcgatatcatttgtgtcactggatggactgccaccccaatgcaggatgttcaagttacaattgattggtttatttcctcttaagaatgtgttcccaggacctattgtgttttaaattcacaaaatccttttgtgttaaataagggggatgggaaaatttgacttt

SEQ ID NO: 78559 - DNA, 185 bp, Glycine max
aagtgatttaatgaaagaaattgaggaaaaatattttgggaaggatgatgatattgtaggagaagagaccactactgaaatttcttctgctactctaagtcttaactatcatagtcttgcagggatattcttgattactggcatttctactttattagcgctattggtcttacaaacttgttttt

SEQ ID NO: 78560 - DNA, 214 bp, Glycine max
aaaaaaaaaaaaaaaaaaaaaaaaaaaaaaaaaaaaaaaaaaaaggaaaaaaaaaaaaaaaaaaaaaaaaaaaaaaaaaaaaaaaaaaaaaaaaaaaaaaaaaaaaaggggggggccgccgattagtgagtttttcaacccggaaattaattccggcccggtccctggaggcgaaccagttttccttatagggagtcgttttaaagtttggcga

SEQ ID NO: 78561 - DNA, 116 bp, Glycine max
caaaactagtgcaactttgcactatataacgttagcaggggggggttttttcaagagagactttattcacatgtctaatgatatgtgggtcgttccagtggtcaaggccatgtcaa

SEQ ID NO: 78562 - DNA, 407 bp, Glycine max
ccgaagtgttaagagaatgcctctttctatagggggaggagctggtgcaaagaatgctattctcatgaatatgccaaatgctgttctttcaatgtggagatattttgttggagatctcgtctttgaagtttctaagatgacttctccctacattaaatgtacagtctctttcttcatagcatttggaaatttggctgatgataccatcaattttgaggcttttccccacaagctggtgcagtttggagagattcaggaaaaagttgtattgaaattttcacaagaggaatttcttacagcttggtcaactcaggtgcgtcctgcaacaactctgttggctgatgggtgtccatatttgtatgcaatggtgcatgatagttcagtgtctacaataccaggtgattttg

SEQ ID NO: 78563 - DNA, 395 bp, Glycine max
gtctgggaatgcagcagtcaaaaggagtgattgggcctcagtggtacaagtgtttttaacaaacagcaacagtacagagcattttgatgcatgtaagtggacaaaatcagaaccacattcctgggaattgatcttcccaatagaggtatgtggtcctaataatggttttgaaatgtggagttctgagtgggcaaatcaaacttcatggcatttgagtttccttattgacaatcccaaacagtctacagtttttgatattctcttgggaatctctcaagattttgaaattgctggtaatactcttatgccagctttttctgttccacaggctactgtcagatcttttgaaaatgcggaattctctgcatgatctggaatttggttttctttcgctt

SEQ ID NO: 78564 - DNA, 367 bp, Glycine max
gactcgaaaaacgcaatcaactggaatgaaacggatgctattgctgttgaattaacggccatctttagtcaggtttcggatagtaacgttgatgagttcacatcgacgatcgaaaagttgagatactaccttcaaatcgcaaaaaaagttgatcgtaagcaattcacggaaggctgcattaaagaacttgatggcctcttgcaagactacaaactacttttggagaagttggcaaaatctaaccgcttagaacgttttctatcgtcttataggttgagaactcccctggagcaaaccaacattcgcattgacatgcttaccaacgtggccttttccattttgccaaaaccagagaaagtgggtggaa

SEQ ID NO: 78565 - DNA, 119 bp, Glycine max
taagctcggaattcgtttcgagggtacacttactgtaaaatgtgcataccaagcttaccttttaagggggcctaaaaactgagtgggaaacaaaagaccccatcatgattttatggaat

SEQ ID NO: 78566 - DNA, 126 bp, Glycine max
  unsure (1)..(126): unsure at all n locations
aagagctatgacctcccattccccccgtccgtaacctcgaatttcggctcgagcggctcgagctcgagccgaatcggctcgngaaaaaaaaaaaattgggtaatattaaaaaaaattaaccattat

SEQ ID NO: 78567 - DNA, 405 bp, Glycine max
gttttctattgaccttctcggtggaggaatcttagtggacaaaactggagattggatcacacttatacaaaattctccaattagtaacttattgagagttgctgcttggaagaaaggctgtttaatggtcaagattgtgatgtctgggaatgcagcagtcaaaaggagtgattgggcctcattggtacaagtgtttttaacaaacagcaacagtacagagcattttgatgcatgtaagtggacaaaatcagaaccacattcctgggaattgatcttcccaatagaggtatgtggtcctaataaaggttttgaaatgtggagttctgagtgggctatacaaacttcatggcatttggagtttctttattgacaattccaaacagtcctacagtttttgatattctt

SEQ ID NO: 78568 - DNA, 170 bp, Glycine max
  unsure (1)..(170): unsure at all n locations
acgncgcggcacgcgtacataagctctgaattctgctcgagctcacaattcctgttttgaataaaggcttaataatgttcacgagtttttttttatggtgatgcagcattcacaatttacttcattgtgcctcattctttcaatccatctataacatacattatccttta

SEQ ID NO: 78569 - DNA, 192 bp, Glycine max
aaactcaagggttactggtcattcaagggggactcttgggaattcacaaatgggtcatttcttcataccagaagaatctttaacttttttttgagagggaaaggtttaggcaacaccccaaaccaagtatttccgggggggccgggattatttttggacctgttgccaaaggttggaggggggttaccgaaa

SEQ ID NO: 78570 - DNA, 407 bp, Glycine max
cttcgatggggcaagagtcccaccatcctccacaaggtttgcgatctgccattaggagctttccatttgatgggcttccttctttctcattgtgccagcaagtggaaagctcctaatgatcaggttggttcacttgtgcttgaatctctatctcttcttggtcactttgcattgtttcatcctggaaatcaagctgtccttcgatggggcaagagtcccaccatcctccacaaggtttgcgatctgccattcgttttcttcagtgacccagagttgatgccaatcttggctggcacgttagttgctgtatgctacgggtgtgagcagaacaagtttgtagttcagcaagaactgagtgttgacatgctactttccttgctaaggtcttgcagaaatgctgcgcctgc

SEQ ID NO: 78571 - DNA, 409 bp, Glycine max
ggtgcgtcctgcaacaactctgttggctgatgggtgtccatatttgtatgcaatggtgcatgatagttcagtgtctacaataccaggggattttggcattggggtcaagctgacaaccataaacaatatgtgtgcatatgggctcaatcctggtattttaggttctcggcttttgggcaccattcctcagtccatttcacagcaaactgtttggaatcaaatggcaacagtgagaacaccattgaatcttgattctagcaagcagagcttttgtcagttttctattgaccttctcggtggaggaatcttagtggacaaaactggagattggatcacacttatacaaaattcttcaattagtaacttattgagagctgctgcttggaagaaaggctgtttaatggtcaag

SEQ ID NO: 78572 - DNA, 308 bp, Glycine max
cgatatccgaatacacttgtactacaggcagccaatttagcaacggtaagacattcacgcatactccaccatctgaccctgatgagcgccacccttgtggatgatgacattgggtaaaaggggctccggactaggaggttataacgagtgtggaccggagggattgaccgggccatcgccgtggaccagtttttcaaacagtgacggagataaatgcgcacctgctgccataatgatggaagggagattacttaaacaattgctagagcattctcaaccaggcaaaacatgtgagagagccttaaagt

SEQ ID NO: 78573 - DNA, 403 bp, Glycine max
atttccgctcacagttatttgcaatagcatttttaatgagaggctcattagatatagctatgaaaaattactgcgccaggctaaagctccaagtatgtttttacaatccttcaaaaattttgtttctttgtgtgtgtatggtgatgataacttaattagtgttcatgaatatgtcaagccttactttagtggttctaaattgaaaagctttctagctagtcataacatcaccattactgatggtattgacaaaactagtgcaactttgcaatttagaaagttagcagattgtgattttctcaagagaaactttaagcagatgtctaatgttttgtgggtggctcctgaggacaaggcgagtttatgtgcaccaacttcattatgtttcgtgtaataatttgga

SEQ ID NO: 78574 - DNA, 243 bp, Glycine max
ctcgagccgcaggttacaattgattggtttatttcctctcaggaatgtgttcccaggacctattgtgttttaaatccacaaaatccttttgtgttaaataggtggatgggaaaattgactttcccccagggcactatccgaagtgttaagagaatgcctctttttatagggggtggagctggtgcaaagaatgctattttcatgaatattgcccaatgctgttttttcaatgtttagatattt

SEQ ID NO: 78575 - DNA, 240 bp, Glycine max
caattacactgtttgttcttccattggcagcttttctgagggcgtgctcatccaagacggattttacaaagtgacagttaacgataccacactttggtttcagctttgcgatggaatgattttcaatcatgatcctccaatatgtgctgactgctgggattgtggaggtccaaaactttgtggtatgtagtgctttgctattgtttcaaacatcgtttgttgttatcatgtatgcacagt

SEQ ID NO: 78576 - DNA, 78 bp, Glycine max
aaaaaaaaaaacaatatttattaaacattcattcctaaaatctcgggggttatttaaaaatacgtaagcaactaaaaa

SEQ ID NO: 78577 - DNA, 279 bp, Glycine max
ctctattctggctgtttgagctataagccacagcctcgcgtacgagtactaacacatatacaggatggtccaggactcgcctgctgaacgcactggcagacctgacggctgagctaagagggacctgcatggtcattgaggtgcagcctgagctaccaaggacggcttgtttgggacctgccggaaaaacgttatcgcctggagggtgccgagcattgaggtttgcgggggaaggttcaagagagttgctgttgaacagaggagggagattgtagaaac

SEQ ID NO: 78578 - DNA, 254 bp, Glycine max
aagttgacaaccataaacaatatgtgtgcatatgggctcagggctggtatttcaggttctcgtcttttgggcaccattcctcaatccatttcacagcaaactgtttggaatcaaatggcatcagtgagaacaccattgaattttgattctagcaagcagagcttatgtcagatttctattgactctcctggtggaggaatcctagatgactaatctggagattgtgttcacactttattcacatattttttcaa

SEQ ID NO: 78579 - DNA, 417 bp, Glycine max
tcggttcgggcaactttgttggctgttgggtgtccatatttgtatgcaatggggcatgatagttcagtgtctacaataccaggtgattttgtcattggtgtcaagttgacaaccataaacaatatgtgtgcatatgggctcaatcctggtatttaaggttctcgtcttttgggcaccattcctcagtccatttcacagcaaactgtttggaatcaaatggcaacagtgagaacaccattgaattttgattctagcaagcagagcttttgtcagttttctattgaccttctcggtggagaaatcttagtggacaaaactggagattggatcacacttatacaaaattctccaattagtaacttgttgagagttgctgcttggaagaaaggctgtttaatggtcaagattgtgatgtct

SEQ ID NO: 78580 - DNA, 306 bp, Glycine max
agttaatgtagcatgtgctgctgttggcttgacatcaagttacactccaactccattgttggaatctggtttgcaaaaagacagagggttaattgtggagtattttggaaggatgtcttacgttgctcataacgttaatcagccccaagagaaagatttgttggagggaaatttttcctttgatattaaatctcgctctagattggaaaaagtttcctttacaaaagcacaatttgttagtggaaaaaccttcaatatgatataattggtgctggttcacattcttcagaagattttcctgaaaag

SEQ ID NO: 78581 - DNA, 161 bp, Glycine max
tcataatgttggaagcattatcttccagtgatggtatcgggagtgctatcgtatcaaaagtccacagtaggaccaatcccaatattatttcctttttttttatttatcctacagtttgagagtgtttaatattggttttaggcatttactttctccagatt

SEQ ID NO: 78582 - DNA, 212 bp, Glycine max
gatgattgctacactttctctaccgatgaacctaaaccagtgagggggtttcggcttttggggcgcattatacactcagaccaaagcctagactcaaagccttatttagcttatcggacattctgactttgtcaaaccacatacccatggtcatttacactaaacgattgcagtttaggccaacctggctatatggaggtttgaatagggag

SEQ ID NO: 78583 - DNA, 400 bp, Glycine max
ccttctttttaaccctttttttcaagtttcatctcttttcctcaggggattcttctaactggctctccgtttacttcacttcatgacggattcttctcctcttatccctccctcaccggtcacagtcaccgtgatcgacctcgaagtgggaccctcctatcaaattcaatgccggattcgtcttgtaactgatggttgaatttttcattgttccttgtaagtgcaaaggtacgctatagtacttacattgagagtgttttgtatctttgactccctctgatgctggggatttcttcctcttttatattttttttttttgttctccatctcatcctgttttatcaaagtttttttttcatatattcactttttttctttattttttcatatttttttcttt

SEQ ID NO: 78584 - DNA, 69 bp, Glycine max
gtctctaatttctaaaactcgtcagtgcaatagcataattgggcgactttttatatgcttcagagccat

SEQ ID NO: 78585 - DNA, 396 bp, Glycine max
cacacttatacaaaattctccaattagtaacttgttgagagttgctgcttggaagaaaggctgtttaatggtcaagattgtgatgtctgggaatgcagcagtcaaaaggagtgattgggcctcattggtacaagtgtttttaacaaacagcaacagtacagagcattttgatgcatgtaagtggacaaaatcagaaccacattcctgggaattgatcttcccaatagaggtatgtggtcctaataatggttttgaaatgtggagttctgagtgggcaaatcaaacttcatggcatttgagtttccttattgacaatcccaaacagtctacagtttttgatattctcttgggaatctctcaagattttgaaattgctggtaatactcttatgccagc

SEQ ID NO: 78586 - DNA, 175 bp, Glycine max
cgttttgattgaaattctgagttctaacgccacgaagcctattctgacgcgacttcttgagaactgtaagagtctcaaatatctggttgatgagtgtccttttgcatttgtgaactagtatgtagtattttattcacttaaataaagcgcattactatgtgcaatgagtgtgttt

SEQ ID NO: 78587 - DNA, 392 bp, Glycine max
  unsure (1)..(392): unsure at all n locations
ggcacgcgnacnaagcnnggaancggctcgagcaacttcattatgtttcgcgtaataatctggaaatgcgagaagcttatcttgtcaatctcgtaaatatgttacgagaattgtatttgcacagtccagaggaagctcgccaattgagaaggaaagctctctctcgtattgaatggctgcaaaaagctgatgtgcctaccatagcacagattgaagagttccattcgatgcagaggatgatgaatgctcctgattcaaatgataatattgatttactgttgagcattgatttgttgggtttacaaggagcaagtaaagcttttccaaacaaaattgtttttgatgataagcttgtgttggctaacacacaagaattctttgatggaaatttt

SEQ ID NO: 78588 - DNA, 387 bp, Glycine max
tcgcctcgagaaaaaataaataattaaaaaaaaaaaaaaaaaaaaccccccccctttttttatttttccccccccccccaaaaacaaaaaaaaaataatccccccccctttcccccctaccttttcccttttctccccctccccctttctcctttttcttccctcttaatcctttcctctctttctttccttctctataacccccccccccctctttttccccccccccccccttttttttcccccccccctccccctccgtctccccttttttttttttttttctttttttccccccccccccccttttttcccccactctttttttctcctttattattatttttcctccctccctttccccccccccctcttctctcccccttt

SEQ ID NO: 78589 - DNA, 361 bp, Glycine max
gttcattgtctacaataccaggtgattttgtcgggggggtcaagttgacaaccataaacaatatgtgtgcatatgggctcaatcctggtatttcaggttctcgtcttttgggcaccattcctcagtccatttcacagcaaactgtttggaatcaaatggcaacagtgagaacaccattgaattttgattctagcaagcagagcttttgtcagttttctattgaccttctcggtggaggaatcttagtggacaaaactggagattggatcacacttatacaaaattctccaattagtaacttattgagagttgctgcttggaagaaaggctgtttaatggtcaagattgtgatgtctgggaa

SEQ ID NO: 78590 - DNA, 153 bp, Glycine max
aaaaaatttttatatttaaaaaaaaaaaaaaaaaaaccgaccgatttattaaaaaatctaaaaaaactaaaaaacccaaaaattaattaaaaaaccaatacctacaaacataccaaaatttccctattaataaaatcatattaaaacttgacc

SEQ ID NO: 78591 - DNA, 244 bp, Glycine max
aaaaaatatatatattcttgaaagaaagatagaagcgagggtttcctttatcttgcaacagtttaagtattgcatctctctgctagacgagaggaatgagaattacaagaagacatgcgtggagttagacaagcctaactgtgtatttagtgtgtttggaaacacatcacaaactattaaacgtgaatccccaacacgcttttgcatcaaattaaaaaaaaaaaaaaaaaaaaaaaattagaaa

SEQ ID NO: 78592 - DNA, 362 bp, Glycine max
gaaaattgtctttcccccagggcacttcccgaagggtgaagagaatgcctctttctatagggggaggagctggtgcaaagaatgctattctcatgaatatgccaaatgctgttctttcaatgtggagatattttgttggagatctcgtctttgaagtttctaagatgacttctccctacattaaatgtacagtctctttcttcatagcatttggaaatttggctgatgataccatcaattttgaggcttttccccacaagctggtgcagttgggagagattcaggaaaaagttgtattgaaattttcacaagaggaatttcttacagcttggtcaactcaggtgcgtcctgcaacaactctg

SEQ ID NO: 78593 - DNA, 349 bp, Glycine max
gacaaaacttgatattggatcacacttatacaaaatggtcgattagtaacttattgagagttgctgcttggaagaaaggctgtttaatggtcaagattgtgatgtctgggaatgcagcagtcaaaaggagtgattgggcctcattggtacaagtgtttttaacaaacagcaacagtacagagcattttgatgcatgtaagtggacaaaatcagaaccacattcctgggaattgatcttcccaatagaggtatgtggtcctaataatggggggggaatgtggagttctgagtgggcaaatcaaacttcatggcatttgagtttccttattgacaatcccaaacagtctac

SEQ ID NO: 78594 - DNA, 363 bp, Glycine max
gttttaaattcacaaaatccttttgtgttaaagagggggatgggaaaattgactttcccccagggcacttcccgaagtgttaagagaatgcctctttctatagggggaggagctggtgcaaagaatgctattctcatgaatatgccaaatgctgttctttcaatgtggagatattttgttggagatctcgtctttgaagtttctaagatgacttctccctacattaaatgtacagtctctttcttcatagcatttggaaatttggctgatgataccatcaattttgaggcttttccccacaagctggtgcagtttggagagattcaggaaaaagttgtattgaaattttcacaagaggaattt

SEQ ID NO: 78595 - DNA, 342 bp, Glycine max
ctcgagcttattcggctcgagcaaaaagctgatgtcgctaccatagcacagattgaagagttccattcaatgcagaggatgatgaatgctcctgattcaaatgataatattgatttactgttgagcattgatttgttgggtttacaaggagcaggtaaagcttttccaaacaaaattgtttttgatgataagcttgtgttggctaacacacaagaattctttgatggaaattttccagtggattcttggttaccaatttttgtgaattgtctttatcctgtaagtcaattaccttcagaagctgtcgttgtaaatgttacatgtggtagtggacgtggtggt

SEQ ID NO: 78596 - DNA, 365 bp, Glycine max
tgggctctttcctggtatttcaggttctcgtctgtggggcaccattcctcagtccatttcacagcaaactgtttggaatcaaatggcaacagtgagaacaccattgaattttgattctagcaagcagagcttttgtcagttttctattgaccttctcggtggaggaatcttagtggacaaaactggagattggatcacacttatacaaaattctccaattagtaacttattgagagttgctgcttggaagaaaggctgtttaatggtcaagattgtgatgtctgggaatgcagcagtcaaaaggagtgattgggcctcattggtacaagtgtttttaacaaacagcaacagtacagagcattttg

SEQ ID NO: 78597 - DNA, 373 bp, Glycine max
  unsure (1)..(373): unsure at all n locations
gggagattctcttatgggatgnaaaaaccttaacggattggacgcattttcaatgtgtctgataaacccaaatctcagggtcnagtcccagaccgagattcgcttcatggttgagtctcaccacgcctggatctctcctacaacaatttcatcggcaaggtccctaccggtggtcagtttttggtcttcagcgacaaatcctttgcagggaacccgaatctctgtagttcccactcttgccctaattcctcgttgaagaagagacgcggcccttggagtttgaaatcgacgagggtgatcgtcatggtgattgcactggccactgcggcgattctcgtggcggggacggagtacatgaggaggaggaggaagc

SEQ ID NO: 78598 - DNA, 368 bp, Glycine max
gagagttgttgtttggaagaaaggctgtttaatggtgaagagtgtgatgtctgggaatgcagcactcaaaaggagtgattgggcctcattggtacaagtgtttttaacaaacagcaacagtacagagcattttgatgcatgtaagtggacaaaatcagaaccacattcctgggaattgatcttcccaatagaggtatgtggtcctaataatggttttgaaatgtggagttctgagtgggcaaatcaaacttcatggcatttgagtttccttattgacaatcccaaacagtctacagtttttgatattctcttgggaatctctcaagattttgaaattgctggtaatactcttatgccagctttttctg

SEQ ID NO: 78599 - DNA, 371 bp, Glycine max
ctagtttcttactaggctctactctactgcttcacctggctgctctagaaaattcagtggtgatacatggcttcggctactctctctgtagccaaaccagcccttcaggcaaatgggaaaggcttctctgaattctctggcctccgcagctcatcaggcttccttcccttttctagaaaatcttcagaggatttccattctgtcattgccttccagacctatgcagttggaagcagtggaggatacaagaagggtgtgacagaagcaaaactgaaggttgccataaacggatttggaaggattggaaggaacttcttgaggtgctggcacggtcgcaaagactcccctcttgatgtcattgccatcaacga

SEQ ID NO: 78600 - DNA, 366 bp, Glycine max
agcatttttatgcatgtaagtggacaaaatcaggacgacattcctgggaattgatcttcccaatagaggtatgtggtcctaataatggttttgaaatgtggagttctgagtgggcaaatcaaacttcatggcatttgagtttccttattgacaatcccaaacagtctacagtttttgatattctcttgggaatctctcaagattttgaaattgctggtaatactcttatgccagctttttctgttccacaggctactgccagatcttctgaaaatgcggaatcctctgcatgatctggaatttgtgttttctttcgcttgttcgtttgtttaattcaataaaggaaattaggcatgaccctcttgt

SEQ ID NO: 78601 - DNA, 74 bp, Glycine max
ctcatttctaacattaaactacaagctcagaatgacgcacctattcgtcgtttggaatctgaacattttctgtt

SEQ ID NO: 78602 - DNA, 245 bp, Glycine max
gcagacgcctgcacgcgtacgtaagctcaattcctcgaggggtttttttggcaagtgcaaccatagcgtgttcttgctaaccggattcagtctcgcttggcccatctagccattacagcaactgtggatcaaatgcacgggacaccattgatttgtttgcagcagcttgcagttcatgaccttggggggatttgggcaaatgggatgacacactatcaaaattcaatgaactgtaagtctcttgg

SEQ ID NO: 78603 - DNA, 360 bp, Glycine max
  unsure (1)..(360): unsure at all n locations
ctgatagttacatccaggtcgtcacagcccgcgagagcgtggtggtgtttttgacaaatcccctcgangtggacttgcagccacgtagtataatggagatgtatcgagcgctgtgtagctgcatctcgtcttctaatttagaggtgcgtcagcttgtgcagcggctgctgttgagtggtcgactccccgaattctgcctagagctcatggatgcgtgggagcgtcagtctcattagaattccacaagagctgccattactgacgaccaaagaaatgttgatactacagtttgttgggtgcggcaggatcgcgaactttggtgagactgccggaaagcttgttcgaaccttacacattgtg

SEQ ID NO: 78604 - DNA, 417 bp, Glycine max
  unsure (1)..(417): unsure at all n locations
agagcnaagacggcccaggcgcgcgnacgnaagctctttattcggctcgagacattttttatttctacatcacttttactcaacccgccttttattaactgtagagacacctcaagatagcaatgacaaagctgcaccatgtcattgagctgtaccataattacagagataaagagagaaaagagaggaaaagcttatcacacgaacacgataggcggtgaacttgacttgagtttgaagcaaatgtaaagcgcggcaacacgagatatcactatactgcatgggagaacaagggaaggaggtagaacttttggttctgggggggggggctgtttttgctccattccttttttgctgtcttaaaatattaactgtaacaccctgggaaactcattttaaattttaattttggctctt

SEQ ID NO: 78605 - DNA, 379 bp, Glycine max
gctcgaaattcggttcgagctcaagcctttttcggcaatggtatggaatatggccccgcacaagatttctgggagcgacagttccaacttcgattcgacttgaagagagggaggaaggtggaaattggcaaattataagaatacgctgaaatgtcagcgcttttcaatttccattcatttctaactgtgatacttctgggaatatgtgcctgcacttatttcaagatgcagtttccggcgatccttgaccagaaaactgggtttcgtggtttcttctggaaggcgggaagaggggggtgaacgtttaagcctctgggtagctgccggttgctttatgatgggcgtttcaataatttttttctaagtcttgttttactta

SEQ ID NO: 78606 - DNA, 86 bp, Glycine max
  unsure (1)..(86): unsure at all n locations
agaccgacctgataagcgctgtaaaattgacacgcaaggcaggaagatggaagcgctcacggggaanggactggagagaaagagag

SEQ ID NO: 78607 - DNA, 365 bp, Glycine max
gcaattgttgttaaaagccttagccttccctaggacgccaaacacaaagacatcatcatccatggctgcctccgtctccactgtcggagctgtcaacagagctcttttgaacctgaatggttctggagctggagcttcagctcccagttcagccttctttgggaccagcttgaagaaggttattgcctcaagggtccccaacagcaaggtttccggtggaagcttcaagattgttgctgtagaagagaagaaagagattgaagagacccagcagaccgacaaggacagatggaagggtcttgcctatgatatctcagacgaccaacaagacatcacaagaggaaagggtttggttgactcccttt

SEQ ID NO: 78608 - DNA, 363 bp, Glycine max
  unsure (1)..(363): unsure at all n locations
gagagttgttgcttggaagaaaggctgtttaatggcgaggattgtgatgtctgggaatgcancantcaaaaggagtgattgggcctcattggtacaagtgtttttaacaaacagcaacagtacagagcattttgatgcatgtaagtggacaaaatcagaaccacattcctgggaattgatcttcccaatagaggtatgtggtcctaataatggttttgaaatgtggagttctgagtgggcaaatcaaacttcatggcatttgagtttccttattgacaatcccaaacagtctacagtttttgatattctcttgggaatctcttaagattttgaaattgctggtaatactcttatgccagcttt

SEQ ID NO: 78609 - DNA, 159 bp, Glycine max
  unsure (1)..(159): unsure at all n locations
agagctatgacgncgcatgcacgcgtacctaagctccgaatttcgcttcaagaccacacttttttttgcctctgttctgggtgtccgggggggggcattgccaatggcccttctcaacctttaattttaaattgacaagccttttgcccccttttttaa

SEQ ID NO: 78610 - DNA, 90 bp, Glycine max
cgcaactctcctcttccgcttcacacacacctcaccgccctcctctcgctctcttcgattgaatgaaacacatgatgttccctctctctc

SEQ ID NO: 78611 - DNA, 362 bp, Glycine max
ggagagtttaatgtggaatcccttctggatttgcgcgcgacagttatttgcaatagcatttttaatgagatgctcattagatatagctatgaaaaattactgcgccaggctaaagctccaagtatgtttttacaatccttcaaaaattttgtttctttgtgtgtgtatggtgatgataacttaattagtgttcatgaatatgtcaagccttactttagtggttctaaattgaaaagctttctagctagtcataacatcaccattactgatggtattgacaaaactagtgcaactttgcaatttagaaagttagcagattgtgattttctcaagagaaactttaagcagatgtctaatgtttt

SEQ ID NO: 78612 - DNA, 370 bp, Glycine max
  unsure (1)..(370): unsure at all n locations
attcctcagtccatttcacagcaaactgtttggaatcgaaggggaacagtgagaacaccattgaattttgattctagcaagcagagcttttgtcagttttctattgaccttctcggtggaggaatcttagtggacanaactggagattggatcacacttatacaaaattctccaattagtaacttgttgagagttgctgcttggaagaaaggctgtttaatggtcaagattgtgatgtctgggaatgcagcagtcaaaaggagtgattgggcctcattggtacaagtgtttttaacaaacagcaacagtacagagcattttgatgcatgtaagtggacaaaatcagaaccacattcctgggaattgatct

SEQ ID NO: 78613 - DNA, 361 bp, Glycine max
atttaacctatatgtttcagcatgccacaaatgacagtgcggataccatgaagcatctgactcatacaattcaaaattagaatgacaaaatgctcaagctgaatgagttgcaaaggtcacactaaagatgaacatgctggacttagaaatactattactgatatccatgaatacttgggatatttgcaacaaacactgcaaacattggattatactgtgcctgaatcgagtactaaacaggattatgcaaattatggattgtcatatgtcatcgactatgtacactgaaaaagccagaaaaagcctgaattggtgcacgagcaactgaaactatgaaggaagtcccctaatttgatcacat

SEQ ID NO: 78614 - DNA, 361 bp, Glycine max
gtgcttattatagcacagattgaagagttccaggcggggcagaggatgatgaatgctcctgattcaaatgataatattgatttactgttgagcattgatttgttgggtttacaaggagcaggtaaagcttttccaaacaaaattgtttttgatgataagcttgtgttggctaacacacaagaattctttgatggaaattttccagtggattcttggttaccaatttttgtgaattgtctttatcctgtaagtcaattaccttcagaagctgtcgttgtaaatgttacatgtggtagtggacgtggtggtttacccaccactgcttggattagttctgcagtttacaatcgctccttagata

SEQ ID NO: 78615 - DNA, 368 bp, Glycine max
gtcttgcccttctctcttcaactccaaacacaaggcagcatcatccatggctgcctccgtctccactgtcggagctgtcaacagagctcttttgaacctgaatgggtctggacctggggtttcagctcccagttcatccttctttgggagcagcttgaagaaggttattggctcaagggtccccaacacaaagatttcctctggaagcttcaagattgttgctgtagaagagaagaaagagattgaagagacccagcagaccgacaaggacagatggaagggtcttgcctatgatatctcagacgaccaacaggacatcacaagaggaaagggtttggttgactcccttttccaagctccacaagatg

SEQ ID NO: 78616 - DNA, 357 bp, Glycine max
cgaagtgtttagagaatgcctctttctatagggggaggagctggtgcaaagaatgctattctcatgaatatgccaaatgctgttctttcaatgtggagatattttgttggagatctcgtctttgaagtttctaagatgacttctccctacattaaatgtacagtctctttcttcatagcatttggaaatttggctgatgataccatcaattttgaggcttttccccacaagctggtgcagtttggagagattcaagaaaaagttgtattgaaattttcacaagaggaatttcttacagcttggtcaactcaggtgcgtcctgcaacaactctgttggctgatgggtgtccatatttg

SEQ ID NO: 78617 - DNA, 359 bp, Glycine max
ctcccttctcttcacacattttcttagctctgtccggcaatccctctcgttcacactttcaggtctctctctctctctctcattatctctttattttaatgtattttattctcgattaaatatgaatgctatgcttctcttctcaccgcttcaatcgcaccttcttattttccaatttccctattctcgttcgatctaaccttttccgctcttcgtgcttcgaatgactgagtaaatctacgattctctgttcattcatttcatagatttcgcgtgattttggctattttttatttgcggccattccttacatgtagtggttgattttcaaacttttctcctcgatataactcttgtgc

SEQ ID NO: 78618 - DNA, 408 bp, Glycine max
  unsure (1)..(408): unsure at all n locations
gctatgaccgtcgcatgcaccgcgtgacgtaagctcggaaattcggcttcgaggtgataaccttaatttaagtgttcaatgaatattgtcaacgccgttacgtgttaagtgtgttctaaaaattgaaaacagctttctaagctaggtcataaacatcaccacttacctgatgtgtatttgaccacaaactacgtgcaactttgcaatttaagaaacgttagcaagattggtgatttttctcaaagagaaacctttaaagcaagattgtctatatgtnntttgtgggtgtgctccttgaggacaaaggcgaagtttattggtcacacacttcattattgtttcgtgtaataaatctggaaatgcaagaagcttatcttgtcaatctccgaaatgtgttacgagaattgt

SEQ ID NO: 78619 - DNA, 362 bp, Glycine max
catggcactgctaatttccttctagttgaagccttgtctgtaaagaaaaagcatgtgcaataacccttgcaacaattatggacaactatcaaagtgatttaagtgacataattcgtgctagtggtgcatcgtatggcacttgcagcacgggaactccatcatctgaagctgctaatcccttctctcgtggtcacttgcaattctcttctgatcccatgattttctcttgtgttttggaagggttcaatagcaacttcggtgatcctttctcaaacatgagagatccctttctacacgagcttgatttgcctccttctgcctactttaacatcacaacaagttcatctgcagaaatgagcagt

SEQ ID NO: 78620 - DNA, 320 bp, Glycine max
gctggttatagatactgtacactgagacaggagcggggtcttgttgcgctggactcgtacaactgtctttaacagatatatcttactcgaaggtcaaataatgcgcattcttaagagcgtagacccgttcgatgatggcggaaggtggttgtcaataggctactatagttctgaacacattttaaaaacttcgcagaatacttgtatccatggaagtatatggagtgcaagctcttgtatgaatctacccaaacgttctactcgcacaaaggttgatagatagaacagcggataacgcgtaataatgaattcgtccgttg

SEQ ID NO: 78621 - DNA, 361 bp, Glycine max
cggctctagctcgagccgaatcggctcgagtgcagctacaaaggttgctgtaggagataagatattgaagtagtgctaagtgcctaacacctgcagtgaacaatggcctctgcatcagcatctcttctcaagtcttcacttgttcttgacaagtctgagtgggtgaagggacaaacacttcgccaaccttctgctgcatcagttgtgagatgcaaccccaccaccccatcaggcctcaccatcagagctggttcctatgctgatgagctcgttaagaccgcgaaaacagtggcttcaccagggaggggtattttggccatggatgagtccaatgctacctgtgggaagcgtttggcttcaa

SEQ ID NO: 78622 - DNA, 283 bp, Glycine max
ataagatattatgattatgttgtcatatgacacagggtggaatctactcgcaggcaatgaatgaacaacaccaattctgaaacttcttctacgacgtcttcttcttgtgtacctctcgggtactattactactgctgaacatggaactgttgtctttgagactcaccactgcacatacgcgttcgacttcatcgctgcctgcagcacttgctcactgatccaagctatgcgaatttcagccgaggtagaagaagaaggcgtgcttcgacgcgcctaagcttgc

SEQ ID NO: 78623 - DNA, 352 bp, Glycine max
tgataatatcttctcattattcctttgatctctctgccagtcttcgatcatgggcctctgtttctcctccaccaaggtcagcggctccagcagcaacaacaacaacaacaacaacgcctcatccaaccgtaaccgcaaatgttcggccgcgccggcggctgcagcgccgccggagccggtgacgccgcagaagaaacaaccgtcgcaggctcaacggcggcgagtgccagaggagtcgcggaagaacccacgcgccaaagacaaagcgggtgcgcgtcggcaagggacacgtgttccgtgcggaaagcgaacggatttcgggtacgagaaagacttcgagaatagattctcg

SEQ ID NO: 78624 - DNA, 363 bp, Glycine max
gttccctacaagctggtgccatttggagagattcaggggggaggtggtttggaattttcacaagaagaatttcttacagcttggtcaactcaagtgcgtcctgcaacaactctggtggctgatgggtgtccatatttgtatgcaatggggcatgatagttcagtgtctacaataccaggtgattttgtcattggtgtcaagttgacaaccataaacaatatgtgtgcatatgggctcaatcctggtatttcaagttctcgtcttttgggcaccattcctcagtccatttcacagcaaactgtttggaatcaaatggcaacagtgagaacaccattgaattttgattctagcaagcagagcttt

SEQ ID NO: 78625 - DNA, 360 bp, Glycine max
tgcaattgaagttgaagtcttgcccttctctgtcggctccaaacacaagacatcatcatccatggctgcctccgtctccactgtcggagctgtcaacagagctcttttgaacctgaatgggtctggacctggggtttcagctcccagttcatccttctttgggagcagcttgaagaaggttattggctcaagggtccccaacacaaagatttcctctggaagcttcaagattgttgctgtagaagagaagaaagagattgaagagacccagcagaccgacaaggacagatggaagggtcttgcctatgatatctcagacgaccaacaggacatcatcaagaggaaagggtttggttgact

SEQ ID NO: 78626 - DNA, 361 bp, Glycine max
tgtcaatctcgtaaatgtgttacgagaatgggatgtgcacagtccagaggaagctcgccaattgagaaggaaagctctctctcgtattgaatggctgcaaaaagctgatgtgcctaccatagcacagattgaagagttccattcgatgcagaggatgatgaatgctcctgattcaaatgataatattgatttactgttgagcattgatttgttgggtttacaaggagcaggtaaagcttttccaaacaaaattgtttttgatgataagcttgtgttggctaacacacaagaattctttgatggaaattttccagtggattcttggttaccaatttttgtgaattgtctttatcctgtaagt

SEQ ID NO: 78627 - DNA, 94 bp, Glycine max
aagtgtatcacgccttactcaagtacgcgggatcggaaatggtctctagctggatataacattaccatcactcctgctattgacacaactacca

SEQ ID NO: 78628 - DNA, 363 bp, Glycine max
ctcgagctccatatggcaacagtgagaacaccatggaatgttgattctagcaagcagagcttttgtcagttttctattgaccttctcggtggaggaatcttagtggacaaaactggagattggatcacacttatacaaaattctccaattagtaacttgttgagagttgctgcttggaagaaaggctgtttaatggtcaagattgtgatgtctgggaatgcagcagtcaaaaggagtgattgggcctcattggtacaagtgtttttaacaaacagcaacagtacagagcattttgatgcatgtaagtggacaaaatcagaaccacattcctgggaattgatctttccaatagaggtatgtggt

SEQ ID NO: 78629 - DNA, 273 bp, Glycine max
ataacttttaaaatcataaccgttttccagagcggagccacatagacctaccacaggctttcataccaagaacttaccatctatatacatcaagggagattcttactacagaatggattgatagacataatctcatacagagcacacatagtgactatcccaaactggctaaagtttgagatattctctttctaaaacctctactatatgctagtttttgtcatacttatacacccccttttaattttatacacacttctgacagaaaatttg

SEQ ID NO: 78630 - DNA, 358 bp, Glycine max
aatgtttttgtcaatggtttcttttttctttttccgttgtcttttggtgtttttgtgttcttgatgattttcatgccttaggagagatatgaaaagaaatggtcgatgtggtgcctgtagtttggaattggacttgtgggttgaattgggatttgcatgctgaatgaggtgtcatgagaattgagccttttcttgtttgcatgtcgctgtaaactattagtttggtgtttggtaagttctaagataaacatcttggtgggtttatctaatcttttttatctcttgcttcaaaattaggaaataagttggtttctctgcaccgccatagttgttgttctgtgaaaagttaccttccttt

SEQ ID NO: 78631 - DNA, 363 bp, Glycine max
tagatatatgtcgccctgcccccacaacatgagaggttgggtatagaattagaacctgtgaccttcaagttacaagtaaccttactgattctcataggctaaggtctagggatcacttcctttcacatatgatcagttttcattcttactttctgaaaaaaatttggcttctgatcaatgtcacatttggatttttgcagtaaaatgatccagttgtttgcctgacggagcctgcacaataaagggaatgcaaagttacagaccccaatgacatgattattactgaaaacagattggcattgttaaccatgttggcaggtttaaacccattatggttcatgtctccataaattgaatatttca

SEQ ID NO: 78632 - DNA, 361 bp, Glycine max
ggtacaacttcattatgtttcgtgtaataatctggagaggcaagaagcttatcttgtcaatctcgtaaatgtgttacgagaattgtatttgcacagtccagaagaagctcgccaattgagaaagaaagctctctctcgtattgaatggctgcaaaaagctgatgtgcctaccatagcacagattgaagagttccattcgatgcagaggatgatgaatgctcctgattcaaatgataatattgatttactgttgagcattgatttgttgggtttacaaggagcaggtaaagcttttccaaacaaaattgtttttgatgataagcttgtgttggctaacacacaagaattctttgatggaaat

SEQ ID NO: 78633 - DNA, 359 bp, Glycine max
gtatcattcaaaaggagtgattgggcctcagggcgacaagtgtttttaacaaacagcaacagtacagagcattttgatgcatgtaagtggacaaaatcagaaccacattcctgggaattgatcttcccaatagaggtatgtggtcctaataatggttttgaaatgtggagttctgagtgggcaaatcaaacttcatggcatttgagtttccttattgacaatcccaaacagtctacagtttttgatattctcttgggaatctctcaagattttgaaattgctggtaatactcttatgccagctttttctgttccacaggctactgccagatcttctgaaaatgcggaatcctctgcatg

SEQ ID NO: 78634 - DNA, 359 bp, Glycine max
ctcgatccgtcaattttgaggcttttccccggaggctggtgcagtttggagagattcaggaaaaagttgtattgaaattttcacaagaggaatttcttacagcttggtcaactcaggtgcgtcctgcaacaactctgttggctgatgggtgtccatatttgtatgcaatggtgcatgatagttcagtgtctacaataccaggtgattttgtcattggtgtcaagttgacaaccataaacaatatgtgtgcatatgggctcaatcctggtatttcaggttctcgtcttttgggcaccattcctcagtccatttcacagcaaactgtttggaatcaaatggcaacagtgagaacaccattg

SEQ ID NO: 78635 - DNA, 363 bp, Glycine max
attcatgaaaaagttgtattgaaattttcacgaggaggaatttcttacagcttggtcaactcaggtgcgtcctgcaacaactctgttggctgatgggtgtccatatttgtatgcaatggtgcatgatagttcagtgtctacaataccaggtgattttgtcattggtgtcaagttgacaaccataaacaatatgtgtgcatatgggctcaatcctggtatttcaggttctcgtcttttgggcaccattcctcagtccatttcacagcaaactgtttggaatcaaatggcaacagtgagaacaccattgaattttgattctagcaagcagagcttttgtcagttttctattgaccttctcggtgg

SEQ ID NO: 78636 - DNA, 300 bp, Glycine max
ggctcctttagaggccgcttcggcttgcacacagggtacgcggcagatcttcttaacctgcttattccggtccatgatctcgaaataaggcaacctttgccaggtacaattcgcatagtgcaaaaaggaagaggtatctcacgccatcgatgagggacctgcacacattgacatgcaagaccatcttctgaagactgccacatgacgaggtaagtgatggttgttgaatagaacgatgggaacggaagcagggaatgggttatcgacgtcgtgatagctttggtacccactaattaattc

SEQ ID NO: 78637 - DNA, 360 bp, Glycine max
agagcattttgatgcatgtaagtggacaaaatcagaacggcatacctgggaatggatcttgccaatatacggatggggaactaataatggatgcgaaatgtggagatctgagagggcaaatcaaacttcatggcatttgagtttccttattgacaatcccaaacagtctacagtttttgatattctcttgggaatctctcaagattttgaaattgctggtaatactcttatgccagctttttctgttccacaggctactgccagatcttctgaaaatgcggaatcctctgcatgatctggaatttgtgttttctttcgcttgttcgtttgtttaattcaataaaggaaattaggcatgac

SEQ ID NO: 78638 - DNA, 120 bp, Glycine max
ctcccgtttcgtatgacgatgactattcctataggggggggatcttggacagaaaatgctactctgatgaataagccaaatgctgatcggtcaatgtggacatatcaagagcgcaatctg

SEQ ID NO: 78639 - DNA, 363 bp, Glycine max
gagatatctagaaacagtgtgatgaaaatgaagggccttgttttcttcgttgctacaattttggtagcatggcaatgccatgcgtacgatatgttccctctccgaatgaacactggctatggtgcccgtactccggaggtgaaatgcgcaagttggaggcttgctgtggaagcacacaacatctttggctttgagaccattcctgaagagtgcgttgaagcaacaaaggaatacatccatggcgaacaatatagatcagactccaaaacagttaaccaacaagcttacttttatgccagagacctcgaagtccatcccaaggacacatttgtgttcagtatagatggcaccgtactctctaat

SEQ ID NO: 78640 - DNA, 360 bp, Glycine max
gtcaagttgacaaccataaacaatatgtgtgcatgggggctcaatcctggtatttcaggttctcgtcttttgggcaccattcctcagtccatttcacagcaaactgtttggaatcaaatggcaacagtgagaacaccattgaattttgattctagcaagcagagcttttgtcagttttctattgaccttctcggtggaggaatcttagtggacaaaactggagattggatcacacttatacaaaattctccaattagtaacttattgagagttgctgcttggaagaaaggctgtttaatggtcaagattgtgatgtctgggaatgcagcagtcaaaaggagtgattgggcctcattggta

SEQ ID NO: 78641 - DNA, 364 bp, Glycine max
tgatggtattgacaaaactagtgcaactttgcaaggtagagaagttagcagattgtgattttctcaagagaaactttaagcagatgtctaatgttttgtgggtggctcctgaggacaaggcgagtttatggtcacaacttcattatgtttcgtgtaataatctggaaatgcaagaagcttatcttgtcaatctcgtaaatgtgttacgagaattgtatttgcacagtccagaggaagctcgccaattgagaaggaaagctctctctcgtattgaatggctgcaaaaagctgatgtgcctaccatagcacagattgaagagttccattcgatgcagaagatgatgaatgctcctgattcaaatga

SEQ ID NO: 78642 - DNA, 365 bp, Glycine max
ctcgattcgttaggagctggtgcaaagaatgctatgctcgtgaatatgccaaatgctgttctttcaatgtggagatattttgttggagatctcgtctttgaagtttctaagatgacttctccctacattaaatgtacagtctctttcttcatagcatttggaaatttggctgatgataccatcaattttgaggcttttccccacaagctggtgcagtttggagagattcaggaaaaagttgtattgaaattttcacaagaggaatttcttacagcttggtcaactcaggtgcgtcctgcaacaactctgttggctgatgggtgtccatatttgtatgcaatggtgcatgatagttcagtgtctac

SEQ ID NO: 78643 - DNA, 365 bp, Glycine max
cttggacatgcttcagttccattggtatttaatcgctcggtgttgtggttttttatctactaactatcacggttcaagcagcacaattcttcaaattttagggagaattagaatcataaccattaacattatccatgacaaaatcatccattttgcttctttactgaaatagtgaaaaagagtacttaatttccattatctagctaaactacttattaaaataattctgattctctgaagttaaggattcttgttacaattctcctctatctctaatggatttaggtgggattattcgaatccaggctacctggatgcactaaaacacctaacagatttgaaagaagaaggttagtttcatttct

SEQ ID NO: 78644 - DNA, 356 bp, Glycine max
caattttgaggcttttccccacaagctggtgcgggttggagagattcaggaaaaagttgtattgaaattttcacaagaggaatttcttacagcttggtcaactcaggtgcgtcctgcaacaactctgttggctgatgggtgtccatatttgtatgcaatggtgcatgatagttcagtgtctacaataccaggtgattttgtcattggtgtcaagttgacaaccataaacaatatgtgtgcatatgggctcaatcctggtatttcaggttctcgtcttttgggcaccattcctcagtccatttcacagcaaactgtttggaatcaaatggcaacagtgagaacaccattgaattttg

SEQ ID NO: 78645 - DNA, 300 bp, Glycine max
  unsure (1)..(300): unsure at all n locations
gaagagttccattcgatgcagaggatgatgaatgcgccggattcaaatgataatattgatttactgttgagcattgatttgttgggtttacaaggagcaggtaaagcttttccaaacaaaattgtttttgatgataagcttgtgttggctaacacacaagaattctttgatggaaattttccagtggattcttggttaccaatttttgtgaattgtctttatcctgtaagtcaattaccttcagaagctgtcgttgtaaatgttacatgtggtagtggacgtggtggntnacccaccact

SEQ ID NO: 78646 - DNA, 355 bp, Glycine max
cagcaaatgcacctttgctgatctgattcgcgaagagtcgcctttcacaaggatcatgcataaattggatgaccacattaataacattagcaatgatcttgtttggagacaaggctaaaagtccttttgtcagcttctctactggaaaaaaaattatattttcaatagatactttcaaaaacacttataccttgtattcaaacagacccattgtctggtctaatgtaagataaataaattagcttgtccatgagtctttggtattgggacttttctaaaaaaaaaaaataaaatataaatatataatatatttttttttatttttttttttttttttttttttttttttttttat

SEQ ID NO: 78647 - DNA, 366 bp, Glycine max
tgtttttaacaaacagcaacagtacagagcatttgggtgcgtgtaagtggacaaaatcagaaccacattcctgggaattgatcttcccaatagaggtatgtggtcctaataatggttttgaaatgtggagttctgagtgggcaaatcaaacttcatggcatttgagtttccttattgacaatcccaaacagtctacagtttttgatattctcttgggaatctctcaagattttgaaattgctggtaatactcttatgccagctttttctgttccacaggctactgccagatcttctgaaaatgcggaatcctctgcatgatctggaatttgtgtttttttttcgcttgttcgtttgtttaattcaa

SEQ ID NO: 78648 - DNA, 364 bp, Glycine max
gttcagtgtctacaataccaggtgattttgtcatgggtggcaagttgacaaccataaacaatatgtgtgcatatgggctcaatcctggtatttcaggttctcgtcttttgggcaccattcctcagtccatttcacagcaaactgtttggaatcaaatggcaacagtgagaacaccattgaattttgattctagcaagcagagcttttgtcagttttctattgaccttctcggtggaggaatcttagtggacaaaactggagattggatcacacttatacaaaattctccaattagtaacttgttgagagttgctgcttggaagaaaggctgtttaatggtcaagattgtgatgtctgggaatgc

SEQ ID NO: 78649 - DNA, 361 bp, Glycine max
gaaactttaagcagatgtctaatgttttgtgggtggctcctgaggacaaggcgagtttatggtcacaacttcattatgtttcgtgtaataatctggaaatgcaagaagcttatcttgtcaatctcgtaaatgtgttacgagaattgtatttgcacagtccagaggaagctcgccaattgagaaggaaagctctctctcatattgaatggctgcaaaaagctgatgtgcctaccatagcacagattgaagagttccattcgatgcagaggatgatgaatgctcctgattcaaatgataatattgatttactgttgagcattgatttgttgggtttacaaggagcaggtaaagcttttccaaa

SEQ ID NO: 78650 - DNA, 361 bp, Glycine max
caggttttcgtcttttgggcaccattcctgagtccatttcacagcaaactgtttggaatcaaatggcaacagtgagaacaccattgaattttgattctagcaagcagagcttttgtcagttttctattgaccttctcggtggaggaatcttagtggacaaaactggagattggatcacacttatacaaaattctccaattagtaacttgttgagagttgctgcttggaagaaaggctgtttaatggtcaagattgtgatgtctgggaatgcagcagtcaaaaggagtgattgggcctcattggtacaagtgtttttaacaaacagcaaccgtacagagcattttgatgcatgtaagtggac

SEQ ID NO: 78651 - DNA, 346 bp, Glycine max
gtggagttctgagtgggcaaatcaaacttcatggcgtttgagtttccttattgacaatcccaaacagtctacagtttttgatattctcttgggaatctctcaagattttgaaattgctggtaatactcttatgccagctttttctgttccacaggctactgccagatcttctgaaaatgcggaatcctctgcatgatctggaatttgtgttttctttcgcttgttcgtttgtttaattcaataaaggaaattaggcatgaccctcttgttgagtatgctctgcctatttgaaaatttccacacctcttttaattgtcgtaatgatgtgtgaagtgtgtgttatttt

SEQ ID NO: 78652 - DNA, 58 bp, Glycine max
tgactccagcagcgtactaactcgaattggctcgagtggagttgagggatgaagggag

SEQ ID NO: 78653 - DNA, 363 bp, Glycine max
gtcacatcttcattatgtttcgtgtaataatgtcgagatgcaagaagcttatcttgtcaacctcgtaaatgtgttacgagaattgtatttgcacagtccagaggaagctcgccaattgagaaggaaagctctctctcgtattgaatggctgcaaaaagctgatgtgcctaccatagcacagattgaagagttccattcgatgcagaggatgatgaatgctcctgattcaaatgataatattgatttactgttgagcattgatttgttgggtttacaaggagcaggtaaagcttttccaaacaaaattgtttttgatgataagcttgtgttggctaacacacaagaattctttgatggaaattt

SEQ ID NO: 78654 - DNA, 349 bp, Glycine max
gttgtttatttattctttcagaatcgatctcctacggccgctctttagactacactatcgttaataaaatccaccgtctctaccacgactcgaatcgaatcgaaccaacctttcatacccaccaacactcctacttcaaccgctaatatgctcggacgtaccgttttcgccgcgactttctttgcgctcgctcaattcgccatggccagcccccctggctgcctcctcggcgctgtcaaccaatatgaagacccatctgacatcaaagccgtctgcaaggccaaagacctgagcgagaaggtagcggaaatctgcggtgacgatgctaaggacgctatggctgcgatcg

SEQ ID NO: 78655 - DNA, 245 bp, Glycine max
aagattttgaaattgctggtaatactcttatgccggctttttctgttccacaggctactgccagatcttctgaaaatgcggaatcctctgcatgatctggaatttgtgttttctttcgcttgttcgtttgtttaattcaataaaggaaattaggcatgaccctcttgttgagtatgctctgcctatttgaaaatttccacacctcttttaattgtcgtaatgatgtgtgaagtgtgtgttatttt

SEQ ID NO: 78656 - DNA, 302 bp, Glycine max
ctacattatcataactgctaacaaatcaaaggacgacctttatctacttgtgcccattgattcagctcccatacaatgctcatttgaaagcatttcaaacaagattattgtctaaaatatgctcaacacaaatatcacacatgaatgcttcaatataaatgctgcagaagatactaaagtgctaattttgaccaatcagacctacacggacagatgaaaaagccttagcctattatatttgagactaccaccaggacttacaacggggaagggtttggttgacctcctttttcaaacttcac

SEQ ID NO: 78657 - DNA, 327 bp, Glycine max
aagagcatgacggccattgccgcgtacgtaagctcggaatcgctcgagagcgttggggaattggagggagaagagagaggggattagcacatcagcagcataagaagaatgcgttggatggaaccgtgcgagggctatgggactcgccggtccacgagaagagaggggaaatagggaagcagtgaatgcctcaagccatatccaagcgacgcgtcgtttttccaatcgtcgggcaagactcgtcttcgattgccacgcttctcttcaccattctacaacgtaaccacgccaagtcacacctcgacgttctaattgcttctgagtcta

SEQ ID NO: 78658 - DNA, 424 bp, Glycine max
agagcttgacgcgcaaggccgccttccttaagctcgaaattcggttcgaggtcaagctttactttagtggttctaaattgaaaagctgtctagctagtcataacatcaccattactgatggtattgacaaaactagtgcaactttgcaatttagaaagttagcagattgtgattttctcaagagaaactttaagcagatgtctaatgttttgtgggtggctcctgaggacaaggcgagtttatggtcacaacttcattatgtttcgtgtaataatctggaaatgcaagaagcttatcttgtcaatctcgtaaatgtgttacgagaattgtatttgcacagtccagaggaagctcgccaattgagaaggaaagctctctctcgtattgaatggctgcaaaaagctgatgtgcctaccatagcaca

SEQ ID NO: 78659 - DNA, 165 bp, Glycine max
ggaaaaggtggttttgaaattttcacaagaggaatttcttacagcttggtcaactcaggtgcgtcctgcaacaactctgttggctgatgggtgtccatatttgtatgcaatggtgcatgatagttcagtgtctacaataccaggtgattttgtcattggtgtcaa

SEQ ID NO: 78660 - DNA, 327 bp, Glycine max
gtcaaaagttttttaattttgtgaggttcattatgaagaaaagggacaaacttagttgtcaagttggaatcaacccatactccatggaatggactggtttggccaatagattactgagtaagggcaatgatattctgtgttgcgattatgctagttttgatggtttgattaccaagcaagttatgagcaagatggcagaaatgataaacagtctttgtggtggtgatgaaaaattgatgcgtgaaaggacgcacctgctgttggcttgttgttcaaggatggcaatttgtaagaaagatgtttggagagttgaatgtggaatccctt

SEQ ID NO: 78661 - DNA, 362 bp, Glycine max
ttttggcctcaatcctggtatttgagtttctcgtcttttgggcaccattcctcagtccatttcacagcaaactgtttggaatcaaatggcaacagtgagaacaccattgaattttgattctagcaagcagagcttttgtcagttttctattgaccttctcggtggaggaatcttagtggacaaaactggagattggatcacacttatacaaaattctccaattagtaacttgttgagagttgctgcttggaagaaaggctgtttaatggtcaagattgtgatgtctgggaatgcagcagtcaaaaggagtgattgggcctcattggtacaagtgtttttaacaaacagcaacagttcagagc

SEQ ID NO: 78662 - DNA, 335 bp, Glycine max
gacctattgtgttttaaatccacaaaatcctgtggggttaaataggtggatgggaaaattgactttcccccagggcacttcccgaagtgttaagagaatgcctctttctatagggggaggagctggtgcaaagaatgctattctcatgaatatgccaaatgctgatctttcaatgtggagatattttgttggagatctcgtctttgaagtttctaagatgacttcttcctacattaaatgtacagtctctttcttcatagcatttggaaagttggctgatgataccatcaattttgaggctattccccacaagctggtgcagtttggagagattc

SEQ ID NO: 78663 - DNA, 373 bp, Glycine max
cggctctagttttgtgttaaataggtggatggggagagattgactttcccccagggcacttcccgaagtgttaagagaatgcctctttctatagggggaggagctggtgcaaagaatgctattctcatgaatatgccaaatgctgttctttcaatgtggagatattttgttggagatctcgtctttgaagtttctaagatgacttctccctacattaaatgtacagtctctttcttcatagcatttggaaatttggctgatgataccatcaattttgaggcttttccccacaagctggtgcagtttggagagattcaggaaaaagttgtattgaaattttcacaagaggaatttcttacagcttggtcaactc

SEQ ID NO: 78664 - DNA, 335 bp, Glycine max
gcggaattttattgattttggtgggtggatattgggggggttttctggccctttggtaatactaatcgtgcattgtttttgtaacaaactgatcagaccaggctatttattcagtgcttcatatgataaatcgatgataagagcttaaaggggatcgaccatttgacatctagttctgaggtaacgcatctacgtatcctattttgcatgcttaggtgatactttcaggtgctgctatttttaaaatgcgaaccaaagaaagctcgacacgaattgtctgtagcatgtacatatgcaggctgatgtactaagacactgttgtagctcgagcatgc

SEQ ID NO: 78665 - DNA, 291 bp, Glycine max
agctttttcattctaatcctacatatgactatcgggggtacactattgccatggatgcttacaagctccggacaatacagggcctgcaatcgtctattgtggactacaaaccgtgatgattctgttacggacaccagctggtgttcaacctttgcatatagagggccaatttatgcctgaggattatcatgttgatgagaagctcgcagactaagacagggaacgtatacaataacgcacagtacatgccccgggagctaaaacaaaaaggccctttgaggccacacatga

SEQ ID NO: 78666 - DNA, 373 bp, Glycine max
gcaagcagagcttttgtcagttttctattgaccttgtcggtggaggaatcttagtggacaaaactggagattggatcacacttatacaaaattctccaattagtaacttgttgagagttgctgcttggaagaaaggctgtttaatggtcaagattgtgatgtctgggaatgcagcagtcaaaaggagtgattgggcctcattggtacaagtgtttttaacaaacagcaacagtacagagcattttgatgcatgtaagtggacaaaatcagaaccacattcctgggaattgatcttcccaatagaggtatgtggtcctaataatggttttgaaatgtggagttctgagtgggcaaatcaaacttcatggcattt

SEQ ID NO: 78667 - DNA, 366 bp, Glycine max
caacttctttcaagtctaaacccacctcacgtgtggaaccaaccttctccagtctcagcttcaccatatctccaaactacaaacccaccacaccacatctcatgtaccaccttatcccaacaccaaacaacctcaaatttaaattccaccttatcaccattaaaccaaactcaaaccccaaatgaagaatctcaatcaaactctaacaacctgtacacatgctcatcacttcctgcaaatgcaaatgctcttcccccatgctctaagactgtactctcgacttaccccatggtgactcgctctaagaatggaattctcaaacctaaacaagttcacctagccaccaaatttccctatcattctctg

SEQ ID NO: 78668 - DNA, 373 bp, Glycine max
gtgatgataacttaattagtgttcatgaatatgtgaggccttactttagtggttctaaattgaaaagctttctagctagtcataacatcaccattactgatggtattgacaaaactagtgcaactttgcaatttagaaagttagcagattgtgattttctcaagagaaactttaagcagatgtctaatgttttgtgggtggctcctgaggacaaggcgagtttatggtcacaacttcattatgtttcgtgtaataatctggaaatgcaagaagcttatcttgtcaatctcgtaaatgtgttacgagaattgtatttgcacagtccagaggaagctcgccaattgagaaggaaagctctctctcgtattgaatg

SEQ ID NO: 78669 - DNA, 428 bp, Glycine max
  unsure (1)..(428): unsure at all n locations
gaagagctatgacgncgcatgcacgcctacctaagcttcgaattccgcttcagggctggtccaaaaaatgctattctcatgaatatgccagatgctgttctttcaatgtggagatattttgttggagatctcgtctttgaagtttctaagatgacttctccctacattaaatgtacagtctctttcttcatagcatttggaaatttggctgatgataccatcaattttgaggcttttccccacaagctggtgcagtttggagagattcaggaaaaagttgtattgaaattttcacaagaggaatttcttacagcttggtcaactcaggtgcgtcctgcaacaactctgttggctgatgggtgtccatatttgtatgcaatggtgcatgatagttcagtgtctacaataccaggtgattttgtcattgg

SEQ ID NO: 78670 - DNA, 377 bp, Glycine max
atatcttcattactgatggtattgacaaaactagtgcgggtttgcaatttagaaagttagcagattgtgattttctcaagagaaactttaagcagatgtctaatgttttatgggtggctcctgaggacacggcgagtttatggtcacaacttcattatgtttcgtgcaataatctggaaatgcaggaagcttatcttgtcaatctcgtaaatgtgttacgagaattgtatttgcacagtccagaggaagctcgccaattgagaaggagagctctctctcgtattgaatggctgcaaaaagctgatgtgcctaccatagcacagattgaagagttccattcgatgcacaggatgatgaatgctcctgattcaaatgat

SEQ ID NO: 78671 - DNA, 127 bp, Glycine max
gaaagcttatgagttaccgaccaatggccaccagggcttcttcctcattcactgtgctcttctcttcataccctttccaacccttctcatatttacacactcttacttttcgcccctttttttcttt

SEQ ID NO: 78672 - DNA, 370 bp, Glycine max
aattttgtttctttgtgtgtgtatggtgatgatggcttaattagtgttcatgaatatgtcaagccttactttagtggttctaaattgaaaagctttctagctagtcataacatcaccattactgatggtattgacaaaactagtgcaactttgcaatttagaaagttagcagattgtgattttctcaagagaaactttaagcagatgtctaatgttttgtgggtggctcctgaggacaaggcgagtttatggtcacaacttcattatgtttcgtgtaataatctggaaatgcaagaagcttatcttgtcaatctcgtaaatgtgttacgagaattgtatttgcacagtccagaggaagctcgccaattga

SEQ ID NO: 78673 - DNA, 280 bp, Glycine max
aaaaaaaaaaaaaaacactgcttatctaaaatttttgtggcccccaaacctcactttaataaaactaaaattaaaaatctttcttcctaaccataacattaccaacaccctaccaatttacaaaactcctgccccttttccacttccaaatttatcaaaatataactctcctaaaaaaaaacccaaacccccattcctacattctttcttttttctctcctactccaaagccaatttattttcacacctccattattgttccgttaataattcttaaatc

SEQ ID NO: 78674 - DNA, 278 bp, Glycine max
gcaaaaagctgatgtgcctaccatagcacagattgaagagttccattcgatgcagaggatgatgaatgctcctgattcaaatgataatattgatttactgttgagcattgatttgttgggtttacaaggagcaggtaaagcttttccaaacaaaattggttttgatgataagctggtgttggctaacacacaagaattctttgatggaaattttccagtggattcttggttaccaatttttgtgaattgtctttatcctgtaagtcaattaccttcag

SEQ ID NO: 78675 - DNA, 313 bp, Glycine max
aaaatactttcgaaagatgatatcctattgaaatggtggaactgactggcataaacttaagaattcaattatcgaaattgaatatagataatacactttaattggattgcacgaacggtattaaagaaatggagtactaactaccagttcttatttattattgaattaaccgctcaacttggctttgtatcgaacatttgttcgtgatctcaaaaattcttcggcaaaaaatttgaatctatttctatatgcgaatcaattctactactgccggtcctgaggtttcttagctcgaaaaagaatctgggacgta

SEQ ID NO: 78676 - DNA, 357 bp, Glycine max
gctctctctcgtattgaatggctgcaaaaagctggggtgcctaccatagcacagattgaagagttccattcgatgcagaggatgatgaatgctcctgattcaaatgataatattgatttactgttgagcattgatttgttgggtttacaaggagcaggtaaagcttttccaaacaaaattgtttttgatgataagcttgtgttggctaacacacaagaattctttgatggaaattttccagtggattcttggttaccaatttttgtgaattgtctttatcctgtaagtcaattaccttcagaagctgtcgttgtaaatgttacatgtggtagtggacgtggtggtttacccaccact

SEQ ID NO: 78677 - DNA, 214 bp, Glycine max
gggatatatccaacgactatactcgaaaaacatggtgggagtatgaactatcaaccttatctttcatatcacatacaaaagataaaaattcctaacttactaaactattacccatagtaatctacctgaacagttaaaaatgatcaacaacgattgcttaaacctttaaaaaaaaaaaataatagggctgtcaaccgcttttgctctcacacac

SEQ ID NO: 78678 - DNA, 287 bp, Glycine max
cttgacttcaacgaattttataggcgggtgcgggcgagcatgtatgaaatttgtgaataaggctgaaggtcaggctgaagcattgtttcttcaaaaagacaaggcattaaaagcgttgcacccagctaacttccattgtgtgtttgagtggaacaattctattgttgctaactttctttggaccaacagaatgggtcattaattgaccatataggtagtcacattatgtgatttgcaagattgtttgttgcagatatgaagctattaatattcaattggatgcccga

SEQ ID NO: 78679 - DNA, 380 bp, Glycine max
cttacttctttgtcaactcaggtgcgtcctgcaagaacgctgttggctgatgggtgtccatatttgtatgcaatggtgcatgatagttcagtgtctacaatccaagtgaattttgtatttgggtcaaagtgacaaccataaacaatatgtgtgcatatgggctcaatcctggtatttcaggttctcgtcttttgggcaccattcctcagtccatttcacagcaaactgtttggaatcaaatggcaacagtgagaacaccattgaattttgattctagcaagcagagcttttgtcagttttctattgaccttctcggtggaggaatcttagtggacaaaactggagattggatcacacttatacaaaattctccaattagt

SEQ ID NO: 78680 - DNA, 418 bp, Glycine max
acgacgacgcatgcgcgcctacgtcagctcctaatacttctcgacgcactttactgattcgcctaccatagcacagagtcagctatcttattcgaaacaggggaataacaaccctcctcatccaaaaaaacttattcctcaacaatacaacacattaaaaacgtttctcccagctaactaccattttgtgtaagaccggaacaatgctattcgtgctaacttcctttggaccaacacaatgtgtcattaattgaccatatatgtagtcacatcttctgaatttcaaaattgcttgatgcaaatatgaagctatggagattcaattgcatcccccacttaattattacacactttatataaagccacaggttaatcaagtagcaagattctttccatgcaaatcaatataccttataca

SEQ ID NO: 78681 - DNA, 368 bp, Glycine max
gagatattttgttggagatctcgtctttgaagggtcgaagatgacttctccctacattaaatgtacagtctctttcttcatagcatttggaaatttggctgatgataccatcaattttgaggcttttccccacaagctggtgcagtttggagagattcaggaaaaagttgtattgaaattttcacaagaggaatttcttacagcttggtcaactcaggtgcgtcctgcaacaactctgttggctgatgggtgtccatatttgtatgcaatggtgcatgatagttcagtgtctacaataccaggtgattttgtcattggtgtcaagttgacaaccataaacaatatgtgtgcatatgggctcaatcctg

SEQ ID NO: 78682 - DNA, 371 bp, Glycine max
attgaattttgattctagcaagcagagcttttggggggtttctattgaccttctcggtggaggaatcttagtggacaaaactggagattggatcacacttatacaaaattctccaattagtaacttattgagagttgctgcttggaagaaaggctgtttaatggtcaagattgtgatgtctgggaatgcagcagtcaaaaggagtgattgggcctcattggtacaagtgtttttaacaaacagcaacagtacagagcattttgatgcatgtaagtggacaaaatcagaaccacattcctgggaattgatcttcccaatagaggtatgtggtcctaataatggttttgaaatgtggagttctgagtgggcaa

SEQ ID NO: 78683 - DNA, 256 bp, Glycine max
ttttgttaactcttgattcatataaatgtatgtgggatagagcactgagctggtgtgaagatttaaattcgaacttgctgattacaagtctactcaatttttgagctttgcaaaactgcctattgagttgtgacatgaaaaaattggaaataatgttatattcttgttacttcagtggcataatattagaagttaaagcaaagccctagataatgttaaaaaagtacagtaggcggtcgccgcctagtgagctcgt

SEQ ID NO: 78684 - DNA, 251 bp, Glycine max
ttttgtttactcatgatcaatataaatccatggcgatataccactcctaggtaggaaaatttaaaatcgaccttgctcattacacgtctactaaatatgtgagcttctcaaaacagcctatcgcgtagcaacaagaaaaaattgtaaataatgtactatctgtgctactttcttatcctaaggttggttgttattgccatacacctgtttggctagagacgataaattaggcggtcaccgactcgtgagca

SEQ ID NO: 78685 - DNA, 198 bp, Glycine max
  unsure (1)..(198): unsure at all n locations
aacctccgaaatccgcctcnacaaaaaaataaatataaacaaaaaaaaaaaaaaaaaactgacaatttataaaaaacaaaaaaaccaaccaaccccaaaccacaaacttaaaataatccaaaaataatacaaaaacacttcaccaaatcttcccatatactcattacccaattaacacaaaaaacattttctcaaact

SEQ ID NO: 78686 - DNA, 367 bp, Glycine max
aaaaaaaaaaaaaaaacaaaaaaaaaaaaaaaaggcgcaaaattaaaaaaaaaaaaaaaaaaaaaaaaaaaaaaaaaaaaaaaaaaccaaaaaaaaaaaaaaaaaaaaaaaaaaaaaaaaaaaaaaaaaaaaaaaaaaaaaaaaaaaaaaaagggcccccccccccccaaaaaaccccctcccccccaaaaaaaattccaacccgttcccttaagcctacccatttttccctaaaaaaaatttattaaaaccttccctaaaaaattaaaaaactttttcccttttaaaaatttaattcccttaaaaattccaaaaaaaaaacaaccctaaaccaaaaatttaaaaccctgggttcccaaaaaattac

SEQ ID NO: 78687 - DNA, 385 bp, Glycine max
gcacgcgtacgaagctcgaattcggctcagagagtaatagaaaaagtgattgaaattccagcagatgtaatacttacaggttgtcaactcaggtgcgtcctgcaacaactctgttggctgatgggtgtccatatttgtatgcaatggtgcatgatagttcagtgtctacaataccaggtgattttgtcattggtgtcaagttgacaaccataaacaatatgtgtgcatatgggctcaatcctggtatttcaggttctcgtcttttgggcaccattcctcagtccatttcacagcaaactgtttggaatcaaatggcaacagtgagaacaccattgaattttgattctagcaagcagagcttttgtcagttttctattgaccttct

SEQ ID NO: 78688 - DNA, 175 bp, Glycine max
tgaaaattcttaatcctctgcatgatctggaatttggggtttctttcgcttgttcgtttgtttaattcaataaaggaaattaggcatgaccctcttgttgagtatgctctgcctatttgaaaatttccacacctcttttaattgtcgtaatgatgtgtgaagtgtgtgttatttt

SEQ ID NO: 78689 - DNA, 364 bp, Glycine max
gtgtattatagttcagtgtctacaataccaggtgagtttgtcattggtgtcaagttgacaaccataaacaatatgtgtgcatatgggctcaatcctggtatttcaggttctcgtcttttgggcaccattcctcagtccatttcacagcaaactgtttggaatcaaatggcaacagtgagaacaccattgaattttgattctagcaagcagagcttttgtcagttttctattgaccttctcggtggaggaatcttagtggacaaaactggagattggatcacacttatacaaaattctccaattagtaacttattgagagttgctgcttggaagaaaggctgtttaatggtcaagattgtgatgt

SEQ ID NO: 78690 - DNA, 366 bp, Glycine max
cttaattagtgttcatgaatatgtcaagccttactggagtggttctaaattgaaaagctttctagctagtcataacatcaccattactgatggtattgacaaaactagtgcaactttgcaatttagaaagttagcagattgtgattttctcaagagaaactttaagcagatgtctaatgttttgtgggtggctcctgaggacaaggcgagtttatggtcacaacttcattatgtttcgtgtaataatctggaaatgcaagaagcttatcttgtcaatctcgtaaatgtgttacgagaattgtatttgcacagtccagaggaagctcgccaattgagaaggaaagctctctctcgtattgaatggct

SEQ ID NO: 78691 - DNA, 248 bp, Glycine max
agaagagcgacggcccagggccccctaccttaagctcggaattcggttcgaggagagatgttgcttggaagaaaggctgtttaatgggcaagattgtgatgtctgggaatgcaccagtcaaaaggagtgattgggcctcattggtacaagtgtttttaacaaacagcaacagtacagagcattttgatgcatgtaagtggacaaaatcagaaccacattcctgggaattgatctttccaatagaggta

SEQ ID NO: 78692 - DNA, 366 bp, Glycine max
ctcgattttttgatgataacttaattagtgttcatgaatatgtcaagccttactttagtggttctaaattgaaaagctttctagctagtcataacatcaccattactgatggtattgacaaaactagtgcaactttgcaatttagaaagttagcagattgtgattttctcaagagaaactttaagcagatgtctaatgttttgtgggtggctcctgaggacaaggcgagtttatggtcacaacttcattatgtttcgtgtaataatctggaaatgcaagaagcttatcttgtcaatctcgtaaatgtgttacgagaattgtatttgcacagtccagaggaagctcgccaattgagaaggaaagctc

SEQ ID NO: 78693 - DNA, 232 bp, Glycine max
ctcgatttgctaaatgagctacttttagtcctttggcggtatctttgtattactgtggcagatgctactatcctcaaatttgaaaaacttactaagtttctttaccttgtccataccctatagctaacaaccctaaaaatggtttcattttctgcatggtagtatatcttggagtttttaaagatggtcatagtagaaaaattgctttaggagaaattaatacatggatcag

SEQ ID NO: 78694 - DNA, 356 bp, Glycine max
atacttttgtaggcacttcaatattttagtaaggatttgggctgaatgacagcaatggtcataaatatgtacatgatacttgtgacctatttatatggatatatattgagatgagttgaggtgaaaaaaaaaaaaaaaaaaaaaaaaaataaaaacaaaaaaaaaaaaaaaaaaaaaaaaaaataaaagaatatgacattaaaactaaaaaaaagaaagaaagagtcgtcgtggacaaattaccttcgcgttaaagggcaccaaaacatgtacggcatcggcaatttcccccacttcccgaagtaccccgtcaagttccagttactggtcgagcactggaacgtggccggcaacca

SEQ ID NO: 78695 - DNA, 367 bp, Glycine max
cagtatttttctttgaaattgatgacccccacggggagattctagctagctccatattccaaagtaagaagtgacagaagaaaaggaggagaaattagaagaaaaaaaatccagaattcggttatggttaatcaataggggctgtggatgaggtatattcaagttcatgtgcatgattgaagaggatggccaacatggagcgagtgatttcagatttcatgtcttggtttcctctttgggcaattttggtgcttgacttgctgctcaaggtttctggcaacacagaaggtgatgctctgactgcattgaagaacagtgtgagtgatcctaacaatgttcttcaaagttgggattctacacttgtcga

SEQ ID NO: 78696 - DNA, 326 bp, Glycine max
  unsure (1)..(326): unsure at all n locations
tgaaatangattctagcaagcagagcttttggcagttttttattgaccttctgggtggaggaatcttagtggacaaaactggagattggatcacacttatacaaaattctccaattagtaacttgttgagagttgctgcttggaagaaaggctgtttaatggtcaagattgtgatgtctgggaatgcagcagtcaaaaggagtgattgggcctcattggtacacgtgtttttaacaaacagcaacagtacagagcattttgatgcatgtaagtggacaaaatcagaaccacattcctgggaattgatcttcccaatataggtatga

SEQ ID NO: 78697 - DNA, 362 bp, Glycine max
ttgacattaagttacactccaactccattgttggaatctggtttgcaaaaagacagagggttaattgtggagtattttggaaggatgtcttacgttgctcataacgttaatcagccccaagagaaagatttgttggagggaaatttttcctttgatattaaatctcgctctagattggaaaaagtttcctctacaaaagcacaatttgttagtggaaaaaccttcaaatatgatataattggtgctggttcacattcttcagaagattttcctgaaaaggaagatcaagaaaaacccaaaaagattgatgccagattgagacaaagaatagatcctcaatacaatgaggttcaggctcagat

SEQ ID NO: 78698 - DNA, 360 bp, Glycine max
gtcatatcttcaccattactgatggtattgacaaagctagtgcaactttgcaatttagaaagttagcagattgtgattttctcaagagaaactttaagcagatgtctaatgttttgtgggtggctcctgaggacaaggcgagtttatggtcacaacttcattatgtttcgtgtaataatctggaaatgcaagaagcttatcttgtcaatctcgtaaatgtgttacgagaattgtatttgcacagtccagaggaagctcgccaattgagaaggaaagctctctctcgtattgaatggctgcaaaaagctgatgtgcctaccatagcacagattgaagagttccattcgatgcagaggatga

SEQ ID NO: 78699 - DNA, 208 bp, Glycine max
gatttgttttgtttacaaggagcaggtaaagctttgccggacaaaattgtttttgatgataagcttgtgttggctaacacacaagaattctttgatggaaattttccagtggattcttggttaccaatttttgtgaattgtctttatcctgtaagtcaattaccttcagaagctgtcgttgtaaatgttacatgtggtagtggacgtg

SEQ ID NO: 78700 - DNA, 363 bp, Glycine max
aattgatgttgaagtcttgcccttctctcttcggcgggcaaacacaagacatcatcatccatggctgcctccgtctccactgtcggagctgtcaacagagctcttttgaacctgaatgggtctggacctggggtttcagctcccagttcatccttctttgggagcagcttgaagaaggttattggctcaagggtccccaacacaaagatttcctctggaagcttcaagattgttgctgtagaagagaagaaagagattgaagagacccagcagaccgacaaggacagatggaagggtcttgcctatgatatctcagacgaccaacaggacatcacaggaggaaagggtttggttgactccctt

SEQ ID NO: 78701 - DNA, 257 bp, Glycine max
tgtatttacgcacctgctgttggcttgttgttgaaggatggcaatttgtaagaaagatgtttggagagttgaatgtggaatcccttctggatttccgctcacagttatttgcaatagcatttttaatgggattcctattagatatagcttttaaaaattactgcgccaggcttaaagctccaatatggttttaccattcttcaaaaaatttggttctttggggggggatggggatgataacctaattaggggtcatt

SEQ ID NO: 78702 - DNA, 365 bp, Glycine max
ccgaaatccattgtgcagattgaaccagacatgaagtcaaggtttcagcttttgagtaccactaccaatggtgattttgttcaagggaaagatctcgcaatggttaaagttaatgtagcatgtgctgctgttggcttgacatcaagttacactccaactccattgttggaatctggtttgcaaaaagacagagggttaattgtggagtattttggaaggatgtcttacgttgctcataacgttaatcagccccaagagaaagatttgttggagggaaatttttcctttgatattaaatctcgctctagattggaaaaagtttcctctacaaaagcacaatttgttagtggaaaaaccttcaaata

SEQ ID NO: 78703 - DNA, 354 bp, Glycine max
cggctctaggcagaaagcaagctcatcctagagttgtaaaaatggcagcagcctcctccatggctctctcttccccatccttggctggcaaggccgtgaagctgggcccatcagcccccgaagtcgggagggtcagcatgaggaagaccgtcaccaagcaggcctcctccggaagcccatggtacggcccagaccgcgtcaagtacttgggcccattctctggcgagcccccgtcctacctcactggcgagttcccaggtgactacggctgggacactgctgggctttcggccgacccagaaaccttcgccagaaaccgtgagctcgaagtgatccactccaggtgggccatgc

SEQ ID NO: 78704 - DNA, 365 bp, Glycine max
  unsure (1)..(365): unsure at all n locations
aaaagccttagccttccctacaactccaaacacagggacatcatcatccatggctgcctccgtctccactgtcggagctgtcaacagagctcttttgaacctgaatggttctggagctggagcttcagctcccagttcagccttctttgggaccagcttgaagaaggttattgcctcaagggtccccaacagcaaggtttccggtggaagcttcaagattgttgctgtagaagagaagaaagagattgaagagacccagcagaccgacaaggacagatggaagggtcttgcctatgatatctcagacgaccaacaagacatcacangaggaaagggtttggttgactcccttttccaagctccac

SEQ ID NO: 78705 - DNA, 361 bp, Glycine max
atttcttacatcttggtcaactcaggtgcgtcctgcgggaactctgttggctgatgggtgtccatatttgtatgcaatggtgcatgatagttcagtgtctacaataccaggtgattttgtcattggtgtcaagttgacaaccataaacaatatgtgtgcatatgggctcaatcctggtatttcaggttctcgtcttttgggcaccattcctcagtccatttcacagcaaactgtttggaatcaaatggcaacagtgagaacaccattgaattttgattctagcaagcagagcttttgtcagttttctattgaccttctcggtggaggaatcttagtggacaaaactggagattggatcaca

SEQ ID NO: 78706 - DNA, 272 bp, Glycine max
gttttatatactagagttgatccttttccagggggggtactggctgttctttttggcgttaagaatgaaattctgagttctaacgccactaatcctatgctgacgcgacttcttgagaactgtaagagtctcaaatatctggttgatgagtgtccttttgcatttgtgaactagtatgtagtattttattcacttaaataaagcgcattactatgtgcaatgagtgtgtttaaatataaaaaaaaaaaaaaaaaaaaaaaagagggagggat

SEQ ID NO: 78707 - DNA, 354 bp, Glycine max
gtttggtgagattcaggaaaaagttgtattgaggtgttcacaagaggaatttcttacagcttggtcaactcaggtgcgtcctgcaacaactctgttggctgatgggtgtccatatttgtatgcaatggtgcatgatagttcagtgtctacaataccaggtgattttgtcattggtgtcaagttgacaaccataaacaatatgtgtgcatatgggctcaatcctggtatttcaggttctcgtcttttgggcaccattcctcagtccatttcacagcaaactgtttggaatcaaatggcaacagtgagaacaccattgaattttgatctagcaagcagagcttttgtcagttttct

SEQ ID NO: 78708 - DNA, 299 bp, Glycine max
aaaaaaaaaaaaaataaaattatttttaaataattattttataattatttatttatttatatatttttttttattttataaatttcttttaatttatatttttatttttttaataatattttttctttctttttttctcaatttaatttttttcttataatttttttttttttttcttttttattttttcttttctcttttttttttattttttatttttttttatattttttttttcttttcttatttttattttcttttaattaataattttttttttttattttattttttttatt

SEQ ID NO: 78709 - DNA, 328 bp, Glycine max
caccgatcatctcccatgggtaccgttccttcgctgcggcactcatctggggcctgttgtttctctcaatttcaagcctttcaattctattgttcttcgctggatgctcatggaaacaggcatgggaatgccgtggtctatgtgaaggcctatgcttctggggttgagttggtcgcgaagattgatgcttggaatgcccatttggctgactcaggacagactgggatggactctcacgtgctttagggatatagaaggaaacgaagagagcacagctttgtcctcaagagggacaccttgaacactacaattagtgcctacagcctgt

SEQ ID NO: 78710 - DNA, 424 bp, Glycine max
agaagagctatgacggcgcatggacgcggtccgtaggttcggaattcggttcgggattttatttaattaatgtgaatattaagagaactaggtgaatggttgttattacatgcactcagagtagattgtacgtacgtgttgaatttggaagcaggtttcgaattggtttattaacgcgagggtgaggctatggaagccgatggtggaggaaatgtatctggaagaagagaaggagcaagaaaacgacgtagcatcatcggatattaatgttcccgaagaggatgagaagccaacgcaggaggctccactccttcgaattgactcagagtgcatgtcgtctatcgtcaacgacgtcacaaagagcggcaaaaccattcaaaacgacaaccaaatggacgcattcgggtcggtggagcttgacttt

SEQ ID NO: 78711 - DNA, 362 bp, Glycine max
attgaagtttaagtcttgcccttctctcttcaactcgaaacacaagacatcatcatccatggctgcctccgtctccactgtcggagctgtcaacagagctcttttgaacctgaatgggtctggacctggggtttcagctcccagttcatccttctttgggagcagcttgaagaaggttattggctcaagggtccccaacacaaagatttcctctggaagcttcaagattgttgctgtagaagagaagaaagagattgaagagacccagcagaccgacaaggacagatggaagggtcttgcctatgatatctcagacgaccaacaggacatcacaagaggaaagggtttggttgactcccttt

SEQ ID NO: 78712 - DNA, 340 bp, Glycine max
  unsure (1)..(340): unsure at all n locations
gaagagctatgacgncgcatgcacgcgtacctaagctccgaattccgcttcagggggtttattaataaaaatgggtttcatgtgtaaagtgcgtcaacttaaattgtcgtttcagttacccctacccacccacccacaaaaaaataataataatatcttctgctcattttagtataggttagattttaatcaccacttttttttttaataatttcgggttaggattgttttaggcgtgtttcatttgtaaaattttctcatcttcacgagtgtttcaataaaggcagcaaatcaccttgaaaaaaaaaaaaaataaaaaagggaaaaaaaaatccttata

SEQ ID NO: 78713 - DNA, 249 bp, Glycine max
ttctaatgccactaatcctatgctgacgcgacgtggtgagaactgtaagagtctcaaatatctggttgatgagtgtccttttgcatttgtgaactagtatgtagtattttattcacttaaataaagcgcattactatgtgcaatgagtgtgtttaaatttaaaaaaaaaaaaaaaaaaaaaaaaaaaaaaaaaaaaaaaaaaaaaaatataaaaaaaataaataaaaaaaaataaaaaaaattataatt

SEQ ID NO: 78714 - DNA, 369 bp, Glycine max
atttgctcattccagaggaagctcgccaattgagagggagaagctctctctcgtattgaatggctgcaaaaagctgatgtgcctaccatagcacagattgaagagttccattcgatgcagaggatgatgaatgctcctgattcaaatgataatattgatttactgttgagcattgatttgttgggtttacaaggagcaggtaaagcttttccaaacaaaattgtttttgatgataagcttgtgttggctaacacacaagaattctttgatggaaattttccagtggattcttggttaccaatttttgtgaattgtctttatcctgtaagtcaattaccttcagaagctgtcgttgtaaatgttacatgt

SEQ ID NO: 78715 - DNA, 394 bp, Glycine max
  unsure (1)..(394): unsure at all n locations
aaaaaaaaaaaanantaaaaattataattttatttttttcttaatattttattattacttttttatatattatttttttttatatattttttttttttttttttatatttttttttttttttattattatttttttttttttatattatcatttaattttatttttttataatttattatattttttttatttattattctttttatttttttttaattattattttttttattatattatttttttttaatttttttttttatttattatttttttattatttttattatttatttatattattattttaatttttttattataatttaatttaaattttttatattttattatttttatatattattttttttatattttattttttatttt

SEQ ID NO: 78716 - DNA, 376 bp, Glycine max
aacacatagcacaaagcaaagctcatccttgagttaaaaaatggcagcagcttcttccatggctctctcatccccatccttggctggcaaggccgtgaagctgggcccatcagccccagaagtgggaagggtgagcatgaggaagaccgtcaccaagcaggtctcctcaggaagcccatggtacggcccagaccgagtcaagtacttgggcccattctctggcgagcccccgtcctacctaaccggtgagttcccaggcgactacggctgggacactgctgggctttccgcagacccagaaaccttcgccaagaaccgtgaactcgaagtgatccactccaggtgggccatgctcggagccttgggctgcgtcttc

SEQ ID NO: 78717 - DNA, 366 bp, Glycine max
atgataacttaattagtgttcatgaatatgtcaagccttactttagtggttctaaattgaaaagctttctagctagtcataacatcaccattactgatggtattgacaaaactagtgcaactttgcaatttagaaagttagcagattgtgattttctcaagagaaactttaagcagatgtctaatgttttgtgggtggctcctgaggacaaggcgagtttatggtcacaacttcattatgtttcgtgtaataatctggaaatgcaagaagcttatcttgtcaatctcgtaaatgtgttacgagaattgtatttgcacagtccagaggaagctcgccaattgagaaggaaagctctctctcgtattg

SEQ ID NO: 78718 - DNA, 367 bp, Glycine max
caaaactagtgcaactttgcaatttagaaagttaggagattgtgattttctcaagagaaactttaagcagatgtctaatgttttgtgggtggctcctgaggacaaggcgagtttatggtcacaacttcattatgtttcgtgtaataatctggaaatgcaagaagcttatcttgtcaatctcgtaaatgtgttacgagaattgtatttgcacagtccagaggaagctcgccaattgagaaggaaagctctctctcgtattgaatggctgcaaaaagctgatgtgcctaccatagcacagattgaagagttccattcgatgcagaggatgatgaatgctcctgattcaaatgataatattgatttactg

SEQ ID NO: 78719 - DNA, 319 bp, Glycine max
caacatttttgttcaaacaccccacgagcttctccagcattttcaatcctcttctcttttatcctcatcgctctgcaccaaaacctccccactcctcaattatttatttatctctcccactttttctcacacacattttctcaaacacatggtgtcctcactccttcacttcactctagcttaaataacccaacaaagttcgcttcaaacctcaaccatggccctcgaaacgctcctcgtgaaggtcaaaaccgccatatcaaacagcatcgactcggtcccgccgaagctcctgaagaagaagccttctttcaaagcg

SEQ ID NO: 78720 - DNA, 349 bp, Glycine max
gaaaatttactgcgccaggctaaagctccaagtatgtttggacaatccttcaaaaattttgtttctttgtgtgtgtatggtgatgataacttaattagtgttcatgaatatgtcaagccttactttagtggttctaaattgaaaagctttctagctagtcataacatcaccattactgatggtattgacaaaactagtgcaactttgcaatttagaaagttagcagattgtgattttctcaagagaaactttaagcagatgtctaatgttttgtgggtggctcctgaggacaaggcgagtttatggtcacaacttcattatgtttcgtgtaataatctggaaatgcaag

SEQ ID NO: 78721 - DNA, 237 bp, Glycine max
  unsure (1)..(237): unsure at all n locations
agttatttgaaaaaacccaaaatgnnattcgcccagcctgtttttgtaggttcgcacacccaaactctnnggacgaaattttaaaatggggaaagggttacaaatagttgaagagggatgagaacacatgggcaaacaacacgcaaaggcgagtcggggtagaagtcacatgcggaagtggacgaggaacctgacacaaccccgaagggacaaactatctgctgaccgtgtctacct

SEQ ID NO: 78722 - DNA, 368 bp, Glycine max
  unsure (1)..(368): unsure at all n locations
cgcgtagcgtaacgctcggatattcggcttcgagtctcgatttttttttaatcnacgaaccacattcctgggaagggggggcttcccaatacgaggtattgtggtccataataatcggtttatgaaatgtcggagtctctgagtagggcgaaatcaaacgttcattggcattttgcagtttcccttattcgaccaatcaccaaacacgtctacacgtcttttgatattcatcttgtggaattctctcacagatttatgaacattggctggtatatacctcttactgccagcattttctctgtttccacagggctacttgccagaatctatctggaaatgcgtgaatcactctgcatgtatctggaatt

SEQ ID NO: 78723 - DNA, 349 bp, Glycine max
cttggttgctttaatttgtatggtctgaaagagccgaagggctaccgcgaagataggactcggagttggtcccgtcccaacaaccactcaccgagtcaccgccgtcgccgcttcttcctccgccgcattctccccgccgacgcaccgactattctttctcaactcgagccggccgcccctacgacctcgccccctacccctccgtgtagccgccgcgtcctcctccccctccgtcgccgcgccaggaaaacgagttgagaatgtggtaattataggttcaggccctgcacgatacacagcggcaatatatgcagcacgtgccaatttgaaacctgtggcgtttgagggg

SEQ ID NO: 78724 - DNA, 345 bp, Glycine max
gtccataggtagctcgccaattgagaaggaaagctgtcggtcgtattgaatggctgcaaaaagctgatgtgcctaccatagcacagattgaagagttccattcgatgcagaggatgatgaatgctcctgattcaaatgataatattgatttactgttgagcattgatttgttgggtttacaaggagcaggtaaagcttttccaaacaaaattgtttttgatgataagcttgtgttggctaacacacaagaattctttgatggaaattttccagtggattcttggttaccaatttttgtgaattgtctttatcctgtaagtcaattaccttcagaagctgtcgttg

SEQ ID NO: 78725 - DNA, 346 bp, Glycine max
aaaaattgattcgtgaaaggacgcacctgctgttggctggttgttcaaggatggcaatttgtaagaaagatgtttggagagttgaatgtggaatcccttctggatttccgctcacagttatttgcaatagcatttttaatgagatgctcattagatatagctatgaaaaattactgcgccaggctaaagctccaagtatgtttttacaatccttcaaaaattttgtttctttgtgtgtgtatggtgatgataacttaattagtgttcatgaatatgtcaagccttactttagtggttctaaattgaaaagctttctagctagtcataacatcaccattactgatgg

SEQ ID NO: 78726 - DNA, 84 bp, Glycine max
agcaggttattcttttccaaacaaaattgtttttggtgagaagcttgtgttggctaacacacaaaaattctttgatggaaattt

SEQ ID NO: 78727 - DNA, 166 bp, Glycine max
cgcacgcgtacgcaagctattaatttcgatcgagcgtattttcatccaccaatcgcttccaccgtgggcgctctcaaatacatgaatatagtccccatcagcgacaccgaaaccgacaaactaattcgtcaccaaacaagaagaaacctccaccttgagcgcgcga

SEQ ID NO: 78728 - DNA, 346 bp, Glycine max
gtgatgataacttaattagtgttcatgaatatgtcgggcgttactttagtggttctaaattgaaaagctttctagctagtcataacatcaccattactgatggtattgacaaaactagtgtaactttgcaatttagaaagttagcagattgtgattttctcaagagaaactttaagcagatgtctaatgttttgtgggtggctcctgaggacaaggcgagtttatggtcacaacttcattatgtttcgtgtaataatctggaaatgcaagaagcttatcttgtcaatctcgtaaatgtgttacgagaattgtatttgcacagtccagaggaagctcgccaattgag

SEQ ID NO: 78729 - DNA, 344 bp, Glycine max
aatttgtatatcaagaaaaacccaaaaagatgggcggcagattgaaacaaagaatagatcctcaatacaatgaggttcaagctcagatggaaacaaatttgtttaaattgtctcttgatgatgttgaaactcctaaaggttccatgttggatctgaaaatttctcaatctaaaattgcacttcccaagaacacagttggaggaaccattctgcgtagtgatctattggcaaattttttgacagagggcaattttagagcaagtgttgatttgcagcgcactcatcgtattagaggaatgattaaaatggtggccacagttggtattcctgagaatacaggtata

SEQ ID NO: 78730 - DNA, 234 bp, Glycine max
aaattataaaaaaaaaaaaaaaaaaaaaaaaaggcgcaaaatataaaaaaaaaaaaaaaaaaaaaaaaaaaaaaaaaaaaaaaaaaaaaaaaaaaaaaaaaaaaaaaaaaaaaaaaaagggcccccccccacctattaaccttttcaacccggaaataaattccgacccgttccctcaaggcttcccacttttccttataagaagcctttttaaacctttcctaaaaaatggca

SEQ ID NO: 78731 - DNA, 226 bp, Glycine max
taatactcttatgccagctttttctgttccacaggctacggccagatcttctgaaaatgcggaatcctctgcatgatctggaatttgtgttttctttcgcttgttcgtttgtttaattcaataaaggaaattaggcatgaccctcttgttgagtatgctctgcctatttgaaaatttccacacctcttttaattgtcgtaatgatgtgtgaagtgtgtgttatttt

SEQ ID NO: 78732 - DNA, 345 bp, Glycine max
tgcatgtaagtggacaaaatcagaaccacattcctggggattgatcttcccaatagaggtatgtggtcctaataatggttttgaaatgtggagttctgagtgggcaaatcaaacttcatggcatttgagtttccttattgacaatcccaaacagtctacagtttttgatattctcttgggaatctctcaagattttgaaattgctggtaatactcttatgccagctttttctgttccacaggctactgccagatcttctgaaaatgcggaatcctctgcatgatctggaatttgtgttttctttcgcttgttcgtttgtttaattcaataaaggaaattaggcat

SEQ ID NO: 78733 - DNA, 344 bp, Glycine max
gctaaattctcaaacacaagccccacgacatgctggagttctgcgcaaacttctttaatcgccgtctcgagtcgcagcgaaccgaatatctgctgtcgcaacagcactccagtccccagggccgtgccgagaacacctttcccggcaacaaccccttcagcacctcccccagcagcggcagcggcttcaccaaatccacaatgcagcgtctcgaagaagaggaggagaacgacaccatgacctcccccactgcctcgacctttgcagccgtcgactttagcaggtcccgcggcagcaacaacgactcgggtgcgagcgcatttggcgactttggcggctttggc

SEQ ID NO: 78734 - DNA, 343 bp, Glycine max
ggaaacttaatgcatgggtcaagtaacaccaagcgggatgaactggaagggtttatacaggagatctgcagacggacagtttgttcaagaaagaaaaaattttagagtctagctttccgtcgggcccattaagatgaaagcattgttagcataacgtccaaaatgttgccatacccatctcatcagtaacatcattatcaaattgcactactttggattgtaagctaatttaaatcaaggactacatttagattgacgtggtgttctggtcaagactcatgtggttgcacaccaactactggtaagacaaaggaggcagttacgggggctctaatagccgaac

SEQ ID NO: 78735 - DNA, 347 bp, Glycine max
agcagattgtgattttctcaagagaaactttaagcagatgtctaatgttttgtgggtggctcctgaggacaaggcgagtttatggtcacaacttcattatgtttcgtgtaataatctggaaatgcaagaagcttatcttgtcaatctcgtaaatgtgttacgagaattgtatttgcacagtccagaggaagctcgccaattgagaaggaaagctctctctcgtattgaatggctgcaaaaagctgatgtgcctaccatagcacagattgaagagttccattcgatgcagaggatgatgaatgctcctgattcaaatgataatattgatttactgttgagcattgatt

SEQ ID NO: 78736 - DNA, 396 bp, Glycine max
  unsure (1)..(396): unsure at all n locations
gagagcaagacggccaggcacgcgtacgtaagctcttaattcnnctcgagaatactggatgccacatctnangnatnnacaccccgcccttcttaaaaaacacggcgcccccaacaaaaaaaaantnnattttttcaacactagaatttgaacgctcttctcagggataatatgctctcagacaaagtacatcaaacattaaaatttccagcaaaaatttccagtaaaagaagagtgtcccaccaacattttcagctaaaagaatatttataaacactctactgacaaaatgctccaactatataatctgcgggcgagggccgggcttaatccatattcaactatctaattccatctcaatcacaaaaacctttactccactgacagtcaataact

SEQ ID NO: 78737 - DNA, 335 bp, Glycine max
aattctccaattagtaacttgttgggggttgttgcttggaagaaaggctgtttaatggtcaagattgtgatgtctgggaatgcagcagtcaaaaggagtgattgggcctcattggtacaagtgtttttaacaaacagcaacagtacagagcattttgatgcatgtaagtggacaaaatcagaaccacattcctgggaattgatcttcccaatagaggtatgtggtcctaataatggttttgaaatgtggagttctgagtgggcaaatcaaacttcatggcatttgagtttccttattgacaatcccaaacagtctacagtttttgatattctctt

SEQ ID NO: 78738 - DNA, 344 bp, Glycine max
cccatttcctattgtgttttaaatccacaaaatccggttgtgttaaataggtggatgggaaaattgactttcccccagggcacttcccgaagtgttaagagaatgcctctttctatagggggaggagctggtgcaaagaatgctattctcatgaatatgccaaatgctgttctttcaatgtggagatattttgttggagatctcgtctttgaagtttctaagatgacttctccctacattaaatgtacagtctctttcttcatagcatttggaaatttggctgatgataccatcaattttgaggcttttccccacaagctggtgcagtttggagagattcagga

SEQ ID NO: 78739 - DNA, 283 bp, Glycine max
tcatatgaaacctgccccggagggggcatattatggggacctttactttacaacatatttctaccatcaggtttcaaaagggagcgttttacacaaatcttttcttccctgggttcacgtgtgttctcaaattttagggctctgaattgcctagaaaaaatctttgtgagaaatcttcacacactatttttgcattacctacgctggctaaaccggttctttagaattgtgggagaccttaaacattgatttataccggaacccgacttttttttggggcaca

SEQ ID NO: 78740 - DNA, 218 bp, Glycine max
agagctaagacggcgcaggcacgcggacgttaggttcgaatttcggttcaggatcctttgttggttctggaattggggttttctttggggggttcgtttgtttaattcaataaaggaaattaggcatgacccttttgttgagtatgctctgcctatttgaaaatttccacacctcttttaattgtcgtaatgatgtgtgaagtgtgtgttattttaaa

SEQ ID NO: 78741 - DNA, 345 bp, Glycine max
ggacggtcttcatcctgggcatcaattacgccgatgccaattctcagaggaaggggacagatgaaacgctcgagtttgtcgaatttcgagatggcctttcctaggtgctcggctccagaacctcaatttcaagagatcgtactcttttggcgtatttgcccaggaacgatggtccgctttcgccagggctgtgcacgcttgcaagccagagcttactcttggtcctacttggcagaggctggccagatcctggcgaggaagatgctcggccacggcgaggagcacgtctaggatcaagcgttctcccatagtgctgggattgttttgctgaaagcgaaggcaaga

SEQ ID NO: 78742 - DNA, 342 bp, Glycine max
aaattattaaaaaaaaaaaaaaaaaaaaaaaaagcgcaaatttaaaaaaaaaaaaaaaaaaaaaaaaaaaaaaaaaaaaaaaaaaaaaaaaaaaaaaaaaaaaaaaaaaaaaaaaaaaaaaaaaaaaaaaaagggcccccccccccattaaaaacctcttcaccccgaaaataaattccaacccgttccctaaaacctaacaaattttcctttaataaactctttttaaaccttcccaaaataaaggaaaaacctttttcctttgaaaaattgtattcccttaaaaattccaaaaaaaatacaacccgaaaacaaaaaattaaaaacctggggccccaaaaa

SEQ ID NO: 78743 - DNA, 329 bp, Glycine max
aaattataaaaaaaaaaaaaaaaaaaaaaaaaagccccattttaaaaaaaaaaaaaaaaaaaaaaaaaaaaaaaaaaaaaaaaaaaaaaaaaaaaaaaaaaaaaaaaaaaaaaaaaaaaaaaaaaaaaaaaaaaagggcccccccccattttaaaaccctttcaccccccaaataaataccgacccgttccctacaccctacccatttttccttaaaaaaagtcttttaaaaccttccctaaaaaaaagaaaaacctttttcctttgaaaaatgggtatccctcaaaaattccacaaaaaaaacaaccctaaacattaaatttaaaacc

SEQ ID NO: 78744 - DNA, 125 bp, Glycine max
aaatacttaaaaatatagttggatttcccacctggcgtctacccctgttgaaagtaacaaagtaaagctgctctgcaacaggggtagaagcaaggtgggaaatactgaaaaatatagttggattt

SEQ ID NO: 78745 - DNA, 360 bp, Glycine max
aatttcggttcaggagcaatttttttttaatttaatccaaacccgtgtgccgatgcatggagtttggaatttctgaaccgtcctggatttcattgcgatatcatttgtgtcactggatggactgccaccccaatgcaggatgttcaggttacaattgattggtttatttcctctcaggaatgtgttcccaggacctattgtgttttaaatccacaaaatccttttgtgttaaataggtggatgggaaaattgactttcccccagggcacttcccgaagtgttaagagaatgcctctttctatagggggaggagctggtgcaaagaatgctattctcatgaatatgccaaatgctgttctt

SEQ ID NO: 78746 - DNA, 347 bp, Glycine max
tgtgtgtgtatggtgatgataacttaattagtgttgatgaatatgtcaagccttactttagtggttctaaattgaaaagctttctagctagtcataacatcaccattactgatggtattgacaaaactagtgcaactttgcaatttagaaagttagcagattgtgattttctcaagagaaactttaagcagatgtctaatgttttgtgggtggctcctgaggacaaggcgagtttatggtcacaacttcattatgtttcgtgtaataatctggaaatgcaagaagcttatcttgtcaacctcgtaaatgtgttacgagaattgtatttgcacagtccagaggaagct

SEQ ID NO: 78747 - DNA, 316 bp, Glycine max
atggcttttgagtttccttattgacaatcccaagcggtctacagtttttgatattctcttgggaatctctcaagattttgaaattgctggtaatactcttatgccagctttttctgttccacaggctactgccagatcttctgaaaatgcggaatcctctgcatgatctggaatttgtgttttctttcgcttgttcgtttgtttaattcaataaaggaaattaggcatgaccctcttgttgagtatgctctgcctatttgaaaatttccacacctcttttaattgtcgtaatgatgtgtgaagtgtgtgttatttt

SEQ ID NO: 78748 - DNA, 367 bp, Glycine max
aacctcgaaattcggttcgaggtcaaatttttgatgtctgggaatgcaccagtcaaggggggtgattgggcctcattggtacaagtgtttttaacaaacagcaacagtacagagcattttgatgcatgtaagtggacaaaatcagaaccacattcctgggaattgatcttcccaatagaggtatgtggtcctaataatggttttgaaatgtggagttctgagtgggcaaatcaaacttcatggcatttgagtttccttattgacaatcccaaacagtctacagtttttgatattctcttgggaatctctcaagattttgaaattgctggtaatactcttatgccagctttttctgttccacaggcta

SEQ ID NO: 78749 - DNA, 344 bp, Glycine max
caaatttcaacagtgagaacaccattgaatttggggtctagcaagcagagcttttgtcagttttctattgaccttctcggtggaggaatcttagtggacaaaactggagattggatcacacttatacaaaattctccaattagtaacttattgagagttgctgcttggaagaaaggctgtttaatggtcaagattgtgatgtctgggaatgcagcagtcaaaaggagtgattgggcctcattggtacaagtgtttttaacaaacagcaacagtacagagcattttgatgcatgtaagtggacaaaatcagaaccacattcctgggaattgatcttcccaataga

SEQ ID NO: 78750 - DNA, 176 bp, Glycine max
  unsure (1)..(176): unsure at all n locations
ataaatanaaaaaaaacaaaaaacaaaaaaaccccgcctttaaaaaaaaaatacgcaccacaaaaaaaaaaaaaaaaaaaaaaaaaaaaaaaaaaaaaaaaaaaaaaaaaaaaaaaaaaaaaaaaaaaaataaaaaaaaaaaaggttccgcacaccaaaataaacaaccccaaccc

SEQ ID NO: 78751 - DNA, 347 bp, Glycine max
ttgtgttttaaatccacaaaatccttttgtgttaggtaggtggatgggaaaattgactttcccccagggcacttcccgaagtgttaagagaatgcctctttctatagggggaggagctggtgcaaagaatgctattctcatgaatatgccaaatgctgttctttcaatgtggagatattttgttggagatctcgtctttgaagtttctaagatgacttctccctacattaaatgtacagtctctttcttcatagcatttggaaatttggctgatgataccatcaattttgaggcttttccccacaagctggtgcagtttggagagattcaggaaaaagttgtattga

SEQ ID NO: 78752 - DNA, 344 bp, Glycine max
gtcttgtaattgaagttgaagtcttgcccttgtctgttcaactccaaacacaagacatcatcatccatggctgcctccgtctccactgtcggagctgtcaacagagctcttttgaacctgaatgggtctggacctggggtttcagctcccagttcatccttctttgggagcagcttgaagaaagttattggctcaagggtccccaacacaaagatttcctctggaagcttcaagattgttgctgtagaagagaagaaagagattgaagagacccagcagaccgacaaggacagatggaagggtcttgcctatgatatctcagacgaccaacaggacatcacaag

SEQ ID NO: 78753 - DNA, 397 bp, Glycine max
gaagtagctacgacgaaggcacccgtccgtaagctcggaattcggttcgagcaaatggtatcagtgagaacaccattgaattttgagccgagcaagcagagcttttgtcagttttctattgaccttctcggtggaggaatcttagtggacaaaactggagattggatcacacttatacaaaattctccaattagtaacttattgagagttgctgcttggaagaaaggctgtttaatggctaagattgtgatgtctgggaatgcagcagtcaaaaggagtgattgggccttattggtacaagtgtttttaacaaacagcaacagtacagagcattttgatgcatgtaagtggacaaaatcagaaccacatttctgggaattgatcttcccaatagagg

SEQ ID NO: 78754 - DNA, 336 bp, Glycine max
cgcaattaacacgagatgactctggctccgcagctgcagtaacaccaagccttgagttctttcagcatagctcggcgccattagctcgcgggtctgccaaatcgcaatggtactggtctgcgaactgaatatacaccaaggctaggcttctgagttccatcagacctggggatgcatacaatcgctgccctgatttgaacccttgatcatacttgacaacaggctgtgatttatgttatacaacaaaagggctcaacaagccagacccctcaatctcgcgtctattccgctcacaccaacccagcactctactctaagtcgtctagggaacaacat

SEQ ID NO: 78755 - DNA, 338 bp, Glycine max
  unsure (1)..(338): unsure at all n locations
catccccttgctcatagcctgagacactgcctggtgaacacacggcgcgcggcaccatctctcttcgccagacaccaaaactatataacacgcgaagcccgtccttgccctccttggggcgtaccgtgacgatggccgntccaccaccaccaccacctnggcgcaccgncacgccctncgtacccaccgagcccgagaaaccaacgtggaaatcaaagatgaaagctaagggagcggtctgggggaagacagcgatggacaagggcatcattttgtcagacaacatcggcggcaaggtcaacaacatcgcagagaagcggttcgggaccgaacacttt

SEQ ID NO: 78756 - DNA, 263 bp, Glycine max
acccttagctcagctttcagctcgagcggaacaccaaatccttatttttatggtagtgaccacactcggggaaagtctctgtctgtgtgttgacgtaacatagaaaagcaaaattggggctcacttcaatatcaataaaaagatcgtgatgttcattcctcttagatggtaccaccactaactaccctaccaccagtattatagcattttatttccattcctacaacctatccgctgtttatgagttccacagagcacacctt

SEQ ID NO: 78757 - DNA, 409 bp, Glycine max
cttttgagtaccactaccattggtgattttgttcaagggaaagagctggcattggttaaagttaatgtagcatgtgctgctgttggcttgacatcaagttacactccaactccattgttggaatctggtttgcaaaaagacagagggttaattgtggagtattttggaaggatgtcttacgttgctcataacgttaatcagccccaagagaaagatttgttggagggaaatttttcctttgatattaaatctcgctctagattggaaaaagtttcctctacaaaagcacaatttgttagtggaaaaaccttcaaatatgatataattggtgctggttcacattcttcagaagattttcctgaaaaggaagatcaagaaaaacccaaaaagattgatgccagattgagac

SEQ ID NO: 78758 - DNA, 412 bp, Glycine max
caaatggcaactgtgttatacaccattgaattttgattcgagcaggcagagcttttgtcagttttctattgaccttctcggtggaagaatcttagtggacaaaactggagattggatcacacttatacaaaattctccaattagtaacttgttgagagttgctgcttggaagaaaggctgtttaatggtcaagattgtgatgtctgggaatgcagcagtcaaaaggagtgattgggcctcattggtacaagtgtttttaacaaacagcaacagtacagagcattttgatgcatgtaagtggacaaaatcagaaccacattcctgggaattgatcttcccaatagaggtatgtggtcctaataatggttttgaaatgtggagttctgagtgggcaaatcaaacttcatggcat

SEQ ID NO: 78759 - DNA, 324 bp, Glycine max
  unsure (1)..(324): unsure at all n locations
acaagctggtgctgtttggagagattcaggaaaaagttggataggaattttcacaagaggaatttcttacagcttggtcaactcaagtgcgtnctgcaacaactctgttggctgatgggtgtccatatttgtatgcaatggcgcatgatagttcagcgtctacaataccaggtgattttgtcattggcgtcaagttgacaaccataaacaatatgtgtgcatatgggctcaatcctggtatttcaggttctcgtcttttgggcaccattcctcagtccatttcacagcaaactgcttggaatcaaatggcaacagtgagaacac

SEQ ID NO: 78760 - DNA, 156 bp, Glycine max
  unsure (1)..(156): unsure at all n locations
cactctagaagagctctcncattccccccgtccttaagctcggattccgcctcaagctcaaacgtattaaattcttttggctttccttctgggccccttgcccgagttaattattcctccctttctcaaaaccaaaaaaatgttcctcgggaagtt

SEQ ID NO: 78761 - DNA, 251 bp, Glycine max
  unsure (1)..(251): unsure at all n locations
agacaacacccgacggagctaagctctcgtctcgacccgagcttccangctctcttttctcaccccccacaccccccccgggcagtcatcctcaacccctagcgcagccccccccaccctacactccacccaatcatgatccttgccaaccccaccacccgcaaaacccaaccgacctgccaccacacggactctaagtgaaccaacctgaaccacggatcacactgaaacaaaatcctccaattattgac

SEQ ID NO: 78762 - DNA, 382 bp, Glycine max
gtcacaacttcattatgttttttgtaataatctggaaatgcaagaagcttatcttgtcaatctcgtaaatgtgttacgagaattgtatttgcacagtccagaggaagctcgccaattgagaaggaaagctctctctcgtattgaatggctgcaaaaagctgatgtgcctaccatagcacagattgaagagttccattcgatgcagaggatgatgaatgctcctgattcaaatgataatattgatttactgttgagcattgatttgttgggtttacaaggagcaggtaaagcttttccaaacaaaattgtttttgatgataagcttgtgttggctaacacacaagaattctttgatggaaattttccagtggattcttggtta

SEQ ID NO: 78763 - DNA, 351 bp, Glycine max
caaaattgtttttgattataagcttgtgttggctaacacacaagaattctttgatggaaattttccagtggattcttggttaccaatttttgtgaattgtctttatcctgtaagtcaattaccttcagaagctgtcgttgtaaatgttacatgtggtagtggacgtgtggtttacccaccactgcttggattagttctgcagttaacaatcgctcctcagatatcaacaaaaagattcgcacagcacttgggaaaggtaagaaaattgtttttcttactagagttgatccttttccagtagctttactggctgttctttttggcgttaagaatgaaattctgagttctaac

SEQ ID NO: 78764 - DNA, 431 bp, Glycine max
  unsure (1)..(431): unsure at all n locations
acgtaagctcgggtttcctctcaagctcccacccgttctcttctcacncccanaccacangcgaaaggaaaggccttccatagcgagcaaagcccccccnncnccaanaccgcnaccgcaatcgcccactgcaacgccggaaagggactgcgcaagagccaccgacaagccccaccccaggaccaacccaacaccctgcgatccaagaggctaccagcccatcccaatccgatgagacaacaacaccagagaattcaacacccactcacgcagctccaaacgcagaaacaccccccaaaactaccccagcgggcaggccaggggcagatccaccaaagaccactaccaaaagcaccgcaacaagcactcaaagaaccaacaaaagcaccgctctgaaccaatacgaccacacacctcccataaccgacaac

SEQ ID NO: 78765 - DNA, 428 bp, Glycine max
  unsure (1)..(428): unsure at all n locations
cttgacncccatccacccgtacgtaagctcggaattcgctcgagggcttttccccacaatcttttcattttggagagattcaggaagaaagtgtttttaaattttcacaagaggaatttcttaaacctaggtcaactcaagtgcgtcctgcaacaactctgttggctgataggtgtccatatttgtatgcaatggtgcatgatagttcagtgtctacaataccaggtgattttgtcattggtgtcaagttgacaaccataaacaatatgtgtgcatatgggctcaatcctggtatttcaagttctcgtcctttgagcaccattcctcagtccatttcacagcaaactgtttggaatcaaatggctacagtgagaacaccattgaattttgattctagcaagcagagcttttgtcaattttctattgac

SEQ ID NO: 78766 - DNA, 391 bp, Glycine max
ggaaatttggctgattataccatcaattttgaggcttttgccgagaagctggtgcagtttggagagattcaagaaaaagttgtattgaaattttcacaagaggaatttcttacagcttggtcaactcaggtgcgtcctgcaacaactctgttggctgatgggtgtccatatttgtatgcaatggtgcatgatagttcagtgtctacaataccaggtgattttgtcattggtgtcaagttgacaaccataaacaatatgtgtgcatatgggctcaatcctggtatttcaggttctcgtcttttgagcaccattcctcagtccatttcacagcaaactgtttggaatcaaatggcaacagtgagaacaccattgaattttgattctagcaagc

SEQ ID NO: 78767 - DNA, 383 bp, Glycine max
gacgccatagcacgcgtacgtagctcggaattcgctcgaggtcagacagcgaccttttctggatgaatgtcttccacgggagacattgccatccgggaagactgaagacggggatgactccaatcggagtagcagaactgtgaagcgatggttggggtcgggatggggaacttggccacgggagcatatgcgcgggaggaagctgagccggcgagtactcgcgcgtggcggcgggatgagatgggaagagaggggacacgtgcgagtgtggaccggaagagtgagaggtggggaatgagtgtacaaaaggggaactttgttgatgcttgagtctttgatcgcgcgattgcgatgtcgccgcgagtgccgttaccggacaaccg

SEQ ID NO: 78768 - DNA, 227 bp, Glycine max
tttgattaccaagcattttttgaccaagatggcagaaatgatagacaggcttggtggtggggatgaaaaatggatccgtgaaaggcccccccggctggtggctggtggttcaaggatggcaattgtaagaaagagttggagagttgatggggaatcctctggatttcgctcacagtattgcatacatttaatgagagctataaatacttgaaaaacgccagtaactc

SEQ ID NO: 78769 - DNA, 396 bp, Glycine max
atctcttcttctttctctcttgtctctctgtctctattacatgtgtcgctctatctatctgctcatttattaactctgatgggtgggtggtgggaaattctgatcaatttggataaagttcggtactttttttggagggtctatgtttgtttttcctagtgttggacttgagaaaactttaacctttgtagatgtactgtttatttttgttggcttggtttggtttgctgaattttaatataccccttttaaaaagtttgcctttttttttaattctttttaaatgtatataggtttattttttttgtatatgaagggatagattgcatactgaagagtttgtgaatccatggtgcagacctaacatgaagttgtgatcgtgttcggtgtgaaaaa

SEQ ID NO: 78770 - DNA, 91 bp, Glycine max
aagctagttaaggcaacaaattttgttcttctatttaaaactctaattcttattttattttttatccaaatatttgagactttatgatgaa

SEQ ID NO: 78771 - DNA, 379 bp, Glycine max
cgccaattgagaagagttagctctctctcgtattgaatgggtgcggaaagctgatgtgcctaccatagcacagattgaagagttccattcgatgcagagagatgatgaatgctcctgattcaaatgataatattgatttactgttgagcattgatttgttgggtttacaaggagcaggtaaagcttttccaaacaaaattgtttttgatgataagcttgtgttggctaacacacaagaattctttgatagaaattttccggtagactcttggttaccaatttttgagaattgtctttatcctgtaagtcaattaccttcagaagctgtcgttgtaaatgttacatgtggtaatggaccttgtggtttacccaccactgc

SEQ ID NO: 78772 - DNA, 404 bp, Glycine max
  unsure (1)..(404): unsure at all n locations
atcctcaaaaatttgtttttttgtgtgtgtatggtgagatggcagaatagtgttcatgaatatgtcaagccttactttagtggttctaaattgaaaagctttctagctagtcataacatcaccattactgatggtattgacaaaactagtgcaactttgcaatttagaaagttagcagattgtgattttctcaagagaaaacttaagcagatgtctaatgtttagtgggtggctcctgatgacaaggcgagtttatggtcacaacttcattatgtttcgtgtaataatctggaaatgcaagaagcttatcttgtcaatctcgtaaatgtgttacgagaattgtatntgcacagtccagaggaagctcgccaattgagaaagatagctctctctcgtatagaatg

SEQ ID NO: 78773 - DNA, 404 bp, Glycine max
tggaaatgcaagaagcttttcttgtcaatctcgtaaatgtgtgacgagaattgtttttccacagtccagaggaagctcgccaattgagaaggaaagctctctctcgtattgaatggctgcataaagctgatgtgcctaccatagcacagattgaagagttccattcgatgcagaggatgatgaatgctcctgattcaaatgataatattgatttactgttgagcattgatttgttgggtttacaaggagcaggtaaagcttttccaaacaaaattgtttttgatgataagcttgtgttggctaacacacaagaattctttgatggaaattttccagtggattcttggttaccaatttttgagaattgtctttatcctgtaagtcaattaccttcagaagctgtc

SEQ ID NO: 78774 - DNA, 434 bp, Glycine max
gcttgacgtccatgccccgtcgtagctcgattcgctcgagatcaatgcccggtttttagaagaaatttccgaaagtaggtgcatctaaagaacaggacggttgctttgtctggggctttctttcttggaaagattgtcttgcttttatttggtttatgaattcatttgcattatggcattgatcagatgaaaccaacttcccccctcccatgttttctctagaaactggtgggcataatatatattagtgtctctgataatattgactatgtcccctgaaatttaaaattaagccatctgttacgtcttgtaaacatctgagatctgaaatcttatattcaataagcaggatgtctggcaaggtactcagcttctcgccattgatgttgctgctgccatgggtttacttagaagggcattgataggggatgaat

SEQ ID NO: 78775 - DNA, 412 bp, Glycine max
cgagaattgtatttgctcagtccagaggaagctcgccaattgagaagagaaagctctctctcgtattgaatggctgcaaaaagctgatgtgcctaccatagcacagattgaagagttccattcgatgcagaggatgatgaatgctcctgattcaaatgataatattgatttactgttgagcattgatttgttgggtttacaaggagcaggtaaagcttttccaaacaaaattgtttttgatgataagcttgagttggctaacacacaagaattctttgatggaaattttccagtggattcttggttaccaatttttgagaattgtctttatcctgtaagtcaattaccttcagaagctgtcgttgtaaatgttacatgtgggagagggacgccggaggttacccaccactgc

SEQ ID NO: 78776 - DNA, 255 bp, Glycine max
tgataatattgatttactgttgagcattgatttgttgggtttagaaggagcaggtaaagcttttccaaacaaaattgtttttgatgataagcttgtgttggctaacacacaagaattctttgatggaaattttccagtggattcttggttaccaatttttgtgaattgtctttatcctgtaagtcaattaccttcagaagctgtcgttgtaaatgttacatgtggtagggggacgtagtggtttcccaccactgc

SEQ ID NO: 78777 - DNA, 318 bp, Glycine max
  unsure (1)..(318): unsure at all n locations
attaagccaaatactaggtcgatcctcgtcatagttcagccgtcgagttcccgccatcgacgagctcacagcagaattcatccctggtcatttcctatnctctctaattttagagaaaataattaaattcttttcataattagttttgaagttagagatcaaattgagtagctctctcaagaacttagctactactaacgttggagcaatttattagttattagtattaaagtggagtgatcttaatttgcgtgattgtacaaatttcatcttgtattcgttttttcgaaattgtatctcgaaattttgaaagcattg

SEQ ID NO: 78778 - DNA, 398 bp, Glycine max
  unsure (1)..(398): unsure at all n locations
tgtcaatctcgtaaatgtgtttcgagaattgtatttgcacagagcagaggaagctcgccaattgagaaggaaagctctctctcgtattgaatggctgcaaaaagctgatgtgcctaccatagcacagattgaagagttccattcgatgcagaggatgatgaatgctcctgattcaaatgataatattgatttactgttgagcattgatttgttgggtttacaaggagcaggtaaagcctttccaaacaaaattgtttttgatgataagcttgtgttggctaacacacaagaattctttgatggaaattttccagtggattcttggttaccaatttttgtgaattgtctttatcctgtaagtcaattaccttcaaaagctgtcngtggaaatgttacat

SEQ ID NO: 78779 - DNA, 224 bp, Glycine max
  unsure (1)..(224): unsure at all n locations
cgtaagctcggaattctgcccgagaaaaaaaaaatttacataaacacaaaaaaaaaaaccaaaaaaagaaaaaaattaaaaaaaagaaaccgcccccccccannccnacaacaaaaacaaaaaaaaaccaacaaaacacagataaaacaaatacaaaaacgaacacaccaaaaacaccaaaaagaaccaacaacaaaaaatgcacgcagaaccaccccatatca

SEQ ID NO: 78780 - DNA, 264 bp, Glycine max
  unsure (1)..(264): unsure at all n locations
agcacacccacgcgtacctaagctcggaattcagctcgagacaaaaaaccatatttttttcaacccaaaaaaaaacaaaaggaaagttaattttctattgttggtgcggcccactcctaaaaagnnccacctgggatcttgtatatttctcaatctaaaattgcacttcccaattacacacccttgaggaaccttctctcccctcctgttccatttggcaattcttttgacataatgcaatttttataacccatcccatatttc

SEQ ID NO: 78781 - DNA, 409 bp, Glycine max
ggcaaatcaaacttcattgttttagagtttccttattgacaatggcaagcagtctacagtttttgatattctcttgggaatctctcaagattttgaaattgctggtaatactcttatgccagctttttctgttccacaggctactgccagatcttctgaaaatgcggaatcctctgcatgatctggaatttgagttttctttcgcttgttcgtttgtttaattcaataaaggaaattaggcatgaccctcttgttgagtatgctctgcctatttgaaaatttccacacctcttttaattgtcgtaatgatgtgtgaagtgtgtgtttttttaaaaaaaatatttaaattataattaattaattataattttttatttatttattttttaatttattattttttattttt

SEQ ID NO: 78782 - DNA, 150 bp, Glycine max
atctgaaaaatttctcaatctaaaatgcacttcccaaaacacagttggaggaaccattctgcgtagtgatctattggcaaattttttgacagagggcaattttagagcaagtgttgatttgcagcgcactcatcgtattagaggaatgat

SEQ ID NO: 78783 - DNA, 309 bp, Glycine max
agcttgggtcccttcttcggcggcggctccgtcctcggcgtcggcacaaataaggtcaaggtacccgctctccactgcgattctagggttcagaccatctccgctgacgtcaccacgctcccccaccagcgtctaaaagctctttctcccaaggagaaagggttctccgagattctctcggatatgtgtcccctggtttctggaatcaccaccaaagacgctgctttgtcgtttgagcttgggatgcgtgccttggatttggctcttggcagcagaattcacctggagccaagtgattgtgtaggagtc

SEQ ID NO: 78784 - DNA, 368 bp, Glycine max
ttttttttttttttttttattttttttgtttggtttttttttttggttttttttttttttttttttttttttaattttttttttttttttttttatttttaatttttttaatttttttttttggagaaaaaaaaaaaaaggccccaaaaaaaaataaaggggccccccccccaaaaaaatttaggaggaaacccccccaaaaaaaaaaaaatggggagatatttaaaaacttcctttttttttttcccccaaaaaaattaaaaatgcgaaaaggggtacccccaaattcaaaaaaaaatttaaaatcttggaaaaaaaaaaaaaccccccaaaaaaaaaaaaattctcccccaaggtgtgttcccccc

SEQ ID NO: 78785 - DNA, 278 bp, Glycine max
agacgggggcggtaatgcattggttgccaggctagctccatctttcgcatcttgagtgtcagccttgcgcgtctgtgatgcaagcgctagctgttcgctacgccaaccatggccaggtgatcttgcaagcgcggccggcagccgtttgggctcggacaaatgccttacctagatcgtcccgagcgccctctcttgtttccagcgccttcgtacgttgtggtacttgtttccgtgcgactcgaacttgggtggcttgcccttgaacgcatactttttgt

SEQ ID NO: 78786 - DNA, 74 bp, Glycine max
tattatttttatatttttttccatctgtccaaattttttacaatttatataatttataaatcatttcgatttat

SEQ ID NO: 78787 - DNA, 124 bp, Glycine max
cgggttggttaaaattatacatatttaatattttatttattaaattaaattactttttttaattttaaaattattatatatttttaaaaatatattatttttcataccccctaatatttaaata

SEQ ID NO: 78788 - DNA, 257 bp, Glycine max
tttaatagtatttgttaaatcgaccaggccaattaggtatcattttacattttttcttcaacagatcgtgtgataaaaaaaaaacccaccttttgtgctatgttatggcctttattttagtgtataaaaaattgcttacttttttacaagttctaatgggccttttttatccgtattttttgggactttttcaattcttaaaaaggtcccttatcataatttttgtggtttttaaactcttaattttttttttttta

SEQ ID NO: 78789 - DNA, 215 bp, Glycine max
  unsure (1)..(215): unsure at all n locations
cggaattanaacccgggtcggcgagctcactagtcctcggccgccctcgcccttttttttttctatttctttttttatttttttttttggttggtctaaaaaaacgcacacttcacacattatttcgacaattaaaaggggtgcggaaattttaaaataggcagagcttactttacaagggggtcatgcctaatttccttttatgaattaaacaa

SEQ ID NO: 78790 - DNA, 84 bp, Glycine max
gcaaattctcgcttcattcggatgattggttaaacttaaaaaatgatcaggctccattggtgtttatttccaaaaaagggcttc

SEQ ID NO: 78791 - DNA, 51 bp, Glycine max
  unsure (1)..(51): unsure at all n locations
gcccgcgagcacactataccacancccccccctcctttttaattttttttt

SEQ ID NO: 78792 - DNA, 190 bp, Glycine max
ttttttttttaaatatattttttttttgtgaattttcaaattttatttttattttattaacacctataaatttttattttttattttttttttttttttatttttttttcgcccccccaaattttttaaataaaaaaaatatatttttaaaaaaaaaaatttttcactaaaaaaagtttttccctttatt

SEQ ID NO: 78793 - DNA, 286 bp, Glycine max
ccgggtcggcgagctcactagtcctcggccgcccccgacctttttttttttttttttttaaagaacaagcccagatggatattctttaacaattaacaggaggtgcttggttattttcagttataggaactcccaacatgagggtggcccctaaacattttacatgaacatgacaggccctttccatggtcttgtacacggaacagagggatcacattgggctcatgacttattacctagccttcagaaggatctagaacataaaaagttgcgctaaaaatgttta

SEQ ID NO: 78794 - DNA, 245 bp, Glycine max
ggctcactagtcggcggccgccctcgctttttttttttttttttagatttcaaggtataaatcttattggggagtttgtatgcaagagaaacattatcgctctgtttctcagaacatgtatataagaaaaatgaagcaacaagtgtgtgagtggtagtagtagatgtaagcaatcaaaattacaatggtatggttcatacataataatgtatttaccaatggagaatttgtttggctctaacttt

SEQ ID NO: 78795 - DNA, 164 bp, Glycine max
aaaataacacacactggacacgtgattacgacgatgaaaagaggcgtggaaattttcaaataggctcagctttctcaacaggcgggttacgcctaatctcctttatggaattaatcaaactgccattctatagaaaacactaattccttatcatgcgtaggatt

SEQ ID NO: 78796 - DNA, 198 bp, Glycine max
gcaaacacacttttttccttcatataaactgagctgaattcgaaggaaaatctttttgtaaaaaaaagtataaaaatttaaactcttgatctaattcatgatatgatcttggataattaactgcatttctctgtgtattggaacaatataactattaacaaaatttgaaatattaatttattaataatattctacatt

SEQ ID NO: 78797 - DNA, 82 bp, Glycine max
ttttatttttttttttgcccacgaagcggtgtattataaggtaaattgaaacattaataaaatcatgacggcactaatcttc

SEQ ID NO: 78798 - DNA, 180 bp, Glycine max
cccggggcggcgagcacactagtccgcggccgccctcttcctattatattttatttttttcctattttattctcccgtgcggcgtttttttatcgggggggacgatcccatcccaaaaccaaggaaatatcgaaatttcccgtataaagggaccgcaccccaatgggggccacaatttac

SEQ ID NO: 78799 - DNA, 292 bp, Glycine max
aaaaagcaaatgccttttcagtctcgggttccaatcaccgcctttcccccgaaccacattagaccaccttaccccctttgtccccaactcacccctagggggggctgaggccctttatccagctttaaacatataaaatggggggaattaggggtcatttaacccccaaaaaccataaattttttttttttaaatagctttagtggggaaaaactgggccttaatttggtgattaagggggccccccgggtaagggaagcaaaaatttttttgctaaccacaaacccccttt

SEQ ID NO: 78800 - DNA, 154 bp, Glycine max
gtaaaaagcaagtaacattaagttggattgggatacacaagataattcacattttctgaagtacattgcaataacatattcttcaccaaacacaaatctaaaaactttcaaaagtccacaagtctaccttttttttcatgctcacttgccgggg

SEQ ID NO: 78801 - DNA, 132 bp, Glycine max
ttttcttttaatttatataggggagtttaaacaattgggggatgtttaatattcagggaaaaccaattttttttgtgttttcaggatattttttaactcttacaaaatttaaaacaatttaatactttttaa

SEQ ID NO: 78802 - DNA, 81 bp, Glycine max
tctaggctaatagtaacaacagagaaagtataaagcgaaggttacattaattctcgttcgtgtccaatgatgcttactttt

SEQ ID NO: 78803 - DNA, 381 bp, Glycine max
tttttaattaatcaatcaacgtgttagtgaagtgatatattattaaccatgtataactttcatgcaataaacctttgttgacagacacttgagatataacacaactacacaagtaggataaattataggataaattacaccatattgatcagtgatcacaaactggtacataaacattattattacatcaaacaaaacaagctgaaaaatgaacatgattatgacttcaaactatcctacgactctagcagataaacacaacttctatttgactgtagatgcatcccatccattgaatgaaaggacgctttattggctcagtctacatcttagaggaagcctgcagcaatacaacgtttcactgttgagacaggaaacgtt

SEQ ID NO: 78804 - DNA, 149 bp, Glycine max
atattaaattattatatattataaaaattaaagggaaacccaaaaggggacaattaaaaatttttctttaaaaaaaaaaaaaacttggaataaaatttaaaaatcccctgttaaaaaaaaaaaagaaatttaaaaaaaaaccttttaaa

SEQ ID NO: 78805 - DNA, 322 bp, Glycine max
gttggggttgttttttatgtgtaaattaaaacacaccctttggtcatagtaaggcgcgttatttaagtgaataaaattcttgatactagttcacaaatgctaaagggcacccattaacctgtattttgagacttttacagtttttaagaagttgggattgtataggtattggggtgttggaactctatatattttttttaaactcttaaaaagaacagcttatttagtttctggaaaaggttcaatttttgtaagaaaaaaaattttgtttatctttttcaagagggtgtgggaattctctttttttatattttttgggggt

SEQ ID NO: 78806 - DNA, 286 bp, Glycine max
tgaaaatcaagaacacatcgatttactggtatttatggaactaaccaatgttttaaaatacatggtggaacaggcaatgatccattagcatgacatactaactatcaatgcaattatgtaaagaaaaaagaagttggtgttaacaaacgcctgaaaccatatttgatatgaaggaggtaatatcagttttgtataggaacattggttcaatcgatgattgacaagatcaaaagctgtggaaggcttgtattacacgggcgaccaattcatgctattgtcttggggc

SEQ ID NO: 78807 - DNA, 276 bp, Glycine max
tttaaaataacacacacaaacaccctcgttgcacctagtaatgcagcgtgtatttaagttgaataaagtgctacatacttgaacacgaaggcaaagcgacactcattaaccagattttagcgactctaacagctatcaagaagacacgtcagcattcgtgcagtggcgttcgaactcacagattaattgtcaacggccagaggaacagccagtgcagccactggagaaggaccagctctagtaagaaatacagtgatcttaccttgactatgagct

SEQ ID NO: 78808 - DNA, 278 bp, Glycine max
tttctgctagatatctaaaatggggggggttctattttatttttttctttcccatttttatattttttctcttttccaaaaaaacccccccctttacactcttttaccccattaaaatagggctttgaatattttaaaaatgtccattcatacccaacaagggggtcccccccatatttccttttgtaataaaacaacccccccccccaatataaaccccatattcactttcttcctcgatatccttttttctaaaaaaattccatctcttccctttt

SEQ ID NO: 78809 - DNA, 289 bp, Glycine max
acattttaaattttttttctcatatttactaataattattttcatccttctgggcagacatcttgaaaaacaaaataaaaattaaaaatagaaaataaaatgaaaaacggttttcttcaatcaaccatgtccatttctcttctatttttcatcatctacttctactatttttttctcccgtgtttctctaatgtaattagagatacttgttcttatacgtaacattgaattctaggatcttatgtgatttttaatcaacaaatttataggatgttatctaccttcctat

SEQ ID NO: 78810 - DNA, 175 bp, Glycine max
  unsure (1)..(175): unsure at all n locations
atttttaaacnnaangcatattaacgacagtggtgtcatactattatttgtttaaacacaaacaaacaaaaggtttagattttaaacatccctccccttatttataacttattttccagtttcatgattttaatcaccaatttatatgaaattatcatttatcaacacttatatc

SEQ ID NO: 78811 - DNA, 225 bp, Glycine max
aataccaatacgggctgatgagttaaaatttttatttctctaggataatatacaatcaaacataacccaagttgcggggtttcaaaccaaccaaaccacagactaatatcactcgtattagcaaccagatacacccacaatttctcacttttgtttttctcactcataaatagatcacaagattgggaaaaaggaaaaatagatagatagagatagagagagaga

SEQ ID NO: 78812 - DNA, 179 bp, Glycine max
aattaattcccagatcaacaagctcactagtccacaaccacccttttttttttttttttttttttttttttttttttttaagattaaaatttttttttttattatttaaatttttttttttatatttatattattattttttttttttatttattatataaaataatataaattaataa

SEQ ID NO: 78813 - DNA, 352 bp, Glycine max
cccttttcttttttttttttttttttttatacttttctctcttttaaagattagatttttttttttttttttcttcccttctccttttttttttttttattttttttttttctatttttctttattttattatctttctttcattttaattttatcactttttttataaacacaaaccaaaaattccctcaaaccacccccctcaaccattaaaataccttaatctttccccccacaaaacaaaatatttccccattattaaaaaaaccccacacaatataaaacccctaaaaccaccaattattttcctcttcaaaaaaccccctctttcacattttattaaaaataaaaa

SEQ ID NO: 78814 - DNA, 146 bp, Glycine max
  unsure (1)..(146): unsure at all n locations
ttttnttttttggattngngcacaagaagggatagtcacttttcgaggattacataaattaccactacctccgagctctgctgcacttccttgttcacaatcccaacaagtttctcgcccggcgcgagttttccattaccaacccc

SEQ ID NO: 78815 - DNA, 274 bp, Glycine max
ctctcactcctttaaaattaagaatattttttttttatattttctactttcctttctttatttataaaacaataattataaattccctataatcataaaacaaacaaacaatccaaataaacacaaatctaaaatcaacaaaaacccaccattccctccccacaaccacaaaacttccaccacaacccttaaaaactcataaaaaatatttttctaactaaaccccaaaacaattaataaaaactctccaaaacaatattatacatacccccta

SEQ ID NO: 78816 - DNA, 341 bp, Glycine max
  unsure (1)..(341): unsure at all n locations
ctcactantctcaccaacctttttcttttttttcttttaacttccttcctcaaaagatatgtgtcctatcctctaaactcgaccaatctatcttcatctttataacaaaaaactgaacctcaaataaactttctttataataattataaaccaacctttacgcttcttattttttaatatctaccattttttcagtcttactatttctagctttcaatactatataatttctaaatgctatacttatttttcttgatattttatagagcaaactcccctatcatatttcttacaccttatatctgtttcaacagctttttcatgagaataatttacattta

SEQ ID NO: 78817 - DNA, 362 bp, Glycine max
ttttgattttgaactgtttgaatatgatggggacatgtgtctaaattattctgaactacatatcctcagtagtgcacaatgtattcctcaaatttgcagaacaccccagttgcatcaatcacagtgatgctttggctgttagctcctcaaaaattacatggcaaaaaaataataaactccgccccattgctacccaagcataaattcactatacatgagggcaaaaactcattgaaaaggagagagatgacccacggtagaaccttttattcttcattatttggaagagtttgctaccacacggtggtaagatattcaaaggacaaagttctgaattatggcaaagtaactctcacttcttt

SEQ ID NO: 78818 - DNA, 318 bp, Glycine max
catcaatcatgctcgcatccattgactaggtatgtatgtcataaaggcgcattgcgagcgatcaagctgcacacacaaagacaagagaatgggaaagaaacaggttgcgtcaaccctgcgcaacccacatattctgccaaaatcatgtcgcgaaaaggttttgggcaatgcaccatgaacaccgattaccacgagtcgtgaatattgtcaaagtcatgactacgttccagtctcagtctctacaccaggctggattccgtcaagaccaccagtaaccttgtttttaagtttggcgttcccaattgaagcctgattctt

SEQ ID NO: 78819 - DNA, 259 bp, Glycine max
  unsure (1)..(259): unsure at all n locations
ttcctttttttttcaaaaattttaatcttccccactcttattcattaagaaatttttttccattcatttaaccctcccccnccgcctttggatgaaccatatttttcaacaatacatctcaccaccctctaccctaataaatttaatatttgtcaatccaaaatttaaatagtacgtctttctactctttctaataacatctaatcaatgctcaacaaaactgtcttgtttctcttgtccagattctacatattacatt

SEQ ID NO: 78820 - DNA, 142 bp, Glycine max
tttaaaaaaaactttaacccaaagaaatgtgatcacctaattacgacattttcattaaacaaagaaaattcttaataaacttttaactcttaaacctattaaaactccaaatgctccttataaaatcaaacatcttatacaa

SEQ ID NO: 78821 - DNA, 155 bp, Glycine max
tttaaactgaacattttccttaaagatagcttcatatatgtttcttatcctctctcttaactaaaattttaaatcgctccatattaatgaactccttctggtatgactctttataataaaatacctactatttacattttttattcacttttacc

SEQ ID NO: 78822 - DNA, 110 bp, Glycine max
attcactgcctgtgggacttgactggaaaacctcttcccactatgctctcacatcctttccagtgcgtatacaaaggccgaccacgccttcacgtgcccctgatgcaatg

SEQ ID NO: 78823 - DNA, 294 bp, Glycine max
aagaaaaaaaatcccaaaaatttgatttttaattgaggccaaccacattatgtgattcatacattttataaccggccttaataaaaacttttgcaacttctttttttattcaaagacttatttccattcacttaaatgccaaaaaaaaaaaaaaaataaatacccgaatatggttatttttggcctcgagtaactagcttccttttaaaagagtacaataaaatttttgaaccgggaatacttttcacccaaaaacatttttccttcagaacttttacaaattacaattccctt

SEQ ID NO: 78824 - DNA, 413 bp, Glycine max
  unsure (1)..(413): unsure at all n locations
aattaattgcccgggtcagacgaagctcactatntcggcaggcccgccccctttttttttttttgtttttttttttttttaaaacacacaagagactaaggtnttcttacattatatattgaaaccattccatcaatacataatactatattcttggaccgaaaataccaggatacattaaaaattaaaaaccaagaccaaaaggaataataatatcagaaattaaaataatagctggaatctcaatttcacatccatttataggggcttgatctaacatccaaccattttcccacatattctatcatttgtttcccttcatttcttttcagctcaagctctaaccgaattcccaacttacttactcgtgcattcgacttcatagcttttttttagtgtcacctaaaattaat

SEQ ID NO: 78825 - DNA, 163 bp, Glycine max
ttttctacatttttttttatctgaataaagattttttatcaatttatttacacccctccatacaaatctaaaaatttcattttaataccaaatatttcattaattttactatatatattaaaccacatatcaaattcttcctttccaaacttattctttaaca

SEQ ID NO: 78826 - DNA, 308 bp, Glycine max
ggggttgggttttttttttttttttttttttttttttttgtggggaggggcccccccccaatttttgtaaacataaattaaataaaccttgggccgggggttttcaattttttccaatccccccttttttaccaatttattttaaaacccaattaaatgaagcattttttttgaagctaaaatagtttggccaaaattacaggtttggggagcccctaaaaaaccctaaatcctttttttttttggcccataacactggctgggggttaaatgccacaaaagcatcccccttgaaggttccaacccaa

SEQ ID NO: 78827 - DNA, 314 bp, Glycine max
tttttacttattttttttttttagggaggtttttttttaaaataaaacacactttacacattattactacaattaaaaaatgtttgacaatttttaaattagcctatctttcccaacaaaatggccatccctaattttcttttttgttttaaacaaaccaaccatccttaaaaaccacaatttccatatctttcaatttattccattttttcaaaatatcttgcaatatccttttcaacataaaaaacttgccttacaattttccctactttttaaataatttttatattattccctcattaattttaaaaact

SEQ ID NO: 78828 - DNA, 180 bp, Glycine max
aaaataacacacacttcggacagggttacgacaattaaaagaggggctgaaattttcaaataggccaagcattcttaacaggacgggcatgcctaattccctttattgaattaaacaaacgaacatgcgaaagaaaacacaaacatcggtttacaccaacgtttcccttttttcattaga

SEQ ID NO: 78829 - DNA, 196 bp, Glycine max
attaattgtcccgacccacgcgcccaccaacccgcgggcgtcctttgtttttttttgtttttccccccggcaaccaaagagggggggagcgtcctttataattggtgaagaactcctcgctgctagctcaatgtcgatcaaatatctgcgcgtgctctcactcgacaacacagttgcctattgcatctggattcca

SEQ ID NO: 78830 - DNA, 318 bp, Glycine max
atatggaaacggacttatttttcaaaggaaagccccatacccaaatccaaaaattactacacactctttcacaaacacaaattttcacttatgaaccccaaatttaaaactcttaccggtcttattaaaccgcgtgaccataaaaacacccgcgttacaacaacataattcccttctgaacacacaaaccattagccaggaaagcttattaaaaagaagccccccccgtacgaacatcccaacaattacccatcccaaatactgaaatgaacccccccttgatctttccattaaaatcggtaactgtagaacttatcc

SEQ ID NO: 78831 - DNA, 265 bp, Glycine max
attcccgggccgacccacgcgtccggaaattggcaattgctgtgtgtgagatataatattagagtaatagcaccatcaataaataagattattttgcatctctatattctatacaacaaatgagaataaccttacaacctgtgttcaaagtctttctccaaatctcagcttgctttctaatgattttaattccccttttcacctcccattaaaaaaaaaaaataaaattattccctttaaaacctaactaaaaatcttcttttta

SEQ ID NO: 78832 - DNA, 368 bp, Glycine max
ctcatcaaacaaatcccagtgcctcagtctatactcaatccagtcgattctatcaacatcccatcccatccaaagaaagaaaaaaacacccttcttcgagaccagctctcagagaagcgcccattgatccatatccaacttgcctaaaaccttccttctcaccagccttcgcacggaacgacgcatttatggagagaaatccaaagcacccgggttaggcaccttaatattctgtgcgccctgaatcgcacccttaatcggagtcgtctttcccagatcaagaactttatctcccaagccgccgatgacggtcttcgcggctttgatggcacctccgaaacgtccttgtggcaatgcgtctcgggcgt

SEQ ID NO: 78833 - DNA, 230 bp, Glycine max
atatattagatatttttaaaataaagaaaggttaactatcaatcataatttttttactcaatttctcagaagacaaaaggaaaagcccccaaaattaattaaaagcaccccccccccccaaaatttttaagaaaaacccccccaaaaaaaaaaaaaatataagtcatctaaaacataacatttcctccctgtccctaaaaaactataaaaccccaaaaattcccccccaa

SEQ ID NO: 78834 - DNA, 282 bp, Glycine max
tccggattcccgggtcgacccacgcgtccagtaagcggccgccgtagtttttaacatttttttttttggttctagttctgatcatcaagagggtgttaattatgcattattatgagacaagaacagtacagaagagggcctgctgtctattggattaggacatgcaaaactaaaagctggccgatctgtattcaaaccttacattaagtgatcagaggaagccaaagaaaacatattgttttacactggctgtcaaagtgaatagaaacgtcctaagagggt

SEQ ID NO: 78835 - DNA, 270 bp, Glycine max
  unsure (1)..(270): unsure at all n locations
aataatctttgnctaattgaactttcatggtacaacaaattacaaatgcatgaacatcacatggtccatgaattacattgtgaattggtcaaaattccatttgtcagcttcatcagtaaggtttaccctgtttgttaacccttttaagttgtacctttaattttttaccttctaatttgctttcattcatcatacttgttgcatgatgagcatcctttagggtatcaattcttacaatcccaatacattttgctatcaccggtttgcttt

SEQ ID NO: 78836 - DNA, 311 bp, Glycine max
tttttacacaactcattacaaaaggttaagtatcctcttatatttcaaatcaaccttcaacttccctatatttcactactattaatacatttcatcatttaaaaatcctatttccacctatctcttctacacccccttacttttacccaatttcctactttctaccattgataatatatattcttaacatttaatcatttttctattctttccctagaactaattcttttttttaattcttaatatattctttactttatttctttcattctattcctaaatacatatattactccattctcttcctttct

SEQ ID NO: 78837 - DNA, 191 bp, Glycine max
aaaaacgcttttttctaaaggggacaggtttttttaaaaaatctctaattcctacatctttctactcaataacacaatttatttctatttctttattcttcttttttcataaaactaaaaaaaaaaatatttcaatataactagtgttctccccctcacaccccccccttaaaaaaaatcattattaaata

SEQ ID NO: 78838 - DNA, 157 bp, Glycine max
ttaagacttttttaatatcacaatgtattataaacgtaattcttcttcactcatgcagactcaaattatcaatgaaaagcatcattatcaaaccaaatcatgttttgagaatcattcttgtaaagttctttaatcttcctctttttattatacttta

SEQ ID NO: 78839 - DNA, 217 bp, Glycine max
  unsure (1)..(217): unsure at all n locations
attaattcccggtcgacaatctcacagtccgccctcgcgctttttnttttttttttttttnnaaaacaacacacacgtcaaagattacttccactattaaaagaggtgtgttaatcctcaaataggcagagctttctcacacagtgtcatgcttcatttttccttttgttaataaaacactctcactcaactttatttttcatattttccttatttt

SEQ ID NO: 78840 - DNA, 192 bp, Glycine max
  unsure (1)..(192): unsure at all n locations
ccggtccggaattaatggctcgacccacgcgttcactaacgcgcgggcgcccatccacaaactgagtttttgaaaacgattcatatgttagctgaggcggtntttagagggttgcttaagtattcaccttttactaattgtttgaaggtagttctcttcctcggtgaacttgtcgaattccttgaagcatca

SEQ ID NO: 78841 - DNA, 345 bp, Glycine max
aattgaacgtatcccgttttctctaaatcaaatataatatccctataaaatacaattattaatagaattcaacaattaaaaatactaaagctgccgaatgcttttacacaccgagcattccaccaaaatccaatctttaactattgtaaataaaaataaaaaggaaaaaaacaaattacgaaacagcagcaagggaaaagctatataaaaatttaagagatatttactcatgctacatcaagcgagaaagattttaccagtactccagttcctcaattgagtgatacatcaggcggcaaataacatgttttcaatgcaatgtttaattactaaaaatccaagcat

SEQ ID NO: 78842 - DNA, 224 bp, Glycine max
ttcagtatttgacagaatagagatctatggcatttggaactccatattactccatcattcacattatgcatcaactagcaataacaaattctgaaattggcattcccatttaacaatattttaccagcggaattggttttctaatcacatttaaattcaaatccccccttatctttcataaacacaaaaacttctcaaaagtctccgtggatttctacagaacc

SEQ ID NO: 78843 - DNA, 229 bp, Glycine max
  unsure (1)..(229): unsure at all n locations
cgacgagctcactagtcggcagccgcccttcttttttttttttttttttttttttttttctttnnccttttaagcaagagtttgttcttttaacaaaaatataccaaaatctcacaagaaaatatttaattgttgttctgcataaaaaaaaactacccatacatttttcaaaatacatttcctgtatttttggcccttgtataaatatcccaaacaatattcattattc

SEQ ID NO: 78844 - DNA, 165 bp, Glycine max
  unsure (1)..(165): unsure at all n locations
tttttattataacntaaatttttggggtgggattagaattttcaaattcgtcatttattatctcttttctttcttccaatcatattttgtatattcaccttcatttattttttctattatttattttcactattaaattcctaactcatattttccgaattaaaa

SEQ ID NO: 78845 - DNA, 346 bp, Glycine max
gtttttacaatccttcaaaaattttgtttctttgtgtgtgtatggtgatgataacttaattagtgttcatgaatatgtcaagccttactttagtggttctaaattgaaaagctttctagctagtcataacatcaccattactgatggtattgacaaaactagtgcaactttgcaatttagaaagttagcagattgtgattttctcaagagaaactttaagcagatgtctaatgttttgtgggtggctcctgaggacaaggcgagtttatggtcacaacttcattatgtttcgtgtaataatctggaaatgcaagaagcttatcttgtcaatctcgtaaatgtgtta

SEQ ID NO: 78846 - DNA, 63 bp, Glycine max
gcagctgctgtcagactttttcaacggcaaggagcccaacaagtcgatcaaccctgatgaggc

SEQ ID NO: 78847 - DNA, 427 bp, Glycine max
  unsure (1)..(427): unsure at all n locations
catcaattgcgcctcctagactcctcaagcataaacaagactcgcccgaaacataaggcgcacatctgattcgcatcgatcggctntgcgtcacttctccgagctcgcgccctagatacggccggaaatgttcgcttcgtcctcctcgtccctcacccgggccgctacatcgacgatgtatgcgcaagctcaacgtaacttctcatcgtcatcctctgtcctggcttcgcggagaagacagctgatcgagctgctggttgaccacgaacgcttgggcacaaaaggtgtgttcgcgtgtcctacgctgtgctgaatttgaaaaccccgtgctgtgttcaccccacaggtgaccgagttctcgtcgctcctggatacgcacgacatcgtctggtcccacggcgtatcgctcgacatgtgccattctgga

SEQ ID NO: 78848 - DNA, 162 bp, Glycine max
caaagctattttttgtaacaggtaaagctattcgcagaggcgggaccaagctattctgcacaactcttccaattcattgcttccatgactccctctcactacctcgcttgggacgtatggcacttgggagctggcccaagcttgtcaatatcttttagtctg

SEQ ID NO: 78849 - DNA, 334 bp, Glycine max
tcggggaattccaattccacattttcaagaaataaggaggcaaaaatgttcatatatgaattggaattatttgttttcttattaggcctatcctgaagccaaaggaaatgagatcggaattccttggggaattccaatttcacattttcaagaaataaggaggcaaaaatgttcatatatgaattggaattatttgttttcttattaggcctatcctgaagccaaaggaaatgagatcggaattcctcggtgaattttcaatttcacaattttaaaaaaattaaggaggcaaaaaatgttcatatatgacattggaattatttgttttcttatt

SEQ ID NO: 78850 - DNA, 416 bp, Glycine max
gttaattgtggagtattttggaaggatgtcttacgttgctcataacgttaatcagccccaagagaaagatttgttggagggaaatttttcctttgatattaaatctcgctctagattgggaaaagtttcctctacaaaagcacaatttgttagtggaaaaaccttcaaatatgatataattggtgctggttcacattcttcagaagattttcctgaaaaggaagatcaagaaaaacccaaaaagattgatgccagattgagacaaagaatagatccttaatacaatgaggttcaggctcagatggaaacaaatttgtttaaattgtctcttgatgatgttgaaacttctaaaggttccatgttggatctgaaaatttttcaatctaaaattgcactttccagaacacagttggagg

SEQ ID NO: 78851 - DNA, 316 bp, Glycine max
atttgtaatagcatttttaatgagatgctcattagatatagctatgaaaaattactgcgccaggctaaagctccaagtatgtttttacaatccttcaaaaattttgtttctttgtgtgtgtatggtgatgataacttaattagtgttcatgaatatgtcaagccttactttagtggttctaaattgaaaagctttctagctggtcataatatcaccattactgatggtattgacaaaactagtgcaactttgcaatttaaaaaggtagcagattgtgattttcttaaaagaaacttttagcagatgtcttatgttt

SEQ ID NO: 78852 - DNA, 410 bp, Glycine max
gttcagtgtctacaataccaggtgattttgtcattggtgtcaagttgacaaccataaacaatatgtgtgcatatgggctcaatcctggtatttcaggttctcgtcttttgggcaccattcctcagtccatttcacagcaaactgtttggaatcaaatggcaacagtgagaacaccattgaattttgattctagcaagcagagcttttgtcagttttctattgaccttctcggtggaggaatcttagtggacaaaactggagattggatcacacttatacaaaattctccaattagtaacttgttgagagttgctgcttgaaagaaagggctgtttaatggtcaagaatgtgatgtctgggaatgcagcaagcaaaaggagtgattgggccttattggttcaagggtttta

SEQ ID NO: 78853 - DNA, 285 bp, Glycine max
aaaaaaaaaaaaaaaaaaaaaaaaaaaaaaaaaaaaagaagagaaaaaaaaaaaaaaaaaaaaaaaaaaaaaaaaaaaaaaaaaaaaaaaaaaaaaaaacaaaaaaaaaaaaaaaaaaaaaaaaaaaaaaaaaaaaaaaaaaaaaaaaaaaaaaaaaaaaaaaaaaaaaaaaaaaaaaaaaaaaaaaaaaaaaaaaaaaaaaagaaaaaaaaaaaaaaaaaaaaaaaaaaaaaaaaaaaaaaaaaaaaaaaaaaaaaaaaaaaaaaaaaaaaaaaaaaaaaaaaa

SEQ ID NO: 78854 - DNA, 413 bp, Glycine max
gaaagatgtttggagagttgaatgtggaatcccttctggatttccgctcacagttatttgcaatagcatttttaatgagatgctcattagatatagctatgaaaaattactgcgccaggctaaagctccaagtatgtttttacaatccttcaaaaattttgtttctttgggggtgtatggtgatgataacttaattagtgttcatgaatatgtcaagccttactttagtggttctaaattgaaaagctttctagctagtcataacatcaccattactgatggtattgacaaaactagtgcaactttgcaatttagaaagttagcagattgtgattttctcaagagaaactttaagcagatgtctaatgttttgtggtggctcctgaggacaaggcgagtttatggtcacaact

SEQ ID NO: 78855 - DNA, 426 bp, Glycine max
cacaagctggtgcagtttggagagattcaggaaaaagttgtattgaaattttcacaagaggaatttcttacagcttggtcaactcaggtgcgtcctgcaacaactctgttggctgatgggtgtccatatttgtatgcaatggtgcatgatagttcagtgtctacaataccaggtgattttgtcattggtgtcaagttgacaaccataaacaatatgtgtgcatatgggctcaatcctggtatttcaggttctcgtcttttgggcaccattcctcagtccattttacagcatactgtttggaatcaaatggcaacagtgagaacaccattgaattttgattctagcaagcagagcttttgtcaggtttctattgaccttttcggtggaggaatcttattggacaaaactggtgattggatcacactt

SEQ ID NO: 78856 - DNA, 393 bp, Glycine max
gaatcttagtggacaaaactggagattggatcacacttatacaaaattctccaattagtaacttgttgagagttgctgcttggaagaaaggctgtttaatggtcaagattgtgatgtctgggaatgcagcagtcaaaaggagtgattgggcctcattggtacaagtgtttttaacaaacagcaacagtacagagcattttgatgcatgtaagtggacaaaatcagaaccacattcctgggaattgatcttcccaatagaggtatgtggtcctaataatggttttgaaatgtggagttctgagtgggcaaataaaacttcatggcatttgagtttccttatttgacaatcccaaacagtctacagtttttgatattctcttgggaatctctcaa

SEQ ID NO: 78857 - DNA, 411 bp, Glycine max
gagcattttgatgcatgtaagtggacaaaatcagaaccacattcctgggaattgatcttcccaatagaggtatgtggtcctaataatggttttgaaatgtggagttctgagtgggcaaatcaaacttcatggcatttgagtttccttattgacaatcccaaacagtctacagtttttgatattctcttgggaatctctcaagattttgaaattgctggtaatactcttatgccagctttttctgttccacaggctactgccagatcttctgaaaatgcggaatcctctgcatgatctggaatttgtgttttctttcgcttgttccgttgtttaatttcaataaaggaaattaggcatgacccttttgttgagtatgctctgcctatttgaaaatttcacaccttttttatt

SEQ ID NO: 78858 - DNA, 317 bp, Glycine max
attggtgtcaagttgacaaccataaacaatatgtgtgcatatgggctcaatcctggtatttcaggttctcgtcttttgggcaccattcctcagtccatttcacagcaaactgtttggaatcaaatggcaacagtgagaacaccattgaattttgattctagcaagcagagcttttgtcagttttctattgaccttctcggtggaggaatcttagtggacaaaactggggattggatcacacttatacaaaattctccaattagtaactttgttgagagttgctgcttggaagaaaggctgtttaatggtcaagattg

SEQ ID NO: 78859 - DNA, 409 bp, Glycine max
cgcccgatacgtaaatcctggaaacttcgcaatcggtcttgctataggcacggaaagacctacgcaaacaccaaaacaacagttacccacacgatgaatcggtcactctcagtccgctcgaagaagggcagtggtagcggcagtggggaaaagtccgcgcccaagcaccgtttcacgatggcttccctaagaggtacgcagtagccggagctttcgaagaaactgttcatgatcatcaaatttggaaaccatgcgattggcgcctacgaggctgcggctcgagaacgggttggcattgcttatcagctttcggaacggggtgaggtctcataggacgagacgatctctgtgatcttcagataagcttggagttgctgctcgttgagattgccgagcaagatgatattta

SEQ ID NO: 78860 - DNA, 136 bp, Glycine max
gggacaatctcatttacaaacttggcagcaacatatgcggcgtggaatagactggcacggccaatggataactgagaaaagataatcaaaattcattgacgcgatgatgctaaccgtgcaaaactgagtacaaatc

SEQ ID NO: 78861 - DNA, 402 bp, Glycine max
atgataacttaattagtgttcatgaatatgtcaagccttactttagtggttctaaattgaaaagctttctagctagtcataacatcaccattactgatggtattgacaaaactagtgcaactttgcaatttagaaagttagcagattgtgattttctcaagagaaactttaagcagatgtctaatgttttgtgggtggctcctgaggacaaggcgagtttatggtcacaacttcattatgtttcgtgtaataatctggaaatgcaagaagcttatcttgtcaatctcgtaaatgtgttacgagaattgtatttgcacagtccagaggaagctcgccaattgagaaggaaagctctctctcgtattgaatggctgcaaaaagctgatgtgcctaccatagcac

SEQ ID NO: 78862 - DNA, 419 bp, Glycine max
cttattttctgatcattcttctgctctacgaaaattcagttcctctttcacctgcgttaattattaataattttattttagcaaattatagctatatctgtagtttcctaattcctttgaagtttacttaatccttgttgaaatatgaattgatgagtaacaattgttatacacgaccctttgaattttgtgaatagattgccaacttgagctgtgcaaggaaagacctgggatggtattggaagaatgtgatgaaggagcaacctatgccacaagcaattaaagaccttgttgaggattcacaagcatcagctgcagggaagaaggatcgttttatcagggacttcgatgtaaagcctaatgtcatattatatcacacccatgttgtgcccatgaagcagaagcataagcataagcag

SEQ ID NO: 78863 - DNA, 408 bp, Glycine max
agcagattgtgattttctcaagagaaactttaagcagatgtctaatgttttgtgggtggctcctgaggacaaggcgagtttatggtcacaacttcattatgtttcgtgtaataatctggaaatgcaagaagcttatcttgtcaatctcgtaaatgtgttacgagaattgtatttgcacagtccagaggaagctcgccaattgagaaggaaagctctctctcgtattgaatggctgcaaaaagctgatgtgcctaccatagcacagattgaagagttccattcgatgcagaggatgatgaatgctcctgattcaaatgataatattgatttactggtgagcattgatttgttgggtttacaaggagcaggtaaagcttttcaaacaaaattgtttttgatgataagctt

SEQ ID NO: 78864 - DNA, 300 bp, Glycine max
  unsure (1)..(300): unsure at all n locations
gccagtttctataaatgaaatcgagtggactaagatccaaaggagggttgtgagcacgattcggttagcccttgctcctgatataaaacatgcattgaaagagacaacactgaaggccttgtgggagaagctcaagaatatcgatacgtcaaagtcgctaaccaattgcctttgtttgaagatggagttgtatcaactcaaaatggagatggaaggagatctgcatgaccacatcaacaaaagatgacgctgactctcaatcgcgtncaccaacgagatatgaaataacattcaatgtta

SEQ ID NO: 78865 - DNA, 352 bp, Glycine max
tatgtttcgtgtaataatctggaaatgcaagaagcttatcttggcaatctcgtaaatgtgttacgagaattgtatttgcacagtccagaggaagctcgccaattgagaaggaaagctctctctcgtattgaatggctgcaaaaagctgatgtgcctaccatagcacagattgaagagttccattcgatgcagaggatgatgaatgctcctgattcaaatgataatattgatttactgttgagcattgatttgttgggtttacaaggagcaggtaaagcttttccaaacaaaattgtttatgatgaatatgtttgtgttggctaacacacaagaattcttttgatgggaaatt

SEQ ID NO: 78866 - DNA, 421 bp, Glycine max
caggctcgtcgccatccaagcccatccccatcagcatctcacgggagacatggcctcgcccactggctccctctacagcaactgctccatggagtccaactctcgccgcggctcttcgtgtgcctatccttcctggcccactggtccttcactggaataccgcaacccatcatcgtatatcagcgacgaggacctcttcggcgaagatttcgaggacgagtactgccccattctcaagaaggcaccagcgccaccacgagttcctcccatggcgcaggccttaccagagctgcctcctctctacgctcaaaagaagccaaagacccagcgcaggcgcaagcaacggaagcagcgccgcacttttgcagcccatgactcccatcaatgagtcgcctgagcagcaagagtaagcaacatcagc

SEQ ID NO: 78867 - DNA, 251 bp, Glycine max
accaaatgtgcatgatgagaaattgattagatatgctatgacagacatctgaagccgtatcttctgatttacacatttctatgttcaacctgaggtagctatttggttaagtaacttaaatgattcattatgagcttcggctgacatatgctgtgtacaaaattgaaagcaagcaagtatgggcttgcaaacgtacaaggctactaacatataaggtagtgattaatcgatctctggcaacttttgttgca

SEQ ID NO: 78868 - DNA, 257 bp, Glycine max
  unsure (1)..(257): unsure at all n locations
taccaagcaagttatgagcaagatggcagaaatgatgggcagtctttgaggtggtgatgaaaaattgatgcctgaaaagacgcacctgctgttggcttgttgttcaaggatggcaatntgtaagaaagatgtttggagagttgaatgtggaatcccttctggatttccgctcacagttatttgcaatagcattttttaattgagatgctcattagaatatagcttataaaaaaattacttgcgcccagggctaaaag

SEQ ID NO: 78869 - DNA, 161 bp, Glycine max
agagctatgacgtgcgcgcgcacgcatacgtaagcattgtattcggctccagatactataatatgaaatctatgtggactaaatattcaaagggggggggtaaatcactatggggtgagtcctattttctttatataaaacattcatttgaaagagacaac

SEQ ID NO: 78870 - DNA, 386 bp, Glycine max
gttcccaggacctattgtgttttaaatccacaaaatccttttgtgttaaataggtggatgggaaaattgactttcccccagggcacttcccgaagtgttaagagaatgcctctttctatagggggaggagctggtgcaaagaatgctattctcatgaatatgccaaatgctgttctttcaatgtggagatattttgttggagatcttgtctttgaagtttctaagatgacttctccctacattaaatgtacagtctctttctttatagcattttgaaatttggctgatgataccatctaatttgaggcttttccccacaagctggtgcagctttgagagattcaggaaaaaagttgttttgaaattttcacaagaggaattttctt

SEQ ID NO: 78871 - DNA, 289 bp, Glycine max
gcctaccatagcacagattgaagagttccattcaatgcagaggatgatgaatgctcctgattcaaatgataatattgatttactgttgagcattgatttgttgggtttacaaggagcaggtaaagcttttccaaacaaaattgtttttgatgataagcttgtgttggctaacacacaagaattctttgatggaaattttccagtggattcttggttaccaatttttgtgaattgtctttatcctgtaagtcaattaccttcagaagctgtcgttgtaaatgttacatgt

SEQ ID NO: 78872 - DNA, 217 bp, Glycine max
  unsure (1)..(217): unsure at all n locations
tgcacgcgtagcgtaagctcggaaattcggcttcgagggttccttcttcttcttccaataatgtcttctacattctctgtgcgggggctatgctccacttgctgcatcatcatcatcatgcctccccaccagctctctgtcgaagacatggctctgcgccgccgccaccccaacggtggcttcgtcaaccaccacctncttcttggaggtggaggct

SEQ ID NO: 78873 - DNA, 292 bp, Glycine max
tgaagttaaaagccttagccttccctacaactccaaacacaaagacatcatcatccatggctgcctccgtctccactgtcggagctgtcaacagagctcttttgaacctgaatggttctggagctggagcttcagctcccagttcagccttctttgggaccagcttgaagaaggttattgcctcaagggtccccaacagcaaggtttccggtggaagcttcaagattgttgctgtagaaaagaagaaagagattggagagacccagcagaacgacaaggacaagatggaagg

SEQ ID NO: 78874 - DNA, 391 bp, Glycine max
gcagtcaaaaggagtgattgggcctcattggtacaagtgtttttaacaaacagcaacagtacagagcattttgatgcatgtaagtggacaaaatcagaaccacattcctgggaattgatcttcccaatagaggtatgtggtcctaataatggttttgaaatgtggagttctgagtgggcaaatcaaacttcatggcatttgagtttccttattgacaatcccaaacagtctacagtttttgatattctcttgggaatctctcaagattttgaaattgctggtaatactcttatgccagctttttctgttccacaggctactgccagatcttctgaaaatgcggaatcctctgcatgatctggaatttgtgttttctttcgcttgttcgttt

SEQ ID NO: 78875 - DNA, 385 bp, Glycine max
ctccaattagtaacttgttgagagttgctgcttggaagaaaggctgtttaatggtcaagattgtgatgtctgggaatgcagcagtcaaaaggagtgattgggcctcattggtacaagtgtttttaacaaacagcaacagtacagagcattttgatgcatgtaagtggacaaaatcagaaccacattcctgggaattgatcttcccaatagaggtatgtggtcctaataatggttttgaaatgtggagttctgagtgggcaaatcaaacttcatggcatttgagtttccttattgacaatcccaaacagtctacagtttttgatattctcttgggaatctctcaagattttgaaattgctggtaatactcttatgccagctttttc

SEQ ID NO: 78876 - DNA, 391 bp, Glycine max
agggggaggagctggtgcaaagaatgctattctcatgaatatgccaaatgctgttctttcaatgtggagatattttgttggagatctcgtctttgaagtttctaagatgacttctccctacattaaatgtacagtctctttcttcatagcatttggaaatttggctgatgataccatcaattttgaggcttttccccacaagctggtgcagtttggagagattcaggaaaaagttgtattgaaattttcacaagaggaatttcttacagcttggtcaactcaggtgcgtcctgcaacaactctgttggctgatgggtgtccatatttgtatgcaatggtgcatgatagttcagtgtctacaataccaggtgattttgtcattggtgtcaag

SEQ ID NO: 78877 - DNA, 100 bp, Glycine max
gcgactaaatgaaatcgaaaacccgaaaattaaatatcggaccgggtcctgaagggcgggccggctttccctatagggagtcgttttacagcttgtagtt

SEQ ID NO: 78878 - DNA, 74 bp, Glycine max
gttaatgcaagcaacacaagttttgtcgaagtcttatatggaatagagatttcgcatttcttgttttgaagttt

SEQ ID NO: 78879 - DNA, 185 bp, Glycine max
catgcacgcgtacgtaagcttcggaatttgtttcgagattacacaacacactttgtgaaaaagggggagttccttattcctggtagacgcttccattgagtggggatctctgatacatggctggatcattacgaacactaggaagtcaagggcgagttcttgttggtgaagatctctgggtaaga

SEQ ID NO: 78880 - DNA, 387 bp, Glycine max
gggcacttcccgaagtgttaagagaatgcctctttctatagggggaggagctggtgcaaagaatgctattctcatgaatatgccaaatgctgttctttcaatgtggagatattttgttggagatctcgtctttgaagtttctaagatgacttctccctacattaaatgtacagtctctttcttcatagcatttggaaatttggctgatgataccatcaattttgaggcttttccccacaagctggtgcagtttggagagattcaggaaaaagttgtattgaaattttcacaagaggaatttcttacagcttggtcaactcaggtgcgtcctgcaacaactctgttggctgatgggtgtccatatttgtatgcaatggtgcatgatag

SEQ ID NO: 78881 - DNA, 51 bp, Glycine max
  unsure (1)..(51): unsure at all n locations
tatanaatactatgacgtcgggagggcacgcgttacgtaagcttcggtaat

SEQ ID NO: 78882 - DNA, 343 bp, Glycine max
ggaatcttagtggacataactggagattggatcacacttatgcagaattcttcaattaggaacttattgagagttgctgcttggaagaaaggctgtttaatggtcaagattgtgatgtctgggaatgcagcagtcaaaaggagtgattgggcctcattggtacaagtgtttttaacaaacagtaacagtacagagcattttgatgcatgtaagtggacaaaatcagaaccacattcctgggaattgatcttcccaatagaggtatgtggtcctaataatggttttgaaatgtggagttctgattgggcaaatcaaactttatggcatttgagttttcttattg

SEQ ID NO: 78883 - DNA, 390 bp, Glycine max
caaactcttatgcctttcttgacggctttgatgcaaagttcaacgacttgcagagtgcctctggcgcaacttcggttagcgacgaggccctcgcagcgggacaactttagcactatcgctgtcgcgaaatccaccaagggggcgaagaagcaagctgagttggtggatggtggctgtggttcacgactgatgaggtcttctaggcctaagcaattgggtaggcgtaaggtgcgatcattgaggttaacgggggcactgggttgggaaaacatggggtgtggcatcactaccgggcgtgggacggcgttctgagcgtgtacactcttgtagcaacagtttcgtttagacttggtaacctttctggatattgtttccttgatcggacatatg

SEQ ID NO: 78884 - DNA, 57 bp, Glycine max
gtacttcagctcgtaattccgctcacgacgtactgccatccctttacacgatgtcta

SEQ ID NO: 78885 - DNA, 385 bp, Glycine max
cacacacacatagcaaaaagacaccaaaaaaaaggataagcttcttcagtccttgagaaatcatattcagtttttatttttagaatgttatagttttctgcttccttaaaatcttcactagcaatgaagattgagtttgtccagtttttcactttacattaccaaaagaaagaactaggaagaatgggagttcagcaaaagctcatttctttcctctttcatacttgtcttgttttcattatgttttcccttgtaagctcatcacaagagcaccaccaaattacaagcagcccttcaaaaaccaaagatagcaaccacattaaggtaacctgttcattatacttcccttgccttttccaatcttacaagtttaatcctttgttta

SEQ ID NO: 78886 - DNA, 384 bp, Glycine max
gctggtgcaaagaatgctattctcatgaatatgccaaatgctgttctttcaatgtggagatattttgttggagatctcgtctttgaagtttctaagatgacttctccctacattaaatgtacagtctctttcttcatagcatttggaaatttggctgatgataccatcaattttgaggcttttccccacaagctggtgcagtttggagagattcaggaaaaagttgtattgaaattttcacaagaggaatttcttacagcttggtcaactcaggtgcgtcctgcaacaactctgttggctgatgggtgtccatatttgtatgcaatggtgcatgatagttcagtgtctacaataccaggtgattttgtcattggtgtcaagttg

SEQ ID NO: 78887 - DNA, 84 bp, Glycine max
agcagtagctgcttttcaaggttccgtcggcaacggtgggggatcttttcaatgtccgagcactgcaaagacttctgttgacaa

SEQ ID NO: 78888 - DNA, 324 bp, Glycine max
gttcccaggacctattgtgttttaaatccacaaaatccttttgtgttaaataggtggatgggaaaattgactttcccccacggcacttcccgaagagttaagagaatgcctctttctatagggggaggagctggtgcaaagaatgctattctcatgaatatgccaaatgctgttctttcaatgtggagaaattttgttggagatctcgtctttgaagtctctaagatgacttttccctacattaaatgtacagcctctttttttcatagcatttggaaatttggctgatgataccatcaatttttgggctttttccccacaagc

SEQ ID NO: 78889 - DNA, 54 bp, Glycine max
aattgttatgaaaatttaatatttgaagcagagattagagaatcaatagagaag

SEQ ID NO: 78890 - DNA, 206 bp, Glycine max
ctcgagccttttaattttcagtatttcacttatatgtagaaaagctgttcggatttcctacattatgaagttgtgtaatatttcatgagctcttcgttcatcatttttaaaatatatatataataaattgtcttaaaaaataaaaaaaaagggtggtcgcctactagtgagctcgttgacccgggaatcaattctggaccggttcc

SEQ ID NO: 78891 - DNA, 383 bp, Glycine max
gcattttgatgcatgtaagtggacaaaatcagaaccacattgctgggaattgatcttcccaatagaggtatgtggtcctaataatggttttgaaatgtggagttctgagtgggcaaatcaaacttcatggcatttgagtttccttattgacaatcccaaacagtctacagtttttgatattctcttgggaatctctcaagattttgaaattgctggtaatactcttatgccagctttttctgttccacaggctactgccagatcttctgaaaatgcggaatcctctgcatgatctggaatttgtgttttctttcgcttgttcgtttgtttaattcaataaaggaaattaggcatgaccctcttgttgagtatgctctgcctat

SEQ ID NO: 78892 - DNA, 120 bp, Glycine max
atggagggaatcttttattattcatgctcacttgccggtcactggggtctaagaaagctgagtgggcgatatcatgacattcaccactccattgatggtgacactgacatggctttctct

SEQ ID NO: 78893 - DNA, 288 bp, Glycine max
aagctcgcaattcgttctaggggacaggttggtttagaactttcattgcagactatgtagcggggcttatgaaagtcggggggacagctttattattcatagtaccaagtaaagtgccttttggagttccaagaaagcccaacttctcctcttgcttgcggaaactacatcctttcactaattggacagtaatcaaagatattgtggaggtttctctcgcatatatacttgctgcttcttatctcccgtcctaatgatagcggtgctttactcttttactcataatgt

SEQ ID NO: 78894 - DNA, 421 bp, Glycine max
catgcacgcgcccgaaccttcggaattcggttcgaggtcttgcaattgaagttgaagtcttgcccttcttttttcaactccaaacacaagacatcatcatccatggctgcctccgtctccactgtcggagctgtcaacagagctcttttgaacctgaatgggtctggacctggggtttcagctcccagttcatccttctttgggagcagcttgaagaaggttattggctcaagggtccccaacacaaagatttcctctggaagcttcaagattgttgctgtagaagagaagaaagagattgaagagacccagcagaccgacaaggacagatggaagggtcttgcctatgatatctcagacgaccaacaggacatcacaagaggaaaggggttggttgactcccttttccaagctccacagg

SEQ ID NO: 78895 - DNA, 134 bp, Glycine max
atgcacgcgtacgtaagcttcggaattcggcttgcggattgaagagtgtaccttttgcattcgagaaactagtattgtaggggtttactcacttaaataaagcgcattactatgcgcattgagtgtgcttaaat

SEQ ID NO: 78896 - DNA, 382 bp, Glycine max
gtcttgcaattgaagttgaagtcttgcccttctctcttcaactccaaacacaagacatcatcatccatggctgcctccgtctccactgtcggagctgtcaacagagctcttttgaacctgaatgggtctggacctggggtttcagctcccagttcatccttctttgggagcagcttgaagaaggttattggctcaagggtccccaacacaaagatttcctctggaagcttcaagattgttgctgtagaagagaagaaagagattgaagagacccagcagaccgacaaggacagatggaagggtcttgcctatgatatctcagacgaccaacaggacatcacaagaggaaagggtttggttgactcccttttccaagctccac

SEQ ID NO: 78897 - DNA, 165 bp, Glycine max
tgttaacagattctgcataagaagaataatattgaatatgggggtgttttgaattcctgggctgaagcgtttcaaacatcacggctattactaagaatgtctttctctcttatttatgttctaactgtacaatcgcggacaggttgactaactgccaccaaccct

SEQ ID NO: 78898 - DNA, 252 bp, Glycine max
ctgttcacaccctttttttacaggtctaagaacaaaaacgtagcagctttaaagaaggaaagcttcgaattctatatcaacaaagaaaatgatcaggtgaagatggtgccattgtaatagaataagctgatgggattgttgtcattctaagcgagagaatgcttaaaaggactgccaaacaacttgtgctccgaacaaaattgaatcatggtggttagtcgcgtggtctttaatatgaagccaaaatgattg

SEQ ID NO: 78899 - DNA, 284 bp, Glycine max
cggctcgagctcgagccgcgacgtcaccggcgtcgacggcgggcctcttcagccccgcgcagccgccggcaacaacaaccgcgccgccggctctggcttcggtttcggcgccaggcgcaatggcggaggcggcgccgcgtgctaccagtgtggcgagtttggacacctcgccagggattgcaacaggagcagtaattctggtggcggcggaagcggcagcggcggtggttgtttcaattgcggggggttcgggcaccttgcgagagattgcgtgcgcggaggcg

SEQ ID NO: 78900 - DNA, 406 bp, Glycine max
gagatattttgttggagatctcgtctttgaagtttctaagatgacttctccctacattaaatgtacagtctctttcttcatagcatttggaaatttggctgatgataccatcaattttgaggcttttccccacaagctggtgcagtttggagagattcaggaaaaagttgtattgaaattttcacaagaggaatttcttacagcttggtcaactcaggtgcgtcctgcaacaactctgttggctgatgggtgtccatatttgtatgcaatggtgcatgatagttcagtgtctacaataccaggtgattttgtcattggtgtcaagttgacaaccataaacaatatgtgtgcatatgggctcaatcctggtatttcaagttctcgtcttttgggcaccattcctcag

SEQ ID NO: 78901 - DNA, 148 bp, Glycine max
gtgcaaagttactttctacagtattgcttggaatagaaatgtccgtccgacatatactatgatatccacggtcggccgatgtatatttagaccgaattttaatgaggtctttttaatattcacttaaattatttgtagttgatttttt

SEQ ID NO: 78902 - DNA, 304 bp, Glycine max
gcggacgaagcacgaattcggctcggggcaagacacgttttttacctactaaacatacataatccctgccactatatcccattgcgagcgcgcacaacctaaaacaacaccttcacatactaaatcaaccatgtcgactgaacacaagtacgaaggctgtggcgcgtttgacaagaactcgatcaaggtcgagctcaagtggttcgagtacgaacccaagccattcgttgatgatgatgtcaagctcgaaatccaatactcgtggatctgctgctcgcacctgcacaccatttcctatggctgt

SEQ ID NO: 78903 - DNA, 402 bp, Glycine max
tgataacttaattagtgttcatgaatatgtcaagccttactgtagtggttctaaattgaaaagctttctagctagtcataacatcaccattactgatggtattgacaaaactagtgcaactttgcaatttagaaagttagcagattgtgattttctcaagagaaactttaagcagatgtctaatgttttgtgggtggctcctgaggacaaggcgagtttatggtcacaacttcattatgtttcgtgtaataatctggaaatgcaagaagcttatcttgtcaatctcgtaaatgtgttacgagaattgtatttgcacagtccagaggaagctcgccaattgagaaagaaagctctctctcgtattgaatggctgcaaaaagctgatgtgcctaccatagcaca

SEQ ID NO: 78904 - DNA, 303 bp, Glycine max
agctgatgtgcctaccatagcacagattgaagagttccattcgatgcagaggatgatgaatgctcctgattcaaatgataatattgatttactgttgagcattgatttgttgggtttacaaggagcaggtaaagcttttccaaacaaaattgtttttgatgataagcttgtgttggctaacacacaagaattctttgatggaaattttccagtggattcttggttaccaatttttgtgaattgtctttatcctgtaagtcaattaccttcagaagctgtcgttgtaaatgttacatgtggtag

SEQ ID NO: 78905 - DNA, 268 bp, Glycine max
ggaaattaggcatgaccctcttgttgagtatgctctgcctatttgaaaatttccacacctcttttaattgtcgtaatgatgtgtgaagtgtgtgttattttaaaaaaaaaaaaaaaaaaaaaaaaaaaaaaaaaaaaaaaaaaaaaaaaaaaaaaaaaaaaaaaaaaaaaaaaaaaaaaaaaaaaaaataaaaaaaaaaaaaaaaaaaaaaaaaaaaggggcggcccccaattagggagttttttaccccggaaattaattccggacc

SEQ ID NO: 78906 - DNA, 403 bp, Glycine max
gtgcatgatagttcagtgtctacaataccaggtgattttgtcattggtgtcaagttgacaaccataaacaatatgtgtgcatatgggctcaatcctggtatttcaggttctcgtcttttgggcaccattcctcagtccatttcacagcaaactgtttggaatcaaatggcaacagtgagaacaccattgtattttgattctagcaagcagagcttttgtcagttttctattgaccttctcggtggaggaatcttagtggacaaaactggagattggatcacacttatacaaaattctccaattagtaacttgttgagagttgctgcttggaagaaaggctgtttaatggtcaagattgtgatgtctgggaatgcagcagtcaaaaagagtgattgggcctcat

SEQ ID NO: 78907 - DNA, 66 bp, Glycine max
atgaacgtcgcatgcacgccgtacgtaagactacggaattacggctcgagcgtcacgttttctatt

SEQ ID NO: 78908 - DNA, 271 bp, Glycine max
gccttactttagtggttctaaattgaaaagctttctagctaggcataacatcaccattactgatggtatcgacaaaactagtgcaactttgcaatttacaaacatagcagattgtgattttctcaagcagaaactttaagcaaatgtgtaatgttttgtgggtggctcctgaggacaaggcgagtttatggtcacaacttcattatgtttcgtgtaataatctggaaatgcaagaagcttatcttgtcaacctcgtaaatgtgttactaga

SEQ ID NO: 78909 - DNA, 323 bp, Glycine max
caaccataaacaatatgtgtgcatatgggctcaatcctggtttggaggttctcgtcttttgggcaccattcctcagtccatttcacagcaaactgtttggaatcaaatggcaacagtgagaacaccattgaattttgattctagcaagcagagcttttgtcagatttctattgaccttctcggaggaggaatcttactggacaaaactggagattggctcacacttatacaaaattctccaattagtaacttattgagagttgctgcttctaagaaaggctgtttaatggtcaacattgtgatgtcctggaatgcactactca

SEQ ID NO: 78910 - DNA, 407 bp, Glycine max
ttgaccttctcggtggaggaatcttagtggacaaaactggagattggatcacacttatacaaaattctccaattagtaacttattgagagttgctgcttggaagaaaggctgtttaatggtcaagattgtgatgtctgggaatgcagcagtcaaaaggagtgattgggcctcattggtacaagtgtttttaacaaacagcaacagtacagagcattttgatgcatgtaagtggacaaaatcagaaccacattcctgggaattgatcttcccaatagaggtatgtggtcctaataatggttttgaaatgtggagttctgagtgggcaaatcaaacttcatggcatttgagttttccttattgacaatcccaaacagtctacagtttttgatattctcttgggaatctc

SEQ ID NO: 78911 - DNA, 407 bp, Glycine max
gttcgtagttgagtctaatttcgatgcactataatataaaagttgttacttgttaaattgatggatgatttttaagattattatcataaaaattaataaatttatcatataatatcatctaatactaaaattaaaactcataactacatatatacttttcacacttcttaatattagaccaaccttaatgattcaaatcatacttatttattagtatatatattttttagaattttataatcttaaaaggtgagtttaaagttaacttaatcttaaaagttagtttaagggatgagaattttttagttcacgtgaaacttgagttttttttaatacattttcgcacgtctaacctttcttaggcttggtgtgtgatcttttggatgaatcttaaatataatctgata

SEQ ID NO: 78912 - DNA, 265 bp, Glycine max
aaaaaaaaccccccgcaaaaacaaaaattcgctcgcgcccaataacatatttttcccaatctcttcttcaacctcctcgcctattataccttttctccccccaaaacaaaccctaattccctcattcccatttcctcacaacacccacttcaccttaaaccctatctctaaccttcatcttctatccttcctcaattataactactatcccaaaccttaatccaatcctattaaaaccaactaacccaaacctaaaatattttcc

SEQ ID NO: 78913 - DNA, 404 bp, Glycine max
gagaaactttaagcagatgtctaatgttttgtgggtggctcctgaggacaaggcgagtttatggtcacaacttcattatgtttcgtgtaataatctggaaatgcaagaagcttatcttgtcaacctcgtaaatgtgttacgagaattgtatttgcacagtccagaggaagctcgccaattgagaaggaaagctctctctcgtattgaatggctgcaaaaagctgatgtgcctaccatagcacagattgaagagttccattcgatgcagaggatgatgaatgctcctgattcaaatgataatattgatttactgttgagcattgatttgttgggtttacaaggagcaagtaaagcttttccaaacaaaattgtttttgatgataagcttgtgttggctaacacac

SEQ ID NO: 78914 - DNA, 382 bp, Glycine max
ctggatttcattgcgatatcatttgtgtcactggatggactgccaccctaatgcaggatgttcaggttacaattgattggtttatttcctctcaggaatgtgttcccaggacctattgtgttttaaatccacaaaatccttttgtgttaaataggtggatgggaaaattgactttcccccagggcacttcccgaagtgttaagagaatgcctctttctatagggggaggagctggtgcaaagaatgctattctcatgaatatgccaaatgctgttctttcaatgtggagatattttgttggagatctcgtctttgaagtttctaagatgactttcttcctacattaaatgtacagtctttttcttcatagcatttggaaatt

SEQ ID NO: 78915 - DNA, 233 bp, Glycine max
ctctcctgctttccagctaccaagctgccagcacagcggatgtgcacgtttgcagagactcttgatctcctcatgcagccggggagcaagcacgtcgacctaaatatcgacgtcaagctcgacattgatcctgaattgctctatccgttcatgaggtgggagattgtgtctttcccaggctggtatacgtatcttgttccgagacatatttcttggcctctggcacgcctagc

SEQ ID NO: 78916 - DNA, 386 bp, Glycine max
ggcctcattggtacaagtgtttttaacaaacagcaacagtacagagcgttttgatgcatgtaagtggacaaaatcagaaccacattcctgggaattgatcttcccaatagaggtatgtggtcctaataatggttttgaaatgtggagttctgagtgggcaaatcaaacttcatggcatttgacttttcttattgacaatcccaaacagtctacagtttttgatattctcttgggaatctcttaagattttgaaattgctggtaatactcttatgccagctttttctgtttcacaggctactgccagatctttatgaaaatgcggaatcctctgcatgatctggaatttgtggtatctttcgcttgttcttttgcttaattcaataa

SEQ ID NO: 78917 - DNA, 294 bp, Glycine max
tgcaattgaagttgaagtcttgcccttctctcttcaactccaaacacaagacatcatcatccatggctgcctccgtctccactgtcggagctgtcaacagagctctttagaacctgaatgggtctggacctggggtttcagctcccagttcatccttctttgggagcagcttgaagaaggttattggctcaagggttcccaacacaaagatttcctctggaagcttcaagattgttgctgtcgaagagaagaacgagattgaagagacctaacagaccgtcatggaccgttgga

SEQ ID NO: 78918 - DNA, 316 bp, Glycine max
  unsure (1)..(316): unsure at all n locations
cacagattgaagagttccattcgatgcagaggatgatgaatgctcctgattcaaatgataatattgatttactgttgagcattgatttgttgngtttacaaggagcaggtaaagcttttccaaacaaaattgtttttgatgataagcttgtgttggctaacacacaagaattctttgatggaaattttccagtggattcttggttaccaatttttgtgaattgtctttatcctgtaagtcaattaccttcagaagctgtcgttgtaaatgttacatgttgtaatgggacctgtggtttacccaccactgcttggat

SEQ ID NO: 78919 - DNA, 312 bp, Glycine max
  unsure (1)..(312): unsure at all n locations
gatataacatggttgaatcnagtacacaactcacagcaaaaaggtttataagctgtaaaggtacatgtaaccataaacctttttgctgtgagntgtgtacttgatataacatggttgaatctcggcaatcaatgaaaaaacccattaaaaatgtgtggaaattgaaaaaacccgttaaatgatctgtgggaggaatatagcggcatgatccattgcactatttgctggttgaatttggtattgctgagaagctcttccaagacaattgtatgtcgtcgttatttatttgttatgacaatcactggtacatat

SEQ ID NO: 78920 - DNA, 404 bp, Glycine max
  unsure (1)..(404): unsure at all n locations
gtgcatgatagttcagtgtntacaataccaggtgattttgtcattggtgtcaagttgacaaccataaacaatatgtgtgcatatgggctcantcctggtatttcaggttctcgtcttttgggcaccattcctcagtccatttcacagcaaactgtttggaatcaaatggcaacagtgagaacaccattgaattttgattctagcaagcagagcttttgtcagttttctattgaccttctcggtggaggaatcttagtggacaaaactggagattggatcacacttatacaaaattctccaattagtaacttgttgagagttgctgcttggaagaaaggctgtttaatggtcaagattgtgatgtctgggaatgcagcagtcaaaaggagtgattgggcctcatt

SEQ ID NO: 78921 - DNA, 81 bp, Glycine max
atttcatataccttgtgtttgtatagcatatattcctagttgatattatctatagatggagccaattgaacaggaagccaa

SEQ ID NO: 78922 - DNA, 404 bp, Glycine max
  unsure (1)..(404): unsure at all n locations
caagaacattatcttcgatgtacatggcgttacatcgctcgacggtgctggagctcaagtcctggctgagattgtcgagtcatacagaagcaggnaagtcagagtcttcttctgtagagttccaaaagagtctagtccagtctatcagctgttcgataagagcggtattgttgagatgtgcggcggtccaagacactttgtacagagcgttgaggaggcacttcgcatgacggaactagagcgattgacagaggaatttgccagctccgcagaagggtcgagagctgcatccagccgagcttaagtcttccgatgcatttatcctttatcctatgagcgatgggaatgagcgtgttagcactgcatctgatggtatgggcatattgcattagcgatttgctacg

SEQ ID NO: 78923 - DNA, 406 bp, Glycine max
  unsure (1)..(406): unsure at all n locations
ctcgagccgattcggctctaggttgagagttgctgcttggaagaaaggctgtttaatggtcaagattgtgatgtctgggaatgcagcagtcaanaggagtgattgggcctcattggtacaagtgtttttaacaaacagcaacagtacagagcattttgatgcatgtaagtggacaaaatcagaaccacattcctgggaattgatctncccaatagaggtatgtggtcctaataatggttttgaaaatgtggagttctgagtgggcaaatcaaacttcatggcatttgagtttccttattgacaatcccaaacagtctacagtttttgatattctcttgggaatctctcaagattttgaaattgctggtaatactcttatgccagctttttctgttccacaggctac

SEQ ID NO: 78924 - DNA, 397 bp, Glycine max
  unsure (1)..(397): unsure at all n locations
cgaaaagaaagagcaggctaagcgcgttgcggctgaaaacggcgttgtcaacccttcaggtgcgatgatcgctgcttttgcaccaatgtacntcgctgccatacctgttacttcatacctcacaaaaccaaacagcgtgatgcagtccttggtgcacgctctcatcaagttaattcctggagttactacaacagcaataacatccggtcgcgctattcccgcactctcagccatttacctattctggactttcggcgcctcgggtgctctctctgcggcagggcaagccatgggacgagaagagggcctggacattgagcactcgagaaaacatattcacaagctggatgggttgccgttgaggttgagaagtgcgcattatgcactcatggaaaac

SEQ ID NO: 78925 - DNA, 267 bp, Glycine max
  unsure (1)..(267): unsure at all n locations
ctgaaaagggagatcaagaaaaacccaaaaagattgatgccagattgagacaaagaatagatcctcaatacaatgaggttcaggctcagatgganacaaatttgtttaaattgtctcttgatgatgttgaaactcctaaaggttccatgttggatctgaaaatttctcaatctaaaattgcacttcccaagaacacagttggaggaaccattctgcgtagtgatctattggcaaattttttgacagagggcaattttagagcaagtg

SEQ ID NO: 78926 - DNA, 403 bp, Glycine max
  unsure (1)..(403): unsure at all n locations
agctggtgcagtttggagagattcaggaaaaagttgtattgaaattttcacaagaggaatttcttacagcttggtcaacctaggtgcgtccntcaacaactctgttggctgatgggtgtccatatttgtatgcaatggtgcatgatagttcagtgtctacaataccaggtgattttgtcattggtgtcaagttgacaaccataaacaatatgtgtgcatatgggctcaatcctggtatttcaggttctcgtcttttgggcaccattcctcagtccatttcacagcaaactgtttggaatcaaatggcaacagtgagaacaccattgaattttgattctagcaagcagagcttttgtcagttttctattgaccttctcggtggaggaatcttagtggacaaaac

SEQ ID NO: 78927 - DNA, 406 bp, Glycine max
  unsure (1)..(406): unsure at all n locations
ggagatctcgtctttgaagtttctaagatgacttctccctacattaaatgtacagtctctttcttcatagcatttggaaatttggctgatgatancatcaattttgaggcttttccccacaagctggtgcagtttggagagattcaggaaaaagttgtattgaaattttcacaagaggaatttcttacagcttggttaactcaggtgcgtcctgcaacaactctgttggctgatgggtgtccatatttgtatgcaatggtgcatgatagttcagtgtctacaataccaggtgattttgtcattggtgtcaagttgacaaccataaacaatatgtgtgcatatgggctcaatcctggtatttcaggttctcgtcttttgggcaccattcctcagtccatttcacagc

SEQ ID NO: 78928 - DNA, 403 bp, Glycine max
  unsure (1)..(403): unsure at all n locations
gcaacagtacagagcattttgatgcatgtaagtggacaaaatcagaaccacattcctgggaattgatcttcccaatagaggtatgtggtcctantaatggttttgaaatgtggagttctgagtgggcaaatcaaacttcatggcatttgagtttccttattgacaatcccaaacagtctacagtttttgatattctcttgggaatctctcaagattttgaaattgctggtaatactcttatgccagctttttctgttccacaggctactgccagatcttctgaaaatgcggaatcctctgcatgatctggaatttgtgttttctttcgcttgttcgtttgtttaattcaataaaggaaattaggcatgaccctcttgttgagtatgctctgcctatttgaaaa

SEQ ID NO: 78929 - DNA, 319 bp, Glycine max
  unsure (1)..(319): unsure at all n locations
ggaaggatgtcttacgttgctcataacgttaatcagccccaagagaaagatttgttggagggaaatttttcctttgatattaaatctcgctntagattggaaaaagtttcctctacaaaagcacaatttgttagtggaaaaaccttcaaatatgatataattggtgctggttcacattcttcagaagattttcctgaaaaggaagatcaagaaaaacccaaaaagattgatgccagattgagacaaagaatagatcctcaatacaatgaagttcaggctcagatggaaacaaatttgtttaaattgtctcttgatgatg

SEQ ID NO: 78930 - DNA, 402 bp, Glycine max
  unsure (1)..(402): unsure at all n locations
ctttctaactagtcataacntcaccattactgatggtattgacaaaactagtgcaactttgcaatttagaaagttagcagattgtgattttttcaagagaaactttaagcagatgtctaatgttttgtgggtggctcctgaggacaaggcgagtttatggtcacaacttcattatgtttcgtgtaataatcgggaaatgcaagaagctaatcttgtcaatttcgtaaatgtgttacaagaattgtatttgcacagtccagaggaagctcgccaattgagaaggaaagctctctctcgtattgaatggctgcaaaaagctgatgtgcctaccatagcacagattgaagagttccattcgatgcagaggatgatgaatgctcctgattcaaatgataatattga

SEQ ID NO: 78931 - DNA, 380 bp, Glycine max
  unsure (1)..(380): unsure at all n locations
ctcgagccgattcggctcgagatggttttgaaatgtggagttctgagtgggcaaatcaaacttcatggcatttgagtttccttattgacaatccnaaacagtctacagtttttgatattctcttgggaatctctcaagattttgaaattgctggtaatactcttatgccagctttttctgttccacaggctactgccagatcttntgaaaatgcggaatcctctgcatgatctggaatttgtgttttctttcgcttgttcgtttgtttaattcaataaaggaaattaggcatgaccctcttgttgagtatgctctgcctatttgaaaatttccacacctcttttaattgtcgtaatgatgtgtgaagtgtgtgttatttt

SEQ ID NO: 78932 - DNA, 401 bp, Glycine max
  unsure (1)..(401): unsure at all n locations
tgataacttaattagtgttcatgaatatgtcaagccttactttagtggttctaaattgaaaagctttctagctagtcataacatcaccatnactgatggtattgacaaaactagtgcaactttgcaatttagaaagttagcagattgtgattttctcaagagaaactttaagcagatgtctaatgttttgtgggtggctcctgaggacaaggcgagtttatggtcacaacttcattatgtttcgtgtaataatctggaaatgcaagaagcttatcttgtcaatctcgtaaatgtgttacgagaattgtatttgcacagtccagaggaagctcgccaattgagaaggaaagctctctctcgtattgaatggctgcaaaaagctgatgtgcctaccatagcac

SEQ ID NO: 78933 - DNA, 404 bp, Glycine max
  unsure (1)..(404): unsure at all n locations
ctcgagccgctcgagccgtnaagttaaaagccttagccttccgtacaactccaaacacaaagacatcatcatccatggctgcctccgtctnnactgtcggagctgtcaacagagctcttttgaacctgaatggttctggagctggagcttcagctcccagttcagccttctttgggaccagcttgaagaaggttattgcctnaagggtccccaacagcaaggtttccggtggaagcttcaagattgttgctgtagaagagaagaaagagaattgaagagacccagcagaccgacaaggacagatggaagggtcttgcctatgatatctcagacgaccaacaagacatcacaagaggaaagggtttggttgactcccttttccaagctccacaggatgctggaac

SEQ ID NO: 78934 - DNA, 320 bp, Glycine max
  unsure (1)..(320): unsure at all n locations
gcacagtccaaaggaagctttccatttgagaaggaaagctctctctcgtattgaatggctgcaaaaagctgatgtgcctaccatagcacagattganaagttccattcgatgcagaggatgatgaatgctcctgattcaaatgataatattgatttactgttgagcattgatttgttgggtttacaaggagcaggnaaagctnttncnaacaaaattgtttttgatgataagcttgtgttggctaacacacaagaattctttgatggaaatttttcaatggattcttggttaccaatttttgtgaattggctttatcctg

SEQ ID NO: 78935 - DNA, 396 bp, Glycine max
  unsure (1)..(396): unsure at all n locations
naaaaaaaaaaaaaaaaaaagaagggaaaaaaaaaaaaaaaaaaaaaaaaaaaaaaaaaaaaaaaaaaaaaaaanaaaaaaaaaaaaaaaaaaaaaaaaaaaaaaaaaaaaaaaaaaaaaaaaaaaaaaaaaaaaaaaaaaaaaaaaaaaaaaaaggggggggcccccccttagtgacccnnnnccccgggaaaaaatttcgggccgggaccctgggggggtccaaattttccttaaaggggggggtttaaaacctgggggaaataagggaaaaaggtgttcccggggaaaaattttttccccctaaaaatcccaaaaaaaaaaaaacccgaaaacaaaaagttaaaacccgggggccccaaaggggggagcaaccccactttattgggggggccc

SEQ ID NO: 78936 - DNA, 372 bp, Glycine max
  unsure (1)..(372): unsure at all n locations
aaattttgtttctttgtgtgtgtatggtgatgataacttaattagtgttcatgaatatgtcaagccttactttagtggttctaaattgaanagctttctagctagtcataacatcaccattactgatggtattgacaaaactagtgcaactttgcaatttagaaagttagcagattgtgattttctcaagagaaactttaagcagatgtctaatgttttgtgggtggctcctgaggacaaggcgagtttatggtcacaacttcattatgtttcgtgtaataatctggaaatgcaagaagcttatcttgtcaacctcgtaaatgtgttacgagaattgtatttgcacagtccagaggaagctcgccaattgag

SEQ ID NO: 78937 - DNA, 266 bp, Glycine max
  unsure (1)..(266): unsure at all n locations
aaaaaaaaaattatttataataaaaaaaaaaaaaaaaaagggggaaaaaaataaaaaaataaaaaaaaaaaaaaaaaaaaaatattattaaaaatntttaaaaataaaaaaaaaaaaataaaaatataaaaaaaaaaaactaataaaaaaactattttaaatataatatgggggggctccccttttttggccttctctnnnnggggaaaaatnngttccccttccctttagggtttcccctttttctttttttggggttctttaac

SEQ ID NO: 78938 - DNA, 399 bp, Glycine max
  unsure (1)..(399): unsure at all n locations
ctcgagccgctcgagccgngcgaagctgcacgtgtccgaggccgacggcacacctgaggtttggcagctggtgattggctgaaaagtgcnncggatctcatgcgcggtgtgtcccgctgggaccagtagctcgtttgcctgcagccaggaacacccttttggacgacatgattgacgcgaggcgccttgatatgtcgccatatccgggacagggtccggtgatgcactccgatcagcccgaggtgcatgtccaacgtcttgaatcataggaattacgcgacagtaattctgtggcttcatggcgttgttatcagggtgttggaccccaagcctgcctgtgcgatgtggtacgggtctgggaactgcggaggaggaggggctcctctgccgcgtccagcg

SEQ ID NO: 78939 - DNA, 403 bp, Glycine max
  unsure (1)..(403): unsure at all n locations
ctctctatatatatagagatgactatattctttgtaactagcctttcattttctgatcaatgagaaattagagtttcccaaactctattagttngtatccagagaattgtagatttgtgctgcaatctttgaacttcttttatatttctatcagtaaagagagaagagccctttgatagatagatatcaggagaaatgttctttacttattttatctctctctctccctttctttattacatgtatgttcttacttcttttaagatttcatattcttgactaatttactcctgcagtttcttttcctaataaaatttcttattttaaattaaaaaggagttttgatagatgtacttctcattacccccagtttcttattctacttgtatgctntttctctatg

SEQ ID NO: 78940 - DNA, 403 bp, Glycine max
  unsure (1)..(403): unsure at all n locations
agcaaactgtttggaatcanatggcaacagtgagaacaccattgaattttgattctagcaagcagagcttttgtcagttttctattgaccnnctcggtggaggaatcttagtggacaaaactggagattggatcacacttatacaaaattctccaattagtaacttgttgagagttgctgcttggaagaaaggctgtttaatggtcaagattgtgatgtctgggaatgcagcagtcaaaaggagtgattgggcctcattggtacaagtgtttttaacaaacagcaacagtacagagcattttgatgcatgtaagtggacaaaatcagaaccacattcctgggaattgatcttcccaatagaggtatgtggtcctaataatggttttgaaatgtggagttctga

SEQ ID NO: 78941 - DNA, 406 bp, Glycine max
  unsure (1)..(406): unsure at all n locations
ctcgagccgctcgagccgttcggcccgctcgagccgaaaaaattatgatcttaatgatgatgagccgggaatgatcatcctcaatggtgatccanaatctagataccctagtcctcttgcatttgagtgcttaaaaacatgatattatttggatgagaatgtggattggaattattgtgcataatttactgatagacacangnnngacaaattttcgacattcaaattacttcaatcaaacaaagatttgaattatatctatattcgtattttgagaaaatcaagagaatcaaatagaataggaaattgattaatgacttttttttttcctttgtgactattctcattcaattgattattttcacatttattgtgtatttgtgtgcttaccatgtacagatagtta

SEQ ID NO: 78942 - DNA, 397 bp, Glycine max
  unsure (1)..(397): unsure at all n locations
ctttcttcatagcatttggaaatttggctgatgataccatcaattttgaggcttttccccacaagctggtgcagtttggagagattcannaaaaagttgtattgaaattttcacaagaggaatttcttacagcttggtcaactcaggtgcgtcctgcaacaactctgttggctgatgggtgtccatatttgtatgcaatggtgcatgatagttcagtgtctacaataccaggtgattttgtcattggtgtcaagttgacaaccataaacaatatgtgtgcatatgggctcaatcctggtatttcaggttctcgtcttttgggcaccattcctcagtccatttcacagcaaactgtttggaatcaaatggcaacagtgagaacaccattgaattttga

SEQ ID NO: 78943 - DNA, 400 bp, Glycine max
  unsure (1)..(400): unsure at all n locations
ttggaaatttggctgatgataccntcaattttgaggcttttccccacaagctggtgcagtttggagagattcangaaaaagttgtattgaaattntcacaagaggaatttcttacagcttggtcaactcaggtgcgtcctgcaacaactctgttggctgatgggtgtccatatttgtatgcaatggtgcatgatantttanngnnacaataccaggtgattttgtcattggtgtcaagttgacaaccataaacaatatgtgtgcatatgggctcaatcctggtatttcaggttctcgtcttttgggcaccattcctcagtccatttcacagcaaactgtttggaatcaaatggcaacagtgagaacaccattgaattttgattctagcaagcagagcttt

SEQ ID NO: 78944 - DNA, 400 bp, Glycine max
  unsure (1)..(400): unsure at all n locations
gaatgctattctcatgaatatgccaaatgctgttctttcaatgtggagatattttgttggagatctcgtctttgaagtttctaagatgacttntccctacattaaatgtacagtctctttcttcatagcatttggaaatttggctgatgataccatcaattttgaggcttttccccacaagctggtgcagtttggagagattcaggaaaaagttgtattgaaattttcacaagaggaatttcttacagcttggtcaactcaggtgcgtcctgcaacaactctgttggctgatgggtgtccatatttgtatgcaatggtgcatgatagttcagtgtctacaataccaagtgattttgtcattggtgtcaagttgacaaccataaacaatatgtgtgcatat

SEQ ID NO: 78945 - DNA, 91 bp, Glycine max
  unsure (1)..(91): unsure at all n locations
ttgaatcacgagaaagaatttatggattagttgatagtaataatantcaagcacatgccaggcatacatagaaagaggaagagcacagccg

SEQ ID NO: 78946 - DNA, 181 bp, Glycine max
  unsure (1)..(181): unsure at all n locations
atcagcccaacacaacatttttataagctaaaatcacttcatcatgggtgcctcgtgtgcttcctctgccattgcagctgttgccatcttcacacnaaggcaagtttattttttttcacgtgcccattacttgtaagttgtataatagtgaaccattaacgtacgtgaaattagtctatgc

SEQ ID NO: 78947 - DNA, 184 bp, Glycine max
  unsure (1)..(184): unsure at all n locations
ctcttgttgagtattctttgcctatttgaaaatttccacacctcttttaattgtcgtaatgatgtgtgaagtgtgtgttattttaaaanaggaaattaggcatgaccctcttgttgagtatgctctgcctatttgaaaatttccacacctcttttaattgtcgtaatgatgtgtgaagtgtgtg

SEQ ID NO: 78948 - DNA, 392 bp, Glycine max
ggacaaaatcagaaccacattcctgggaattgatcttcccaatagaggtatgtggtcctaataatggttttgaaatgtggagttctgagagggcaaatcaaacttcatggcatttgagtttccttattgacaatcccaaacagtctacagtttttgatattctcttgggaatctctcaagattttgaaattgctggtaatactcttatgccagctttttctgttccacaggctactgccagatcttctgaaaatgcggaatcctctgcatgatctggaatttgtgttttctttcgcttgttcgtttgtttaattcaataaaggaaattaggcatgaccctcttgttgagtatgctctgcctatttgaaaatttccacacctcttttaattgt

SEQ ID NO: 78949 - DNA, 401 bp, Glycine max
  unsure (1)..(401): unsure at all n locations
gtttaaattgagatgataagatgtttttctctgttgtggtggttatatgcggtttaaattttgaatttctttgttggtgtatttttttttntttctttctttcatttttagtagaacctaaataatttatggtttatattgttttaattgtttaactcggaacttaacagtgtgcttggttatagaagagggaggaatttttatttttattttttttaatttaccttgtttgatttataaatctagtgggaggagaggggaaacgagaggttaattatctacctctaatagttgaagaatttggaatttatgatttttgaaatgtaaacacaacattgttccacaattttattttatttttcatcacttttcttactgtatggatgtatgatagttcgtac

SEQ ID NO: 78950 - DNA, 404 bp, Glycine max
  unsure (1)..(404): unsure at all n locations
aagaagcttatcttgtcaaactcgtaaatgtgttacgagaattgtatttgcacagtccagaggaagctcgccaattgagaaggaaagctctntctcgtattgaatggctgcaaaaagctgatgtgcctaccatagcacagattgaagagttccattcgatgcagaggatgatgaatgctcctgattcaaatgataatattgatttactgttgagcattgatttgttgggtttacaaggagcaggtaaagcttttccaaacaaaattgtttttgatgataagcttgtgttggctaacacacaagaattctttgatggaaattttccagtggattcttggttaccaatttttgtgaattgtctttatcctgtaagtcaattaccttcagaagctgtcgttgtaaat

SEQ ID NO: 78951 - DNA, 401 bp, Glycine max
  unsure (1)..(401): unsure at all n locations
cacaaatgctaatatgagatcactttaagcattactacagactttccttgcacaaatccaaattaaaagagatattggtgtttcaaaagtcagnattagtcaccattgatgtaataaaattgatagacattgaaggatgtagacaaggattatcctatagtgtttgagtatctagcatgcatgattgataccagtacagcatttattaaatgtctaaacttccttaatcaacatttgaacataggtaatgccattaagaagtaatcttgaaacaatggagagtggatagttttaatttagaataagaaagaaatattgaaataaaagtaaatggaataattttaaacatttagttggagtgaatttaaatattgacttccagtttcaaattgttatcagtt

SEQ ID NO: 78952 - DNA, 397 bp, Glycine max
  unsure (1)..(397): unsure at all n locations
gaagttaaaagccttagccttccctacaactccaaacacaaagacatcatcatccatggctgcctccgtctccactgtcggagctgtcancagagctcttttgaacctgaatggttctggagctggagcttcagctcccagttcagccttctttgggaccagcttgaagaaggttattgcctcaagggtccccaacagcaaggtttccggtggaagcttcaagattgttgctgtagaagagaagaaagagattgaagagacccagcagaccgacaaggacagatggaagggtcttgcctatgatatctcagacgaccaacaagacatcacaagaggaaagggtttggttgactcccttttccaagctccacaggatgctggaactcactatgcagtc

SEQ ID NO: 78953 - DNA, 305 bp, Glycine max
  unsure (1)..(305): unsure at all n locations
ctttaagcagatgtctaatgtttngtgggtggctcctgaggacaaggcgagtttatggtcacaacttcattatgtttcgtgtaataatctggaantgcaagaagcttatcttgtcaatctcgtaaatgtgttacgagaattgtatttgcacagtccagaggaagctcgccaattgagaaggaaagctctctctcgnatngaanggnttcaaaaagctgatgtgcctaccatagcacagattgaagagttccattcgatgcanaagatgatgaaagctcctgattcaaatgataatattgatttac

SEQ ID NO: 78954 - DNA, 135 bp, Glycine max
  unsure (1)..(135): unsure at all n locations
gtcaaaaggagtgattgggcctcattggtacaagtgtttttaacaaacagcaacagtacagagcattttgatgcatgtaagtggacaaaatnagaaccacattcctgggaattgatcttcccaatagaggtatgt

SEQ ID NO: 78955 - DNA, 175 bp, Glycine max
cccccttccttaacttcgaatttcggttcgggcctgtttcaaaggatattatggattaactgtggaccattgattggtggggtttacaaggagcaggtaaagcttttccaaccaaaattgtttttgatgataagttggggtgggttaacacacaaaatttcttggttggaaattt

SEQ ID NO: 78956 - DNA, 375 bp, Glycine max
atcttagtggacaaaactggagattggatcacacttatacaaaattctccaattagtaacttgttgagagttgctgcttggaagaaaggctgtttaatggtcaagattgtgatgtctgggaatgcagcagtcaaaaggagtgattgggcctcattggtacaagtgtttttaacaaacagcaacagtacagagcattttgatgcatgtaagtggacaaaatcagaaccacattcttgggaattgatcttcccaatagaggtatgtggtcctaataatggttttgaaatgtggagttctgagtgggcaaatcaaacttcatggcatttgagtttccttattgacaatcccaaacagtctacagtttttgatattctc

SEQ ID NO: 78957 - DNA, 373 bp, Glycine max
gcagatgtctaatgttttgtgggtggctcctgaggacaaggcgagtttatggtcacaacttcattatgtttcgtgtaataatctggaaatgcaagaagcttatcttgtcaatctcgtaaatgtgttacgagaattgtatttgcacagtccagaggaagctcgccaattgagaaggaaagctctctctcgtattgaatggctgcaaaaagctgatgtgcctaccatagcacagattgaagagttccattcgatgcagaggatgatgaatgctcctgattcaaatgataatattgatttactgttgagcattgatttgttgggtttacaaggagcaggtaaagcttttccaaacaaaaatgtttttgatgataag

SEQ ID NO: 78958 - DNA, 165 bp, Glycine max
acacaaaagctaagctgtgacttcccctcgacccgaacctcagatttcggttcgagctttttttaagtgtagtagaggagaggaaccgcgccaaccctctcttcttctttttcttcaatcctttaataacattattagtggcattcttaatcgttgggaaaaatg

SEQ ID NO: 78959 - DNA, 388 bp, Glycine max
aaaaccttcaaatatgatataattggtgctggttcacattcttcagaagattttcctgaaaaggaagatcaagaaaaacccaaaaagattgatgccagattgagacaaagaatagatcctcaatacaatgaggttcaggctcagatggaaacaaatttgtttaaattgtctcttgatgatgttgaaactcctaaaggttccatgttggatctgaaaatttctcaatctaaaattgcacttcccaagaacacagttggaggaaccattctgcgtagtgatctattggcaaattttttgacagagggcaattttagagcaagtgttgatttgcagcgcactcatcgtattagaggaatgattaaaatggtggccacagttggtattcctg

SEQ ID NO: 78960 - DNA, 238 bp, Glycine max
gggaagtcctggagggattatgcaggtggggaatctattctcaatttccaaattagcttgtgctttcctagttaagaacttatgatcatagccagatgaagtcattattttttattatagaaggccaatagtcatggtgtagtaatcttctgttgctttaaattagttaatttagtctacttttttatgccacacctttgtatttgaagttcgttaataagacaaattaaattcttac

SEQ ID NO: 78961 - DNA, 388 bp, Glycine max
cagaaaaacaagtagttgagaactaagaagaaggaaatggcttcctcaatgatctcctccccagctgttaccaccgtcaaccgtgccggtgccggcatggttgctccattcaccggcctcaaatccatggctggcttccccacgaggaagaccaacaatgacattacctccattgctagcaacggtggaagagtacaatgcatgcaggtgtggccaccaattggcaagaagaagttcgagactctttcctacttgccagacctcgatgatgcccaattggcaaaggaagtcgaataccttctaaggaaaggatggattccttgcttggaattcgagttggagcacggtttcgtgtaccgtgagcacaacaggtcacctggatactatg

SEQ ID NO: 78962 - DNA, 379 bp, Glycine max
caaaattctccaattagtaacttattgagagttgctgcttggaagaaaggctgtttaatggtcaagattgtgatgtctgggaatgcagcagtcaaaaggagtgattgggcctcattggtacaagtgtttttaacaaacagcaacagtacagagcattttgatgcatgtaagtggacaaaatcagaaccacattcctgggaattgatcttcccaatagaggtatgtggtcctaataatggttttgaaatgtggagttctgagtgggcaaatcaaacttcatggcatttgagtttccttattgacaatcccaaacagtctacagtttttgatattctcttgggaatctctcaagattttgaaattgctggtaatactctta

SEQ ID NO: 78963 - DNA, 386 bp, Glycine max
gcaaaaagctgatgtgcctaccatagcacagattgaagagttccattcgatgcagaggatgatgaatgctcctgattcaaatgataatattgatttactgttgagcattgatttgttgggtttacaaggagcaggtaaagcttttccaaacaaaattgtttttgatgataagcttgtgttggctaacacacaagaattctttgatggaaattttccagtggattcttggttaccaatttttgtgaattgtctttatcctgtaagtcaattaccttcagaagctgtcgttgtaaatgttacatgtggtagtggacgtggtggtttacccaccactgcttggattagttctgcagttaacaatcgctcctcagatatcaacaaaagga

SEQ ID NO: 78964 - DNA, 386 bp, Glycine max
ctagttttgatggtttgattaccaagcaagttatgagcaagatggcagaaatgataaacagtctttgtggtggtgatgaaaaattgatgcgtgaaaggacgcacctgctgttggcttgttgttcaaggatggcaatttgtaagaaagatgtttggagagttgaatgtggaatcccttctggatttccgctcacagttatttgcaatagcatttttaatgagatgctcattagatatagctatgaaaaattactgcgccaggctaaagctccaagtatgtttttacaatccttcaaaaattttgtttctttgtgtgtgtatggtgatgataacttaattagtgttcatgaatatgtcaagccttactttagtggttctaaattgaaa

SEQ ID NO: 78965 - DNA, 392 bp, Glycine max
aaaacactcataacacaaagcacaaagcaaagctcatccttgagttaaaaaatggcagcagcttcttccatggctctctcatccccatccttggctggcaaggccgtgaagctgggcccatcagccccagaagtgggaagggtgagcatgaggaagaccgtcaccaagcaggtctcctcaggaagcccatggtacggcccagaccgagtcaagtacttgggcccattctctggcgagcccccgtcctacctaaccggtgagttcccaggcgactacggctgggacactgctgggctttccgcagacccagaaaccttcgccaagaaccgtgaactcgaagtgatccactccaggtgggccatgctcggagccttgggctgcgtcttcccgga

SEQ ID NO: 78966 - DNA, 371 bp, Glycine max
gaaagatctcgcaatggttaaagttaatgtagcatgtgctgctgttggcttgacatcaagttacactccaactccattgttggaatctggtttgcaaaaagacagagggttaattgtggagtattttggaaggatgtcttacgttgctcataacgttaatcagccccaagagaaagatttgttggagggaaatttttcctttgatattaaatctcgctctagattggaaaaagtttcctctacaaaagcacaatttgttagtggaaaaaccttcaaatatgatataattggtgctggttcacattcttcagaagattttcctgaaaaggaagatcaagaaaaacccaaaaagattgatgccagattgagac

SEQ ID NO: 78967 - DNA, 387 bp, Glycine max
ttgcaatttaaaaagttagcagattgtgattttctcaagagaaactttaagcagatgtctaatgttttgtgggtggctcctgaggacaaggcgagtttatggtcacaacttcattatgtttcgtgtaataatctggaaatgcaagaagcttatcttgtcaatctcgtaaatgtgttacgagaattgtatttgcacagtccagaggaagctcgccaattgagaaggaaagctctctctcgtattgaatggctgcaaaaagctgatgtgcctaccatagcacagattgaagagttccattcgatgcagaggatgatgaatgctcctgattcaaatgataatattgatttactgttgagcattgatttgttgggtttacaaggagcaggt

SEQ ID NO: 78968 - DNA, 381 bp, Glycine max
aagctggtgcagtttgtagagattcaggaaaaagttgtattgaaattttcacaagaggaatttcttacagcttggtcaactcaggtgcgtcctgcaacaactctgttggctgatgggtgtccatatttgtatgcaatggtgcatgatagttcagtgtctacaataccaggtgattttgtcattggtgtcaagttgacaaccataaacaatatgtgtgcatatgggctcaatcctggtatttcaggttctcgtcttttgggcaccattcctcagtccatttcacagcaaactgtttggaatcaaatggcaacagtgagaacaccattgaattttgattctagcaagcagagcttttgtcagttttctattgaccttctcggt

SEQ ID NO: 78969 - DNA, 273 bp, Glycine max
gggcagcacggcaaccagggcacgtcgttcgaggaagagggcgacggctcgtcccgcctcgtgaccgagggcacgggcgaagaaggcacgtacaagccgtccgagcacggtggcaagcgcgaggacgggcagcccgacaagcgcgtcagctcggagcacggctttggcggcaacaaggatctcgcttccgaggcgggcaagaagggtggttcagcgagctacgacaatgggggcttgacgcagtaacaatgtacatgctattcgtctacagtg

SEQ ID NO: 78970 - DNA, 296 bp, Glycine max
gacattgtcagtattgcaatgcagtacttgatttctttggctgtggtgataaaaactaggggcggagtctactgcaaatacatgttggagcttatactagcactgcacctctattcaagctgactttaagcattttggaactgttcttccagtacaatagataaactgaaatagtatagtcttaagctctgtaatgagttctactcccccaccccccgaaatctgtaattaaatttatctcctctaaaaaagttaggttattaaaataaaaaattaaccatcaatatgaatatttt

SEQ ID NO: 78971 - DNA, 282 bp, Glycine max
ggttattgattgcttgtgagaagctgaaaaagaatcccaagggggactggaaagatattaatttttttgaccaactaaaaattattagaaatgcaagaaaatttggacattaactttggattaaaaaattggttgaagttaacaattcttcaagtattggattaaattacaaacttttgggcattggtttagttcttggaccaccgttgggggtgaaggattgctttatttattgaatggggagcattttcaagttctggcacttcattgtacaagatacct

SEQ ID NO: 78972 - DNA, 376 bp, Glycine max
ggctgatgatatcatcaattttgaggcttttccccacaggctggtgcattttggagagattcaggaccaccgttgtattgaaattttcacaagaggaatttcttacagcttggtcaactcaggtgcgtcctgcaacaactctgttggctgatgggtgtccatatttgtatgcaatggtgcatgatagttcagtgtctacaataccaggtgattttgtcattggtgtcaagttgacaaccataaacaatatgtgtgcatatgggctcaatcctggtatttcaggttctcgtcttttgggcaccattcctcagtccatttcacagcaaactgtttggaatcaaatggcaacagtgagaacaccattgaattttgattc

SEQ ID NO: 78973 - DNA, 373 bp, Glycine max
gtttggaatcaaatggcaacagtgagaacaccattgaattttgattctagcaagcagagcttttgtcagttttctattgaccttctcggtggaggaatcttagtggacaaaactggagattggatcacacttatacaaaattctccaattagtaacttgttgagagttgctgcttggaagaaaggctgtttaatggtcaagattgtgatgtctgggaatgcagcagtcaaaaggagtgattgggcctcattggtacaagtgtttttaacaaacagcaacagtacagagcattttgatgcatgtaagtggacaaaatcagaaccacattcctgggaattgatcttcccaataaaggtatgtggtcctaaataat

SEQ ID NO: 78974 - DNA, 116 bp, Glycine max
atgcacccgtacgtaagctcgaaattcggttcgggaaaaaaaaaaaaaaaaaatttaaaaaaaaaaaaaaaaaaaaaaaaaaaaaaaaattaaaaaaaaaaaaaaaaaaaaccaaa

SEQ ID NO: 78975 - DNA, 302 bp, Glycine max
  unsure (1)..(302): unsure at all n locations
aacatgacgatttcttgaagaaaaaaaaaanaaaaagcccgcnattttttaaaaaaggggaaccgccccccccccaccgnaaagacngaaaagagnnacancgagactggagacaaggangacacagcagcngaacaagaaaggaagcgcaagaggggaacgaacggaacaagaacgaacngaacacagagacaagaaggaacaaagaagaaaacacaacaaacaaacaggaaggcaacaccaaaaaaaaaaacaaaagaaaaaaaaaaaaaagaaaaaaaaaaaaaaaaaaaagaagaggc

SEQ ID NO: 78976 - DNA, 388 bp, Glycine max
gtctttgtggtggtgatgaaaaattgatgcgtgaaaggacgcacctgctgttggcttgttgttcaaggatggcaatttgtaagaaagatgtttggagagttgaatgtggaatcccttctggatttccgctcacagttatttgcaatagcatttttaatgagatgctcattagatatagctatgaaaaattactgcgccaggctaaagctccaagtatgtttttacaatccttcaaaaattttgtttctttgtgtgtgtatggtgatgataacttaattagtgttcatgaatatgtcaagccttactttagtggttctaaattgaaaagctttctagctagtcataacatcaccattactgatggtattgacaaaactagtgcaacttt

SEQ ID NO: 78977 - DNA, 381 bp, Glycine max
ccgattagaagtataaatttttctttgcgacaggaaaatagaagtatagatgtgactctttcccgttgtttatctttggacaggccagagcgtctcggcgaaaaatcaccgtaaagggatccgggtcgggtgggtaataactaatgtgttttgttttgggtatatagttcgagaaccatcgctgaaaggtgtcggaaataataatacgataagattgggtcactcactgtaaagaaatctttgcaatctaattaaatcatcaatagataaataaattaaaaaaataaaaaattctgcaacccgacgaacaccataaaagagctactcttgcacttctaaattcctttctttcatttcggtttccccattcaacgattctcg

SEQ ID NO: 78978 - DNA, 82 bp, Glycine max
ctcgagccgctcgagccgttttagcggctcgagaaaaaaaaaaaaggggggaatttaaaaaaagggggggaaaaccccacac

SEQ ID NO: 78979 - DNA, 64 bp, Glycine max
aaaaaaaaactaacaaattaattttttatataaaaaaaaaaaaaaaccggcggtaatataaaaa

SEQ ID NO: 78980 - DNA, 252 bp, Glycine max
aaaaaaaaatttatttttaaaaaaaaaaaaaaaaaaaaggagggggaaaaaaaaaaaaagggaggggaaaaaaaaaaaaaaaaaaaaaaaaaaaaaaaaaaaaaaaaaaaaataaaaaaaaaataaaaaaaaaaaaaaaaaacaaaacatcaatcaatgtttaatctacaaaggggggcgaccctgttttaaaccgatcctttccggtcttaaaaaccacacgcgtatcttgaggatgttattttttttttt

SEQ ID NO: 78981 - DNA, 190 bp, Glycine max
ataaggcacaatttgttgcttgaataacccctaaacctaagttatgggagctgacaaaatctgttacacacatatttctgaactgatatacatcgaactgccaagaaggtgacgcctgactgatacatagaatatagctttaatccagcgaggttcacgctcatatggagacaaatctgcatgaaccgat

SEQ ID NO: 78982 - DNA, 366 bp, Glycine max
tgaattgtggaatcctgcttgcacaaaagcaatgactatgtcatttaatccaaacccgtgttctgatgcatggagtttggaatttctgaagcgtactggatttcattgcgatatcatttgtgtcactggatggactgccaccccaatgcaggatgttcaggttacaattgattggtttatttcctctcaggaatgtgttcccaggacctattgtgttttaaatccacaaaatccttttgtgttaaataggtggatgggaaaattgactttcccccagggcacttcccgaagtgttaagagaatgcctctttctatagggggaggagctggtgcaaagaatgctattctcatgaatatgccaaatgc

SEQ ID NO: 78983 - DNA, 368 bp, Glycine max
cgaccagagacggccacgccgcagaagccgacgtacgagggcctggaggtggacaagggctctctgcccgccggcactaacccgctgccggttactacattgccacgtctgtggagccaaacgtgaaggacggagcggctaatgccaacgagactctgaccctgctcgcgcccaatgacaacgactatgccgcattcgagccgatcatctcgcagctggcctcgacgatcgactcgctcacgtcatcgctggcgaccccaagctcgggtgactctgcaaagatcttgaccaaagcgcaagacgacctcgcggcgttgagcgaccggctcatcgaagtgaagaaaactgagaaagagaggctggagaag

SEQ ID NO: 78984 - DNA, 412 bp, Glycine max
cgccaattgagaaggaaagctctctctcgtattgaatggctgcaaaaagctgatgtgcctaccatagcacagattgaagagttccattcaatgcagaggatgatgaatgctcctgattcaaatgataatattgatttactgttgagcattgatttgttgggtttacaaggagcaggtaaagcttttccaaacaaaattgtttttgatgataagcttgtgttggctaacacacaagaattctttgatggaaattttccagtggattcttggttaccaatttttgtgaattgtctttatcctgtaagtcaattaccttcagaagctgtcgttgtaaatgttacatgtggtagtggacggtgtggtttacccaccactgcttggattagttctgcagttaacaatcgctcctcag

SEQ ID NO: 78985 - DNA, 400 bp, Glycine max
tttctattgaccttctcggtggaggaatcttagtggacaaaactggagattggatcacacttatacaaaattctccaattagtaacttattgagagttgctgcttggaagaaaggctgtttaatggtcaagattgtgatgtctgggaatgcagcagtcaaaaggagtgattgtgcctcattggtacaagtgtttttaacaaacagcaacagtacagagcattttgatgcatgtaagtggacaaaatcagaaccacattcctgggaattgatcttcccaatagaggtatgtggtcctaataatggttttgaaatgtggagttctgagtgggcaaatcaaacttcatggcatttgagtttccttattgacaatcccaaacagtctacagtttttgatattct

SEQ ID NO: 78986 - DNA, 414 bp, Glycine max
agcttatcttgtcaacctcgtaaatgtgttacgagaagtgtatttgcacagtccagaggaagctcgccaattgagaaggaaagctctctctcgtattgaatggctgcaaaaagctgatgtgcctaccatagcacagattgaagagttccattcgatgcagaggatgatgaatgctcctgattcaaatgataatattgatttactgttgagcattgatttgttgggtttacaaggagcaggtaaagcttttccaaacaaaattgtttttgatgataagcttgtgttggctaacacacaagaattctttgatggaaattttccagtggattcttggttaccaatttttgtgaattgtctttatcctgtaagtcaattaccttcagaagctgtcgttgtaaatgttacatgtggtag

SEQ ID NO: 78987 - DNA, 406 bp, Glycine max
aaatttggctgatgataccatcaattttgaggcttttccccacaagctggtgcagtttggagagattcaggaaaaagttgtattgaaattttcacaagaggaatttcttacagcttggtcaactcaggtgcgtcctgcaacaactctgttggctgatgggtgtccatatttgtatgcaatggtgcatgatagttcagtgtctacaataccaggtgattttgtcattggtgtcaagttgacaaccataaacaatatgtgtgcatatgggctcaatcctggtatttcaggttctcgtcttttgggcaccattcctcagtccatttcacagcaaactgtttggaatcaaatggcaacagtgagaacaccattgaattttgattctagcaagcagagctttttgtcagtt

SEQ ID NO: 78988 - DNA, 408 bp, Glycine max
ctagttttgatggtttgattaccaagcaagttatgagcaagatggcagaaatgataaacagtctttgtggtggtgatgaaaaattgatgcgtgaaaggacgcacctgctgttggcttgttgttcaaggatggcaatttgtaagaaagatgtttggagagttgaatgtggaatcccttctggatttccgctcacagttatttgcaatagcatttttaatgagatgctcattagatatagctatgaaaaattactgcgccaggctaaagctccaagtatgtttttacaatccttcaaaaattttgtttctttgtgtgtgtatggtgatgataacttaattagtgttcatgaatatgtcaagccttaacttagtggttctaaattgaaaagctttctagctagtcataaca

SEQ ID NO: 78989 - DNA, 377 bp, Glycine max
cagcagtcaaaaggagtgattgggcctcattggtacaagtgtgtttaacaaacagcaacagtacagagcattttgatgcatgtaagtggacaaaatcagaaccacattcctgggaattgatcttcccaatagaggtatgtggtcctaataatggttttgaaatgtggagttctgagtgggcaaatcaaacttcatggcatttgagtttccttattgacaatcccaaacagtctacagtttttgatattctcttgggaatctctcaagattttgaaattgctggtaatactcttatgccagctttttctgttccacaggctactgccagatcttctgaaaatgcggaatcctctgcatgatctggaatttgtgttttc

SEQ ID NO: 78990 - DNA, 424 bp, Glycine max
tgggaatgcagcagtcaaaaggagtgattgggcctcattggtacaggtgtttttaacaaacagcaacagtacagagcattttgatgcatgtaagtggacaaaatcagaaccacattcctgggaattgatcttcccaatagaggtatgtggtcctaataatggttttgaaatgtggagttctgagtgggcaaatcaaacttcatggcatttgagtttccttattgacaatcccaaacagtctacagtttttgatattctcttgggaatctctcaagattttgaaattgctggtaatactcttatgccagctttttctgttccacaggctactgccagatcttctgaaaatgcggaatcctctgcatgatctggaatttgtgttttctttcgcttgttcgtttgtttaattcaataaaggaaatta

SEQ ID NO: 78991 - DNA, 272 bp, Glycine max
gcaatgagtgtgtttaaatataaaaaaaaaaaaaaaaaagagagaaaaaaaaaaaaaaaaaaaaaaaaaaaaaaaaaaaaaaaaaaaaaaaaaaaaaaaaaaaaaaaaaagaaaaaaaaaaaaaaaaaaaaaccagaaagtaaaaaaaaaaaagcgaaaaaaaaacagaaaaaaaacaacggcaaaaaaaaaaggaaaaaacaaaaacatttatcacataaaatacgaaacccaatgcccaaacaagaaacgccaccggaataacaaaaaga

SEQ ID NO: 78992 - DNA, 421 bp, Glycine max
agcattttgatgcatgtaagtggacaaaatcagaaccacatggctgggaattgatcttcccaatagaggtatgtggtcctaataatggttttgaaatgtggagttctgagtgggcaaatcaaacttcatggcatttgagtttccttattgacaatcccaaacagtctacagtttttgatattctcttgggaatctctcaagattttgaaattgctggtaatactcttatgccagctttttctgttccacaggctactgccagatcttctgaaaatgcggaatcctctgcatgatctggaatttgtgttttctttcgcttgttcgtttgtttaattcaataaaggaaattaggcatgaccctcttgttgagtatgctctgcctatttgaaaattttcacacctcttttaattgtcgtaatga

SEQ ID NO: 78993 - DNA, 421 bp, Glycine max
  unsure (1)..(421): unsure at all n locations
tgggtgtccatatttgtttgcaatggtgcatgatagttcagggtgtacaataccaggtgattttgtcattggtgtcaagttgacaaccataaacaatatgtgtgcatatgggctcaatcctggtatttcaggttctcgtcttttgggcaccattcctcagtccatttcacagcaaactgtttggaatcaaatggcaacagtgagaacaccattgaattttgattctagcaagcagagcttttgtcagttttctattgaccttctcggtggaggaatcttagtggacaaaactggagattggatcacacttatacaaaattctccaattagtaacttattgagagtngctgcttggaagaaaggctgtttaatggtcaagattgtgatgtctgggaatgcagcagtcaaaaggagtgattgg

SEQ ID NO: 78994 - DNA, 399 bp, Glycine max
tgggaattgatcttcccaatagaggtatgtggtcctaataatggggttgaaatgtggagttctgagtgggcaaatcaaacttcatggcatttgagtttccttattgacaatcccaaacagtctacagtttttgatattctcttgggaatctctcaagattttgaaattgctggtaatactcttatgccagctttttctgttccacaggctactgccagatcttctgaaaatgcggaatcctctgcatgatctggaatttgtgttttctttcgcttgttcgtttgtttaattcaataaaggaaattaggcatgaccctcttgttgagtatgctctgcctatttgaaaatttccacacctcttttaattgtcgtaatgatgtgtgaagtgtgtgttatttt

SEQ ID NO: 78995 - DNA, 417 bp, Glycine max
gcatgatagttcagtgtctacaataccaggtgattttgtcattggtgtcaagttgacaaccataaacaatatgtgtgcatatgggctcaatcctggtatttcaggttctcgtcttttgggcaccattcctcagtccatttcacagcaaactgtttggaatcaaatggcaacagtgagaacaccattgaattttgattctagcaagcagagcttttgtcagttttctattgaccttctcggtggaggaatcttggtggacaaaactggagattggatcacacttatacaaaattctccaattagtaacttgttgagagttgctgcttggaagaaaggctgtttaatggtcaagattgtgatgtctgggaatgcagcagtcaaaaggagtgattgggcctcattggtacaagtgttttt

SEQ ID NO: 78996 - DNA, 421 bp, Glycine max
gaaaagagttacttcatcatcatcatcaacatgagtcgcttcaacagtcagcaagaatcccctggtgagttttgattatatcattcagcataatgttagcaaaatggtttcatgtgtgaagtttcttttgatccaaatagattgacaccatatttgcatgctcaatgttcattcaataatatgtactttcttttacataaagcttaagctaaaattaatttgttacttttcatgagaaatgtgagtgtatttctaaatgggattaatgacatgatattatgatgcagcagtatcatatcctccagcactgtatgttagtgccccaccacctatgggttatccttccaaaggtgatcctacagctgtagggtacccccaacaaagagttccagaagaaaccacaagcaggggtgatggattt

SEQ ID NO: 78997 - DNA, 414 bp, Glycine max
ctcgagccgcaatatgtgtgcatatgggctcaatcctggtgtgtcaggttctcgtcttttgggcaccattcctcagtccatttcacagcaaactgtttggaatcaaatggcaacagtgagaacaccattgaattttgattctagcaagcagagcttttgtcagttttctattgaccttctcggtggaggaatcttagtggacaaaactggagattggatcacacttatacaaaattctccaattagtaacttgttgagagttgctgcttggaagaaaggctgtttaatggtcaagattgtgatgtctgggaatgcatcagtcaaaaggagtgattgggcctcattggtacaagtgttcttaacaaacagcaacagtacatagcattttgatgcatgtaagtggacaaaatcaga

SEQ ID NO: 78998 - DNA, 411 bp, Glycine max
gcaagatggcagaaatgataaacagtctttgtggtggtgatgaaaaattgatgcgtgaaaggacgcacctgctgttggcttgttgttcaaggatggcaatttgtaagaaagatgtttggagagttgaatgtggaatcccttctggatttccgctcacagttatttgcaatagcatttttaatgagatgctcattagatatagctatgaaaaattactgcgccaggctaaagctccaagtatgtttttacaatccttcaaaaattttgtttctttgtgtgtgtatggtgatgataacttaattagtgttcatgaatatgtcaagccttactttagtggttctaaattgaaaagctttctagctagtcataacatcaccattactgatggtattgacaaaactagtgcaactt

SEQ ID NO: 78999 - DNA, 316 bp, Glycine max
cggctcgaggttccttccggtcgctgtaatcggtttggctgagaggggaatcgaaaatcaattgaggaagaaggatgtcggtgacagcgggtgttagtgatactgtgatagcagttagggataagctcagaggtaaaattggccaaactaaagttaagcgttttttggccttgtaaagtttctgaatgggcttttgacttttaacctattatgcttttcttcttaatttttatttcgacccttctactatatgtatatctcttcgcttaattgttctttttatatattatttttcttttcttgttatcttctgatt

SEQ ID NO: 79000 - DNA, 318 bp, Glycine max
catcagaggagttgtaaattaagagcatggctgcacaagctcgggtatcatcatcttctcttaccttctcagcggaggctgcaagacaaagtcttggaccaagatcactccaatctccatttggcttctccagaaaagcctcctttcttgttaaggcagctgctaccccccctgtcaagcaaggatcagacagacctttgtggtttgcatcaaagcaaagtctttcttacttggatggcagccttccgggtgactatggatttgaccctctgggactttcagaccctgaaggaacaggagggttcattgagccgaaat

SEQ ID NO: 79001 - DNA, 375 bp, Glycine max
ggagaaacgcaatcttcgtcgccttgctgaaaaaaaaaaaaaggaggaaattataaaaaaaaaaaaaaaaaaaaaaaaaaaaaaaaaaaaaaaaaaaaaaaaaaaaaaaaaaaaaaaaaaaaaaaaaaaaaaaaaaaaaaaaaaaaaaaaaaaaaaaaaaaaaaaaaaaaaaaaaaaaaaaagggggcgcccccccttatttgacctttcccccccgaaatttattttcgccccgtccccttaaggccccccatttttctttttatgaagtcttttaaaatttgggctaaatatttgaataagtttttcccttttaaaattttttttcctttaaaatttccccacaattttctaccctaaattttaaattttaaa

SEQ ID NO: 79002 - DNA, 352 bp, Glycine max
aaaaaaaaaaaaaattaaaaaaaaaaaaaaaaaaaaaaaggaggggaaaaaaaaaaaaaaaaaaaaaaaaaaaaaaaaaaaaaaaaaaaaaaaaaaaaaaaaaaaaaaaaaaaaaaaaaaaaaaaaaaaaaaaaaggggcggccccccctttttaacctttcccccccggaaataaattccggcccggtccctgagggcttcccaattttccttttagggggtcgttttaaacctgggcgaaaaaatggcaaaagcttttccctgggaaaaatttttttcccctaaaaattccaaaaaaaaaacaacccgaaatcttaaagttaaaaccctggggtccctaatggggggcct

SEQ ID NO: 79003 - DNA, 418 bp, Glycine max
aaaattttgtttctttgtgtgtgtatggtgatgataacttaatgagtgttcatgaatatgtcaagccttactttagtggttctaaattgaaaagctttctagctagtcataacatcaccattactgatggtattgacaaaactagtgcaactttgcaatttagaaagttagcagattgtgattttctcaagagaaactttaagcagatgtctaatgttttgtgggtggctcctgaggacaaggcgagtttatggtcacaacttcattatgtttcgtgtaataatctggaaatgcaagaagcttatcttgtcaatctcgtaaatgtgttacgagaattgtatttgcacagtccagaggaagctcgccaattgagaaggaaagctctctctcgtattgaatggctgcaaaaaagctgatg

SEQ ID NO: 79004 - DNA, 371 bp, Glycine max
gtaatgatgtgtgaagtgtgtgttattttaaaaaaaaaaaaagaaagaaaaaaaaaaaaaaaaaaaaaaaaaaaaaaaaaaaaaaaaaaaaaaaaaaaaaaaaaaaaaaaaaaaaaaaaaaaaacaaaaaaaaaaaaaaaaagggccccccccccactatggaccccacccccccctaaataaaatccggcccgttcccggaagcccacccaactttccttatagaaaactttttaaaacctggccgaatccatgaacataacttctccctgaaaaaaattgtaatccgctcacattcccacacaaaatacgtcccgcaaacttaaatggtaaacccttggctccctaatgagccacctacctcccattat

SEQ ID NO: 79005 - DNA, 407 bp, Glycine max
gtcatttaatccaaacccgtgttctgatgcatggagtttggagttgctgaagcgtactggatttcattgcgatatcatttgtgtcactggatggactgccaccccaatgcaggatgttcaggttacaattgattggtttatttcctctcaggaatgtgttcccaggacctattgtgttttaaatccacaaaatccttttgtgttaaataggtggatgggaaaattgactttcccccagggcacttcccgaagtgttaagagaatgcctctttctatagggggaggagctggtgcaaagaatgctattctcatgaatatgccaaatgctgttctttcaatgtggagatattttgttggagatctcgtctttgaagtttctaagatgacttctccctacattaaatgta

SEQ ID NO: 79006 - DNA, 396 bp, Glycine max
ttttgttggagatctcgtctttgaagtttctaagatgacttcgccctacattaaatgtacagtctctttcttcatagcatttggaaatttggctgatgataccatcaattttgaggcttttccccacaagctggtgcagtttggagagattcaggaaaaagttgtattgaaattttcacaagaggaatttcttacagcttggtcaactcaggtgcgtcctgcaacaactctgttggctgatgggtgtccatatttgtatgcaatggtgcatgatagttcagtgtctacaataccaggtgattttgtcattggtgtcaagttgacaaccataaacaatatgtgtgcatatgggctcaatcctggtatttcaggttctcgtcttttgggcaccattcc

SEQ ID NO: 79007 - DNA, 417 bp, Glycine max
ctcgagccgctcgagccgcttcattatgtttcgtgtaataatggggaaatgcaagaagcttatcttgtcaatctcgtaaatgtgttacgagaattgtatttgcacagtccagaggaagctcgccaattgagaaggaaagctctctctcgtattgaatggctgcaaaaagctgatgtgcctaccatagcacagattgaagagttccattcgatgcagaggatgatgaatgctcctgattcaaatgataatattgatttactgttgagcattgatttgttgggtttacaaggagcaggtaaagcttttccaaacaaaattgtttttgatgataagcttgtgttggctaacacacaagaattctttgatggaaattttccagtggattcttggttaccaatttttgtgaattgtctttat

SEQ ID NO: 79008 - DNA, 324 bp, Glycine max
caaacttcatggcatttgagtttccttattgacaatcccaaagagtctacagtttttgatattctcttgggaatctctcaagattttgaaattgctggtaatactcttatgccagctttttctgttccacaggctactgccagatcttctgaaaatgcggaatcctctgcatgatctggaatttgtgttttctttcgcttgttcgtttgtttaattcaataaaggaaattaggcatgaccctcttgttgagtatgctctgcctatttgaaaatttccacacctcttttaattgtcgtaatgatgtgtgaagtgtgtgttatttt

SEQ ID NO: 79009 - DNA, 411 bp, Glycine max
gtgagaacaccattgaattttgattctagcaagcagagcttttgtgagttttctattgaccttctcggtggaggaatcttagtggacaaaactggagattggatcacacttatacaaaattctccaattagtaacttattgagagttgctgcttggaagaaaggctgtttaatggtcaagattgtgatgtctgggaatgcagcagtcaaaaggagtgattgggcctcattggtacaagtgtttttaacaaacagcaacagtacagagcattttgatgcatgtaagtggacaaaatcagaaccacattcctgggaattgatcttcccaatagaggtatgtggtcctaataatggttttgaaatgtggagttctgagtgggcaaatcaaacttcatggcatttgagtttcctt

SEQ ID NO: 79010 - DNA, 411 bp, Glycine max
caacaacaaagattccaaacaccgaaccaattgcccttaaataactgaattgctcaaacttcagatattccgtctagtattttgactgcagagaagttgctttcttctggattatcccaagatccccaaatgttgaatatgttgcagcagcaacacttgctgcagttgcattctcaggcagcagcggctccttcacaaccaatgcctttgatagataaacttctattgctgaagcagcaacagcagcaggaggagcaacagctgttattacgccaacaacaacagcaggaggagcaacagctgttattgcgccaacaacagcagctgctttctcaagtgcttcaggagcatcagtctcaccagcgctttggcaatttatctcatcaacagctgcagggaggtggaataccc

SEQ ID NO: 79011 - DNA, 388 bp, Glycine max
tgataacttaattagtgttcatgaatatgtcaagccttacttgagtggttctaaattgaaaagctttctagctagtcataacatcaccattactgatggtattgacaaaactagtgcaactttgcaatttagaaagttagcagattgtgattttctcaagagaaactttaagcagatgtctaatgttttgtgggtggctcctgaggacaaggcgagtttatggtcacaacttcattatgtttcgtgtaataatctggaaatgcaagaagcttatcttgtcaatctcgtaaatgtgttacgagaattgtatttgcacagtccagaggaagctcgccaattgagaaagaaagctctctctcgtattgaatggcttcaaaaaagctgatgt

SEQ ID NO: 79012 - DNA, 392 bp, Glycine max
gctcaatcctggtatttcaggttctcgtcttttgggcaccattcctcagtccatttcacagcaaactgtttggaatcaaatggcaacagtgagaacaccattgaattttgattctagcaagcagagcttttgtcagttttctattgaccttctcggtggaggaatcttagtggacaaaactggagattggatcacacttatacaaaattctccaattagtaacttattgagagttgctgcttggaagaaaggctgtttaatggtcaagattgtgatgtctgggaatgcagcagtcaaaaggagtgattgggcctcattggtacaagtgtttttaacaaacagcaacagtacagagcattttgatgcatgtaagtggacaaaatcagaaccac

SEQ ID NO: 79013 - DNA, 401 bp, Glycine max
gttaattgtggagtattttggaaggatgtcttacgttgctcataacgttaatcagccccaagagaaagatttgttggagggaaatttttcctttgatattaaatctcgctctagattggaaaaagtttcctctacaaaagcacaatttgttagtggaaaaaccttcaaatatgatataattggtgctggttcacattcttcagaagattttcctgaaaaggaagatcaagaaaaacccaaaaagattgatgccagattgagacaaagaatagatcctcaatacaatgaggttcaggctcagatggaaacaaatttgtttaaattgtctcttgatgatgttgaaactcctaaaggttccatgttggatctgaaaatttctcaatctaaaattgcactttcca

SEQ ID NO: 79014 - DNA, 332 bp, Glycine max
ctcatattttcatttccaaaactcaaacaatgcctagttaaattaaaaacaaggcaaatattagggtgcgtaattaggcaccgtgcgaaagttattacaatgcgatcacaaccgttggattttgttgattttaaatcaatggttcaaatttttctttcttttttttttatttttttatttttttcttacttttcctaatttacccccaccatctaccctcccccgcggtggaagcccaaggcaacaccgtccgcgcccttaaggccgtcaaaagccgccaacccgaaatcgacgccccaatcgaagccctaaacgcgctgaagcttggaaaa

SEQ ID NO: 79015 - DNA, 388 bp, Glycine max
gttcagtgtctacaataccaggtgattttgtcattggtgtcaagttgacaaccataaacaatatgtgtgcatatgggctcaatcctggtatttcaggttctcgtcttttgggcaccattcctcagtccatttcacagcaaactgtttggaatcaaatggcaacagtgagaacaccattgaattttgattctagcaagcagagcttttgtcagttttctattgaccttctcggtggaggaatcttagtggacaaaactggagattggatcacacttatacaaaattctccaattagtaacttgttgagagttgctgcttggaagaaaagcttgttaatggtcaagattgtgatgtctgggaatgcagcagtcaaaaagagtgattgggc

SEQ ID NO: 79016 - DNA, 304 bp, Glycine max
atcaattcgtctcgtcatgtttgctagacagatcttccggccggccaggacgttgcaccagcaagatctccgttacgcatccgagccgcccaagagcggaggcaacaatggtgtcctctacacatgtattggcgctgctggtcttgctggttcctacctatacatgatgggcggtgaagctctttttgggcttaaaggaaatgcgccgtccttagaagagtccaagaaaatccccgcttctaccgacggctcggtcaagaatgctttcactgtatgcgaccagggctttggatcatttgtgctt

SEQ ID NO: 79017 - DNA, 394 bp, Glycine max
ctcgagccgctcgagccgtgctgcttggaagaaaggctgtttaatggtcaagattgtgatgtctgggaatgcagcagtcaaaaggagtgattgggcctcattggtacaagtgtttttaacaaacagcaacagtacagagcattttgatgcatgtaagtggacaaaatcagaaccacattcctgggaattgatcttcccaatagaggtatgtggtcctaataatggttttgaaatgtggagttctgagtgggcaaatcaaacttcatggcatttgagtttccttattgacaatcccaaacagtctacagtttttgatattctcttgggaatctctcaagattttgaaattgctggtaatactcttatgccagctttttctgttccacaggctact

SEQ ID NO: 79018 - DNA, 396 bp, Glycine max
gtgattttgtcattggtgtcaagttgacaaccataaacaatatgtgtgcatatgggctcaatcctggtatttcaggttctcgtcttttgggcaccattcctcagtccatttcacagcaaactgtttggaatcaaatggcaacagtgagaacaccattgaattttgattctagcaagcagagcttttgtcagttttctattgaccttctcggtggaggaatcttagtggacaaaactggagattggatcacacttatacaaaattctccaattagtaacttattgagagttgctgcttggaagaaaagctgtttaatggtcaagattgtgatgtctgggaatgcagcagtcaaaaggagtgattgggcctcattggtacaagttgttttaacaaaca

SEQ ID NO: 79019 - DNA, 390 bp, Glycine max
tggagatctcgtctttgaagtttctaagatgacttctccctacattaaatgtacagtctctttcttcatagcatttggaaatttggctgatgataccatcaattttgaggcttttccccacaagctggtgcagtttggagagattcaggaaaaagttgtattgaaattttcacaagaggaatttcttacagcttggtcaactcaggtgcgtcctgcaacaactctgttggctgatgggtgtccatatttgtatgcaatggtgcatgatagttcagtgtctacaataccaggtgattttgtcattggtgtcaagttgacaaccataaacaatatgtgtgcatatgggctcaatccttgtatttcaggttctcgtcttttgggcaccattcc

SEQ ID NO: 79020 - DNA, 206 bp, Glycine max
ctcgagccgaatcggctcgaggcaggtaaagcttttccaaacaaaattgtttttgatgataagcttgtgttggctaacacacaagaattctttgatggaaattttccagtggattcttggttaccaatttttgtgaattgtctttatcctgtaagtcaattaccttcaaaagctgtcgttgtaatgttacatgtgggagtggacgt

SEQ ID NO: 79021 - DNA, 399 bp, Glycine max
caaagaatgctattctcatgaatatgccaaatgctgttctttcaatgtggagatattttgttggagatctcgtctttgaagtttctaagatgacttctccctacattaaatgtacagtctctttcttcatagcatttggaaatttggctgatgataccatcaattttgaggcttttccccacaagctggtgcagtttggagagattcaggaaaaagttgtattgaaattttcacaagaggaatttcttacagcttggtcaactcaggtgcgtcctgcaacaactctgttggctgatgggtgtccatatttgtatgcaatggtgcatgatagttcagtgtctacaataccaggtgattttgtcattggtgtcaagttgacaaccataaacaatatgtgtg

SEQ ID NO: 79022 - DNA, 400 bp, Glycine max
caaaatatagccgcgggcacatatcacttcatcctaatgacatggttcttttaattacttttgagatacatgcattttaactgaataaaccaagttgatagctactctaatgaatatataaatgatttgttcattacgtatgtatgtgtaggcttattgggattggtcatgggatgaattagctaggtatgatcttcctgcttttgttcagtatgtgtacaatcaaaccggccagcgaatgcactatgcaggtcattccttggtatgttcctaatttctttcttttgttttcaggttttgtaaagtcaggttaaacaatttaggagcctatatttttactgaattttgtcttgattccatatgctttaaaggttcgattaccagtacccctagactttca

SEQ ID NO: 79023 - DNA, 401 bp, Glycine max
gatgaaaaattgatgcgtgaaaggacgcacctgctgttggcttgttgttcaaggatggcaatttgtaagaaagatgtttggagagttgaatgtggaatcccttctggatttccgctcacagttatttgcaatagcatttttaatgagatgctcattagatatagctatgaaaaattactgcgccaggctaaagctccaagtatgtttttacaatccttcaaaaattttgtttctttgtgtgtgtatggtgatgataacttaattagtgttcatgaatatgtcaagccttactttagtggttctaaattgaaaagctttctagctagtcataacatcaccattactgatggtattgacaaaactagtgcaactttgcaatttagaaagttagcagattgtga

SEQ ID NO: 79024 - DNA, 394 bp, Glycine max
gcaatttagaaagttagcagattgtgattttctcaagagaaactttaagcagatgtctaatgttttgtgggtggctcctgaggacaaggcgagtttatggtcacaacttcattatgtttcgtgtaataatctggaaatgcaagaagcttatcttgtcaatctcgtaaatgtgttacgagaattgtatttgcacagtccagaggaagctcgccaattgagaaggaaagctctctctcgtattgaatggctgcaaaaagctgatgtgcctaccatagcacagattgaagagttccattcgatgcagaggatgatgaatgctcctgattcaaatgataatattgatttactgttgagcattgatttgttgggtttacaaggagcaggtaaagctttt

SEQ ID NO: 79025 - DNA, 143 bp, Glycine max
gggacatggtgagttatcatgaaactattaatgctattgcggcgacaaaattgaaggtgcatcatgttactcatgaaaatgaagcttattgctgataagctagttatcattttaaactctcttagttaattctgttgctgatc

SEQ ID NO: 79026 - DNA, 387 bp, Glycine max
gtgtttttaacaaacagcatcagtacagagcattttgatgcatgtaagtggacaaaatcagaaccacattcctgggaattgatcttcccaatagaggtatgtggtcctaataatggttttgaaatgtggagttctgagtgggcaaatcaaacttcatggcatttgagtttccttattgacaatcccaaacagtctacagtttttgatattctcttgggaatctctcaagattttgaaattgctggtaatactcttatgccagctttttctgttccacaggctactgccagatcttctgaaaatgcggaatcctctgcatgatctggaatttgtgttttctttcgcttgttcgtttgtttaattcaataaaggatattaggcatgacc

SEQ ID NO: 79027 - DNA, 271 bp, Glycine max
aaattagtaaaatgacagattttctgtaattttttcttgaagattttaatgttatgtgaccgtttattttgttttaaaaaaaaaaaaaaaaaaaaaaaaaaaaaaaaaaaaaaaaaaaaaaaaaaaaaaaaaaaaaaaaaaaaaaaaaaaaaataaaataaaaaaataaaaaaaaaaaaaaaaaaaaaaaaaaatgggggggccgccataaattgatctttttaacctggaaataaatttggtacaggaatcctgaaggcgtaccattttt

SEQ ID NO: 79028 - DNA, 251 bp, Glycine max
gaaaaaagtagggtagaatttccgagtcgtctagcctagtaaaaagcaatagcccctgcctcaactccacaatcacaatcatttgtaaagtaaaaaagggtggtttgctggcttgctcgtgcaatctacgataaattcgttcattcacatgttttattttatctgtttgactcagaaggaggagaagacgaagccgaatatacagatagaatcgtttccagcgcaccgatgggagacggggcccccgcaag

SEQ ID NO: 79029 - DNA, 395 bp, Glycine max
agcaagttatgagcaagatggcagaaatgataaacagtctttgtggtggtgatgaaaaattgatgcgtgaaaggacgcacctgctgttggcttgttgttcaaggatggcaatttgtaagaaagatgtttggagagttgaatgtggaatcccttctggatttccgctcacagttatttgcaatagcatttttaatgagatgctcattagatatagctatgaaaaattactgcgccaggctaaagctccaagtatgtttttacaatccttcaaaaattttgtttctttgtgtgtgtatggtgatgataacttaattagtgttcatgaatatgtcaagccttactttagtggttctaaattgaaaagctttctagctagtcataacatcaccattact

SEQ ID NO: 79030 - DNA, 392 bp, Glycine max
tggaaatgcaagaagcttatcttgtcaatctcgtaaatgtgttacgagaattgtatttgcacagtccagaggaagctcgccaattgagaaggaaagctctctctcgtattgaatggctgcaaaaagctgatgtgcctaccatagcacagattgaagagttccattcgatgcagaggatgatgaatgctcctgattcaaatgataatattgatttactgttgagcattgatttgttgggtttacaaggagcaggtaaagcttttccaaacaaaattgtttttgatgataagcttgtgttggctaacacacaagaattctttgatggaaattttccagtggattcttggttaccaatttttgtgaattgtctttatcctgtaagtcaattacct

SEQ ID NO: 79031 - DNA, 402 bp, Glycine max
  unsure (1)..(402): unsure at all n locations
tctcacttctcggatgccctaatttatcatgtcagcgcttaacacctgtggttacgtctctacccttttttgggttcctctcattaccgaaaccgaaacagaaaccatttgtggtgaaccagtggatctcgaaggtcaaagatggccagcatcttctcgaagacgagttttaacttctctaggaatatgtgctcttcttcgattcctcgctgtcactccaaaaccctctcttgcccagtctttgctttgtttattttacccctttttttgtttattaaataggaatctgattatgcattttgttcccatcgccttttcgatccaagcctctgttcttctcacggttntgtccctttttcttgggatttttttggggaaacaaaattcttaatcctctctttg

SEQ ID NO: 79032 - DNA, 261 bp, Glycine max
ggcgtacactactaaaaggaataggagtttccctattgacaatcccgaacagtcgacgagttgggatgaacgcttggcaatctctaaagatgttgacatcgatggtaatactctaaagcctgctttatgtgtaccacaggctacggcgagatcttatgtctacgcgtgatcctctgcatgatctgggatttgggttttttttcgcttgttcgtctgtttaattccaaaaaatgtaaatttgcacgaccctccttgttgagg

SEQ ID NO: 79033 - DNA, 299 bp, Glycine max
aactagtgcaactttgcaatttagaaagttagcagattgtgattttctcaagagaaactttaagcagatgtctaatgttttgtgggtggctcctgaggacaaggcgagtttatggtcacaacttcattatgtttcgtgtaataatctggaaatgcaagaagcttatcttgtcaatctcgtaaatgtgttacgagaattgtttttttcacagtccatatgaagctctccaattgataaggaaagctctctttcgtattgaatggctgcaaaaagctgatgtgcctaccatagcacatatt

SEQ ID NO: 79034 - DNA, 396 bp, Glycine max
gtggcagttcaggctagaaaggaactccaaaggttggctgctaaaccagatatgcttgcaatgtcacttactgtaaaccctcagcatggtttaagtgatttatcagtaatctcccctagaactcctacttcaccaaactttcaggtgcctccttcctattgggatccacaatctgctggcaatgtcaatcctgactttattggaatgaattacttgtattctattgtagaacttcagaagcagacacatatgcttatctttggagaatcaaataaatgctgtaaaaactgggactggagggattgccaatgattactattgcttagatgcttttgctgtcaattttggtggaaaagcttggagaaggatttttgaaatttcaactaagatatgtca

SEQ ID NO: 79035 - DNA, 84 bp, Glycine max
cgagtcgacaagtttttaaaaagtgagattattgtctcaccgtgcatgctatctgcaaacttgtggatattgggagagcaggtg

SEQ ID NO: 79036 - DNA, 105 bp, Glycine max
gtacaatagctgtgtcagtctcccgttcatctggtggcaggcgatgagactatccttctgcttagtctgttccaaactttattgatttaagaaaattaaattcaa

SEQ ID NO: 79037 - DNA, 266 bp, Glycine max
caggttcttgtcttttgggcaccattcctcagtccatttcacagcaaactgtttggaatcaaatggctacagtgagaacaccattgaattttgattctagcaagcagagcttttgtcagttttctattgaccttctcggtggaggaatcttattggacaaaactggagattggatcacacttatacaaaattctccaattagtaacttgttgagagttgctgcttgtaagaaaggcttttaaatggtcaaaattgtgattgttttg

SEQ ID NO: 79038 - DNA, 122 bp, Glycine max
ggacgcacctgttgttggctagttgttcaaggatggcatcgtactgtgttagaagtttgtagagtcgccccctcccattccttatggatttccgcttacagatatttgcattagcattttta

SEQ ID NO: 79039 - DNA, 90 bp, Glycine max
ctttaagcagatgtctaatgttttgtgggtggctcctggggacattgctatattattgtcacagcttcattatgcttcgtgtaattaatc

SEQ ID NO: 79040 - DNA, 321 bp, Glycine max
tgggtgtccatatttgtatgcaatggtgcatgatagttcagtgtctacaataccaggtgattttgtcattggtgtcaagttgacaaccataaacaatatgtgtgcatatgggctcaatcctggtatttcaggttctcgtcttttgggcaccattcctcagtccatttcacagcaaactgtttggaatcaaatggcaacagtgagaacaccattgaattttgattctagcaagcagagcttttgtcagttttctattgaccttctcggtggaggaatcttagtggacaaaactggagattggatcacacttatacaaaattc

SEQ ID NO: 79041 - DNA, 292 bp, Glycine max
gcaagatacgtgggagggaagaatgcactttgatactaaatcgcgctctaaatcggtaaaagtttctctacaaaagcacattttggtagtggaaaaaccactagatctgatataataggtgctggttcacatgcttcaaaaccaaatactgaagaggaagatcacgaaaaacccaattcgattgatgccacattgacacaaacaacagatctaagatcgctgatgttgaggctcatatgtaaacaaatccttctaaattgactctaagagatgttgaaactaccaaaggatc

SEQ ID NO: 79042 - DNA, 217 bp, Glycine max
cccccttccttagcctcggaattcgcttcgagggaaatgggttcaccctattccaaattcttccatttattacctattgggaggtgcttcttggaagaaaggctggtttatggtccagaatgggatggctggggatgccaccatccaaaagggggaatgggccctattggttccaggggtttttaccaaccaccaccgttccaaacctttttgttcc

SEQ ID NO: 79043 - DNA, 213 bp, Glycine max
  unsure (1)..(213): unsure at all n locations
ccttccttaacttcgaatttcgcttcgngaaaaaaaaaaacaattttttttaaaattatacaattaaaaacggagggatattaaaaacttggagagaaaaactaaaaaaaaataaaaaattataataaaattaatatacaaaaataaaaaatgaaaaactttgccatcaatttattcaaatttatttacataacaaaagcggggcgccccctt

SEQ ID NO: 79044 - DNA, 392 bp, Glycine max
gagcattttgatgcatgtaagtggacaaaatcagaaccacattcctgggaattgatcttcccaatagaggtatgtggtcctaataatggttttgaaatgtggagttctgagtgggcaaatcaaacttcatggcatttgagtttccttattgacaatcccaaacagtctacagtttttgatattctcttgggaatctctcaagattttgaaattgctggtaatactcttatgccagctttttctgttccacaggctactgccagatcttctgaaaatgcggaatcctctgcatgatctggaatttgtgttttctttcgcttgttcgtttgtttaattcaataaaggaaattaggcatgaccctcttgttgagtatgctctgcctatttgaaaa

SEQ ID NO: 79045 - DNA, 394 bp, Glycine max
cggctcgagctcgagccgttctcttctccttcctcccgaaggaatctctctcatccttttttccttttccctctctacttcatacccttaatttctctacccacccatggctgcaccaccgacgaagtacacccaccacaccaaactactcataccccccggccccgaagaagatccacccaaacacccctatccaaaactcctcagaataaccgtcacagacaccgacgcaaccgactcctccagcgacgaagaacaaaccaacttttccacgcgccaccgacacagaaagctcatcaacgagatttctatcgccagagcttcagacactcggcgcggccagaaattccgcggagtgagacaaaggccctctgggaaaatggtccgcggagat

SEQ ID NO: 79046 - DNA, 395 bp, Glycine max
ctgttctttcaatgtggagatattttgttggagatctcgtctgtgaagtttctaagatgacttctccctacattaaatgtacagtctctttcttcatagcatttggaaatttggctgatgataccatcaattttgaggcttttccccacaagctggtgcagtttggagagattcaggaaaaagttgtattgaaattttcacaagaggaatttcttacagcttggtcaactcaggtgcgtcctgcaacaactctgttggctgatgggtgtccatatttgtatgcaatggtgcatgatagttcagtgtctacaataccaggtgattttgtcattggtgtcaagttgacaaccataaacaatatgtgtgcatatgggctcaatcctgtgatttaaggt

SEQ ID NO: 79047 - DNA, 102 bp, Glycine max
agagcttttaccttccattccccccttccttaagctcggaattcggttcgagaaaaaattaaaaaaaaacatcaaccgaaggggtcttttttcccaatccgt

SEQ ID NO: 79048 - DNA, 164 bp, Glycine max
cacttagtgacttcgtcaccccggaattaaattccggcccgtgccttgaaggcttccaacttttccttatagggggtcgtttaaaacctggccgtaataatggccatagctgttccctgggggaaatggtaatccgttaacatttccacacaaaatacaacccg

SEQ ID NO: 79049 - DNA, 392 bp, Glycine max
aggttctcgtcttttgggcaccattcctcagtccatttcacagcaaactgtttggaatcaaatggcaacagtgagaacaccattgaattttgattctagcaagcagagcttttgtcagttttctattgaccttctcggtggaggaatcttagtggacaaaactggagattggatcacacttatacaaaattctccaattagtaacttgttgagagttgctgcttggaagaaaggctgtttaatggtcaagattgtgatgtctgggaatgcagcagtcaaaaggagtgattgggcctcattggtacaagtgtttttaacaaacagcaacagtacagagcattttgatgcatgtaagtggacaaaatcagaaccacattcctgggaattgatct

SEQ ID NO: 79050 - DNA, 396 bp, Glycine max
cacaaggcagaaagcaagctcatcctagagttttaaaaatggcagcagcctcctccatggctctctcttccccatccttggctggcaaggccgtgaagctgggcccatcagcccccgaagtcgggagggtcagcatgaggaagaccgtcaccaagcaggcctcctccggaagcccatggtacggcccagaccgcgtcaagtacttgggcccattctctggcgagcccccgtcctacctcactggcgagttcccaggtgactacggctgggacactgctgggctttcggccgacccagaaaccttcgccagaaaccgtgagctcgaagtgatccactccaggtgggccatgcctcggggccttgggctgcgtcttccccgaactgttgtcccgcaac

SEQ ID NO: 79051 - DNA, 309 bp, Glycine max
cttaattagtgttcatgaatatgtcaagccttactttagtggttctaaattgaaaagctttctagctagtcataacatcaccattactgatggtattgacaaaactagtgcaactttgcaatttagaaagttagcagattgtgattttctcaagagaaactttaagcagatgtctaatgttttgtgggtggctcctgaggacaaggcgagtttatggtcacaacttcattatgtttcgtgtaataatctggaaatgcaagaagcttatcttgtcaatctcgtaaatgtgttaccagaattgtatttgca

SEQ ID NO: 79052 - DNA, 405 bp, Glycine max
tggaatttggtctcggggtttattttcccttattgggggagggaatagccccttaggcttgggcctcggttgtaatggtggcaaccaaccaccctaactttggcctttcctggtaaatcttccttggttgccactgcaaagtcctcgggggtggaaaccgaaccaggagcttgggttttggcaccccggcccacccttattaggaggaggattgaccccaaccatttttggacttgcaaaagggatgggaaatggaaatggggtaaaacctttttcattaatccctgacagaactcatcatcaaagaagctctaaaggaccagtggcattcttgggcgggatgtttgcggtatttttagactttgattgaatgaggagcccctcaagggaatggttactaggact

SEQ ID NO: 79053 - DNA, 66 bp, Glycine max
gtgaactagatagtagtattttatgcacttaaataaagcgcgtgactatgtgcaatgagcgtgttc

SEQ ID NO: 79054 - DNA, 394 bp, Glycine max
cagcagtcaaaatgagtgattgggcctcattggtacaagtgtttttaacaaacagcaacagtacagagcattttgatgcatgtaagtggacaaaatcagaaccacattcctgggaattgatcttcccaatagaggtatgtggtcctaataatggttttgaaatgtggagttctgagtgggcaaatcaaacttcatggcatttgagtttccttattgacaatcccaaacagtctacagtttttgatattctcttgggaatctctcaagattttgaaattgctggtaatactcttatgccagctttttctgttccacaggctactgccagatcttctgaaaatgcggaatcctctgcatgatctggaatttgtgttttctttcgcttgttcgtttg

SEQ ID NO: 79055 - DNA, 90 bp, Glycine max
agagctatgacctcgcatgccccccttccttaacctcgaaattcggttcgaggcctgggaaacgttttgtttcaatttccatttaatgtc

SEQ ID NO: 79056 - DNA, 400 bp, Glycine max
cagttttctattgaccttctcggtggaggaatcttagtggacaaaactggaaattggatcacacttatccaaaattctccaattagtaacttattgagagttgctgcttggaagaaaggctgtttaatggtcaagattgtgatgtctgggaatgcagcagtcaaaaggagtgattgggcctcattggtacaagtgtttttaacaaacagcaacagtacagagcattttgatgcatgtaagtggacaaaatcagaaccacattcctgggaattgatcttcccaatagaggtatgtggtcctaataatggttttgaaatgtggagttctgagtgggcaaatcaaacttcatggcatttgagtttccttaattgacaatcccaaacagtctacagtttttgat

SEQ ID NO: 79057 - DNA, 370 bp, Glycine max
ctcgtattgaatggctgcaaaaagctgatgtgcctaccatagcacagattgaagagttccattcgatgcagaggatgatgaatgctcctgattcaaatgataatattgatttactgttgagcattgatttgttgggtttacaaggagcaggtaaagcttttccaaacaaaattgtttttgatgataagcttgtgttggctaacacacaagaattctttgatggaaattttccagtggattcttggttaccaatttttgtgaattgtctttatcctgtaagtcaattaccttcagaagctgtcgttgtaaatgttacatgtggtagaggacacgtgtgttacccaccactgcttggattagttctgcagtt

SEQ ID NO: 79058 - DNA, 393 bp, Glycine max
attcctcagtccatttcacagcaaactgtttggaatcaaatggcaacagtgagaacaccattgaattttgattctagcaagcagagcttttgtcagttttctattgaccttctcggtggaggaatcttagtggacaaaactggagattggatcacacttatacaaaattctccaattagtaacttattgagagttgctgcttggaagaaaggctgtttaatggtcaagattgtgatgtctgggaatgcagcagtcaaaaggagtgattgggcctcattggtacaagtgtttttaacaaacagcaacagtacagagcattttgatgcatgtaagtggacaaaatcagaaccacattcctgggaattgatcttcccaatagaggtatgtggtcct

SEQ ID NO: 79059 - DNA, 409 bp, Glycine max
catgcgcgcgtacgtaagctcgcaattcatctcgagcggacgtccttcatttttctttgtatccgggtactactgtgcggcggctgttcttgctctgttcatcgctatcctcgctttaaacatcatggggttgttcatccagaagaattacttggaggtggatggcccgactgacttgctgactggtggctccactgacatggtccgtagcatggccaagatcttatcacacaagggagcacatatcgtgattgtttcgaggaaccacactcatctagctcaaacactctctggtgtcagcgctgcatccaacgatcccgccaaacagcttttcaccaccatctccaacgactaaagcatccctgatgagaatgtacatatcttgacataaacaaccgcttgccacaat

SEQ ID NO: 79060 - DNA, 454 bp, Glycine max
gacactctcaaagcttgacgtccatgccccccttccttagcttcgaaattcggttcaagcggccgtcctcgattcgactatggtttttgggtcctactgggcgtctgctgtccttgctctgtcaatcgttttcctggcttaaaacataatggggttgttcagccggaaaaattacttggaggtggttggcaagactgtcttgctgactggtgcttccactggtttggcccgtggcgtggccaagaccttagcaaaaaaaggagaaaatatcgtgattgttgcgaggaaccaggctcgtctggctgaagcactcgctgttgtcagtgctgcagcgaaggatcccgccaaacagcgtttcaccaccatcttcgcggacgtgagcagcgctgaggagaatgtccgcatcgtggcagaaacaaccgcttggaacaatggcctggcccccgacatcgtc

SEQ ID NO: 79061 - DNA, 399 bp, Glycine max
gcaacagcccatgcgagaaaggttagctacagactctagcagtcatactcatacttcagtaaacaagacagtttctaatacaatcaccgctgcacgggttcacaatccttctgagaatggtccaaaacaagaaagagcaaagggaagttcaagtggttctctggatgatgtcaagggtgcagacggtgttttaataaagaaaaaggtaaagagaaagccagatcagggtttggaaggaactcattttcgccccgagaagtcagcagcttctctgcaaggagaagaaaaaccaagatccctaaagcagtctgcaggtgttccccccaaatcaaaccttcagccaacttctctacctgggcttgagcagtcaagcttaacatgatatcaactaggatgttt

SEQ ID NO: 79062 - DNA, 375 bp, Glycine max
attgaattttgattctagcaagcagagcttttgtcagttttctattgaccttctcggtggaggaatcttagtggacaaaactggagattggatcacacttatacaaaattctccaattagtaacttgttgagagttgctgcttggaagaaaggctgtttaatggtcaagattgtgatgtctgggaatgcagcagtcaaaaggagtgattgggcctcattggtacaagtgtttttaacaaacagcaacagtacagagcattttgatgcatgtaagtggacaaaatcagaaccacattcctgggaaatgtcttcccaatagaagtatgtggcctaataatggtttggaatgtgagttctgagtgggaaatcaaactt

SEQ ID NO: 79063 - DNA, 408 bp, Glycine max
  unsure (1)..(408): unsure at all n locations
ctttaaatggccgaaatgatgtgtgaagggtggtggtaattttaaagagaaaaaaaaaaaaaaaaaaaaaaaaaaaaaaaaaaaaaaaaaaaaaaaaaaaaaaaaaaaaaaaaaaaaaaaaaaaggggagaagggaaagaaanatacgatccgccccaagggcacgcccaagtccccctcttcggggcaccaacaaacacaacccccaaaagtgcagccaaaaaaaaaagggggggggccccccccaaaagaagacccccccccccgaaaaaaaaaccccccccgcccccgggggggcaacccatttccccaaaaaggggaaaaaaaaaacccgggcaaaaaaagggaaaaaacggcccccggggaaaaaaggtttccccaccaaaaacccccaaaaaaaaggggggg

SEQ ID NO: 79064 - DNA, 394 bp, Glycine max
gttaaaagccttagccttccctacaactccaaacacaaagacatcatcatccatggctgcctccgtctccactgtcggagctgtcaacagagctcttttgaacctgaatggttctggagctggagcttcagctcccagttcagccttctttgggaccagcttgaagaaggttattgcctcaagggtccccaacagcaaggtttccggtggaagcttcaagattgttgctgtagaagagaagaaagagattgaagagacccagcagaccgacaaggacagatggaagggtcttgcctatgatatctcagacgaccaacaagacatcacaagaggaaagggtttggttgactcccttttccaagctccacaggatgctggaactcactatgcagtc

SEQ ID NO: 79065 - DNA, 382 bp, Glycine max
ggaaatgtgttaaccatccttccatattggaaatattaccatgtgtccattaataataaccaaatcaaatcaattgggttcatgtttcttcaggctgattcttttaaaaaacattaacaattagcatattctcttccttctgtgcaagttgtctgcgtgatggaattaacaatatagaaactaaagcatcattaccatgattagagtgttttccagaagctcctttctatttgaaaataaccaaactagatatttaattgttcgatatgctcaaaatacaaagacattctctatcttctgccagtagtagtcacgaagtatggcactgtaaattcatttcttgtgaattaggatgacttatccataccaatatgagctgtac

SEQ ID NO: 79066 - DNA, 152 bp, Glycine max
ccttccttagcctcggatttcggttcgggggccattcattgtgaaggccagttccagttgggaggttccaccttggttgttcctggtttccaattttggtggtcagggggggttgtcctcgattaaaagttacccatgttggtccttaggct

SEQ ID NO: 79067 - DNA, 396 bp, Glycine max
gggcaatgatattctgtgttgcgattatgctagttttgatggtttgattaccaagcaagttatgagcaagatggcagaaatgataaacagtctttgtggtggtgatgaaaaattgatgcgtgaaaggacgcacctgctgttggcttgttgttcaaggatggcaatttgtaagaaagatgtttggagagttgaatgtggaatcccttctggatttccgctcacagttatttgcaatagcatttttaatgagatgctcattagatatagctatgaaaaattactgcgccaggctaaagctccaagtatgtttttacaatccttcaaaaattttgtttctttgtgtgtgtatggtgatgataacttaattagtgttcatgaatatgtcaagccttactt

SEQ ID NO: 79068 - DNA, 396 bp, Glycine max
gaaactttaagcagatgtctaatgttttgcgggtggctcctgaggacaaggcgagtttatggtcacaacttcattatgtttcgtgtaataatctggaaatgcaagaagcttatcttgtcaatctcgtaaatgtgttacgagaattgtatttgcacagtccagaggaagctcgccaattgagaaggaaagctctctctcgtatcgaatggaactcttcaatctgtgcagaggatgatgaatgctcctgattcaaatgataatattgatttactgttgagcattgatttgttgggtttacaaggagcaggtaaagcttttccaaacaaaattgtttttgatgataagcttgtgttggctaacacacaagaattctttgatggaaattttccagtggat

SEQ ID NO: 79069 - DNA, 390 bp, Glycine max
gtggctcctgaggacaaggcgagtttatggtcacaacttcatgatgtttcgtgtaataatctggaaatgcaagaagcttatcttgtcaatctcgtaaatgtgttacgagaattgtatttgcacagtccagaggaagctcgccaattgagaaggaaagctctctctcgtattgaatggctgcaaaaagctgatgtgcctaccatagcacagattgaagagttccattcgatgcagaggatgatgaatgctcctgattcaaatgataatattgatttactgttgagcattgatttgttgggtttacaaggagcaggtaaagcttttccaaacaaaattgtttttgatgataagcttgtgttggctaacacacaagaattctttgatggaaat

SEQ ID NO: 79070 - DNA, 338 bp, Glycine max
ctccaagtatgtttttacaatccttcaaaaattttgtttctttgtgtgtgtatggtgatgataacttaattagtgttcatgaatatgtcaagccttactttagtggttctaaattgaaaagctttctagctagtcataacatcaccattactgatggtattgacaaaactagtgcaactttgcaatttagaaagttagcagattgtgattttctcaagagaaactttaagcagatgtctaatgttttgtgggtggctcctgaggacaaggcgagtttatggtcacaacttcattatgtttcgtgtaataatctggaaatgcaagaagcttatcttgtc

SEQ ID NO: 79071 - DNA, 326 bp, Glycine max
gtgtatggtgatgataacttaattagtgttcatgaatatgtcaagccttactttagtggttctaaattgaaaagctttctagctagtcataacatcaccattactgatggtattgacaaaactagtgcaactttgcaatttagaaagttagcagattgtgattttctcaagagaaactttaagcagatgtctaatgttttgtgggtggctcctgaagacaaggcgagtttatggtcacaacttcattatgtttcgtgtaataatctggaaatgcaagaagcttatcttgtcaaatctcgtaatgtgttacgaagattgtatttgca

SEQ ID NO: 79072 - DNA, 348 bp, Glycine max
cttcattatgtttcgtgtaataatctggaaatgcaagaagcttatcttgtcaatctcgtaaatgtgttacgagaattgtatttgcacagtccagaggaagctcgccaattgagaaggaaagctctctctcgtattgaatggctgcaaaaagctgatgtgcctaccatagcacagattgaagagttccattcgatgcagaggatgatgaatgctcctgattcaaatgataatattgatttactgttgagcattgatttgttgggtttacaaggagcaggtaaagcttttccaaacaaaattgtttttgatgataagcttgtgttggcctacacacaagaattctttgat

SEQ ID NO: 79073 - DNA, 83 bp, Glycine max
aaaaaaaaaaaataatttaaaaaaaaaaaaaaaaaaaaaaaaggataaaaaaaaaaaaaaatgataaaataaaaaaaaaaaaa

SEQ ID NO: 79074 - DNA, 399 bp, Glycine max
  unsure (1)..(399): unsure at all n locations
cctcagtccatttcacagcaaactgtttggaatcaaatggcaacagtgagaacaccattgaattttgattctagcaagcagagcttttgtcagttttctattgaccttctcggtggaggaatcttagtggacaaaactggagattggatcacacttatacaaaattctccaattagtaacttgttgagagttgctgcttggaagaaaggctgtttaatggtcaagattgtgatgtctgggaatgcagcagtcaaaaggagtgattgggcctcattggtacaagtgtttttaacanacagcaacagtacagagcattttgatgcatgtaagtggacaaaatcagaaccacattcctgggaaatgatcttcccaatagaggtatgtggtcctaaataatgg

SEQ ID NO: 79075 - DNA, 295 bp, Glycine max
aaacaaacaaaatattttttaagaacaaaataaaaaaaacgggggccaaacaaaacttctgcgagaaacccaaaaaactaaccaaaccacgtaaactacttgatcccattctctgcctagccccctatcttcctcactgacacaatttccgggccactacttcttgaacactgctccacttttaaacatcccataaaccttctccagaaacctccatctccaattgatccactccagaacacccatgctcgaacccttctgcttcgtcttcccttgacaaattttcctccaccgg

SEQ ID NO: 79076 - DNA, 376 bp, Glycine max
ctcgagccgaatcggctcgagaactcaagtgcgtcctgcaacaactctgttggctgatgggtgtccatatttgtatgcaatggtgcatgatagttcagtgtctacaataccaggtgattttgtcattggtgtcaagttgacaaccataaacaatatgtgtgcttatgggctcaatcctggtatttcaggttctcgtcttttgggcaccattcctcagtccatttcacagcaaactgtttggaatcaaatggcaacagtgagaacaccattgaattttgattctagcaagcagagcttttgtcagttttctattgaccttctcggtggaggaattttagtggacaaaactggagattggatcacacttatacaaaat

SEQ ID NO: 79077 - DNA, 386 bp, Glycine max
ctcggtggaggaatcttagtggacaaaactggagattgcatcacacttatacaaaattctccaattagtaacttgttgagagttgctgcttggaagaaaggctgtttaatggtcaagattgtgatgtctgggaatgcagcagtcaaaaggagtgattgggcctcattggtacaagtgtttttaacaaacagcaacagtacagagcattttgatgcatgtaagtggacaaaatcagaaccacattcctgggaattgatcttcccaatagaggtatgtggtcctaataatggttttgaaatgtggagttctgagtgggcaaatcaaacttcatggcatttgagtttccttattgacaatcccaaacagtctacagtttttgatattct

SEQ ID NO: 79078 - DNA, 182 bp, Glycine max
aacaaatgtttggccagaggaaattctgggtttggataacggaaaggtaatttccgtggcgtggtataatattatagagaagaaagccccttcttttgagggggctactatcagattcaaaattgattaaatttcaaaccttttttttgttaattagaattataatttttgaattattttga

SEQ ID NO: 79079 - DNA, 377 bp, Glycine max
  unsure (1)..(377): unsure at all n locations
aacagtctttgtggtggtgatgaaaaattgatgcgtgaaaggacgcacctgctgttggcttgttgttcaaggatggcaatttgtaagaaagatgtttggagagttgaatgtggaatcccttctggatttccgctcacagttatttgcaatagcatttttaatgagatgctcattagatatagctatgaaaaattactgcgccaggctaaagctccaagtatgtttttacaatccttcaaaaattntgtttctttgtgtgtgtatggtgatgataacttaattagtgttcatgaatatgtcaaagcttacttttagtgttctaaattgaaaagctttctagctagtcataacatcaccattactgatggtattgacaa

SEQ ID NO: 79080 - DNA, 384 bp, Glycine max
gtgagaacaccattgaattttgattctagcaagcagagcttttgtcagttttctattgaccttctcggtggaggaatcttagtggacaaaactggagattggatcacacttatacaaaattctccaattagtaacttgttgagagttgctgcttggaagaaaggctgtttaatggtcaagattgtgatgtctgggaatgcagcagtcaaaaggagtgattgggcctcattggtacaagtgtttttaacaaacagcaacagtacagagcattttgattgcatgtaagtggacaaaatcagaaccacattcctgggaattgatcttcccaatagaggtatgtggtcctaataatggttttgaaatgtggagttctgagtgggcaaa

SEQ ID NO: 79081 - DNA, 389 bp, Glycine max
cagaaatgataaacagtctttgtggtggtgatgaaaaattgatgcgtgaaaggacgcacctgctgttggcttgttgttcaaggatggcaatttgtaagaaagatgtttggagagttgaatgtggaatcccttctggatttccgctcacagttatttgcaatagcatttttaatgagatgctcattagatatagctatgaaaaattactgcgccaggctaaagctccaagtatgtttttacaatccttcaaaaattttgtttctttgtgtgtgtatggtgatgataacttaattagtgttcatgaatatgtcaagccttactttagtggttctaaattgaaaagctttctagctagtcataacatcaccattactgatggtattgacaaa

SEQ ID NO: 79082 - DNA, 317 bp, Glycine max
aagggcaagtggttgcattaattgctacaaactacccgtgactgcttcctgcattctttcttacttatttatactatatacaaagtcgggtccgtcgaagagtgagttataaacccgtttacttggatccgcccttctggccctcaacgtgagggtctggtccatcagatccaccgaagccatgctcagacgacttcctcttgtcgggggtaccgtcctgcttgaggccgtcgtgctcggaaggcttgtacttctcgccaccagcctgaccacccttcttgccctcgacgtgggggtcaaggccgtcagagccaccg

SEQ ID NO: 79083 - DNA, 242 bp, Glycine max
ttcgggttgagcgagataacttgaaacagggtggtgaaaatgaaaggccttggtttcttcggtggttccattttgggaggatgggaattgccttccgtccaaatttttccttttccaaagaaaaattggttttggggcccgacttccgaggggaaaatgcccaaattggaggtttgtttggaaagacaccaaattttttggttttagaaccattcttgaaaagggcgttgaacaaccaaagg

SEQ ID NO: 79084 - DNA, 384 bp, Glycine max
gcagaaatgataaacagtctttgtggtggtgatgaaaaattgatgcgtgaaaggacgcacctgctgttggcttgttgttcaaggatggcaatttgtaagaaagatgtttggagagttgaatgtggaatcccttctggatttccgctcacagttatttgcaatagcatttttaatgagatgctcattagatatagctatgaaaaattactgcgccaggctaaagctccaagtatgtttttacaatccttcaaaaattttgtttctttgtgtgtgtatggtgatgataacttaattagtgttcatgaatatgtcaagccttactttagtggttctaaattgaaaagctttctagctagtcataacatcaccattactgatggtatt

SEQ ID NO: 79085 - DNA, 382 bp, Glycine max
ggacaaggcgagtttatggtcacaacttcattatgtttcgtgtgataatctggaaatgcaagaagcttatcttgtcaatctcgtaaatgtgttacgagaattgtatttgcacagtccagaagaagctcgccaattgagaaggaaagctctctctcgtattgaatggctgcaaaaagctgatgtgcctaccatagcacagattgaagagttccattcgatgcagaggatgatgaatgctcctgattcaaatgataatattgatttactgttgagcattgatttgttgggtttacaaggagcaggtaaagcttttccaaacaaaattgtttttgatgataagcttgtgttggctaacacacaagaattctttgatggaaatttt

SEQ ID NO: 79086 - DNA, 260 bp, Glycine max
  unsure (1)..(260): unsure at all n locations
agctggtgcagtttggagagattcaggaaaaagttgtattgaaatttgcacaagaggaatttcttacagcttggtcaactcangtgcgtcctgcaacaactctgttggctgatgggtgtccatatttgtatgcaatggtgcttgatagttcagtgtctacaataccaggtgattttgtaattggtgtcaagttgacaaccataaacaatatgtgtgcatatggggctcaatcctgggatttcaaggttctcgtcttttgg

SEQ ID NO: 79087 - DNA, 280 bp, Glycine max
gaagagctatgacatcccccccacccgtacctcagcttcggattcggctcgaggcagaaatgattaactgtctttgcggtggtgataaaaaagtcgacggtactatgaatttctgtgctcattccacccacctaatgcacacagaatagattccacaaaatgctgaattgcatttttcacaacaggaattttttacaactatcacaactcaggtacttcctgcaccaactctatttgatgatgcatgtccatatatcaattccaagcaacatgatacttc

SEQ ID NO: 79088 - DNA, 211 bp, Glycine max
ggtctgcaaaagagaaggacagctctgtcgacaattgcggggcggcgaaaagctcatgggcttgccctggcactggtggaagagttgccttgcttgcggaggaccattagtgctacggatataaatgatcagattgatttactggggcacattgaattttttgggcaacaaagcgcaagtaaagctcttccgcactaaattgacatagaag

SEQ ID NO: 79089 - DNA, 373 bp, Glycine max
ctctgttggctgatgggtgtccatatttgtatgcaatggtgcatgatagttcagtgtctacaataccaggtgattttgtcattggtgtcaagttgacaaccataaacaatatgtgtgcatatgggctcaatcctggtatttcaggttctcgtcttttgggcaccattcctcagtccatttcacagcaaactgtttggaatcaaatggcaacagtgagaacaccattgaattttgattctagcaagcagagcttttgtcagttttctattgaccttctcggtggaggaatcttagtggacaaaactggagattggatcacacttatacaaaattctccaattagtaacttattgagagttgctgcttggaaaaa

SEQ ID NO: 79090 - DNA, 379 bp, Glycine max
attgaattttgattctagcaagcagagcttttgtcagttttctattgaccttctcggtggaggaatcttagtggacaaaactggagattggatcacacttatacaaaattctccaattagtaacttgttgagagttgctgcttggaagaaaggctgtttaatggtcaagattgtgatgtctgggaatgcagcagtcaaaaggagtgattgggcctcattggtacaagtgtttttaacaaacagcaacagtacagagcattttgatgcatgtaagtggacaaaatcagaaccacattcctgggaattgatcttcccaatagaggtatgtggtcctaataatggttttgaaatgtggagttctgagtgggcaaatcaaact

SEQ ID NO: 79091 - DNA, 429 bp, Glycine max
ttgacgtcgcatgcacccgtacgtaagctcggtttgattttagcaagcaaagcttttgtcagttttctattgaccttttcggtggaggaatcttagtggacaaaactggagattggatcacacttatacaaaattctccaattagtaacttattgagagttgctgcttggaagaaaggctgtttaatggtcaagattgtgatgtctgggaatgcagcaatccaaaaggagtgattgggcctcattggtacaagtgtttttaacaaacagcaacagtacagagcattttgatgcatgtaagtggacaaaatcagaaccacattcctgggaattgatcttcccaatagaggtatgtggtcctaataatggttttgaaatgtggagttctgagtgggcaaatcaaacttcatggcatttgagtttccttatt

SEQ ID NO: 79092 - DNA, 388 bp, Glycine max
tggtatttcaggttctcgtcttttgggcaccattcctcagtccatttcacagcaaactgtttggaatcaaatggcaacagtgagaacaccattgaattttgattctagcaagcagagcttttgtcagttttctattgaccttctcggtggaggaatcttagtggacaaaactggagattggatcacacttatacaaaattctccaattagtaacttattgagagttgctgcttggaagaaaggctgtttaatggtcaagattgtgatgtctgggaatgcagcagtcaaaaggagtgattgggcctcattggtacaagtgtttttaacaaacagcaacagtacagagcattttgatgcatgtaagtggacaaaatcagaaccacattcc

SEQ ID NO: 79093 - DNA, 109 bp, Glycine max
gccgtcccttccacccgtccgtaagctcggaattcggttcgaggcaaaacccttttcaagcagggtgtagttattcaattggaaagcacgacttcaaagttaatagaaa

SEQ ID NO: 79094 - DNA, 382 bp, Glycine max
ggtgattttgtcattggtgtcaagttgacaaccataaacaatatgtgtgcatatgggctcaatcctggtatttcaggttctcgtcttttgggcaccattcctcagtccatttcacagcaaactgtttggaatcaaatggcaacagtgagaacaccattgaattttgattctagcaagcagagcttttgtcagttttctattgaccttctcggtggaggaatcttagtggacaaaactggagattggatcacacttatacaaaattctccaattagtaatttattgagagttgctgcttggaagaaaggctgtttaatggtcaagattgtgatgtctgggaatgcagcagtcaaaaggagtgattgggcctcattggtacaag

SEQ ID NO: 79095 - DNA, 370 bp, Glycine max
aaaaaaaaaaaaaaaaaaaaaaaaaaaaaaaaaaaaaaaaaaagaaaaagaaaaaaaaaaaaaaaaaaaaaaaaaaaaaaaaaaaaaaaaaaaaaaaaaaaaaacaaaaaaaaaaaaaaaaataaaaataaaaaaagaaaaaaaaaaaaaaaaaaaaggggggggcccctccctgggggccttgcccccccggaatttatttcgggacgggtcccggggggggaacccgttttccttttggggggagctttaggggccgggggaataaagggcaataccttttttggggggaaaatggttgcccgttcaaaatcccccaaacctttcgggccggatgtataaatgaaaaacccggggggccctaagaggg

SEQ ID NO: 79096 - DNA, 380 bp, Glycine max
gacaaccataaacaatatgtgtgcatatgggctcaatcctggtatttcaggttctcgtcttttgggcaccattcctcagtccatttcacagcaaactgtttggaatcaaatggcaacagtgagaacaccattgaattttgattctagcaagcagagcttttgtcagttttctattgaccttctcggtggaggaatcttagtggacaaaactggagattggatcacacttatacaaaattctccaattagtaacttgttgagagttgctgcttggaagaaaggctgtttaatggtcaagattgtgatgtctgggaatgcagcagtcaaaaggagtgattgggcctcattggtacaagtgtttttaacaaacagcaacagta

SEQ ID NO: 79097 - DNA, 93 bp, Glycine max
ctcgacccgggccattctcatcctcctctgtctctctctctccaccattgccatggatccttacaagctccggcccatcaacgcctttaattc

SEQ ID NO: 79098 - DNA, 383 bp, Glycine max
gttcccaggacctattgtgttttaaatccacaaaatccttttgtgttaaataggtggatgggaaaattgactttcccccagggcacttcccgaagtgttaagagaatgcctctttctatagggggaggagctggtgcaaagaatgctattctcatgaatatgccaaatgctgtttctttcaatgtggagatattttgttggagatctcgtctttgaagtttctaagatgacttctccctacattaaatgtacagtctctttcttcatagcatttggaaatttggctgatgataccatcaattttgaggcttttccccacaagctggtgcagtttggagagattcaggaaaaagttgtattgaaattttcacaagaggaatttc

SEQ ID NO: 79099 - DNA, 388 bp, Glycine max
gtgagaacaccattgaattttgattctagcaagcagagcttttgtcagttttctattgaccttctcggtggaggaatcttagtggacaaaactggagattggatcacacttatacaaaattctccaattagtaacttgttgagagttgctgcttggaagaaaggctgtttaatggtcaagattgtgatgtctgggaatgcagcagtcaaaaggagtgattgggcctcattggtacaagtgtttttaacaaacagcaacagtacagagcattttgatgcatgtaagtggacaaaatcagaaccacattcctgggaattgatcttcccaatagaggtatgtggtcctaataatggttttgaaatgtggagttctgagtgggcaaatcaaa

SEQ ID NO: 79100 - DNA, 97 bp, Glycine max
ataagaacaaaggttctaccttcaatttggaatcattctttgaattcttccaaattgaaggtaggataagaacaaaggttctacatattcacaaaaa

SEQ ID NO: 79101 - DNA, 381 bp, Glycine max
ggacaaaatcagaaccacattcctgggaattgatcttcccaatagaggtatgtggtcctaataatggttttgaaatgtggagttctgagtgggcaaatcaaacttcatggcatttgagtttccttattgacaatcccaaacagtctacagtttttgatattctcttgggaatctctcaagattttgaaattgctggtaatactcttatgccagctttttctgttccacaggctactgccagatcttctgaaaatgcggaatcctctgcatgatctggaatttgtgttttctttcgcttagtcgtttgtttaattcaataaaaggaaattaggcatgaccctcttagtgagtatgctctgcctatttgaaaatttccacacc

SEQ ID NO: 79102 - DNA, 120 bp, Glycine max
agaaaacttatagttcttttggatctgatgcattgctcattagagtaaaccatgatcttggttagggtaatgggacttttcgaccactgagctgtgggcctgctgtggaccctgatcaac

SEQ ID NO: 79103 - DNA, 370 bp, Glycine max
attaacgagcagtttttgaaagtcacggctgttattggggagggtaaaccacgacattggtcaggctaatggaacttatcaaccactgagctgtggccctactctgcacactagccaacagtgtaattataccaccacaaagttttgtgaggccaaagtattaccaatctataaactgacaataaaaaaccctatagtattgtccacaatcaagtcatgtttagcattaatactcacatgcctataaagttctaagatcatcagctacccgttcttctcatgccctgataactagcgtatttgcgaagaaactcatcatattgaaatattctaaacatttgaggtcattataactacaccaggattatgt

SEQ ID NO: 79104 - DNA, 386 bp, Glycine max
caagtagttgagaactaagaaggagaagcaaatggcttcctcaatgatctcttccccagctgttaccactgtcaaccgtgccggtgccggcatggttgctccattcactggcctcaagtccatggctggcttccccaccaggaagaccaacaatgacattacctccattgctagcaacggtggaagagtgcaatgcatgcaggtgtggccaccagttggcaagaagaagtttgagactctttcctacctgccagaccttgatgatgcacaattggcaaaggaagtagaataccttcttaggaagggatggattccttgcttggaattcgagttggagcacggtttcgtgtaccgtgagcacaacaggtcaccaggatactacgatg

SEQ ID NO: 79105 - DNA, 377 bp, Glycine max
ctccaagtatgtttttacaatccttcaaaaattttgtttctttgtgtgtgtatggtgatgataacttaattagtgttcatgaatatgtcaagccttactttagtggttctaaattgaaaagctttctagctagtcataacatcaccattactgatggtattgacaaaactagtgcaactttgcaatttagaaagttagcagattgtgattttctcaagagaaactttaagcagatgtctaatgttttgtgggtggctcctgaggacaaggcgagtttatggtcacaacttcattatgtttcgtgtaataatctggaaatgcaagaagcttatcttgtcaatctcgtaaatgtgttacgagaattgtatttgcacagt

SEQ ID NO: 79106 - DNA, 386 bp, Glycine max
gtcttgcaattgaagttgaagtcttgcccttctctcttcaactccaaacacaagacatcatcatccatggctgcctccgtctccactgtcggagctgtcaacagagctcttttgaacctgaatgggtctggacctggggtttcagctcccagttcatccttctttgggagcagcttgaagaaggttattggctcaagggtccccaacacaaagatttcctctggaagcttcaagattgttgctgtagaagagaagaaagagattgaagagacccagcagaccgacaaggacagatggaagggtcttgcctatgatatctcagacgaccaacaggacatcacaagaggaaagggtttggttgactcccttttccaagctccacagga

SEQ ID NO: 79107 - DNA, 388 bp, Glycine max
aagtagttgagaactaaaaaggagaagcaaatggcttcctcaatgatctcttccccagctgttaccactgtcaaccgtgccggtgccggcatggttgctccattcactggcctcaagtccatggctggcttccccaccagaaagaccaacaatgacattacctccattgctagcaacggtggaagagtgcaatgcatgcaggtgtggccaccagttggcaagaagaagtttgagactctttcctacctgccagaccttgatgatgcacaattggcaaaggaagtagaataccttcttaggaagggatggattccttgcttggaattcgagttggagcacggtttcgtgtaccgtgagcacaacaggtcaccaggatactacgatggac

SEQ ID NO: 79108 - DNA, 395 bp, Glycine max
gaaaaactttaagtgtgactaaactgtggaccacagattaatccaacagttgacccaaagggatgaaacttgtgagaataccttgagatcccactgaagaatgaaaggtcctaattacaatggttacaaaaaaaagtaattttacttgatgttgttaaagtgaatatacaaatcaaaagtacttttactttaaaacatatgttgcttttgatctaaacccaagtttgccataaacaggttacaaaattaattttggggaactgcaaacatgatacaaaactgagtttgggttccaaaagtatgtctgagatctcataacagatccaaacattttatcaatattacccttactgtaatgggtatttgtttcgcagcatttgaccccacacacatac

SEQ ID NO: 79109 - DNA, 384 bp, Glycine max
gatgaatgctcctgattcaaatgataatattgatttactgttgagcattgatttgttgggtttacaaggagcaggtaaagcttttccaaacaaaattgtttttgatgataagcttgtgttggctaacacacaagaattctttgatggaaattttccagtggattcttggttaccaatttttgtgaattgtctttatcctgtaagtcaattaccttcagaagctgtcgttgtaaatgttacatgtggtagtggacgttgtggtttacccaccactgcttggattagttctgcagttaacaatcgctcctcagatatcaacaaaaagattcgcacagcacttgggaaaggtaagaaaattgtttttcttactagagttgatccttt

SEQ ID NO: 79110 - DNA, 150 bp, Glycine max
aaaaaacatcttttttcatataaagagtaacccttcactgttgagcggcgaacacaagacatcatcaacaaaaacgtaatagcttaaaaaaggggcggcgccctctaaggaacctctccccccgggaaataaatacggacccgttcctgg

SEQ ID NO: 79111 - DNA, 380 bp, Glycine max
cggctcgagggacaaaatcagaaccacattcctgggaattgatcttcccaatagaggtatgtggtcctaataatggttttgaaatgtggagttctgagtgggcaaatcaaacttcatggcatttgagtttccttattgacaatcccaaacagtctacagtttttgatattctcttgggaatctctcaagattttgaaattgctggtaatactcttatgccagctttttctgttccacaggctactgccagatcttctgaaaatgcggaatcctctgcatgatctggaatttgtgttttctttcgcttgttcgtttgtttaattcaataaaagaaattaggcatgaccctcttgttgagtatgctctgcctatttgaaaat

SEQ ID NO: 79112 - DNA, 384 bp, Glycine max
  unsure (1)..(384): unsure at all n locations
ccgataaggactttctcccaatataaagaatatgtgcaggagtttcaagataaatatgatagttactgctccttgaacaagattttggagggatacagggatgagtttcagaaactaggcaacgatttagaacacgctaaaggcagggatatggatagatattatgacattgtggagcagctgaaggaatcctatcgacgctgtggaccgaggcacaagagattgaagaaaatatttgttgttcttcatacggaattggagaatctcaagggaaggatcaaagacttttcaaactcgtataataaatgatgaaaatacaagagtcctatatagataaaattgaagcctgtttatcaaggtaagaactntnggtgatacatgatg

SEQ ID NO: 79113 - DNA, 393 bp, Glycine max
  unsure (1)..(393): unsure at all n locations
agaacaagtagttgagaactaagaaggagaagcaaatggcttcctcaatgatctcttccccagctgttaccactgtcaaccgtgccggtgccggcatggttgctccattcactggcctcaagtccatggctggcttccccaccaggaagaccaacaatgacattacctccattgctagcaacggtggaagagtgcaatgcatgcaggtgtggccaccagttggcaagaagaagtttgagactctttcctacctgccagaccttgatgatgcacaattggcaaaggaagtagaataccttcttaggaagggatggattccttgcttggaattcgagttggagcacggtttcgtgtaccgtgagcacaacangtcaccaggatactacgatggac

SEQ ID NO: 79114 - DNA, 394 bp, Glycine max
cgagcgccggttctgatatttacaccatctgctctcaagactgtgaattgtggaatcctgcttgcacaaaagcaatgactatgtcatttaatccaaacccgtgttctgatgcatggagtttggaatttctgaagcgtactggatttcattgcgatatcatttgtgtcactggatggactgccaccccaatgcaggatgttcaagttacaattgattgcgttatttcctctcaggaatgtgttcccaggacctattgtgttttaaatccacaaaatccttttgtgttaaataggtggatgggaaaattgactttcccccagggcacttcccgaagtgttaagagaatgcctctttctatagggggaggagctggtgcaaagaatgctattctcat

SEQ ID NO: 79115 - DNA, 364 bp, Glycine max
  unsure (1)..(364): unsure at all n locations
tttaaggtttagccttctgagccagatcgagtgaagtatcatatgcattagatcaaatggctttgctggtcgattaattgtaaaatgcctttgaactctcaagacattcatttgcagtttcaaatactttttcggtgaaacactttgtaatattgtattttatagtaaaaaccaaatgttaattataaactagtttatatttttaaaaaaaaaaaaaannnnnanaannnataataaaataaaaaaaaaattanataataaataaaaataaaaaaaataataaataataaaaaaaaaaaaaaaaaaaaaaaatggggcggcccccctttagggagctcttcaccccggaaattattttcggacc

SEQ ID NO: 79116 - DNA, 388 bp, Glycine max
aatgttttgtgggtggctcctgaggacaaggcgagtttatggtcacaacttcattatgtttcgtgtaataatctggaaatgcaagaagcttatcttgtcaacctcgtaaatgtgttacgagaattgtatttgcacagtccagaggaagctcgccaattgagaaggaaagctctctctcgtattgaatggctgcaaaaagctgatgtgcctaccatagcacagattgaagagttccattcgatgcagaggatgatgaatgctcctgattcaaatgataatattgatttactgttgagcattgatttgttgggtttacaaggagcaggtaaagcttttccaaacaaaattgtttttgatgataagcttgtgttggctaacacacaagaat

SEQ ID NO: 79117 - DNA, 418 bp, Glycine max
ctgcaacaactctgttggctgatgggtgtccatatttgtatgcaatggtgcatgatagttcagtgtctacaataccaggtgattttgtcattggtgtcaagttgacaaccataaacaatatgtgtgcatatgggctcaatcctggtatttcaggttctcgtcttttgggcaccattcctcagtccatttcacagcaaactgtttggaatcaaatggcaacagtgagaacaccattgaattttgattctagcaagcagagcttttgtcagttttctattgaccttctcggtggaggaatcttagtggacaaaactggagattggatcacacttatacaaaattctccaattagtaacttgttgagagttgctgcttggaagaaaggctgtttaatggtcaagattgtgatgtctgggaa

SEQ ID NO: 79118 - DNA, 301 bp, Glycine max
ccggcctgtccaaaacaaaagaaaaaacaatcctctaaaaaagaaatgcatgagaataaaccaaagagatttccaaggaggagatactcacacaaaccatcaaccagtagaggaatggaaaatcctaaaaaaaaaaaaaaaaagaataaaaactgaaagaaaaataacattaagaagctgaaaataaaaaaagaaaaaagtgaaaataaaaaaagaaggaaaacacaaggatgatagtataaaaaaccaaaaataaaaaaaaaaaaagggggggcccccaatttggaatccctccaccccg

SEQ ID NO: 79119 - DNA, 400 bp, Glycine max
cagtttcaaagagaggatttgggattgggaaggcgagggattgcgctgcgtctcttcctcttctctttcgattcatccctcattcataatcttccaatccaacaacctcagcctcacactcacacatacacacatctgaacgcgtatcgtccctcccatggcttcaaagcgcatcctcaaggagctcaaggacttgcagaaagacccaccaacttcttgcagcgctggtccagtagctgaggacatgttccattggcaagcaacgattatgggtcctgctgatagtccttatgctggaggtgtattcctagtcactattcactttcctccggattatcctttcaaacctcccaaggtgcctttaggactaaggtgtttcatccgaacatcaacagcaatg

SEQ ID NO: 79120 - DNA, 446 bp, Glycine max
gtaagctcggaattcggttcgagagggtttttaacaaacagcaccagtccaaagcattttgatgcatgtaagtggacaaaatcagaaccacattcctgggaattgatcttcccaatagaggtatgtggtcctaataatggttttgaaatgtggagttctgagtgggcaaatcaaacttcatggcatttgagtttccttattgacaatcccaaacagtctacagtttttgatattctcttgggaatctctcaagattttgaaattgctggtaatactcttatgccagctttttctgttccacaggctactgccagatcttctgaaaatgcggaatcctctgcatgatctggaatttgtgttttctttcgcttgttcgtttgtttaattcaataaaggaaattaggcatgaccctctttgtgagtatgctctgcctatttgaaaattt

SEQ ID NO: 79121 - DNA, 419 bp, Glycine max
attggtgtcaagttgacaaccataaacaatatgtgtgcatatgggctcaatcctggtatttcaggttctcgtcttttgggcaccattcctcagtccatttcacagcaaactgtttggaatcaaatggcaacagtgagaacaccattgaattttgattctagcaagcagagcttttgtcagttttctattgaccttctcggtggaggaatcttagtggacaaaactggagattggatcacacttatacaaaattctccaattagtaacttgttgagagttgctgcttggaagaaaggctgtttaatggtcaagattgtgatgtctgggaatgcagcagtcaaaaggagtgattgggcctcattggtacaagtgtttttaacaaacagcaacagtacagagcattttgatgcatgtaagtg

SEQ ID NO: 79122 - DNA, 414 bp, Glycine max
gagattcaggaaaaagttgtattgaaattttcacaagaggaatttcttacagcttggtcaactcaggtgcgtcctgcaacaactctgttggctgatgggtgtccatatttgtatgcaatggtgcatgatagttcagtgtctacaataccaggtgattttgtcattggtgtcaagttgacaaccataaacaatatgtgtgcatatgggctcaatcctggtatttcaggttctcgtcttttgggcaccattcctcagtccatttcacagcaaactgtttggaatcaaatggcaacagtgagaacaccattgaattttgattctagcaagcagagcttttgtcagttttctattgaccttctcggtggaggaatcttagtggacaaaactggaagatggatcacacttatacaaaat

SEQ ID NO: 79123 - DNA, 253 bp, Glycine max
aatctctcaagattttgaaattgctggtaatactcttatgccagctttttctgttccacaggctactgccagatcttctgaaaatgcggaatcctctgcatgatctggaatttgtgttttctttcgcttgttcgtttgtttaattcaataaaggaaattaggcatgaccctcttgttgagtatgctctgcctatttgaaaatttccacacctcttttaattgtcgtaatgatgtgtgaagtgtgtgttatttt

SEQ ID NO: 79124 - DNA, 65 bp, Glycine max
aaaaaaaaaaaaaattaaaaaaaaaaaaaaaaaaaaaaaaaaagaaaaaaaaaaaaaaaaaaaaa

SEQ ID NO: 79125 - DNA, 419 bp, Glycine max
  unsure (1)..(419): unsure at all n locations
ttgtgatgtctgggaatgcagcagtcaaaaggagtgattgggcctcattggtacaagtgtttttaacaaacagcaacagtacagagcattttgatgcatgtaagtggacaaaatcagaaccacattcctgggaattgatcttcccaatagaggtatgtggtcctaataatggttttgaaatgtggagttctgagtgggcaaatcaaacttcatggcatttgagtttccttattgacaatcccaaacagtctacagtttttgatattctcttgggaatctctcaagattttgaaattgctggtaatactcttatgccagctttttctgttccacaggctactgccagatcttctgaaaatgcggaatcctctgtatgatctggaatttgtgttttctttcgcttgttcgtntgttaatta

SEQ ID NO: 79126 - DNA, 380 bp, Glycine max
gtttttgatgataagcttgtgttggctaacacacaagaattctttgatggaaattttccagtggattcttggttaccaatttttgtgaattgtctttatcctgtaagtcaattaccttcagaagctgtcgttgtaaatgttacatgtggtagtggacgtggtggtttacccaccactgcttggattagttctgcagttaacaatcgctcctcagatatcaacaaaaagattcgcacagcacttgggaaaggtaagaaaattgtttttcttactagagttgatccttttccagtagctttactggctgttctttttggcgttaagaatgaaattctgagttctaacgccactaatcctatgctgacgcgactttttgagaa

SEQ ID NO: 79127 - DNA, 411 bp, Glycine max
caatttcttatttcactcttctccaccaatgatttccagcacccacttccttaacaactattcctttgtttggttggatatggagaaggcaccagtttttcattttcaattcatactttttcactgataatttaagaatgccactttttttcccttttgtcttttgctttcactactttgcatcactactttatgcacaaaagcaaaatgaaacaaaacattcatggcatcactactaaaaatattaatttgaaaatgaaaaaacaaaccaaacagctccatatcaaaggaatccaacttgtagtttatagggggttttggtttttcactgatgataggaatatgatatgagtatgataatgtgttggtttttgtatagatggatggcgaaataggtgggtgaaatcagac

SEQ ID NO: 79128 - DNA, 152 bp, Glycine max
  unsure (1)..(152): unsure at all n locations
ggacgcacctgctgttggcttgttgttcaaggatggcaatttgtaagaaagatgtttggagagttgaatgtgggatccccttctggattttccgctcacaagttantggcaatagcattttttaatgagatgcctcattagatatagctatg

SEQ ID NO: 79129 - DNA, 287 bp, Glycine max
gtgaaatacacaacagaacaaccttgggtttagggcgagatccgggtgcgtaatcagcagctacctttcttcctttcttctgtatctctcctaccataccacggcctaaataccatacgagcacatcttcaatcctcgatggtggagaatcgggcgaatatggctcgaactactaagatcgttgtgcctgtcagctgcatacaattttgacaccgaaggtttatgtcatggatgatggtccttgcgaaataaaggttatgcatgatcacttttgatttacaacatct

SEQ ID NO: 79130 - DNA, 418 bp, Glycine max
agtggacaaaatcagaaccacattcctgggaattgatcttcccaatagaggtatgtggtcctaataatggttttgaaatgtggagttctgagtgggcaaatcaaacttcatggcatttgagtttccttattgacaatcccaaacagtctacagtttttgatattctcttgggaatctctcaagattttgaaattgctggtaatactcttatgccagctttttctgttccacaggctactgccagatcttctgaaaatgcggaatcctctgcatgatctggaatttgtgttttctttcgcttgttcgtttgtttaattcaataaaggaaattaggcatgaccctcttgttgagtatgctctgcctatttgaaaatttccacacctcttttaattgtcgtaatgatgtgtgaagtgtgtg

SEQ ID NO: 79131 - DNA, 333 bp, Glycine max
cggccctacactgcactcaagtctttcatccgggcgcagtggggatcttttccatgatcagctggaccttgacctccatctgctgatcccgcatctgtctgaagaagagccacctgcgccctaacgaccacccagcgcttaccaatctgatatatcctgactctgatttgggactcaaatctctcattcgagacacgaccgttgatgctgtcattgccgacaatatcatcacagctgagagagacgatctcgcaactgactacgatagagactttgctatacataaccaatcaggaatcaacaagacataacttagaattacagctcttcaaa

SEQ ID NO: 79132 - DNA, 421 bp, Glycine max
  unsure (1)..(421): unsure at all n locations
gtgagaacaccattgaattttgattctagcaagcagagcttttgtcagttttctattgaccttctcggtggaggaatcttagtggacaaaactggagattggatcacacttatacaaaattctccaattagtaacttattgagagttgctgcttggaagaaaggctgtttaatggtcaagattgtgatgtctgngaatgcagcagtcaaaaggagtgattgggcctcattggtacaagtgtttttaacaaacagcaacagtacagagcattttgatgcatgtaagtggacaaaatcagaaccacattcctgggaattgatcttcccaatagaggtatgtggtcctaataatggttttgaaatgtggagttctgagtgggcaaatcaaacttcatggcatttgagtttccttattgacaatc

SEQ ID NO: 79133 - DNA, 415 bp, Glycine max
ccaggacctattgtgttttaaatccacaaaatccttttgtgttaaataggtggatgggaaaattgactttcccccagggcacttcccgaagtgttaagagaatgcctctttctatagggggaggagctggtgcaaagaatgctattctcatgaatatgccaaatgctgttctttcaatgtggagatatttcgttggagatctcgtctttgaagtttctaagatgacttctccctacattaaatgtacagtctctttcttcatagcatttggaaatttggctgatgataccatcaattttgaggcttttcctcacaagctggtgcagcttggagagattcaggaaaaagttgtattgaaattttcacaagaggaatttcttacagcttggtcaactcaggtgcgttctgcaacaac

SEQ ID NO: 79134 - DNA, 108 bp, Glycine max
aaaaaagctaaacttattatcatatctatgcatcatgtaagggttaaggttttaacagtccaagaattctttatgacatggtgtgcaatgtcactgcagatcaagctg

SEQ ID NO: 79135 - DNA, 418 bp, Glycine max
tgcagtttggagagattcaggaaaaagttgtattgaaattttcacaggaggaatttcttacagcttggtcaactcaggtgcgtcctgcaacaactctgttggctgatgggtgtccatatttgtatgcaatggtgcatgatagttcagtgtctacaataccaggtgattttgtcattggtgtcaagttgacaaccataaacaatatgtgtgcatatgggctcaatcctggtatttcaggttctcgtcttttgggcaccattcctcagtccatttcacagcaaacttgtttggaatcaaatggcaacagtgagaacaccattgaattttgattctagcaagcagagcttttgtcagttttctattgaccttctcggtggaggaatcttagtggacaaaactggagattggatcacactta

SEQ ID NO: 79136 - DNA, 396 bp, Glycine max
cttgagcatatttgcaaacatggccactgccaacgggaacgggacacgagatgctggaattacagactcggagcatttttcgccgtatagagcagatggaaaattgtatggtttcgtatgcgtagttacaggagcaacccagcccgttggaaaagcaatcgtcgctgagcttgcagcacacggcgcagcatgcatatatgcatgctctagcctcccctcagaaacctacaccgaactcgccgactcaataaatgcgcaatacccaaacacaaaagtcatcggctacccttacaaaatcaactcggaagaagacactctcgccctgattgatgacgtgctgaactcctgtggccgactcgatgtttgacatcttctaccggtttgctaggacccccg

SEQ ID NO: 79137 - DNA, 350 bp, Glycine max
taaaaatgacctattaatcaacctggatttctttttatttaaccaccccgaccttagaatattccaggtactttttggcattggtgggtgaaattagttgggaaggccggttttgtggcagggggcaaaccaagggtagccctttttacaccttcgtggatttcaaaaactggtagccattggtaatggtttcttcaaggtggcatttcaactggtgattgtggctgtgctggcctctctggtgggctttgatgtgtggaacagcatccattgttctgcacattttttcttctgcgatatcttagtgtgactgattgctatgggatacatatcactatatctgtctatta

SEQ ID NO: 79138 - DNA, 395 bp, Glycine max
tggtgatgaaaaattgatgcgtgaaaggacgcacctgctgttggcttgttgttcaaggatggcaatttgtaagaaagatgtttggagagttgaatgtggaatcccttctggatttccgctcacagttatttgcaatagcatttttaatgagatgctcattagatatagctatgaaaaattactgcgccaggctaaagctccaagtatgtttttacaatccttcaaaaattttgtttctttgtgtgtgtatggtgatgataacttaattagtgttcatgaatatgtcaagccttactttagtggttctaaattgaaaagctttctagctagtcataacatcaccattactgatggtattgacaaaactagtgcaactttgcaatttagaaagttag

SEQ ID NO: 79139 - DNA, 401 bp, Glycine max
gttggctgatgggtgtccatatttgtatgcaatggtgcatgatagttcagtgtctacaataccaggtgattttgtcattggtgtcaagttggcaaccataaacaatatgtgtgcatatgggctcaatcctggtattacaggttctcgtcttttgggcaccattcctcagtccatttcacagcaaactgtgtggaatcaaatggcaacagtgagaacaccatagaattttgattctagcaagcagagcttttgtcagttttctattgaccttctcggtagaggaatcttagtggacaaaactggagattggatcacacttatacaaaactctttcaattagtaacttattgagagttgctgcttggaagaaaggctgtttaatggtcaaaattgtgatgtat

SEQ ID NO: 79140 - DNA, 343 bp, Glycine max
ttggaagaaaggctgtttaatggtcaagattgtgatgtctgggaatgcagcagtcaaaaggagtgattgggcctcattggtacaagtgtttttaacaaacagcaacagtacagagcattttgatgcatgtaagtggacaaaatcagaaccacattcctgggaattgatcttcccaatagaggtatgtggtcctaataatggttttgaaatgtggagttctgagtgggcaaatcaaacttcatggcatttgagtttccttattgacaatcccaaacagtctacagtttttgatattctcttgggaatctctcaagattttgaaattgctggtaatactcttatg

SEQ ID NO: 79141 - DNA, 86 bp, Glycine max
aaaaaaaaaaaaaaataaaaaaaaaaaaaaaaaaaaaaaaaaaaaaaaaaaaaaaaaaaaaaaaaaaaaaaaaaaaaaaaaaaaaa

SEQ ID NO: 79142 - DNA, 412 bp, Glycine max
gtcatttaatccaaacccgtgttctgatgcatggagtttggaatttctgaagcgtactggatttcattgcgatatcatttgtgtcactggatggactgccaccccaatgcaggatgttcaggttacaattgattggtttatttcctctcaggaatgtgttcccaggacctattgtgttttaaatccacaaaatccttttgtgttaaataggtggatgggaaaattgactttcccccagggcacttcccgaagtgttaagagaatgcctctttctatagggggaggagctggtgcaaagaatgctattctcatgaatatgccaaatgctgttctttcaatgtggagatattttgttggagatctcgtttttgaagtttctaagatgacttctccctacattaaatgtacagtc

SEQ ID NO: 79143 - DNA, 415 bp, Glycine max
agttaatgtcttggatcctccagaacaagtgcagcaattatctgtggggtcctctcctgaccatgatacatctggggaaatgcatgtgcaacgattaccttccgcagagctcccttcttctcatctggattcaactaatttacctttgacaaccgaaattgaacatcagccaactgtggttcctaatcaagatgtgcaacctgattcaaatttggaactctattcacattcacatgaagttgttgtgcatcctgcctcaaattcagatcctaatacagttacaccaagtgaagtaagagtgcaatctgcagacacaataaatttgtcgattcctttagagatcaattatcaacatatgcaagctgaaacccattcagcttccagaatgctgcatttaagctatgatccactcaac

SEQ ID NO: 79144 - DNA, 282 bp, Glycine max
  unsure (1)..(282): unsure at all n locations
ccggnccggaanncccgggtcgacccacgcgtccgcacacattcaattcatcctgataacatagttgccttatatctcacttccaataaaaacaaagcgctgaggtgtcatcacgtactttgagcactccaatctccctacattactcataacatgtgtattttacacccccaactcatgtaagtactcatgagcgttttttatgctctttgtaatttactgcacattgaaacataatttctacattttataatacttttattctacttaactatataatat

SEQ ID NO: 79145 - DNA, 392 bp, Glycine max
ggattcccggtcgacccacgcgtccgctagatctagatccccgcctccaaccttttttttactcccccaactcaatcattggaggctgtgatatccctctcaggggcttcaggtgactacacatacacatcctgctctactcactacactttagaccgtggtaaaaaaaaatgcacaccttaaatttgttacaaaataaaaatatactttatttaaataaaattaaatatattatgataaaataaaagttaaaaatatctaaatttttctaaacttttttttctcttccttcatttttattaactcctatattatattaaatttatatctttctccccctctttgaagaaacacaaatttaattccccactccccccatatatattcttttt

SEQ ID NO: 79146 - DNA, 75 bp, Glycine max
catctcaagcatccaatattacatccccatgcattccacgctatacatcttctatagggctacctaaatcaaatt

SEQ ID NO: 79147 - DNA, 471 bp, Glycine max
atacccgggtcgacccacgcgtccgtgcagatgctcagcctcctactacagtaaatcctcgtttttacctttctgagtcttaggtccagtggtgctttgctttttgggggggagagggtcttgctgtttaattccagttgtatttatcattcttttatttctttttttctttttttatttattcagtgctttgaatgtttttattttttatatttattattattttgtgactttataaatataattaatttattttttttttaactatattttttttttattgtttaattttcttttatctttttttgttatttgtttatatggtatatattttttttttttaaatatttttttttgttttttttttttattattatttatttttttactattattatatattatatttattattattttttttgtatattgttatttttttttaatatttttttttattttaatatttat

SEQ ID NO: 79148 - DNA, 263 bp, Glycine max
cccgggccgaccgcacgcgtacgattacacctgtatcagctaaaacatatcccaattttaattttaatacaacaaatccatctagtgggtgtcaaaaaaagctacagatcaattcctaccataatcttttattattattaatcacctatttctttacacatttttccttataatctttaatcaactaattctataattaatttttatattttattaatatttatttatattaaacttaattcatttaaataatattttatttt

SEQ ID NO: 79149 - DNA, 286 bp, Glycine max
cggaattcccgggtcgacccacgcgtccgtagaacgccgcgatctccgcgccggccgggtccttatcttgggatcgggtggctggggcggggggaggggggcccaggcagagagcgcggaaagcgataaatactcggaaccttctccgcctcccgcaggccccgttatctgcctaccgctccgacaccccgatgatctgagccagtagggctacgagagccatgggcccggacccagcccgattccttccctgctacgaccgggccctgacgtcatagctaaaccc

SEQ ID NO: 79150 - DNA, 314 bp, Glycine max
  unsure (1)..(314): unsure at all n locations
cggaatncccgggtcgaccaacgcgtccgatttaatttaaaaaaaaaaaaaaaaaaaaaataatatatttttaaaaaaaataaaaaaataaagaagggaaaattttaaaaaattaaaaataattaaaaaaaataataaataaaattgggggcggccgttttaaagaatcaaagtttacttacccttgcttgcaaaataataatttttttatagtgtcactaaaattaaattaattggccgtttttttaaaactttttaattgtaaaaaccttggttttaccaaattaaattgctttgaagaaaaattccttttt

SEQ ID NO: 79151 - DNA, 358 bp, Glycine max
aattcccgggtcgacccacgcgtccgaagaaaggctcactggactccagtctgtcttactgctgaagaacttgtactggccccttccagcccgtggctctggagggacagcagtggaagtgaaccatacctcgagccttgctggctgtttataggaagcaggaagcaagcatgagacccagtggggtggggtcagatgggcaggtcccaaagcctctacctgcatgtgctgtgccggacgtgaagtcctcttccctagcagtgtaactgtctggttaccacagttacgtggggtgagggtccctgtagcctttggcgtcctaggttcaacccctgtctcccatttgtgtggaattggc

SEQ ID NO: 79152 - DNA, 147 bp, Glycine max
  unsure (1)..(147): unsure at all n locations
cggaatncccgggccgacccacgcgtccgttgactcacagatggtttctttaataaataaacctttttcctaaccatatattataaaatgggggggtttcaatttattgtgtggtgaaaccaaattctttttaaatgttaacaactt

SEQ ID NO: 79153 - DNA, 417 bp, Glycine max
ggaattccgggtcgacccacgcgtccggaaaatctcactagaaggaaaaacacacttattttagattcgagtccgcaagtaccacaagatgggagttatgttaacttcgacagacaatttttacaccttgaatgcccacttataagcaaccgatccgacaactctttgctgaatcttcaccccttgctataaaaaaaaatcatcaaaaccaaacaactggctacaacacgaatagtacttaaatttgctaactgatatctaaaaaccgtgtcgatacactgctacctcgttgttacgtacaccactacaaggaatcatccttaacacaatggatacttggatcctcaaacaaatactgtctccatagtcactggtcacccttatctccattaaaacactaacagctcacccatccat

SEQ ID NO: 79154 - DNA, 184 bp, Glycine max
  unsure (1)..(184): unsure at all n locations
gaannnccgggccgacccacgcgtccgaaccaccttattaaggttgtcattctccaagttttcttttactttctaacttactatcttagggcagggagtatatttacctacgctgtcctattctcatagcttttctaaaaagacaaattaatgtgacatgacaattttttaattcataactaat

SEQ ID NO: 79155 - DNA, 429 bp, Glycine max
aggcttgaagggccgtgaacccacccttccgcacccatggggtcttttttattgtggtaaaatatactgaacataaaatttatgttcaataaaaaacaaaaattgtttttaaccattttaagtacatagttcagtgacattatatgcattcactgttgtgcaaccgtcacccctatgcatttccagaactttttcatcattctatgctgaaactctgtgcattaaacacttaactcgtcagtctccccttccccagccccaggcaaccacagtcctaaccttctgttcctatgatactgtaagtgcctcatgtaagtgaaatcccatagtatttgtctctttatgactgggctatctcacttagcagcatgtcctccaagttcatccatgatgtagcttatgtatctagacttcctgccttttaaaggc

SEQ ID NO: 79156 - DNA, 171 bp, Glycine max
ggatcaggcctggagggccgtcgacccactcgtccgctctctgatctggatttatcagcactacgacaacacacacatggggtgggtcttctaattaaaaggtacagtcttctaaaacaaacaaaggctgaccaaccacttcgtattatgcctacctgccccatatcctct

SEQ ID NO: 79157 - DNA, 442 bp, Glycine max
  unsure (1)..(442): unsure at all n locations
ccctncgtnagccggatcaggccttgagggccgtccaaccaacccttccgccgaaagtttgtggccctggagggccggcacaccagcgccctggccttccgcctgaataatgcctggcagagctgcccccataacaacgtgaccggcattgcctttgaggacgttccgattacttccagagtgttcttcggagagcctgggccctggttcaaccagctggacatggatggggataagacatctgtgttccatgacgtcgacggctccgtgtccgagtaccctggctcctacctcacgaagaatgacaactggctggtccggcacccagactgcatcaatgttcccgactggagaggggccatttgcagtgggtgctatgcacagatgtacattcaagcctacaagaccagtaacctgcgaatgaagatcatcaagaatgact

SEQ ID NO: 79158 - DNA, 406 bp, Glycine max
gacaatcaggcctggagggccgtcacccacgcgttcgggagaaatgagatgccataaagtgattaactttggccgtgaatgtgctcaaacctaacaccaaactgaaaacataaatactgaccactcctatgttcggacccaagcaagttagctaaaccaaaccaactcctctgctttgtccctcaggtggaaaagagaggtagtttagaactctctgcatcatggtggcaattaatcaaaaacctcagatgcttgaaattcctaatacctatactttatagcggttatagtcagctcatttgcatgccactatttcccataatgcttctgagagccactaacttgattgataaagatcctgcctctgctgagtgtacctgaacagtatctaagatgaaagagttta

SEQ ID NO: 79159 - DNA, 88 bp, Glycine max
ccacccttccgggggaaagtgtaaagcattccaacaaagggttttaatgtagatttttttttttgcaccccatgctgttgattgctaa

SEQ ID NO: 79160 - DNA, 443 bp, Glycine max
  unsure (1)..(443): unsure at all n locations
atcagggcttgaagggccgtcaacccacgcgtccgcttgttgtaatagagcttagattttagtggggcaattagatactgaaaagggacacacacaggacagctgaagatagncgtacattctacanaacanacaataacacaccgtgtactggttgggatagcgtcctccccagattcaagtccttcccagaacctcaaggtgtgatctgatttaaaaacacggccattgcagatgctgaagtttcatctcatgcttgagtgaggtggactcttaatccaatatgactagtgtccttctaagaagagaaaagatacagagactgtgacccaagggagaagacagccacctgaagacagaggcaaaagattggagtgatgcggctataatccaaagaatgcaaggggttgctggcagccaccggaagctgacagggggtggga

SEQ ID NO: 79161 - DNA, 222 bp, Glycine max
gggacggccacccacccatcctttgtttaataaagctttttttttttttgccaatacatacattgggggggactcacaagacggctggagattactctacattctacaaaacaaacaataacacacctttttctttatgggatatcgttcttcccacattcatagtcccttcccaaaaccttagggtgtgatctgatttaaaaacacggccattgcagattc

SEQ ID NO: 79162 - DNA, 436 bp, Glycine max
ggcttgaagggccgtcaaccaacccttccggttgcattagtcagaattttccagagaaacagaaaaaataagattcgcgtgtgtgtgtgcaaacatatatataaataaataaaaatatatttattttaaggaattgactcacatgattttgaaggcaggcaagcccaaagtctgcaaggggtgggccagcagagagctggtgctacagtgcaggtctgaaagttgccagagtcccttttatagagaagcttaaaaaatatttgttgaattaaatgtcttaggtagagacaaattgaattaaagtggttaagtaaatactcttaggtgaaatttgtgcaaattatgagtataaagagggtgagctacagaactctccatgaccactcaagaatgggacccaaaggcaaatgataacttattcattcatcaagggata

SEQ ID NO: 79163 - DNA, 253 bp, Glycine max
ggccgtcaccaacaccgcgtccggcttagtggaacaacgattattatcaaggccgagcgactcttatcgggaggaactaagaggagcgtggtgtaacatctcgacacacccgaaagtggatcagtcccccctgggcccgaaccgctttggatgccacaccttctacaaactctctaacatccgcgaccaccggaaattcatgagcccgcctactcacgagtaggtaccagacttgaggacgaaataccttatg

SEQ ID NO: 79164 - DNA, 422 bp, Glycine max
gggccgcgacccacgcgtccggtgagaccatgtctctgagaaaaaaagaaaaaagattatggagacctattcttattgcatggagagacgatcataacatagtgagcaggggttaggaaaacccagattatgtacaacgaatgtgcgttacacttaataattagaagaaaaaagatgtcttttttggggagggggtgacaatgccttgtaaatgtaaggccacttgagaggactgtacagaaatcaaatccttaaagaaaagtaaacatgccaggtcttctgaatctcagcaagggttggccttcttagcattcctacatgggagattctaggattattccagctgtgttacttcaaggattcttgaaactcttcttggacccatttgttgactgactgctttgatggactcgtaatacaca

SEQ ID NO: 79165 - DNA, 237 bp, Glycine max
gcagcttatggcgctgttttgagggacttaccccctgcggagagtgctaatgtggacataatggccaaacacccactccagtgcacaaaacagacttgcaatcgcttgagcccactgagcagatatggtgggttggctggaggcttctctttctaagaccctgcctgtctgacagcctgcagctattctggtttgacactgacttaactacttgaaactttatttattgcaccatgt

SEQ ID NO: 79166 - DNA, 450 bp, Glycine max
ctctagccgataggcctcagggccgtcacccacgcgtccggcggcggctgctgccatggtggctggcggccggtaagggtctgagtggatctcctgccaggccagagcgccttcgggggccgcggcgggaggccaggagtttgcagccagggcgccgggtttgtggtctgcagtgtcgtgaggctgaagtgcagcatgtctagactgggagccctgggtggtgcccgtgccgggctgggactgttgctgggtaccgccgccggccttggattcctgtgcctcctttacagccagcgatggaaacggacccagcgtcatggccgcagccagagcctgcccaactccctggactatacgcagacttcagatcccggacgccacgtgatgctcctgcgggctgtcccaggtggggctggagatgcctcagtgctgcccagccttccacgggaa

SEQ ID NO: 79167 - DNA, 330 bp, Glycine max
cgcttccccccacgcttccgaccagacttaagttttgcctcataccattccacccaaactgacttgggcccatccctgggaaaacctggtgaaacctctcccccagactccaaatcatctccatctgtcttaatacattctttaggtaaatccactactgacaatgatgtcagaattcagcaactgcaggagattttgcaagatctacagatgagattagagagctctgaagcagagagaaaacagctacaggtcgaactccaatcccgaagggcagaactggtatgcttaaacaacactgaggatttcagagaacagcttcttgacctc

SEQ ID NO: 79168 - DNA, 218 bp, Glycine max
  unsure (1)..(218): unsure at all n locations
ccctncgtagccggataggccttgaggccccaacccaccctccggtatgcaggaaagaccccaacttgccttacacttcattccactaatatgcagatactcactctagcaggagcaccgctacattatcattctagacggctggtttttttaattcctttgtttaactgggcccaaatgatttgaaagtacctgtactgcaattctgaaactggtta

SEQ ID NO: 79169 - DNA, 450 bp, Glycine max
ccctcgtagccggatcagcctgagggccgtcacccacgcgtccgcgcatcgccgaggatgaggaggttcaacattagatttgggatcccagcgaataatgtgatgatgcagttgtgattgttagcgagggccgccgctcactcttaccatatgactgatctccatagacagtgacagcgtttgactcttaaatacgctgtcactgaactcgggcccagactattctaacgtacctgcacgtgcaatgtgaaactggttaagagagcgaatgtattgcatcagcacggctatcacaaattaatgacgcatctactacggagaaaaaagtgtgctgttacagataccaacgaggtgcaaaagaggctgcatataactctttatacaacccccaccttgtttccatcttaaaatggcccactgttcatctttcactggttttgcacatagctc

SEQ ID NO: 79170 - DNA, 442 bp, Glycine max
gggccgccaacccacgcgtccgcggacgcgtgggctccggaggcggcctgggcgatggcggcggagtttggtccataacctgtgcaaccgcgcagctggaggatggcctcactcgggcctgccgcagctggagagcaggcgtcgggggctgaggcggagccgggccccgcgtggccgtcgtcgtcgtcctcaccgtgcctgtctggggccccctgctcccccttgcagcggggaaccctctctacaaactgggcagggcgaccaaggacgtccgctgaagagagcgctttcgcccttcctcttcaactcgggagctgctgagcgatgtgcgcttcgtactgagcaagggtcgcggcgccgacgccgctgggggcccgcagcgcatcctcgcccaccgcttcatgctggcggacggcaacgccgtctttgaccccatgttcaa

SEQ ID NO: 79171 - DNA, 294 bp, Glycine max
gctgtttaatggtcaagattgtgatgtctgggaatgcagcagtcaaaaggagtgattgggcctcattggtacaagtgtttttaacaaacagcaacagtacagagcattttgatgcatgtaagtggacaaaatcagaaccacattcctgggaattgatcttcccaatagaggtatgtggtcctaataatggttttgaaatgtggagttctgagtgggcaaatcaaacttcatggcatttgagtttccttattgacaatcccaaacagtctacagtttttgatattctcttgggaa

SEQ ID NO: 79172 - DNA, 271 bp, Glycine max
gtggctctcttcaaagaggccatggaaaagtcgcccggcaaacatctggacatagttgtcgcgaacgccgggattggagagtctgaccctgagatgttccttcctcaggccgatcttaagcttcgcaagcccaacgttaagaccatcgacatcgacctgaccggtgtcatctataccgcccatcttgcttactgggcgttcgcgcagccggctcctaaaggcgactcgctatcttcgggctctccccgacaccattcccttctcctgatcg

SEQ ID NO: 79173 - DNA, 198 bp, Glycine max
ctcgagccgcgccacccagttccgatggctctcctcgccgtcacttcgcgcgctcccttcctcttctccccaaaccctaaaccactttctccatcctctttctactcccacctctctctctcttctcgctctcccagggtcccttctcttcgctttcgctctggcaccggagacgccagcgacgccggcaagcccgcc

SEQ ID NO: 79174 - DNA, 86 bp, Glycine max
cgcacgccggcccggcggctcggaacttcggctcgagcgtcgagctcgattgggtcattcccaacaacatagcgcgtcgtcgcata

SEQ ID NO: 79175 - DNA, 209 bp, Glycine max
cgaaattcggttcgggaaaaaaaaaaaattattataaaaaaaaaaaaaaaaaaaaaaaataaaagttggaaatataaatggggggaaaaaaaaaaaaaaaaaaaaaaaaaaaaaaaaaaaataaaaaaaatggggccgccccccaattattaacttcttcaccccggaatttaatttcgacccggaccttgaaggcttaccatttttcc

SEQ ID NO: 79176 - DNA, 253 bp, Glycine max
tattgaatggctgcaaaaagctgatgtgcctaccatagcacagattgaagagttccattcgatgcagaggatgatgaatgctcctgattcaaatgataatattgatttactgttgagcattgatttgttgggtttacaaggagcaggtaaagcttttccaaacaaaattgtttttgatgataagcttgtgttggctaacacacaagaattctttgatggaaattttccagtggattcttggttaccaattttt

SEQ ID NO: 79177 - DNA, 191 bp, Glycine max
ctcgagccgcaactctgttggctgatgggtgtccatatttgtgtgcaatggtgcatgatagttcaatgtctacaataccaggtgattttgtcattggtgtcaagttgacaaccataaacaatatgtgtgcatatgggctcaatcctggtatttcaagttctcgtcttttgggcaccattcctcagtccatt

SEQ ID NO: 79178 - DNA, 346 bp, Glycine max
cagaaaaacaagtagttgagaactaagaagaaggaaatggcttcctcaatgatctcctccccagctgttaccaccgtcaaccgtgccggtgccggcatggttgctccattcaccggcctcaaatccatggctggcttccccacgaggaagaccaacaatgacattacctccattgctagcaacggtggaagagtacaatgcatgcaggtgtggccaccaattggcaagaagaagttcgagactctttcctacttgccagacctcgatgatgcccaattggcaaaggaagtcgaatcccttctaaggaaaggatggattccttgctggaattcgagttgaacacggt

SEQ ID NO: 79179 - DNA, 196 bp, Glycine max
tgcaacagcaaattgggtggattcaaccggcaacattgagaccaccctggaatttcggttctagcaagcagagcttcaggaaaatgtctattgaccttttcggcggaagaattttattacacatagctgaactaatggatcacacctgatacaacattgtccaatgatgaacttgcatataggtgctcattggaac

SEQ ID NO: 79180 - DNA, 177 bp, Glycine max
tgaaaaattgatgcgtgaaaggacgcacctgctgttggcttgttgttcaaggatggcaatttgtaagaaagatgtttggagagttgaatgtggaatcccttctggatttccgctcacagttatttgcaatagcatttttaatgagatgctcattagatatagctatgaaaaattact

SEQ ID NO: 79181 - DNA, 331 bp, Glycine max
ctttactatattacttgaaaaataataaatagaaaaaattactcaaaataagggtaggatgcgttggtaataccttattttttttcataaaacctgttttttgtttaatttgattcctttacccatacaatatcctctttttgttttgatatacaagaccggtaaatacgaagtagataaggggcaaattcatgttagaagtagcaattaaagtagataggaaaggatggtaggatgaagaaaaagtttgtgtgggacctcaaaaaaacaaaaatctcttaattaattggtcttggtggaaatgatgatgggatctaaatcaagtgaaaat

SEQ ID NO: 79182 - DNA, 206 bp, Glycine max
  unsure (1)..(206): unsure at all n locations
aaaaaaaaaaatttaaaaaaaaaaaaaaaannnnnnggggaaggtaaaaaaaagaaaggggaaaaggggcggccgccaactaagtgcgctcgacaacccggaaattaattcacgggccggtccctgcaggcgtaccatctttccctatagttttttttcttaccccttgcctgaatcctggtcatatctgttttctgtgggaaatt

SEQ ID NO: 79183 - DNA, 61 bp, Glycine max
aagagattgaagagacccccagaccgacaaggacagatggaaaggtcttgcctatgatatc

SEQ ID NO: 79184 - DNA, 160 bp, Glycine max
atgtggaatcccttctggatttccgctcacagttatttgcaatagcatttttaatgggatgctcattaaatatagctatgaaaaaatactgggccaggctaaaactccaaatatggttttaccatccttcaaaaaatttggttctttggggggggatggg

SEQ ID NO: 79185 - DNA, 328 bp, Glycine max
cattggttcaaccatagctcaaggtatggcttttggcactggaagtgcagtggcacacagggctgtggatgctgtcatgggtcctcgtaccattcaacatgaagcagtagtcacggaggctgctgctgctgcccctgcacccactgcaaatacttttggtggcgatgcatgcaatgttcatacaaaggcattccaggattgcctgaacagctatggcagtgaccttagcaagtgccagttttacatggatatgcttgcagaatgcaagaagaactctggagcctcgttgagtgtgtaactgctacatttgtctgtttgggagtttgca

SEQ ID NO: 79186 - DNA, 361 bp, Glycine max
caaaactggagattggatcacacttatacaaaattctccaattagtagcgttgttgagagttgctgcttggaagaaaggctgtttaatggtcaagattgtgatgtctgggaatgcagcagtcaaaaggagtgattgggcctcattggtacaagtgtttttaacaaacagcaacagtacagagcattttgatgcatgtaagtggacaaaatcagaaccacattcctgggaattgatcttcccaatagaggtatgtggtcctaataatggttttgaaatgtggagttctgagtgggcaaatcaaacttcatggcatttgagtttccttattgacaatcccaaacagtctacaagttttgatat

SEQ ID NO: 79187 - DNA, 296 bp, Glycine max
gtcatttaatccaaacccgtgttctgatgcatggagtttggaatttctgaagcgtactggatttcattgcgatatcattggggtcactggatggactgccaccccaatgcaggatgttcaggttacaattgattggtttatttcctctcaggaatgtgttcccaggacctattgtgttttaaatccacaaaatccttttgtgttaaataggtggatgggaaaattgactttcccccagggcacttcccgaagtgttaagagaatgcctctttctatagggggaggaactggtgcaa

SEQ ID NO: 79188 - DNA, 251 bp, Glycine max
  unsure (1)..(251): unsure at all n locations
cttggtatctggggaggcaagggacaaggaaaatctttccaatgtgagcttgtctttgccaagatgggaatcaaccccatcatgatgagtgctggagagttggaaagtggaaatgcaggagagccagcaaaactgatcaggcagagataccgtgaagctgcagacatgatcaagaaaggaaagatgtgcgctctcttcatcaacgatcttgatgcangagctggtcgtcttggtggaaccacacaatacac

SEQ ID NO: 79189 - DNA, 302 bp, Glycine max
ggaggatcctccgcatttgtatattaaccagtccgcacgcccggctgatccgctacctttgtacaaatattacccctgcacaaaatggctcacgttatggactcggtccgcgacaagctgggcttcgacctgcacgccgtgtacgccccgctgccgtggacgctgctgaacattagcgccgggatggacaccgtcagcggccaccgccgtctcctgccgcgcggcctgcagaactacctgcctcctcagggcgagatctcgatcgtgtcgcactacctgaacggcctcggcattgtcctcgc

SEQ ID NO: 79190 - DNA, 351 bp, Glycine max
  unsure (1)..(351): unsure at all n locations
cttctccctacattaaatgtacagtctctttcttcatagcatttggaaatttggctgatgataccatcaattttgaggcttttccccacaagctggtgcagtttggagagattcaggaaaaagttgtattgaaattttcacaagaggaatttcttacagcttggtcaactcangtgcgtcctgcaacaactctgttggctgatgggtgtccatatttgtatgcaatggtgcatgatagttcagtgtctacaataccaagtgattttgtcattggtgtcaagttgacaaccataaacaatatgtgtgcatatgggctcaatccttgtatttcaagttctcgtcttttgggca

SEQ ID NO: 79191 - DNA, 392 bp, Glycine max
tgcacgcgtacgtaagctcggaattcggttcgagaccagtacaaagttttttgatgcttgtaagtggacaaaatcagaaccgcattcctgggaatggatcttcccaatagaggtatgtggtcctaataatggttttgaaatgtggagttctgagtgggcaaatcaaacttcatggcatttgagtttccttattgacaatcccaaacagtctacagtttttgatattctcttgggaatctcttaagattttgaaattgctggtaatactcttatgccagcttttttctgttccacaagctactgccagatcttctgaaatgcgggaatctctgcatgatctggaatttgggttttctttcccttgtccgtttgttaaattcaataaaaggaaa

SEQ ID NO: 79192 - DNA, 317 bp, Glycine max
tgcttgcacaaaagcaatgactatgtcatttaatccaaacccgtgttctgatgcatggagtttggaatttctgaagcgtactggatttcattgcgatatcatttgtgtcactggatggactgccaccccaatgcaggatgttcaggttacaattgattggtttatttcctctcaggaatgtgttcccaggacctattgtgttttaaatccacaaaatccttttgtgttaaataggtggatgggaaaattgactttcccccagggcacttcccgaagtgttaagagaatgcctctttctataaggggaggagctggtg

SEQ ID NO: 79193 - DNA, 312 bp, Glycine max
tgataatattgatttactgttgagcattgatttgttgggtttacaaggagcaggtaaagcttttccaaacaaaattgtttttgatgataagcttgtgttggctaacacacaagaattctttgatggaaattttccagtggattcttggttaccaatttttgtgaattgtctttatcctgtaagtcaattaccttcagaagctgtcgttgtaaatgttacatgtggtagtggacgtggtggtttacccaccactgcttggattagttctgcagttaacaatcgctcctcagatatcaacaaaaggattcgcac

SEQ ID NO: 79194 - DNA, 65 bp, Glycine max
aaaaaaaaaaaaaaaaaaaaaaaaaaaaaaaaaaaagggaaaggaaaaaaaaaaaaaaaaaaaaa

SEQ ID NO: 79195 - DNA, 229 bp, Glycine max
ccctcttgttgagtatgctctgcctatttgaaaatttccacacctcttttaattgtcgtaatgatgtgtgaagtgtgtgttattttaaaaaaaaaaaaaaaaaaaaaaaaaaaaaaaaaaaaaaaaaaaaaaaaaaaaaaaaaaaaaaaaaaaaaaaaaaaaaaaaaaaaaaaaaaaaaaaaaaaaaaaaaaaaaaaaaaaaaaaaaaaaaaaaaaagggggggccccc

SEQ ID NO: 79196 - DNA, 133 bp, Glycine max
gtaagctcgaattcggtcgagctgtgcagtttggaaagattcaggaaaaagttgtattgaaattttcacaagaggaatttcttacagcttggtcaactcaggtgcgtcctgcaacaactcttgtggctgatgg

SEQ ID NO: 79197 - DNA, 150 bp, Glycine max
actctctctcacttggggttgaaaatgaaaatttgtggagcagggatcagcagcagctacaccaccacgtgcaaatcccttttaaggtttgctttctctttcctctccaaacctgcaaaaaccaaaattctgccctcactttctaaaatt

SEQ ID NO: 79198 - DNA, 106 bp, Glycine max
gtggaatgaaaattgtctctgttgggactgatgccaaggggaacatttatatataagagcttggggaagcttcttaaacacacaaaggtaacttatctggacttat

SEQ ID NO: 79199 - DNA, 417 bp, Glycine max
tgcacgcgtacggaagctcggaattcggttcgagcatgatagttcagtgtctacaataccaggggattttgtcattggtgtgaagttgacaaccagaaacaatatgtgtgcatatgggctcaatcctggtatttcaggttctcgtcttttgggcaccattcctcagtccatttcacagcaaactgtttggaatcaaatggcaacagtgagaacaccattgaattttgaattctagcaagcagagcttttgtcagttttctattgaccttctcggtggaggaatcttagtggacaaaactggagattggatcacacttatacaaaattctccaattagtaacttgttgagagttgctgcttggaagaaaggctgtttaatggtcaagattgtgatgtctgggaatgcagcagtcaaaa

SEQ ID NO: 79200 - DNA, 277 bp, Glycine max
  unsure (1)..(277): unsure at all n locations
attgcttcttgtttctttcatcattttcatggctacggnttttcttctgtatttttatatatatttaaatgaattgtcacacgttttttgttttttggtggcttctatggtggagaagggagtcatgtggtccaatcgtgaagaagaaaaattgtttgttacagtatagaaattttcctcagtgtcactgttccaagtctccatttttcctattggtttatttcttccatttccagttccgaaaagggtgtgtgatcattcaatgcangtgggttcg

SEQ ID NO: 79201 - DNA, 256 bp, Glycine max
gggaatctctcaagattttgaaattgctggtaatactcttatgccagctttttctgttccacaggctactgccagatcttctgaaaatgcggaatcctctgcatgatctggaatttgtgttttctttcgcttgttcgtttgtttaattcaataaaggaaattaggcatgaccctcttgttgagtatgctctgcctatttgaaaatttccacacctcttttaattgtcgtaatgatgtgtgaagtgtgtgttatttt

SEQ ID NO: 79202 - DNA, 343 bp, Glycine max
gttctgagtgggcaaatcaaacttcatggcatttgagtttccttattgacaatcccaaacagtctacagtttttgatattctcttgggaatctctcaagattttgaaattgctggtaatactcttatgccagctttttctgttccacaggctactgccagatcttctgaaaatgcggaatcctctgcatgatctggaatttgtgttttctttcgcttgttcgtttgtttaattcaataaaggaaattaggcatgaccctcttgttgagtatgctctgcctatttgaaaatttccacacctcttttaattgtcgtaatgatgtgtgaagtgtgtgttattttaa

SEQ ID NO: 79203 - DNA, 331 bp, Glycine max
  unsure (1)..(331): unsure at all n locations
gtttgatggctgaagagagacctttaaatttagggatcatggactcatgcctgagtcatggtgctcatctctctcgctctcttattttgggggcttcaaaactgccaattccacctttcacactgctaggccatgttacctttggatatctagtatccctgggttttggcgatggttcccatattaaattttgggaggacatttggccatctaggtgggtaaccttgctctttttaatgcttttccaagactcttctctatttctcccaatgcccctataatccaattntattttcttgcatccttataatccaatttcacccaaaggatc

SEQ ID NO: 79204 - DNA, 212 bp, Glycine max
caactatttataacgctcatgaggccatccaggagggccaagactttcttcggatcactatctggctctgcattggggactttggccctcaaaattgggggggaagacccatttggtttcacccacttatcacctttcttgaatctttttaaaggggaggtggtacctaaccccccatagatgagggctattcttttttaagggaggaggct

SEQ ID NO: 79205 - DNA, 387 bp, Glycine max
gtaagctcggaattcggttcgaggtgattgggcctaattggtacaagtgtttttaacaaacagcaacagtgcagagcattttgatgcatgtaagtggacaaaatcagaaccacattcctgggaattgatcttcccaatagaggtatgtggtcctaataatggttttgaaatgtggagttctgagtgggcaaatcaaacttcatggcatttgagtttccttattgacaatcccaaacagtctacagtttttgatattctcttgggaatctctcaagattttgaaattgctggtaatactcttatgccagctttttctgttccacaagctactgccagatcttcttgaaatgcggaatcctctgcatgatcttgaatttgtgttttctt

SEQ ID NO: 79206 - DNA, 156 bp, Glycine max
tccaatgctacctgtgggaagcggttgggtttaattgggcttgagaacactggaacttaacggccgggattcccggcccttcttgggacaagttccagaattggtgaagacattttttggggcattctttttgagggaaatctttttccattcaca

SEQ ID NO: 79207 - DNA, 125 bp, Glycine max
ctcgagccgcttgtgagcagattggaagagaagagaagttggtgtcaacagcagaagcttcttcttcgttccaagaaacagcgcgatgcgttgtgtgccattgcagtttcaacaccttcagaaaa

SEQ ID NO: 79208 - DNA, 295 bp, Glycine max
gtcttgcaattgaagttgaagtcttgcccttctctcttcaactgcaaacacaagacatcatcatccatggctgcctccgtctccactgtcggagctgtcaacagagctcttttgaacctgaatgggtctggacctggggtttcagctcccagttcatccttctttgggagcagcttgaagaaggttattggctcaagggtccccaacacaaagatttcctctggaagcttcaagattgttgctgtagaagagaagaaagagattgaagagacccagcagaccgaccaggacagat

SEQ ID NO: 79209 - DNA, 324 bp, Glycine max
ggaaatttggctgatgataccatcaattttgaggcttttccccacaagctggtgcagtttggagagattcaggaaaaagttgtattgaaattttcacaagaggaatttcttacagcttggtcaactcaggtgcgtcctgcaacaactctgttggctgatgggtgtccatatttgtatgcaatggtgcatgatagttcagtgtctacaataccaggtgattttgtcattggtgtcaagttgacaaccataaacaatatgtgtgcatatgggctcaatcctggtatttcaggttctcgtcttttgggcaccattcctcagtccatt

SEQ ID NO: 79210 - DNA, 365 bp, Glycine max
actggatggactgccaccccaatgcaggatgttcaggttacaattgattggtttatttcctctcaggaatgtgttcccaggacctattgtgttttaaatccacaaaatccttttgtgttaaataggtggatgggaaaattgactttcccccagggcacttcccgaagtgttaagagaatgcctctttctatagggggaggagctggtgcaaagaatgctattctcatgaatatgccaaatgctgttctttcaatgtggagatattttgttggagatctcgtctttgaagtttctaagatgacttctccctacattaaatgtacagtctctttcttcatagcatttggaaatttggctgatgatac

SEQ ID NO: 79211 - DNA, 320 bp, Glycine max
tttctcaagagaaactttaagcagatgtctaatgttttgtgggtggctcctgaggacaaggcgagtttatggtcacaacttcattatgtttcgtgtaataatctggaaatgcaagaagcttatcttgtcaatctcgtaaatgtgttacgagaattgtatttgcacagtccaaaggaagctcgccaattgagaaggaaagctctctctcgtattgaatggctgcaaaaagctgatgtgcctaccatagcacagattgaaaagttccattcgatgcacaagatgatgaatgctcctgattcaaatgataatattgatttact

SEQ ID NO: 79212 - DNA, 325 bp, Glycine max
gacgtcgcatgcacgcgtcccgtagctcgagattcggctcgcgaaaaaaaaaaaatacaaaaaaaaaaaaaaaaaaaaaaaaaaaggggaaaaaataaaaacaaaaaaaaaaaaaaaaacaaaaaataattattggaaccctaaaaaatatggttattcccacacctgatttccaccctttccggaatgtgatcccagtaattttttttccgccatgccttatgaacctggctcaatcttgataaggggcccccccctttttttggttccctacccccccctttttccaccccccttcccccaccttgccccccctctttttttt

SEQ ID NO: 79213 - DNA, 200 bp, Glycine max
ataacttaattagtgttcatgaatatgtcaagccttactttagtgggtctaaattgaaaagctttctagctagtcataatatcaccattactgatgggattgacaaaactagtgcaactttgcaatttaaaaaggtagcagattgtgattttcttaaaaaaaacttttaaccaatgtcttatggtttgggggggggttct

SEQ ID NO: 79214 - DNA, 56 bp, Glycine max
gtggaggaccatttttgggtatggtcattggccaaatttttggccgaggccatttt

SEQ ID NO: 79215 - DNA, 82 bp, Glycine max
gtgtccttttgcatttgtgaactagtatgtagaatttaattcacttaaataaagcgcattactatgtgcaatgagtgtgttt

SEQ ID NO: 79216 - DNA, 255 bp, Glycine max
ccagtctaatgccaaatgtcaaatactatggaaagtagaattggtgtgcccgacgacaggaatgaggggactgtccaacgtctaatggacgtgccacaacacagatgtgagggtttgggtacacagcaagccttatcctgcgacaatgatgcaaaatcaaagactagtatgccctgtatgtggaggggaaatcaaagagtcgaccataatcgatgcgggtcgtatttgctgaatgaaaaattaacgaattgttct

SEQ ID NO: 79217 - DNA, 250 bp, Glycine max
caccggtggatatttttgtacatttttttcattaggcaccaacgaaaccctatacttacccacaaaaaaaaaaaaaaaaaaaaaaaaaaaaaaaaaaaaaaaaaaaaaaaaaaaaaaaaaaaaaaaaaaaaaaaaaaaaaaaaaaaaaaaaaaaaaagaaaaaaaaaaaaaaaaaaaagagaggcaaataaaaaaaaaggcgaaatcaaaagacatagaagtttttctgtgtgaaaatgaaataaagatc

SEQ ID NO: 79218 - DNA, 465 bp, Glycine max
atcgagataactagaaacagtgtgatgaaaatgaagggccttgttttcttcgttgctacaattttggtagcatggcaatgccatgcgtacgatatgttccctctccgaatgaacactggctatggtgcccgtactccggaggtgaaatgcgcaagttggaggcttgctgtggaagcacacaacatctttggctttgagaccattcctgaagagtgcgttgaagcaacaaaggaatacatccatggcgaacaatatagatcagactccaaaacagttaaccaacaagcttacttttatgccagagacctcgaagtccatcccaaggacacatttgtgttcagtatagatggcaccgtactctctaatattccatactacaaaaaacatggatatggggtggagaaatttaactcgaccttgtatgatgaatgggttaacaagggcaatgcaccggcactgcccgag

SEQ ID NO: 79219 - DNA, 379 bp, Glycine max
tgctgttctttcaatgtggagatattttgttggagatctcgtctttgaagtttctaagatgacttctccctacattaaatgtacagtctctttcttcatagcatttggaaatttggctgatgataccatcaattttgaggcttttccccacaagctggtgcagtttggagagattcaggaaaaagttgtattgaaattttcacaagaggaatttcttacagcttggtcaactcaggtgcgtcctgcaacaactctgttggctgatgggtgtccatatttgtatgcaatggtgcatgatagttcaatggctacaataccaggtgattttgtcattggtgtcaagttgacaaccataaacaatatgtgtgcatatgggctc

SEQ ID NO: 79220 - DNA, 438 bp, Glycine max
gcatgtaagtggacaaaatcagaaccacattcctgggaattgatcttgccaatagaggtatgtggtcctaataatggttttgaaatgtggagttctgagtgggcaaatcaaacttcatggcatttgagtttccttattgacaatcccaaacagtctacagtttttgatattctcttgggaatctctcaagattttgaaattgctggtaatactcttatgccagctttttctgttccacaggctactgccagatcttctgaaaaatgcggaatcctctgcatgatctggaatttgtgttttctttcgcttgttcgtttgtttaattcaataaaggaaattaggcatgaccctcttgttgagtatgctctgcctatttgaaaatttccacacctcttttaattgtcgtaatgatgtgtgaaatgtgtgttatttttaaaa

SEQ ID NO: 79221 - DNA, 447 bp, Glycine max
  unsure (1)..(447): unsure at all n locations
ttggagagttgaatgtggaatcccttctggatttccgctcagggttatttgcaatagcatttttaatgagatgctcattagatatagctatgaaaaattactgcgccaggctaaagctccaagtatgtttttacaatccttcaaaaattttgtttctttgtgtgtgtatggtgatgataacttaattagtgttcatgaatatgtcaagccttactttagtggttctaaattgaaaagctttctagctagtcataacatcaccattactgatggtattgacaaaactagtgcaactttgcaatttagaaagttagcagattgtgattttctcaagagaanacttaagcagatgtctaatgttttgtgggtggctcctgaggacaaggcgagtttatggtcacaacttcattatgtttcgtgtaataatcttgaaatgccagaagctta

SEQ ID NO: 79222 - DNA, 304 bp, Glycine max
aaaaaaaaaaaaaaaaaaaattaaaaaaaaaaaaaaaaaaaaaaaaagcgaaaaaataaaaaaaaaaaaaaaaaaaaaaaaaaaaaaaaaaaaaaaaaaaaaaaaaaaaaaaaaaaaaaaaaaaaaaaaaaaaaaaaaaaaaaaaaaaaaaaggggcccccccccccttttaaaccttctcccccccgaaattaatttcggacccgtcccttgagggctcccaattttttttttttgaaagctttttaaaacctggccaaaaaaaaggaaaaacttttttctttttaaaaatttttttcctttc

SEQ ID NO: 79223 - DNA, 430 bp, Glycine max
ctcgagcctattctgctcgagattttcacaagaggagtttgttacagcttggtcaactcaggtgcgtcctgcaacaactctgttggctgatgggtgtccatatttgtatgcaatggtgcatgatagttcagtgtctacaataccaggtgattttgtcattggtgtcaagttgacaaccataaacaatatgtgtgcatatgggctcaatcctggtatttcaggttctcgtcctttgggcaccattcctcagtccatttcacagcaaactgtttggaatcaaatggcaacagtgagaacaccattgaattttgattctagcaagcagagcttttgtcagttttctattgaccttctcggtggaggaatcttagtggacaaaactggagattggatcacacttatacaaaaatcttcaattaataacttgttg

SEQ ID NO: 79224 - DNA, 443 bp, Glycine max
  unsure (1)..(443): unsure at all n locations
gactttatataaagaaattagatgattttgtaggtaaagattgaaaaggttacatatttttgtaggtgacagatgtttttctgaatgggcactcaaacccagagattcagatccttggattgaagatgtctcctttattgcaaaatgtcaaagtgcccgaaccctgtcaaggtcctctgcgttattcaccagtttcagtagatttggtataaattagcattaataatatgaaacatatggcattacttatggtcatttctagttaaagcagacataactttctgctaacatgctgctaactctagaggcaaggaaaccactgtgttgcctggttttaccttctgttttagtgatgccattatgtacagactattttcttttattagagtattcatattcattatgtacagtggatatgtatagaaaatgcaatntcgtaaaaa

SEQ ID NO: 79225 - DNA, 454 bp, Glycine max
gtcacaacttcattatgtttcgtgtaataatctggaaatgcaggaagcttatcttgtcaatctcgtaaatgtgttacgagaattgtatttgcacagtccagaggaagctcgccaattgagaaggaaagctctctctcgtattgaatggctgcaaaaagctgatgtgcctaccatagcacagattgaagagttccattcgatgcagaggatgatgaatgctcctgattcaaatgataatattgatttactgttgagcattgatttgttgggtttacaaggagcaggtaaagcttttccaaacaaaattgtttttgatgataagcttgtgttggctaacacacaagaattctttgatggaaattttccagtggattcttggttaccaatttttgtgaattggctttatcctgtaagtcaattaccttcagaagctgtcgttgtaaatgttacatgt

SEQ ID NO: 79226 - DNA, 130 bp, Glycine max
aaaaaaaaataaaaatataaaaaaaaaaaaaaaaacccgcccgcaaaaaaaaaaaaaaaaaaaaaacacaaaaaaaaaaaaaaaaaaaaaaaacaaaaaaaaaaaaaaaaaaaaaaacaacactaacaac

SEQ ID NO: 79227 - DNA, 460 bp, Glycine max
caaatggcaacagtgagaacaccattgaattttgattctagcgggcagagcttttgtcagttttctattgaccttctcggtggaggaatcttagtggacaaaactggagattggatcacacttatacaaaattctccaattagtaacttgttgagagttgctgcttggaagaaaggctgtttaatggtcaagattgtgatgtctgggaatgcagcagtcaaaaggagtgattgggcctcattggtacaagtgtttttaacaaacagcaacagtacagagcattttgatgcatgtaagtggacaaaatcagaaccacattcctgggaattgatcttcccaatagaggtatgtggtcctaataatggttttgaaatgtggagttctgagtgggcaaatcaaacttcatggcatttgagtttccttattgacaatcccaaacagtctacagtttttgatattc

SEQ ID NO: 79228 - DNA, 346 bp, Glycine max
ctcgaacagtaccagagcaaagagtcaaaatcacactatcccaatatgcaaaacgacaaaggccaaggcgtctcgcacgccgcagagtctcggttgcctcagaaggtgcaagaaaaggctccctcaagcctcgaacaccagatccccgacgccgctcacgacaccaacagcaacaaagacactggcaaggtgtcgcatgcgactggcgactcaaaggtgccgcagacgctgcaggaggggctacctgcgaaggtagaaaagattgtcccaaacgccattcacgacacccgtggggctgatatttagatgagcgttataagaatgattggagtcgttgcatttgttg

SEQ ID NO: 79229 - DNA, 418 bp, Glycine max
atcaaatggcaacagtgagaacaccattgaattttgattctagcaagcagagcttttgtcagttttctattgaccttctcggtggaggaatcttagtggacaaaactggagattggatcacacttatacaaaattctccaattagtaacttgttgagagttgctgcttggaagaaaggctgtttaatggtcaagattgtgatgtctgggaatgcagcagtcaaaaggagtgattgggcctcattggtacaagtgtttttaacaaacagcaacagtacagagcattttgatgcatgtaagtggacaaaatcagaaccacattcctgggaattgatcttcccaatagaggtatgtggtcctaataatggttttgaaatgtggagttctgagtgggcaaatcaaacttcatggcaattgag

SEQ ID NO: 79230 - DNA, 467 bp, Glycine max
  unsure (1)..(467): unsure at all n locations
agctnngaatgggggtagagctngagccgtatacgctcgagacacaacattctagcgggccgggcttttgtcagttttctattgaccttctcggtggaggaatcttagtggacaaaactggagattggatcacacttatacaaaattctccaattagtaacttgttgagagttgctgcttggaagaaaggctgtttaatggtcaagattgtgatgtctgggaatgcagcagtcaaaaggagtgattgggcctcattggtacaagtgtttttaacaaacagcaacagtacagagcattttgatgcatgtaagtggacaaaatcagaaccacattcctgggaattgatcttcccaatagaggtatgtggtcctaataatggttttgaaatgtggagttctgagtgggcaaatcaaacttcatggcatttgagtttccttattgacaatcccaaacagtctacagttttt

SEQ ID NO: 79231 - DNA, 447 bp, Glycine max
  unsure (1)..(447): unsure at all n locations
atcaattttgaggcttttccccacaagctggtgcaggttggagagattcaggaaaaagttgtattgaaattttcacaagaggaatttcttacagcttggtcaactcaggtgcgtcctgcaacaactctgttggctgatgggtgtccatatttgtatgcaatggtgcatgatagttcagtgtctacaataccaggtgattttgtcattggtgtcaagttgacaaccataaacaatatgtgtgcatatgggctcaatcctggtatttcaggttctcgtcttttgggcaccattcctcagtccatttcacagcaaactgtttggaatcaaatggcaacagtgagaacaccattgaattttgattctagcaagcagagcttttgtcagttntctattgaccttctcggtggaagaatcttagtggacaaaactggagattggatcacactt

SEQ ID NO: 79232 - DNA, 301 bp, Glycine max
aaaaaaaaaaaaatataaaataaaaaaaaaaaaaaaaaaaaagagaaaaaaaaaaaaaaaaaaaaaaaaaaaaaaaaaaaaaaaaaaaaaaaaaaaaaaaaaaaaaaaaaaaaaaaaataaaaaaggggcgccccccattttgaacctctttctccccgcaattatatttcgcccccgtcctttcatggtttcaaacttttcttattataagtccgttttaaacatgggcgaaaatccggcaatattttttcttttgtgaaaatatttatcttttaaaaatacataaaaatttacactccg

SEQ ID NO: 79233 - DNA, 454 bp, Glycine max
  unsure (1)..(454): unsure at all n locations
ttcacgttctcgtcttttgggcaccattcctcaggcggtttgacagcaaactgtttggaatcaaatggcaacagtgagaacaccattgaattttgattctagcaagcagagcttttgtcagttttctattgaccttctcggtggaggaatcttagtggacaaaactggagattggatcacacttatacaaaattctccaattagtaacttattgagagttgctgcttggaagaaaggctgtttaatggtcaagattgtgatgtctgggaatgcagcagtcaaaaggagtgattgggcctcattggtacaagtgtttttaacaaacagcaacagtacagagcattttgatgcatgtaagtggacaaaatcagaaccacattcctgggaatggatcttcccaatagaggtatgtggtcctaataatggttntgaaatgtggagttctgagtgggca

SEQ ID NO: 79234 - DNA, 481 bp, Glycine max
  unsure (1)..(481): unsure at all n locations
caccattcctcagtccatttcacagcaaactgtttggaatcaaatggcaacagtgagaacaccattgaattttgattctagcaagcagagcttttgtcagttttctattgaccttctcggtggaggaatcttagtggacaaaactggagattggatcacacttatacaaaattctccaattagtaacttgttgagagttgctgcttggaagaaaggctgtttaatggtcaagattgtgatgtctgggaatgcagcagtcaaaaggagtgattgggcctcattggtacaagtgtttttaacaaacagcaacagtacagagcattttgatgcatgtaagtggacaaaatcagaaccacattcctgggaattgatcttcccaatagaggtatgtggttcctaataatggttttgaaatgtggagttctgagtgggcaaatcaaacttcatggcattngagtttccttattgacaatcccaaaca

SEQ ID NO: 79235 - DNA, 405 bp, Glycine max
ctcctgaggacaaggcgagtttatggtcacaacttcattatgtttcgtgtaataatctggaaatgcaagaagcttatcttgtcaatctcgtaaatgtgttacgagaattgtatttgcacagtccagaggaagctcgccaattgagaaggaaagctctctctcgtattgaatggctgcaaaaagctgatgtgcctaccatagcacagattgaagagttccattcgatgcagaggatgatgaatgctcttgattcaaatgataatattgatttactgttgagcattgatttgttgggtttacaaggagcaggtaaagcttttccaaacaaaattgtttttgatgataagcttgtgttggctaacacacaagaattctttgatggaaaatttcagtggattcttggta

SEQ ID NO: 79236 - DNA, 206 bp, Glycine max
tgacgtcgcatgcacgcgtcgtagcttggattccggttggggggccaagggtttttttccaccagtggttccttaaaattcaccctcacctttcctccaccctcgattggtgggggagaaccatattgggccggcccaaggggttaaccaacctttccaccgttccaaaaacctcaagaccttattgcttttcttgggttgggcca

SEQ ID NO: 79237 - DNA, 292 bp, Glycine max
  unsure (1)..(292): unsure at all n locations
ttaaaaaagctgcgaatggtcaanattgtgatgtctggnaatgcancantcaaaaggagtgattgggcctcattggtacaagtgtttttaacaaacagcaacagtacagagcattttgatgcatgtaagtggacaaaatcagaaccacattcctgggaattgatcttcccaatagaggtatgtggtcctaataatggttttgaaatgtggagttctgagtgggcaaatcaaacttcatggcatttgagtttccttattgacaatcccaaacagtctacaatttttgatattc

SEQ ID NO: 79238 - DNA, 220 bp, Glycine max
  unsure (1)..(220): unsure at all n locations
cgtaagctcggaattcggctggagaatacttttttctttttaaagctgagcattanctcacgcggcgtgttatttgtgacgtgctctacctaccatactcacactacattatcattgaatacaaagttcagcaataatatcctcaatacacctataattagtccatttaaggaacataaccacatataacttatctttggtttcaacacaatataaaatt

SEQ ID NO: 79239 - DNA, 270 bp, Glycine max
  unsure (1)..(270): unsure at all n locations
caagattttgaaattgctggtaatactcttatgccagctttttctgttccacaggctactgccagatcttctgaaaatgcggaatcctctgcatgatctggaatttgtgttttctttcgcttgttcgtttgtttaattcaataaaggaaattaggcatgaccctcttgttgagtatgctctgcctatttgaaaatttccacacctcttttaattgtcgaaatgatgtgtgaagtgtgtgttntttttaaaaaaaaaatactcaataatat

SEQ ID NO: 79240 - DNA, 370 bp, Glycine max
  unsure (1)..(370): unsure at all n locations
cgttaatcagccccaagagaaagatttgttggagggaaattgttcctttgatattaaatctcgctctagattggaaaaagtttcctctacaaaagcacaatttgttagtggaaaaaccttcaaatatgatataattggtgctggttcacattcttcagaagattttcctgaaaaggaagatcaagaaaaacccaaaaagattgatgccagattgagacaaagaatagatcctcaatacaatgaggttcaggctcagatggaaacaaatttgtttaaattgtctcttgatgatgttgaaactcctaaaggttccatgttggatctgaaaatttctcaatctaaaattgcacttnccaagaacacagttgga

SEQ ID NO: 79241 - DNA, 217 bp, Glycine max
aaaaaaaaaaaaaatataaaaaaaaaaaaaaaaaaaaaaagggggaaaaaaaaaaaaaaaaaaaaaaaaaaaaaaaaaaaaaaaaaaaaaaaaaaaaaaaaaaaaaaaaaaaggggcggccccccactagggacctggtcgacccggaaataaattccggcccggaccctgaaggcgtcccatttttccttatagagggtcacttaaaacctgggca

SEQ ID NO: 79242 - DNA, 61 bp, Glycine max
aaaaaaaaaaaaaaaaaaaaaaaaaaaaaaaaaaaaaaaaaaagaaaaaaaaaaaaaaaaa

SEQ ID NO: 79243 - DNA, 516 bp, Glycine max
aagcttacgcgatgccgcctcctagcctcggatttcggttcgggcaaaaagctaatcttgtcaatctcgtaaatgtgttacgagaattggatttgcacagtccagaggaagctcgccaattgagaaggaaagctctctctcgtattgaatggctgcaaaaagctgatgtgcctaccatagcacagattgaagagttccattcgatgcagaggatgatgaatgctcctgattcaaatgataatattgatttactgttgagcattgatttgttgggtttacaaggagcaggtaaagcttttccaaacaaaattgtttttgatgataagcttgtgttggctaacacacaagaattctttgatggaaattttccagtggattcttggttaccaatttttgtgaattgtctttatcctgtaagtcaattaccttcagaagctgtcgttgtaaatgttacatgtggtagtgggacacgtgtgttacccaccactgcttggattagttctgcagttaacaatc

SEQ ID NO: 79244 - DNA, 464 bp, Glycine max
atttgtaagaaagatgtttggagagttgaatgtggaatccgtgctggatttccgctcacagttatttgcaatagcatttttaatgagatgctcattagatatagctatgaaaaattactgcgccaggctaaagctccaagtatgtttttacaatccttcaaaaattttgtttctttgtgtgtgtatggtgatgataacttaattagtgttcatgaatatgtcaagccttactttagtggttctaaattgaaaagctttctagctagtcataacatcaccattactgatggtattgacaaaactagtgcaactttgcaatttagaaagttagcagattgtgattttctcaagagaaactttaagcagatgtctaatggtttgtgggtggctcctgaggacaaggcgagtttatggtcacaacttcattatgtttcgtgtaataatctggaaatgcaagaagctta

SEQ ID NO: 79245 - DNA, 235 bp, Glycine max
attcaggaaaaagttgtattgaaattttcacaagaggaatttcttacagcttggtcaactcaggtgcgtcctgcaacaactctgttggctgatgggtgtccatatttgtatgcaatggtgcatgatagttcagtgtctacaataccaggtgattttgtcattggtgtcaagttgacaaccataaacaatatgtgtgcatatgggctcaatcctggtatttcaggttctcgtcttt

SEQ ID NO: 79246 - DNA, 477 bp, Glycine max
atcaaatggcaacagtgagaacaccattgaattttgattctagcaagcagagcttttgtcagttttctattgaccttctcggtggaggaatcttagtggacaaaactggagattggatcacacttatacaaaattctccaattagtaacttgttgagagttgctgcttggaagaaaggctgtttaatggtcaagattgtgatgtctgggaatgcagcagtcaaaaggagtgattgggcctcattggtacaagtgtttttaacaaacagcaacagtacagagcattttgatgcatgtaagtggacaaaatcagaaccacattcctgggaattgatcttcccaatagaggtatgtggtcctaataatggttttgaaatgtggagttctgagtgggcaaatcaaacttcatggcatttgagtttccttattgacaatcccaaacagtctacagtttttgatattctcttgggaatctctc

SEQ ID NO: 79247 - DNA, 382 bp, Glycine max
cttttgggcaccattcctcagtccatttcacagcaaactgtttggaatcaaatggcaacagtgagaacaccattgaattttgattctagcaagcagagcttttgtcagttttctattgaccttctcggtggaggaatcttagtggacaaaactggagattggatcacacttatacaaaattctccaattagtaacttgttgagagttgctgcttggaagaaaggctgtttaatggtcaagattgtgatgtctgggaatgcagcagtcaaaaggagtgattgggcctcattggtacaagtgtttttaacaaacagcaacagtacagagcattttgatgcatgtaagtggacaaaatcagaaccacattccttggaattgatct

SEQ ID NO: 79248 - DNA, 435 bp, Glycine max
gatgcatgtaagtggacaaaatcagaaccacattcctgggaattgatcttcccaatagaggtatgtggtcctaataatggttttgaaatgtggagttctgagtgggcaaatcaaacttcatggcatttgagtttccttattgacaatcccaaacagtctacagtttttgatattctcttgggaatctctcaagattttgaaattgctggtaatactcttatgccagctttttctgttccacaggctactgccagatcttctgaaaatgcggaatcctctgcatgatctggaatttgtgttttctttcgcttgttcgtttgtttaattcaataaaggaaattaggcatgaccctcttgttgagtatgctctgcctatttgaaaatttccacacctcttttaattgtcgtaatgatgtgtgaagtgtgtgttatttt

SEQ ID NO: 79249 - DNA, 406 bp, Glycine max
  unsure (1)..(406): unsure at all n locations
aaaganctatgacgnctgccgcgcgcctccataagctcagtatgcgtctcgagctgttggccatcattgattatgacaaaccaatcaagacggatggggacagaactgttgcgaagggaacaacgttcacacatgttctggctgcctccttcgccggtttagttgccgtcgacgtcgtctgaagctaccggcgggcaccctacacgggggtgggagagcagaataaggttatttccgagctacgtaagacggaatctgggcgtctctgggagataggaaagttctcccactatgttgctaagcaaatggagtcggaagatgctgatgaggattcagagctatgcatatcggccgcagagtatttgaagaaatccaaaaggcgcgatgaaagcatgtttgaatatat

SEQ ID NO: 79250 - DNA, 85 bp, Glycine max
aaaaaaaaaaaaaattaaaaaaaaaaaaaaaaaaaaaaaaaggggaaaaaaaaaaaaaaaaaaaaaaaaaaaaaaaaaaaaaaaa

SEQ ID NO: 79251 - DNA, 70 bp, Glycine max
cgtatggggattctatacgcactggtaggtcggggttcgggggtgttgccggagttaaggggaacaacaa

SEQ ID NO: 79252 - DNA, 342 bp, Glycine max
cgaaagtggattctgtgctcacattaacgtatcatttcgggggtgctaatatcaggtcaattgctgctgctacaatacgaccggatcatcgcgctattttgtgtaaaggggaaaaagtaaccatcaaagtcacagaggcctagtctcgaaaagctacatgacatagatgagaaaaactcaaagacgaatgcagaatattttcagagaagagacacttctcgcggaacacttatagattgcattggaatacatgaagaatgagaaactattttctttcaagaactcgattctctcaatgaaggaaaaaatgctgaccgattacgtcgatattgtataaacata

SEQ ID NO: 79253 - DNA, 465 bp, Glycine max
ggtttacctcaagagtttgactctgtaattcctttgattgaaaggggagtgatgaaattactatcgaagaggttgaaggcctcattgttgctcaggaactgcgattgcagaaatatttcaagaaaacctcatcagactctaccttctctggatctctatcaatttgacacaatctgtttctcagatccctaccacttcttttgatcaaaacagaacatcaattttcctctgatcagaatcaatcttcgccatttacttaatattgtggttctggttggaggctgttttggccatggtaggggccgtggcggttggggttctgttcactgacatgtgcacttcaagtttgggcacactgcttttgttacgtgctggaaactgaaagctgaacttcgagggtcagcacctccagaagaagaagaagaaaactaagggagaaaggaaattttgctattttcattcatg

SEQ ID NO: 79254 - DNA, 411 bp, Glycine max
cgacgggtcactctttggagaggttcactctgaggatgcccgaggaagtaatgaagaagattctggaagatagtgaacgcgggaatgtgacgaggatgatgaagcgttccgcgagctacgacgtcgttttgcggagcatggaagaagggggtgaaggtagtagtaatagtggtagtaatagtaaagagaagagtagtactaataataataaccggtgggttttatcgatgacgcctccctttgtttctcgcgccgttcggggattccgagagtgtcaagagagaacggttttccattgtgaagtttgatttgttgttagagtttcattgcttgtacagtgaggaaaaaattgagttgtaaaaagtgtagtaggaaatttgaggatttatgacattactcattattttgttt

SEQ ID NO: 79255 - DNA, 195 bp, Glycine max
gggcaatgtaacctctctttctctgtgtcggtcctttcattgcggcgttttttgccttccaggcagcaccttctacaaaattagggttttttgaattctggatgactgatctccaaaaaaaattggtgctgtacctctggattaatgaagccgtatccaggctgttggttttcatacccaatcaattcttgaaca

SEQ ID NO: 79256 - DNA, 444 bp, Glycine max
ctttaagcagatgtctaatgttttgtgggtggctcctgaggacaaggcgagtttatggtcacaacttcattatgtttcgtgtaataatctggaaatgcaagaagcttatcttgtcaatctcgtaaatgtgttacgagaattgtatttgcacagtccagaggaagctcgccaattgagaaggaaagctctctctcgtattgaatggctgcaaaaagctgatgtgcctaccatagcacagattgaagagttccattcgatgcagaggatgatgaatgctcctgattcaaatgataatattgatttactgttgagcattgatttgttgggtttacaaggagcaggtaaagcttttccaaacaaaattgtttttgatgaatagcttgtgttggctaacacaacaaaatctttgatggaaattttcagtggattctggttaccaatttt

SEQ ID NO: 79257 - DNA, 409 bp, Glycine max
  unsure (1)..(409): unsure at all n locations
tgcaattgaagttaaaagccttagccttccctacaactccaaacacaaagacatcatcatccatggctgcctccgtctccactgtcggagctgtcaacagagctcttttgaacctgaatggttctggagctggagcttcagctcccagttcagccttctttgggaccagcttgaagaaggttattgcctcaagggtccccaacagcaaggtttccggtggaagcttcaagattgttgctgtagaagagaagaaagagattgaagagacccagcagaccgacaaggacagatggaagggtcttgcctatgatatctcagacgaccaacangacatcacangaggaaagggtttggttgactcccttttccaagctccacaggatgctggaactcactatgcagtcatgag

SEQ ID NO: 79258 - DNA, 478 bp, Glycine max
caattttgaggcttttttccacaagctggtgcagtttggagagatgcaggaaaaagttgtattgaaattttcacaagaggaatttcttacagcttggtcaactcaggtgcgtcctgcaacaactctgttggctgatgggtgtccatatttgtatgcaatggtgcatgatagttcagtgtctacaataccaggtgattttgtcattggtgtcaagttgacaaccataaacaatatgtgtgcatatgggctcaatcctggtatttcaggttctcgtcttttgggcaccattcctcagtccatttcacagcaaactgtttggaatcaaatggcaacagtgagaacaccattgaattttgattctagcaagcagagcttttgtcagttttctattgaccttctcggtggaggaatcttagtggacaaaactggagattggatcacacttatacaaaattctccaattagtaacttattgaga

SEQ ID NO: 79259 - DNA, 445 bp, Glycine max
ttatgtttcgtgtaataatctggaaatgcaagaagcttatctggtcaacctcgtaaatgtgttacgagaattgtatttgcacagtccagaggaagctcgccaattgagaaggaaagctctctctcgtattgaatggctgcaaaaagctgatgtgcctaccatagcacagattgaagagttccattcgatgcagaggatgatgaatgctcctgattcaaatgataatattgatttactgttgagcattgatttgttgggtttacaaggagcaggtaaagcttttccaaacaaaattgtttttgatgataagcttgtgttggctaacacacaagaattctttgatggaaattttccagtggattcttggttaccaatttttgtgaattgtctttatcctgtaagtcaattaccttcagaagctgtcgttgtaaatgttacatgtggt

SEQ ID NO: 79260 - DNA, 374 bp, Glycine max
cttaaaactatgtgaataaactacagatattcacatagttgggggagagtgaagacacagcctcagtagccaagttctgcttttagtatcttattttttcttattcaatcttgtgttctattctgaaactttgtatcttctctgttctgtaactttgcgtagtttttctgaacattcttagatcatgcaaagatcaatgtgcgcaaagtttattggttgttttcttcagtaatttacagtttgaggaaagtttttttttcccattctgaatgttttgcctcttgaattctgtagaaacttgaaatgttagagaaaaaggagaaagtactcctaaaaaaggctgcagcagaagttgaaaaagccaaagaattcac

SEQ ID NO: 79261 - DNA, 410 bp, Glycine max
gtcaaaaggagtgattgggcctcattggtacaagtgtttttaacaaacagcaacagtacagagcattttgatgcatgtaagtggacaaaatcagaaccacattcctgggaattgatcttcccaatagaggtatgtggtcctaataatggttttgaaatgtggagttctgagtgggcaaatcaaacttcatggcatttgagtttccttattgacaatcccaaacagtctacagtttttgatattctcttgggaatctctcaagattttgaaattgctggtaatactcttatgccagctttttctgttccacaggctactgccagatcttctgaaaatgcggaatcctctgcatgatctggaatttgtgttttctttcgcttgttcgtttgtttaattcaataaaagaaatt

SEQ ID NO: 79262 - DNA, 293 bp, Glycine max
cgcacattctaaattatttaatgcaacataactttatccctgagcttggttttaccaacggctgttgccgctacatctactgtcatctttcccatcacaccaagtttacctatgtcccaagcaggacctcaatcattaccccatggagagatgcacacaagaaggcgatagtgcagtacaacaatgtgctgcacaatgaaaggaatgttgccattataaatcatgacaacactgcagcttcagctaaggatgaaaaagagtccaagaaacaggatccatgcttggatcacaac

SEQ ID NO: 79263 - DNA, 463 bp, Glycine max
gcaaactgtttggtatcaaatggcaacagtgagaacaccggggaattttgattctagcaagcagagcttttgtcagttttctattgaccttctcggtggaggaatcttagtggacaaaactggagattggatcacacttatacaaaattctccaattagtaacttgttgagagttgctgcttggaagaaaggctgtttaatggtcaagattgtgatgtctgggaatgcagcagtcaaaaggagtgattgggcctcattggtacaagtgtttttaacaaacagcaacagtacagagcattttgatgcatgtaagtggacaaaatcagaaccacattcctgggaattgatcttcccaatagaggtatgtgggtcctaataatggttttgaaatgtggagttctgagtgggcaaatcaaacttcatggcatttgagtttccttattgacaatcccaaacagtctac

SEQ ID NO: 79264 - DNA, 471 bp, Glycine max
tgaaaacaccattgaattttgattctagcaagcagagcttttgtgagttttctattgaccttctcggtggaggaatcttagtggacaaaactggagattggatcacacttatacaaaattctccaattagtaacttgttgagagttgctgcttggaagaaaggctgtttaatggtcaagattgtgatgtctgggaatgcagcagtcaaaaggagtgattgggcctcattggtacaagtgtttttaacaaacagcaacagtacagagcattttgatgcatgtaagtggacaaaatcagaaccacattcctgggaattgatcttcccaatagaggtatgtggtcctaataatggttttgaaatgtggagttctgagtgggcaaatcaaacttcatggcatttgagtttccttattgacaatcccaaacagtctacagtttttgatattctcttgggaatctctcaagattttg

SEQ ID NO: 79265 - DNA, 461 bp, Glycine max
gacaaaactagtgcatctttgcaatttagaaagttagcagattgtgattttctcaagagaaactttaagcagatgtctaatgttttgtgggtggctcctgaggacaaggcgagtttatggtcacaacttcattatgtttcgtgtaataatctggaaatgcaagaagcttatcttgtcaatctcgtaaatgtgttacgagaattgtatttgcacagtccagaggaagctcgccaattgagaaggaaagctctctctcgtattgaatggctgcaaaaagctgatgtgcctaccatagcacagattgaagagttccattcgatgcagaggatgatgaatgctcctgattcaaatgataatattgatttactgttgagcattgatttgttgggtttacaaggaacaaggtaaagcttttccaaacaaaattgtttttgatgataaagcttgtgttgctaacacac

SEQ ID NO: 79266 - DNA, 454 bp, Glycine max
  unsure (1)..(454): unsure at all n locations
tcggttggagagcattttgatgcttgtaagtggacaaaatcagaaccacattggtgggaattgatcttcccaatagaggtatgtggtcctaataatggttttgaaatgtggagttctgagtgggcaaatcaaacttcatggcatttgagtttccttattgacaatcccaaacagtctacagtttttgatattctcttgggaatctctcaagattttgaaattgctggtaatactcttatgccagctttttctgttccacaggctactgccagatcttctgaaaatgcggaatcctctgcatgatctggaatttgtgttttctttcgcttgttcgtttgtttaattcaataaaggaaaattaggcatgaccctctcgttgagtatgctctgcctatttgaaaatttccacacctcttttaattgtcgtaatgatgtggggngtgtgtgtattttt

SEQ ID NO: 79267 - DNA, 402 bp, Glycine max
ctcgagccgaatcggctcgagctggtatttcaggttctcgtgggttgggcaccattcctcagtccatttcacagcaaactgtttggaatcaaatggcaacagtgagaacaccattgaattttgattctagcaagcagagcttttgtcagttttctattgaccttctcggtggaggaatcttagtggacaaaactggagattggatcacacttatacaaaattctccaattagtaacttattgagagttgctgcttggaagaaaggctgtttaatggtcaagattgtgatgtctgggaatgcagcagtcaaaaggagtgattgggcctcattggtacaagtgtttttaacaaacagcaacagtacagagcattttgatgcattgtagtggacaaaatcagaac

SEQ ID NO: 79268 - DNA, 344 bp, Glycine max
gttctgagtgggcaaatcaaacttcatggcatttgagtttgcttattgacaatcccaaacagtctacagtttttgatattctcttgggaatctctcaagattttgaaattgctggtaatactcttatgccagctttttctgttccacaggctactgccagatcttctgaaaatgcggaatcctctgcatgatctggaatttgtgttttctttcgcttgttcgtttgtttaattcaataaaggaaattaggcatgaccctcttgttgagtatgctctgcctatttgaaaatttccacacctcttttaattgtcgtaatgatgtgtgaagtgtgtgttattttaaa

SEQ ID NO: 79269 - DNA, 250 bp, Glycine max
acagttctcactgtaactttggactctgactttgcaatactgggtgttctccttctctctgtcgctgatcacccattcaaaggcgataattaccatgcaatccgcgggagatctctcagactcattaaacagggctatgtcaccgactggctgggatgatgtatcagattacagtgcacggcgtgcgatctttcaagatgtctaccgtcgcttgcctgcatgcttcatcgaaaaatcaaatctggaaaat

SEQ ID NO: 79270 - DNA, 366 bp, Glycine max
gacaaaactagtgcaactttgcaatttagaaagttagcagagggtgattttctcaagagaaactttaagcagatgtctaatgttttgtgggtggctcctgaggacaaggcgagtttatggtcacaacttcattatgtttcgtgtaataatctggaaatgcaagaagcttatcttgtcaacctcgtaaatgtgttacgagaattgtatttgcacagtccagaggaagctcgccaattgagaaggaaagctctctctcgtattgaatggctgcaaaaagctgatgtgcctaccatagcacagattgaagagttccattcgatgcagaggatgatgaatgctcctgattcaaatgataatattgattta

SEQ ID NO: 79271 - DNA, 222 bp, Glycine max
tgaatatgtcaagccttactttagtggttctaaattgaaaagctttctagctagtcataacatcaccattactgatggtattgacaaaactagtgcaactttgcaatttagaaagttagcagattgtgattttctcaagagaaactttaagcagatgtctaatgttttgtgggtggctcctgaggacaaggcgagtttatggtcacaacttcattatgtttc

SEQ ID NO: 79272 - DNA, 434 bp, Glycine max
ggaaaattgactttcccccagggcacttcccgaagtgttaagagaatgcctctttctatagggggaggagctggtgcaaagaatgctattctcatgaatatgccaaatgctgttctttcaatgtggagatattttgttggagatctcgtctttgaagtttctaagatgacttctccctacattaaatgtacagtctctttcttcatagcatttggaaatttggctgatgataccatcaattttgaggcttttccccacaagctggtgcagtttggagagattcaagaaaaagttgtattgaaattttcacaagaggaatttcttacagcttggtcaactcaggtgcgtcctgcaacaactctgttggctgatgggtgtccatatttgtatgcaatggtgcatgatagttcagtgtctacaataccaagtgattt

SEQ ID NO: 79273 - DNA, 250 bp, Glycine max
ggctgcacaagctcttgtatcatcatcttctcttaccttctcagcggaggctgcaagacaaagtcttggaccaagatcactccaatctccatttggcttctccagaaaagcctcctttcttgttaaggcagctgctaccccccctgtcaagcaaggatcagacagacctttgtggtttgcatcaaagcaaagtctttcttacttggatggcagcctttcgggtgactatggatttgaccctctgggactt

SEQ ID NO: 79274 - DNA, 256 bp, Glycine max
tgtcattggtgtcaagttgacaaccataaacaatatgtgtgcatatgggctcaatcctggtatttcaggttctcgtcttttgggcaccattcctcagtctatttcacagcaaactgtttggaatcaaatggcaacagtgagaacaccattgaattttgattctagcaagcagagcttttgtcagttttctattgaccttctcggtggaggaatcttagtggacaaaactggagattggatcacacttatacaaaat

SEQ ID NO: 79275 - DNA, 346 bp, Glycine max
  unsure (1)..(346): unsure at all n locations
ggttcctgaggccagggcgagttaatggccacaccttcattatgtttcgggtaataatctggaaatgcaagaagcttatcttgtcaatctcgtaaatgtgttacgagaattgtatttgcacagtccagaggaagctcgccaattgagaaggaaagctctctctcgtattgaatggctgcaaaaagctgatgtgcctaccatagcacagattgaagagttccattcgatgcanaggatgatgaatgctcctgattcaaatgataatattgatttactgttgagcatttgattggtgggtttacaaagagcaggtaaagctttttcaaacaaaattgtttttgatgat

SEQ ID NO: 79276 - DNA, 144 bp, Glycine max
ctcgagccgaatcggctcgagtttggatattccttgtggtcatgctcttaactttcccgttgtttaccctctaaaaaaaaaaaaaaaaaaaaaaaaaaaaaaaaaaaaaaaaaaaaaaaaaaaaaaaaaaaaaaaaaaggggcg

SEQ ID NO: 79277 - DNA, 367 bp, Glycine max
ggttttagtttttttattttttttttttttttttttttttttttttttttttttttttttttttttttttttttttttcccaaaacccttttttttttccggggggttttttttaatttaattccccccccgggggggggggcccttgggttttttttggggtacccgggaacccttttcccggggccggggggccaccggggggggggccccttggggggggggctggccccaaccccccaaaaagggaatccccggcggggttgggaaaaattcccccgccctggggcccgggccggcgcggaaaaccccctggcgttccccccgggctgggggggggggccccttcccgggcgtgggccccccc

SEQ ID NO: 79278 - DNA, 203 bp, Glycine max
  unsure (1)..(203): unsure at all n locations
gttgagtatgctctgcctatttgaaaatatccacacctcttttaattgtcgtaatgatgtgtgaagtgtgtgttatttttaaaaaaaaaaaanaaaaaaaaaaaaaaaaaaaaaaaaaaaaaaaaaaagnaaacattctcccaactttgttgccatcaaaaacaaaaccataaaaaatacgaatgtttcccaaaatgagccct

SEQ ID NO: 79279 - DNA, 312 bp, Glycine max
gcatttggaaatttggctgatgataccatcaattttgaggcttttccccacaagctggtgcagtttggagagattcaggaaaaagttgtattgaaattttcacaagaggaatttcttacagcttggtcaactcaggtgcgtcctgcaacaactctgttggctgatgggtgtccatatttgtatgcaatggtgcatgatagttcagtgtctacaataccaggtgattttgtcattggtgtcaagttgacaaccataaacaatatgtgtgcatatgggctcaatcctggtatttcaggttctcgtcttttgggc

SEQ ID NO: 79280 - DNA, 339 bp, Glycine max
  unsure (1)..(339): unsure at all n locations
anaaaaaaaaaaaaaattattaaaaaaaaaataaaaaaaaaatattagggaaataaaaaagggggggagggatatagaaaaagttagcaaccagataaaaaattatactccggaacagtcaagattaaccacattaacaaaatatagaaaaaagttaaaacatagggggggggggccccttttttgggttttctccccccggaatttttttttgcccgtacctttgggggttccacctttttcttttaaggggggggtttaaggggtgggaaaaaaatgggtaatatttttttttttgggaaaaattgttttccctgtaaaattaccaaaaaatttaac

SEQ ID NO: 79281 - DNA, 259 bp, Glycine max
gtggtaccagagcctcagaactcaaaaactgccaaagcttccttacatggctgctctaaaatatatgcactgtctatcctcgttttaactgcaacgtcttctacactccttacttagtacttaccaatccataacaatttcatacccttcaacataatcacctgaaatgggtttagccacaccccaaccacaaaaaagactttccgaatttctcgatgaggagcaagaaccctttcttctatggggttaacttttaaaa

SEQ ID NO: 79282 - DNA, 126 bp, Glycine max
gccagattgagacaaagaatagatcctcaatacaatgaggttcaggctcagatggaaacaaatttgtttaaattgtctcttgatgatgttgaaactcctaaaggttccatgttggatctgaaaatt

SEQ ID NO: 79283 - DNA, 355 bp, Glycine max
  unsure (1)..(355): unsure at all n locations
tggttttgaaatgtggagttctgagtgggcaaatcaaacttcatggcatttgagtttccttattgataatcccaaacagtctacagtttttgatattctcttgggaatctctcaagattttgaaattgctggtaatactcttatgccagctttttctgttccacaggctactgccagatcttctgaaaatgcggaatcctctgcatgatctggaatttgtgttttctttcgcttgttcgtttgtttaattcaataaaggaaattaggcatgaccctcntgtgagtatgctctgcctatttgaaaatttcacacctcttttattgtcgtaatgatgtgtgaaagtgtgtgtatttt

SEQ ID NO: 79284 - DNA, 411 bp, Glycine max
  unsure (1)..(411): unsure at all n locations
ggaanncggcncgagggaaaaaancataagaggaatnncttacagctnggggcagactggaggtgcgtcctgcaacaaactctgttggctgatgggtgtccatatttgtatgcaagggtgcatgatagttcagtgtctacaataccaggtgattttgtcattggtgtcaagttgacaaccataaacaatatgtgtgcatatgggctcaatcctggtatttcaggttctcgtcttttgggcaccattcctcagtccatttcacagcaaactgtttggaatcaaatggcaacagtgagaacaccattgaattttgattctagcaagcagagcttttgtcagttttctattgaccttctcggtggaggaatcttagtggacaaaactggagattggatcacacttatacaaaat

SEQ ID NO: 79285 - DNA, 416 bp, Glycine max
gtgttctgatgcatggagtttggaatttctgaagcgtactggatttcattgcgatatcatttgtgtcactggatggactgccaccccaatgcaggatgttcaggttacaattgattggtttatttcctctcaggaatgtgttcccaggacctattgtgttttaaatccacaaaatccttttgtgttaaataggtggatgggaaaattgactttcccccagggcacttcccgaagtgttaagagaatgcctctttctatatggggaggagctggtgcaaagaatgctattctcatgaatatgccaaatgctgttctttcaatgtggagatattttgttggagatctcgtctttgaagtttctaagatgacttctccctacattaaatgtacaggctctttcttcatagcatttggaa

SEQ ID NO: 79286 - DNA, 259 bp, Glycine max
cttgacatcaagttacactccaactccattgttggaatctggtttgcaaaaagacagagggttaattgtggagtattttggaaggatgtcttacgttgctcataacgttaatcagcccccaaagaaagatttgttggagggaaatttttcctttgatattaaatctcgctctagattggaaaaagttttctctacaaaagcacaatttgttagtggaaaaacctctcaatatgatataattggggctgggtcacattct

SEQ ID NO: 79287 - DNA, 171 bp, Glycine max
  unsure (1)..(171): unsure at all n locations
taaatgtaaataggtgttaatataaatgagagactgattantgatgcgttgcgagcatcacatataagcacgtatatatatatatacacgattttnttgcgaaattatgaggagtccacaacacaacaaagctatatctaaaacacattttgaaaagagaatatatttttt

SEQ ID NO: 79288 - DNA, 401 bp, Glycine max
caaacccgtgttctgatgcatggagtttggaatttctgaagcgtactggatttcattgcgatatcatttgtgtcactggatggactgccaccccaatgcaggatgttcaggttacaattgattggtttatttcctctcaggaatgtgttcccaggacctattgtgttttaaatccacaaaatccttttgtgttaaataggtggatgggaaaattgactttcccccagggcacttcccgaagtgttaagagaatgcctctttctatagggggaggagctggtgcaaagaatgctattctcatgaatatgccaaatgctgttctttcaatgtggagatattttgttggagatctcgtctttgaaagttctaagatgacttctccctacattaaatgtacagtc

SEQ ID NO: 79289 - DNA, 454 bp, Glycine max
caaatggcaacagtgagaacaccattgaattttgattctagcaagcagagcttttgtcagttttctattgaccttctcggtggaggaatcttagtggacaaaactggagattggatcacacttatacaaaattctccaattagtaacttgttgagagttgctgcttggaagaaaggctgtttaatggtcaagattgtgatgtctgggaatgcagcagtcaaaaggagtgattgggcctcattggtacaagtgtttttaacaaacagcaacagtacagagcattttgatgcatgtaagtggacaaaatcagaaccacattcctgggaattgatcttcccaatagaggtatgtggtcctaataatggttttgaaatgtggagttctgagtgggcaaatcaaacttcatggcatttgagtttccttattgacaatcccaaacagtctacagtttttg

SEQ ID NO: 79290 - DNA, 362 bp, Glycine max
  unsure (1)..(362): unsure at all n locations
atcccaaacagtctacagtttttgatattctcttgggaatctctcaagattttgaaattgctggtaatactcttatgccagctttttctgttccacaggctactgccagatcttctgaaaatgcggaatcctctgcatgatctggaatttgtgttttctttcgcttgttcgtttgtttaattcaataaaggaaattaggcatgaccctcttgttgagtatgctctgcctatttgaaaatttccacacctcttttaattgtcgtaatgatgtgtgaagtgtgtgttattttaaaaaaaaaaatgcannaacctgtcacaaaacatatattggttaccaaacccatttttaatctcacccgttc

SEQ ID NO: 79291 - DNA, 184 bp, Glycine max
gggttggtgttttttttggaaggggtaggaattcaaagtctattgggaaataaatgaaactttttggaaaacaatttttttcggaactgacccaatttcggattaaaaagaaagttaccggggacaagatttctcgagccgtttttttaatcttaaaaacatcttttttttatacttttaatgt

SEQ ID NO: 79292 - DNA, 219 bp, Glycine max
  unsure (1)..(219): unsure at all n locations
anaaaaaaaaaataaaaaataaaaaaaaaaaaaaaaaaaaaaaaaaaaaaaaaaaaaaaaaaaaaaaaaaaaaaaaaaaaaaaaaaaaaaaaaaaaaaaaaaaaaaaaaaaaaaaaaggccgccccccccctattaacctcttccccccggaatttaattccgaaccgttcccttcaggcttcccaattttccttataggaagtcgttttaaaccttgc

SEQ ID NO: 79293 - DNA, 75 bp, Glycine max
  unsure (1)..(75): unsure at all n locations
cagccactttgggaattgtattggacaactttctgttgccatctaatctagttgaagctagcttatcgtgtcnna

SEQ ID NO: 79294 - DNA, 349 bp, Glycine max
tccatcactcactgcatacatatcacctccacaaggctcactcagcgacgcgccgttctcgacacaggctctaagacgcccgctgcaaacccctggcgccctcgaaacttccaataatcgcttccgccgcctcggcagtcgacccccctccctcttcccgtcgtatcacacaacacccaacatggccttcgccccgccccttccgcgcctcggcgcccctctacgcctgcccaagctcctcgcgagcctgcccaacctcggcgagctgtccgtcgtcaagccgtcaaattgccgcaacccgtctcgtgtcttcctgatcacgcgctcgaaaatccggtacactgcacgc

SEQ ID NO: 79295 - DNA, 298 bp, Glycine max
cttgggaatttctcaagattttgaaattgctggtaatactcttatgccagctttttctgttccacaggctactgccagatcttctgaaaatgcggaatcctctgcatgatctggaatttgtgttttctttcgtttgttcgtttgtttaattcaataaaggaaattagacatgaccctcttgttgagtatgctctgtctatttgaaaatttccacacctcttttaattgtcgtaatgatgtgtgaagtgtgtgttattttaaaaaaaaaaaaaaataaaaaaaagaaaaaaaaaaaaca

SEQ ID NO: 79296 - DNA, 348 bp, Glycine max
cgcccttgtgttttctttcgcttgttcgtttgtttaattcaataaaggaaattaggcatgaccctcttgttgagtatgctctgcctatttgaaaatttccacacctcttttaattgtcgtaatgatgtgtgaagtgtgtgttattttaaaaaaaaaaaaaaaaaaaaaaaaaaaaaaaaaaaaaaaaaaaaaaaaaaaaaaaaaaaaaaaaaaaaaaaaaaaaaaaaaaaaaaaaaaaaaaaaaaaaaaaaaaaaaaaaaaaaaaaaaaaagggggggccccccattttgggccttttccccccggaatttaattcgggcccggtccttgggggcttcccaattttcc

SEQ ID NO: 79297 - DNA, 86 bp, Glycine max
tttggggacttaaatggatgctaagccggggattatgtcaatttgatctcaactgaaactttttagcatttctgatggactcgaaa

SEQ ID NO: 79298 - DNA, 284 bp, Glycine max
  unsure (1)..(284): unsure at all n locations
gttgttnaaaaaaaaaaaaaaaaaaaaaaaaaaaaaaaaaaaaaaaaaaaaaaaaaaaaaaanaaaanaaaaaaaaaaaaaaaaaaaaaaacaaaaaaaaaaaaaaaaaaaaaaaacaaaagnnaaaccaaaaaaaccaaaattncaaccccaaaaaaccataccaacccccccccaaaaccgccccccccatccacaaaaaaaaattggcccccccccccccaacaaacccccccccccccccaaaaaaaaaacccccgaacccccaccaaccccccaccccc

SEQ ID NO: 79299 - DNA, 280 bp, Glycine max
ctcgagccgaatcggctcgagcttacgttgctcataacgttaatcagccccaagagaaagatttgttggagggaaatttttcctttgatattaaatctcgctctagattggaaaaagtttcctctacaaaagcacaatttgttagtggaaaaaccttcaaatatgatataattggtgctggttcacattcttcagaagattttcctgaaaaggaagatcaagaaaaacccaaaaagattgatgccagattgagacaaagaatagatcctcaatacaatga

SEQ ID NO: 79300 - DNA, 323 bp, Glycine max
tgataatattgatttactgttgagcattgatttgttgggtttacaaggagcaggtaaagcttttccaaacaaaattgtttttgatgataagcttgtgttggctaacacacaagaattctttgatggaaattttccagtggattcttggttaccaatttttgtgaattgtctttatcctgtaagtcaattaccttcagaagctgtcgttgtaaatgttacatgtggtagtgggacgtgtggtttacccaccactgcttggattagttctgcagttaacaatcgctcctcagatatcaacaaaaggattcgcacagcacttggga

SEQ ID NO: 79301 - DNA, 189 bp, Glycine max
ctttccatcggattccagtgtcgattttctgcttctgcatctgcataacccgttaataattgctgcaaaacccttatttcccaaatcgttgattaaaggttccaagcgtttggccgcgtttggacccaacccgatcgattcccacgaaacggggtttccgaataaaagaattatgggagggttcctttt

SEQ ID NO: 79302 - DNA, 342 bp, Glycine max
aaaaaaaaaaataaaaaaaaaaaaaaaaaaaaaaaaaaaaaagaaaaaaaaaaaaaaaaaaaaaaaaaaaaaagggaaaaaaaaaaaaaaaaaaaaaaaaaaaccagaaaaaaaaataaggaaccggacaaaaaagaagaacaaaaaaatacatataaaaaaaaaaattaaaacggggggggggcccccttttttgctgttccccccccgaaaattattatgggcctcgatttttggggggcaaactttttttttttaaaggggttaataaacgggggggcataatgagggaactaactttcttttgtggaaatgtttttcctgcccaaattccaacaaaaa

SEQ ID NO: 79303 - DNA, 194 bp, Glycine max
ttggattttgacttgcctcttttcttcaaagctggccctggtggttatttcatcaaaatccggtgtatgggtttcaacagttctcttggtggctggttctcctccattgcttctttacagggatagatcccaaacaacttctatgatgaaacccttgccagggtattcccccgcccgtgtagttgccctgtctg

SEQ ID NO: 79304 - DNA, 406 bp, Glycine max
  unsure (1)..(406): unsure at all n locations
gctgagcatacacaatcctagtccttaaaatgcttggagctgtagcagcttccacatcgctatacttttcaccatccacaaactccaccagaattgttgttcttaaaagaatctcaaattcaacacttccattcagcaatgaccactctttctcactcttatcagccacccctatgcatttctcttcacacaagagcagtagaaggcaaccccatttccttgcacaagctgcttcatcttctggaaatgcagttggcactttcttggaaaatgaacaatgcagactggggaataaactttaagggcagtgctgcatttgtgaagattaatatataccctngaatgttagaatgatgtttctgtgtagaaaaagnnntttttctttcttttttcttttttaatttaa

SEQ ID NO: 79305 - DNA, 346 bp, Glycine max
aaaaaaaaaaaataaaaaaaaataaaaaaaaaaataaaagaaggaaaaaaaaaaaaaaaaaaaaaaaaaaaaaaaaaaaaaaaaaaaaaaaaaaaaaaaaaaaaaaaaaaaaaaaaaaaaaaaaaaaaaaaatggggggggcccccccttatggggtttgtgcccccggaatttaattccggccgggtccttgggggggtacaatttttcctttaagggggttattttaaaactgggggaaataagggacaaaattttttcttggggaaaattgttttcccttaaaaattccaaaaaaaatacaacccggaaatttaaaggttaaaacctgggggccttaatgggg

SEQ ID NO: 79306 - DNA, 123 bp, Glycine max
gtgtcattatgtgctcagcggatggaaagatcttcagaccaaagatgaaagtgaaagttaatccaaagcttttgcagctatcaagaagtggacttcaaaatgtggagggaaaatggattcatg

SEQ ID NO: 79307 - DNA, 336 bp, Glycine max
gtctgaagcatggcttcatgcatggcaccttcgtcgcggatgctgggccaacctgaagacctctatagctctcagagaagcacatacgatgtgtatactgtgcgttataagccctccaaatgcctccacatagagcccaaatccaggacttggcgtgccctccgcgtcgctttggctgcacacgggcaagtgcctctgactgtgcacgacacggaggaggacgacggttatgatgggtccaacgacagcttggccgacaccaggaccaacaccaccaccgagcctaagaaaggcacggtcgcgttgcctcttaagagggacaggacgagatctaag

SEQ ID NO: 79308 - DNA, 354 bp, Glycine max
gtttttaacaaacagcaacagtacagagcattttgatgcatgtaagtggacaaaatcagaaccacattcctgggaattgatcttcccaatagaggtatgtggtcctaataatggttttgaaatgtggagttctgagtgggcaaatcaaacttcatggcatttgagtttccttattgacaatcccaaacagtctacagtttttgatattctcttgggaatctctcaagattttgaaattgctggtaatactcttatgccagctttttctgttccacaggctactgccagatcttctgaaaatgcggaatcctctgcatgatctggaatttgtgttttctttcgcttgggtcgttg

SEQ ID NO: 79309 - DNA, 408 bp, Glycine max
gctctctctcgtattgaatggctgcaaaaagctgatgtgcctaccatagcacagattgaagagttccattcgatgcagaggatgatgaatgctcctgattcaaatgataatattgatttactgttgagcattgatttgttgggtttacaaggagcaggtaaagcttttccaaacaaaattgtttttgatgataagcttgtgttggctaacacacaagaattctttgatggaaattttccagtggattcttggttaccaatttttgtgaattgtctttatcctgtaagtcaattaccttcagaagctgtcgttgtaaatgttacatgtggtagtggacgctgtggttacccaccactgcttggattagttctgcagttaacaatcgcttctcagatatcaacaaaaaga

SEQ ID NO: 79310 - DNA, 171 bp, Glycine max
acgtaagctcaggattcggctcgaggaatcatgtcccggcaagctcgccatgtccggcgtcatgggcttcggcctcggcggcgtcttcggcctcttcatgtgctccatgcgctacgacacccccatggccaccaccgccggggggaacgccttcttcttccttcccgtcaa

SEQ ID NO: 79311 - DNA, 398 bp, Glycine max
  unsure (1)..(398): unsure at all n locations
tgattggtttatttcctctcaggaatgtgttcccaggacctattgtgttttaaatccacaaaatccttttgtgttaaataggtggatgggaaaattgactttcccccagggcacttcccgaagtgttaagagaatgcctctttctatagggggaggagctggtgcaaagaatgctattctcatgaatatgccaaatgctgttctttcaatgtggagatattttgttggagatctcgtctttgaagtttctaagatgacttctccctacattaaatgtacagtctctttcttcatagcatttggaaatttggctgatgataccatcaattttgaggcttttccccacaagctggtgcagtttggagagattcangaaaaagttgtattgaaattttcac

SEQ ID NO: 79312 - DNA, 378 bp, Glycine max
  unsure (1)..(378): unsure at all n locations
gttttggtttggtgactagccttaagatttaattaagggaaattgttaatggcgggcgcaaaatgtttaaaactttatatttttactctctctatggggaatgttacttttagtttaagaacacccaccaacttaatcatattagttgcatcttctcttgactcttagcaacatgttttttctaaatactcaaaatagccaatgaatggagaaggtgcaacactctacttcatgcaaattatatatactcttgattcccacccatctctcccacccttcattttttttttcaaacaaagttaattaaagaagtaacaatggatccttcctttccttcaaaatcctttctgcatgttgntcttatcttttgctttcttg

SEQ ID NO: 79313 - DNA, 68 bp, Glycine max
atttgaccattaaattttataaatacacttgaaataaccataagcatttcttacaagcatggtgagaa

SEQ ID NO: 79314 - DNA, 207 bp, Glycine max
ttgcattgagttgcgctgttccttcctcctgttgttcgtatttatttcatttacgccgccgtcgtctccgccgcagagagcgatgtcttccgtcgaaacggagatggagccactcacgtgggggccgcaaccgcataattcgctctaagcctaagctcctattgcacatttcttctcttttgctccgcgcccttccggggcgcttca

SEQ ID NO: 79315 - DNA, 255 bp, Glycine max
agcaagcagagcttttgtcagttttctattgaccttctcggtggaggaatcttagtggacaaaactggagattggatcacacttatacaaaaattctccaattagtaacttattgagagttgctgcttggaagaaaggctgtttaatggtcaagattgtgatgtctgggaatgcagcagtcaaaaggagtgattgggcctcattggtacaagtgtttttaacaaacagcaacagtacagaacattttgatgcatg

SEQ ID NO: 79316 - DNA, 331 bp, Glycine max
aaaaaatggaggaagggggttggtaacatggcacatttgtgctttgcattggaagataataagagtattctcttatccctggtatttgtccttcatgtacagtgatgatattgctaaaagaactgataatgtggtcatttgctgtgttaatatgttgtgaaaatctaaaatgagataaaactttcatttcctagtatctatagtcattacggagtggggtcagaaaattttcctttctgtgaatttttactgcccaaattgctaatgcttccaatatttttttctggctttgttgatattacactctttatgctcaatagcagcatttcat

SEQ ID NO: 79317 - DNA, 388 bp, Glycine max
cgtaaatgtgttacgagaattgtatttgcacagtccagaggaagctcgccaattgagaaggaaagctctctctcgtattgaatggctgcaaaaagctgatgtgcctaccatagcacagattgaagagttccattcgatgcagaggatgatgaatgctcctgattcaaatgataatattgatttactgttgagcattgatttgttgggtttacaaggagcaggtaaagcttttccaaacaaaattgtttttgatgataagcttgtgttggctaacacacaagaattctttgatggaaattttccagtggattcttggttaccaatttttgtgaattgtctttatcctgtaagtcaattaccttcagaagctgtcgttgtaaatgttaca

SEQ ID NO: 79318 - DNA, 139 bp, Glycine max
aatcagaaccacattcctggggggtagatctttaaaataaaaggaagtaaaactaaaaaatgggattgaaaagtagaaattttgattgggcaaatcaaacttaattgcatttgagtttccttatttgcggggccccccc

SEQ ID NO: 79319 - DNA, 328 bp, Glycine max
aaacaatatgtgtgcatatgggctcaatcctggtatttcaggttctcgtcttttgggcaccattcctcagtccatttcacagcaaactgtttggaatcaaatggcaacagtgagaacaccattgaattttgattctagcaagcagagcttttgtcagttttctattgaccttctcggtgggaggaatcttagtggataaaactggagattggatcacacttatacaaaattctccaattagtaacttattgagagttgctgcttggaagaaaggctgtttaatggtcaagattgtgatgtctggggatgcagcagtcaaaaggagtga

SEQ ID NO: 79320 - DNA, 369 bp, Glycine max
  unsure (1)..(369): unsure at all n locations
taggatttaaacctacaaactaacgacctaccttacacgtcgacaacatggctggcaccggcgctgagttcccttgcaccctcaccatcaacacacctttccctacccaaccgcctagccgaaacaactctcaaactcgctcgctgttgacgaagagctatcgcctcttgttcgtcgctctttctcccttgtcaatgctgccggngaagatgccggaagcgatggggagaagacggtcttgaggaccgagtacaaagccacgacaaaccgcatgctgcgcgtcgctgtgaacggtttcttcgagtctctcaatgtcgtggtccaagtcatggaagagtntgacgtggatgtgctgcacgagaacggact

SEQ ID NO: 79321 - DNA, 339 bp, Glycine max
gatgcatgtaagtggacaaaatcagaaccacattcctgggaattgatcttcccaatagaggtatgtggtcctaataatggttttgaaatgtggagttctgagtgggcaaatcaaacttcatggcatttgagtttccttattgacaatcccaaacagtctacagtttttgatattctcttgggaatctctcaagattttgaaattgctggtaatactcttatgccaactttttctgttccacaagctactgccagatcttctgaaaatgcggaatcctctgcatgatctggaatttgtgttttctttcgcttgggtcgttgttaaatcaataaaagaaat

SEQ ID NO: 79322 - DNA, 213 bp, Glycine max
attgtttgttgttgtaactcgttcttcttcttttgttgttctgtgtttgtgtttgtttttttctctcacctgaaaatgtcttgctgcggtggtaactgtggttgcggaagctcctgcaagtgcggcaacggctgcggaggctgcaagatgtacccagacttgagctacactgagtcaaccaccaccgagaccttggtcatgggagtggcacct

SEQ ID NO: 79323 - DNA, 74 bp, Glycine max
aaaaaaaaaaaaaaaaaaaaaaaaaaaaaaaaaaaaaaaaaaaaaaaaaaaaaaaaaaaaaaaaaaaaaaaaaa

SEQ ID NO: 79324 - DNA, 354 bp, Glycine max
gattgaacttgtgtcttcagtggtgatcctacctatcatagcaggggtgtcacttgtgcacctagtactatttaataccaaaaaattgttaactctaaatgctacttctgattatttccaagtgtttgaccattaggcaaaaggaagagtaaaaaaaaacagatggtggggttgacttcccttggtctggggttgtgtttttgggcgtgtatagtgtattttgtatgtccgataatatatcaacttttagtttaattgggaagaggaaggatcttagaccatgttttctggctcaggaagaaagaaacaagagccgaaagacttgtccgcttgatgacaggagatcaaaagaac

SEQ ID NO: 79325 - DNA, 351 bp, Glycine max
caaataccccacacaacaaacccccaacaaacccccaacaaacagacaaaatgagcgactacgcacccaccaaggacggacacgagggaaagacgaaggatggaaagcccgatggccgtgtcagtgagctcaagggcggcgctaagcctgtgaacgacgatggcaaggctgaattcggcggtggacaagaccccaaggaggtcggagcgaagggcggaaagtcgtcttagacttccctttctcagcaggacattattcgatcaatgatacattgcgctaccacgtttaagctcgtcgctcggaagtagttgtgcaaatatcttgcgatcaatcaatcctattatacccgac

SEQ ID NO: 79326 - DNA, 399 bp, Glycine max
acaccattgaattttgattctagcaagcagagcttttgtcagttttctattgaccttctcggtggaggaatcttagtggacaaaactggagattggatcacacttatacaaaattctccaattagtaaacttattgagagttgctgcttggaagaaaggctgtttaatggtcaagattgtgatgtctgggaatgcagcagtcaaaaggagtgattgggcctcattggtacaagtgtttttaacaaacagcaacagtacagagcattttgatgcatgtaagtggacaaaatcagaaccacattcctgggaattgatcttcccaatagaggtatgtggtcctaataatggttttgaaatgtggagttctgagtgggcaaatcaaacttcatggcatttgag

SEQ ID NO: 79327 - DNA, 101 bp, Glycine max
aaaaaaaaaaaaaaaaaataaaaaaaaaaaaaaaaaaaaaaaaaagggaaaaaaaaaaaaaaaaaaaaaaagaggaaaattaatggaaaaaaaaataaaag

SEQ ID NO: 79328 - DNA, 149 bp, Glycine max
ctttttcatcttcttcctcctctcataccaccttcacttccatgaagccacaacatcaatatcaatgacaacaacagtttccaccgatttcctccccctgttcaacccccaccccaaccgcaccaattcccattctaattcccgtacac

SEQ ID NO: 79329 - DNA, 204 bp, Glycine max
gtcgcatgcacccgtacgtaacctcgaaattcgcttcaaggtgtgaagtgtgtgtttttttaaaaaaaaaaaaaaaaaaaaagagaaaaaaaaagaaaaaaaaaaataaaaaaaaaaaaaaaaacaaaaaaaaaaaaaaaaaaaaaaaaaaagaagggggccggccgccaccttttgacctttcaaccccgaaaataaattccg

SEQ ID NO: 79330 - DNA, 368 bp, Glycine max
tttctatagggggaggagctggtgcaaagaatgctattctcatgaatatgccaaatgctgttctttcaatgtggagatattttgttggagatctcgtctttgaagtttctaagatgacttctccctacattaaatgtacagtctctttcttcatagcatttggaaatttggctgatgataccatcaattttgaggcttttccccacaagctggtgcagtttggagagattcaggaaaaagttgtattgaaattttcacaagaggaatttcttacagcttggtcaactcaggtgcgttctgcaacaactctgttggctgatgggtgtccatatttgtatgcaatggtgcatgatagttcagtgtctaca

SEQ ID NO: 79331 - DNA, 469 bp, Glycine max
acttatacaaaattctccaattagtaacttgttgagagttgctgcttggaagaaaggctgtttaatggtcaagattgtgatgtctgggaatgcagcagtcaaaaggagtgattgggcctcattggtacaagtgtttttaacaaacagcaacagtacagagcattttgatgcatgtaagtggacaaaatcagaaccacattcctgggaattgatcttcccaatagaggtatgtggtcctaataatggttttgaaatgtggagttctgagtgggcaaatcaaacttcatggcatttgagtttccttattgacaatcccaaacagtctacagtttttgatattctcttgggaatctctcaagattttgaaattgctggtaatactcttatgccagctttttcttgtccacaagctactgccagatcttctgaaatgcggaatcctctgcatgatctggaattgggtttcttt

SEQ ID NO: 79332 - DNA, 163 bp, Glycine max
  unsure (1)..(163): unsure at all n locations
ctcgagccgttcatttgtaaggtaggaacacgactttcaaaccagttcattgaacctccaaaatgagagcaagttgtaagattttgtctttnaaaaaaaaaaaaaaaaaaaaaaaaaaaaaaaaaaaaaaaaaaaaaaaaaataaaaaaaaaaaaaataaaaa

SEQ ID NO: 79333 - DNA, 261 bp, Glycine max
gttgaagtcttgcccttctctcttcaactccaaacacaagacatcatcatccatggctgcctccgtctccactgtcggagctgtcaacagagctcttttgaacctgaatgggtctggacctggggtttcagcttcccagttcatccttctttgggagcagcttgaagaaggttattggctcaagggtccccaacacaaagatttcctctggaagcttcaagattgttgctgtagaagagaagaaagagattgaagagaccc

SEQ ID NO: 79334 - DNA, 442 bp, Glycine max
gcagcagtcaaaaggagtgattgggcctcattggtacaagtgtttttaacaaacagcaacagtacagagcattttgatgcatgtaagtggacaaaatcagaaccacattcctgggaattgatcttcccaatagaggtatgtggtcctaataatggttttgaaatgtggagttctgagtgggcaaatcaaacttcatggcatttgagtttccttattgacaatcccaaacagtctacagtttttgatattctcttgggaatctctcaagattttgaaattgctggtaatactcttatgccagctttttctgttccacaggctactgccagatcttctgaaaatgcggaatcctctgcatgatctggaatttgtgttttctttcgcttgttcgtttgtttaattcaataaaggaaattaggcatgacccttcttgtgagtatgc

SEQ ID NO: 79335 - DNA, 95 bp, Glycine max
ctcgagccgattctatctacattgaaagggtagccatctctggccacaatactgatgatagcctcaatgtgggacgacacgctacagatggccac

SEQ ID NO: 79336 - DNA, 160 bp, Glycine max
cggatttcggttcgggggaaatattgtcaaaaagcaggatgtcagcattgattttgatgcatgtccaattccaaatgattgtggttcattggttgttgccaaggttggaaatcacaaacaaattgttggtttccatgttgctggaaccaaaggaagactg

SEQ ID NO: 79337 - DNA, 314 bp, Glycine max
tcgtaaatgtgttacgagaattgtatttgcacagtccagaggaagctcgccaattgagaaggaaagctctctctcgtattgaatggctgcaaaaagctgatgtgcctaccatagcacagattgaagagttccattcgatgcagaggatgatgaatgctcctgattcaaatgataatattgatttactgttgagcattgatttgttgggtttacaaggagcaggtaaagcttttccaaacaaaattgtttttgatgataagcttgtgttggctaacacacaagaattctttgatggaaattttccagtggattct

SEQ ID NO: 79338 - DNA, 328 bp, Glycine max
ctcgagccgaatcggctcgagctgaaaatgcggaatcctctgcatgatctggaatttgtgttttctttcgcttgttcgtttgtttaattcaataaaggaaattaggcatgaccctcttgttgagtatgctctgcctatttgaaaatttccacacctcttttaattgtcgtaatgatgtgtgaagtgtgtgttattttaaaaaaaaactatggaagcttcaaaattgttgctgtaaaaaagaaaaaagagattgaaatagacctcacccaccgacaaggacagaaggaaaggacttgcctatgataactaaaaaaaaccgggggggccc

SEQ ID NO: 79339 - DNA, 264 bp, Glycine max
  unsure (1)..(264): unsure at all n locations
atttgaccataaaattttattaatacacttgaattaaccataaaatttcgtacagcatgggagtatatattttttttattcaaatttataagctaatntnnaaaaaaaaaaaaaaaaaaaaaaaaaaaaaaaaaaaaaaaaaaaataaaaaaaaaaaaaannnnaaaaaaaaaaaaaaaaaaaaagaggaaaaagaaaaaaaagaaaaaaaaaaaaaaaaaagggggggggcccccaaaaaaagaactttcaaacccggaaaaa

SEQ ID NO: 79340 - DNA, 144 bp, Glycine max
caattgaagttgaagtcttgcccttctctcttcaactccaaacacaagacatcatcatccatggctgcctccgtctccactgtcggagctgtcaacagagctcttttgaacctgaatgggtctggacctggggtttcagctccc

SEQ ID NO: 79341 - DNA, 409 bp, Glycine max
gttctttcaatgtggagatatttcgttggagatctcggctttgaagtttctaagatgacttctccctacattaaatgtacagtctctttcttcatagcatgtggaaatttggctgatgataccatcaattttgaggcttttccccacaagctggtgcagttcggagagattcaggaaaaagttgtattgaaattttcacaagaggaatttcttacagcttggtcaactcatgtgcgtcctgcaacaactctgttggctgatgggtgtacatatttgtatgcaatggtgcatgatagttcagtgtctacaataccacgtgattttgtcattggtgtcaagttgacaaccataaacaatatgtgcgcatatgggctcaatcctggtatttcaggatctcgtcttttgggca

SEQ ID NO: 79342 - DNA, 370 bp, Glycine max
aggaaagctctctctcgtattgaatggctgcaaaaagctgatgtgcctaccatagcacagattgaagagttccattcgatgcagaggatgatgaatgctcctgattcaaatgataatattgatttactgttgagcattgatttgttgggtttacaaggagcaggtaaagcttttccaaacaaaattgtttttgatgataagcttgtgttggctaacacacaagaattctttgatggaaattttccagtggattcttggttaccaatttttgtgaattgtctttatcctgtaagtcaattaccttcagaagctgtcgttgtaaatgttacatgtggtagtggacgtggtggtttacccaccactgcttgga

SEQ ID NO: 79343 - DNA, 303 bp, Glycine max
ctattgttgtcacgaaaatatgttggccttcattcgtttgtacctctctgtgaacaaataatggttgcattgcgactaatggacttcgagagagagctcttacttttaagaggcgagtgctctcttctatcgcctacagctatctttcccgacttttttaccggataatggggacctcattactttaagcaaagatgaggaaaaatggattctcccgagagtaatatgtgctcaagaaggcaagagtttgtttatatggttaaagatcttaattcatttaattgtagggggaaggagaaccct

SEQ ID NO: 79344 - DNA, 390 bp, Glycine max
acagttgacctttggtacaatgatagaaaagaggttttgcaatggcaagaggagcgtaaaaaggaagctcgtgtgttacattgtgtttacacattgctagggcgagctcggcggttccctttgatggcccaagctaacacctatcaaaaaggtcatattgagcgagctgctattaatactccagtgcaggtccttagctctttctaataaacaaatcaatactgtgtctccctccctcatctatcaaactgtctttacactctcaagttagtaaataaaatatgtactgaattatttaacttgtgattcttgtctagtttggaacttttcccttttaagaacaatgaatgataagatcatattttcaaagcccacttgtaaaatatcata

SEQ ID NO: 79345 - DNA, 467 bp, Glycine max
tgatagttcagtgtctacaataccaggtgattttgtcattggtgtcaagttgacaaccataaacaatatgtgtgcatatgggctcaatcctggtatttcaggttctcgtcttttgggcaccattcctcagtccatttcacagcaaactgtttggaatcaaatggcaacagtgagaacaccattgaattttgattctagcaagcagagcttttgtcagttttctattgaccttctcggtggaggaatcttagtggacaaaactggagattggatcacacttatacaaaattctccaattagtaacttgttgagagttgctgcttggaagaaaggctgtttaatggtcaagattgtgatgtctgggaatgcagcagtcaaaaggagtgattgggcctcattggtacaagtgtttttaacaaacagcaacagtacagagcattttgatgcatgtaagtggacaaaatcag

SEQ ID NO: 79346 - DNA, 446 bp, Glycine max
atcaattttgaggcttttccccacaagctggtgcagtttggagagattcaggaaaaagttgtattgaaattttcacaagaggaatttcttacagcttggtcaactcaggtgcgtcctgcaacaactctgttggctgatgggtgtccatatttgtatgcaatggtgcatgatagttcagtgtctacaataccaggtgattttgtcattggtgtcaagttgacaaccataaacaatatgtgtgcatatgggctcaatcctggtatttcaggttctcgtcttttgggcaccattcctcagtccatttcacagcaaactgtttggaatcaaatggcaacagtgagaacaccattgaattttgattctagcaagcagagcttttgtcagttttctattgaccttcttggtggaggaatcttagtggacaaaactggagattggatcacact

SEQ ID NO: 79347 - DNA, 411 bp, Glycine max
ctctgttggctgatgggtgtccatatttgtatgcaatggtgcatgatagttcagtgtctacaataccaggtgattttgtcattggtgtcaagttgacaaccataaacaatatgtgtgcatatgggctcaatcctggtatttcaggttctcgtcttttgggcaccattcctcagtccatttcacagcaaactgtttggaatcaaatggcaacagtgagaacaccattgaattttgattctagcaagcagagcttttgtcagttttctattgaccttctcggtggaggaatcttagtggacaaaactggagattggatcacacttatacaaaattctccaattagtaacttgttgagaagtgctgcttggaaagaaagctgtttaatggtcaagattgtgatgtctgggaatg

SEQ ID NO: 79348 - DNA, 450 bp, Glycine max
  unsure (1)..(450): unsure at all n locations
ctcgagccgattcggctcgagcccaggacctattgtgttttaaatccacaaaatccttttgtgttaaataggtggatgggaaaattgactttcccccagggcacttcccgaagtgttaagagaatgcctctttctatagggggaggagctggtgcaaagaatgctattctcatgaatatgccaaatgctgttctttcaatgtggagatattttgttggagatctcgtctttgaagtttctaagatgacttctccctacattaaatgtacagtctctttcttcatagcatttggaaatttggctgatgataccatcaattttgaggcttttccccacaagctggtgcagtttggagagattcaggaaaaagttgtattgaaattttcacaagaggaatttcttacagcttggtcaactcaggtgcgtnctgcaacaactctgttggctgat

SEQ ID NO: 79349 - DNA, 371 bp, Glycine max
gtttggagagttgaatgtggaatcccttctggatttccgctcacagttatttgcaatagcatttttaatgagatgctcattagatatagctatgaaaaattactgcgccaggctaaagctccaagtatgtttttacaatccttcaaaaattttgtttctttgtgtgtgtatggtgatgataacttaattagtgttcatgaatatgtcaagccttactttagtggttctaaattgaaaagctttctagctagtcataacatcaccattactgatggtattgacaaaactagtgcaactttgcaatttagaaagttagcagattgtgattttctcaagagaaactttaagcagatgtctaatgttttgtgggt

SEQ ID NO: 79350 - DNA, 425 bp, Glycine max
aaaagattttatttgactagatgttgaattttacgacggagaattttttttaagtcaaaagttaagtaattattttgctcagctagaagaaagatcttacgagagaatagaaaaattaaacacttatgttaatgatttgtataaaactttagactttgattttttattttttaatgaaagtttagatataaaacaagatgatgaattagattatcttgaaaacttaaaaaatgaaaaagattttggtgatattggacgcatttacgaaaatgaatttcccgaaattaaaattcaatatggtgaagaaaaaattatgcctggagattgtaatgaaaattttttagatgataatctagatgaagaatatgataaaattttttcagaatggtgacgatgatgaccatgatactatttttcaatttttt

SEQ ID NO: 79351 - DNA, 365 bp, Glycine max
gaaaagggacaaacttagttgtcaagttggaatcaacccatactccatggaatggactggtttggccaatagattactgagtaagggcaatgatattctgtgttgcgattatgctagttttgatggttgattaccaagcaagttatgagcaagatggcagaaatgataaacagtctttgtggtggtgatgaaaaattgatgcgtgaaaggacgcacctgctgttggcttgttgttcaaggatggcaatttgtaagaaagatgtttggagagttgaatgtggaatcccttctggatttccgctcacagttatttgcaatagcatttttaatgagatgctcattagatatagctatgaaaaattact

SEQ ID NO: 79352 - DNA, 453 bp, Glycine max
gttttctattgaccttctcggtggaggaatcttagtggacaaaactggagattggatcacacttatacaaaattctccaattagtaacttattgagagttgctgcttggaagaaaggctgtttaatggtcaagattgtgatgtctgggaatgcagcagtcaaaaggagtgattgggcctcattggtacaagtgtttttaacaaacagcaacagtacagagcattttgatgcatgtaagtggacaaaatcagaaccacattcctgggaattgatcttcccaatagaggtatgtggtcctaataatggttttgaaatgtggagttctgagtgggcaaatcaaacttcatggcatttgagtttccttattgacaatcccaaacagtctacagtttttgatattctcttgggaatctctcaagatttgaaaattgctgtatactcttatgcagcttt

SEQ ID NO: 79353 - DNA, 325 bp, Glycine max
acgtaagctgcgaattcggttcgaggataaatctgaaaattaacacactcttttttctctttttctatcatgtctagtgtttgttgatgttggatttggttgttctccttattactgatcaataattcaactattggacagtggtaataattagaataagctgaggagctgggattagtggttgttgttgctacttgctggcaagatgatggttttactatgggaatagcaacaccgtcacattcaagaacagtactagaactaaacaccattggttttctcttggatcttgtatcaattcttgcaattctatgtcccaagattt

SEQ ID NO: 79354 - DNA, 332 bp, Glycine max
tatgacgtagcatgcacacttacgttagcgggaattcagcattcaaaaggagtgattgtccctcattggtacatgtcgttttaacagacagcaacagtacagagcattttgatgcatgtaagtggacaaaatcagaaccacattcctgggaattgatcttcccaatagaggtatgtggtcctaataatggttttgaaatgtggagttctgagtgggcaaatcaaacttcatggcatttgagtttccttattgacaatcccaaacagtctacagtttttgatattctcttgggaatctctcaagattttgaaattgctggtaatactcttatg

SEQ ID NO: 79355 - DNA, 332 bp, Glycine max
aaatggcaacagtgagaacaccattgaattttgattctagcaagcagagcttttgtcagttttctattgaccttctcggtggaggaatcttagtggacaaaactggagattggatcacacttatacaaaattctccaattagtaacttattgagagttgctgcttggaagaaaggctgtttaatggtcaagattgtgatgtctgggaatgcagcagtcaaaaggagtgattgggcctcattggtacaagtgtttttaacaaacagcaacagtacagagcattttgatgcatgtaagtggacaaaatcagaaccacattcctgggaattgatc

SEQ ID NO: 79356 - DNA, 234 bp, Glycine max
ggaacacacactaaagatagcgtgaactctgctgctcctcaccggaagcttcagcaggcggtatagatacaggctacagttacgtcgccatcaccacaacaagaaagtctcactgctgggtcaaattcggcccagtccagatcctctgtggtggctgcatcatggacatatttgactccgagcgtgcactgatagccaaggaggacaatacctgcgcagtgatggatctggagc

SEQ ID NO: 79357 - DNA, 435 bp, Glycine max
ctcgtattgaatggctgcaaaaagctgatgtgcctaccatagcacagattgaagagttccattcgatgcagaggatgatgaatgctcctgattcaaatgataatattgatttactgttgagcattgatttgttgggtttacaaggagcaggtaaagcttttccaaacaaaattgtttttgatgataagcttgtgttggctaacacacaagaattctttgatggaaattttccagtggattcttggttaccaatttttgtgaattgtctttatcctgtaagtcaattaccttcagaagctgtcgttgtaaatgttacatgtggtagtggacgtggtggtttacccaccactgcttggattagttctgcagttaacaatcgctcctcagatatcaacaaaaggattcgcacagcactttgggaaaggtaagaaaatt

SEQ ID NO: 79358 - DNA, 473 bp, Glycine max
aggacctattgtgttttaaatccacaaaatccttttgtgttaaataggtggatggggaaattgactttcccccagggcacttcccgaagtgttaagagaatgcctctttctatagggggaggagctggtgcaaagaatgctattctcatgaatatgccaaatgctgttctttcaatgtggagatattttgttggagatctcgtctttgaagtttctaagatgacttctccctacattaaatgtacagtctctttcttcatagcatttggaaatttggctgatgataccatcaattttgaggcttttccccacaagctggtgcagtttggagagattcatgagaaagttgtattgaaattttcacaagaggaatttcttacagcttggtcaactcaggtgcgtcctgcaacaactctgttggctgatgggtgttcatatttgtatgcaatggtgcatgatagttcagtgtctac

SEQ ID NO: 79359 - DNA, 465 bp, Glycine max
  unsure (1)..(465): unsure at all n locations
gagatattttgttggagatctcgtctttgaagtttctaagatgacttctccctacattaaatgtacagtctctttcttcatagcatttggaaatttggctgatgataccatcaattttgaggcttttccccacaagctggtgcagtttggagagattcaggaaaaagttgtattgaaattttcacaagaggaatttcttacagcttggtcaactcaggtgcgtcctgcaacaactctgttggctgatgggtgtccatatttgtatgcaatggtgcatgatagttcagtgtctacaataccaggtgattttgtcattggtgtcaagttgacaaccataaacaatatgtgtgcatatgggctcaatcctggtatttcaggttctcgtcttttgggcaccattcctcagtccatttcacagcaaactgtttggaatcaaatggcnacagtgagaacaccattgaattt

SEQ ID NO: 79360 - DNA, 77 bp, Glycine max
ggtaaatatgcgtagacgtgtccatctgaatgctgttaggcccatcatgaatactagtccacccagtgtacaggatg

SEQ ID NO: 79361 - DNA, 401 bp, Glycine max
  unsure (1)..(401): unsure at all n locations
gcaggatgttcaggttacaattgattggtttatttcctctcaggaatgtgttcccaggacctattgtgttttaaatccacaaaatccttttgtgttaaataggtggatgggaaaattgactttcccccagggcacttcccgaagtgttaagagaatgcctctttctatagggggaggagctggtgcaaagaatgctattctcatgaatatgccaaatgctgttctttcaatgtggagatattttgttggagatctcgtctttgaagtttctaagatgacttctccctacattaaatgtacagtctctttcttcatagcatttggaaatttggctgatgataccatcaattttgaggcttttccccacaagctggtgcagtttggagagattcangaaaaag

SEQ ID NO: 79362 - DNA, 132 bp, Glycine max
gtatgatgaacaggatgcacttactgggggtattttctatcaggaaggtgatattacaacttattgtatattaactacacacaatactttagaggttaaatagtgtgttggaaaaaatgttacaaattcatt

SEQ ID NO: 79363 - DNA, 446 bp, Glycine max
gagaatgcctctttctatagggggaggagctggtgcaaagaatgctattctcatgaatatgccaaatgctgttctttcaatgtggagatattttgttggagatctcgtctttgaagtttctaagatgacttctccctacattaaatgtacagtctctttcttcatagcatttggaaatttggctgatgataccatcaattttgaggcttttccccacaagctggtgcagtttggagagattcaggaaaaagttgtattgaaattttcacaagaggaatttcttacagcttggtcaactcaggtgcgtcctgcaacaactctgttggctgatgggtgtccatatttgtatgcaatggtgcatgatagttcagtgtctacaataccaggtgattttgtcattggtgtcaagttgacaaccataaacaatatgtgtgcatatgggctca

SEQ ID NO: 79364 - DNA, 395 bp, Glycine max
  unsure (1)..(395): unsure at all n locations
ctttaagcagatgtctaatgttttgtgggtggctcctgaggacaaggcgagtttatggtcacaacttcattatgtttcgtgtaataatctggaaatgcaagaagcttatcttgtcaatctcgtaaatgtgttacgagaattgtatttgcacagtccagaggaagctcgccaattgagaaggaaagctctctctcgtattgaatggctgcaaaaagctgatgtgcctaccatagcacagattgaagagttccattcgatgcagaggatgatgaatgctcctgattcaaatgataatattgatttactgttgagcatttgattgtgggtttacaaggagcaggtaaagctttttcaaacaaaatngtttttgatgataagcttgtgtggctaacaca

SEQ ID NO: 79365 - DNA, 257 bp, Glycine max
cgcattcctgaactagtatgtctaatttgattcacttaaatacagcgcattactatgggcactgagtgtgtatggatataactaaaacaaccacacgctataaacagtatcctgtcaagcgattaaatgaagaacaacaataggctgatcacaaaccatatgaagggcgcccgctcactacagagctcgttcacccggaaataatttctggaccagagctggagggcctaccaattcacccaattaagagtcccatt

SEQ ID NO: 79366 - DNA, 275 bp, Glycine max
ctggagctctgtggaagttactatggacacaagcaggtctgagggaaaaagggtcatgaggtacaaagaagaagatgatgataatgatgatgaagaagaagaagaggtggtgagtgagatgggttttgaagaagatggaaggaggaataagagagtaataagagatctctatggaaagagagggtccaaaggtggaggctcaataacaccttcttgccaagtggacaattgtgatgctgatctgagtgaagctaagcagtaccacagaagacaca

SEQ ID NO: 79367 - DNA, 361 bp, Glycine max
tttcaggttctcgtcttttgggcaccattcctcagtccatttcacagcaaactgtttggaatcaaatggcaacagtgagaacaccattgaattttgattctagcaagcagagcttttgtcagttttctattgaccttctcggtggaggaatcttagtggacaaaactggagattggatcacacttatacaaaattctccaattagtaacttgttgagagttgctgcttggaagaaaggctgtttaatggtcaagattgtgatgtctgggaatgcagcagtcaaaaggagtgattgggcctcattggtacaagtgtttttaacaaacagcaacagtacagagcattttgatgcatgtaagtg

SEQ ID NO: 79368 - DNA, 319 bp, Glycine max
gtaagctcggaattcggttcgagcacagattgaagagttccattcgatgcagaggatgatgaatgctcctgattcaaatgataatattgatttactgttgagcattgatttgttgggtttacaaggagcaggtaaagcttttccaaacaaaattgtttttgatgataagcttgtgttggctaacacacaagaattctttgatggaaattttccagtggattcttggttaccaatttttgtgaattgtctttatcctgtaagtcaattaccttcagaagctgtcgttgtaaatgttacatgtggtagtggacgtggtggt

SEQ ID NO: 79369 - DNA, 336 bp, Glycine max
attggcctgtgctatgaatagttcttttagggggcgcgccagttctgatatttacaccatctgctctcaagactgtgaattgtggaatcctgcttgcacaaaagcaatgactatgtcatttaatccaaacccgtgttctgatgcatggagtttggaatttctgaagcgtactggatttcattgcgatatcatttgtgtcactggatggactgccaccccaatgcaggatgttcaggttacaattgattggtttatttcctctcaggaatgtgtttccaggacctattgtgttttaaattcacaaaattcttttgtgttaaataggtggatgggaaa

SEQ ID NO: 79370 - DNA, 346 bp, Glycine max
gaaaaattactgcgccaggctaaagctccaagtatgtttttacaatccttcaaaaattttgtttctttgtgtgtgtatggtgatgataacttaattagtgttcatgaatatgtcaagccttactttagtggttctaaattgaaaagctttctagctagtcataacatcaccattactgatggtattgacaaaactagtgcaactttgcaatttagaaagttagcagattgtgattttctcaagagaaactttaagcagatgtctaatgttttgtgggtggctcctgaggacaaagcgagtttatggtcacaacttcattatgtttcgtgtaataatctggaaatgc

SEQ ID NO: 79371 - DNA, 429 bp, Glycine max
gcaaaaagctgatgtgcctaccatagcacagattgaagagttccattcgatgcagaggatgatgaatgctcctgattcaaatgataatattgatttactgttgagcattgatttgttgggtttacaaggagcaggtaaagcttttccaaacaaaattgtttttgatgataagcttgtgttggctaacacacaagaattctttgatggaaattttccagtggattcttggttaccaatttttgtgaattgtctttatcctgtaagtcaattaccttcagaagctgtcgttgtaaatgttacatgtggtagtggacgtggtggtttacccaccactgcttggattagttctgcagttaacaatcgctcctcagatatcaacaaaaagattcgcacagcacttgggaaaggtaagaaaattgttttcttact

SEQ ID NO: 79372 - DNA, 295 bp, Glycine max
  unsure (1)..(295): unsure at all n locations
gctgatgtgcctaccatagcacagattgaagagttccattcgatgcagaggatgatgaatgctcctgattcanatgataatattgatttactgttgagcattgatttgttgggtttacaaggagcaggtaaagcttttccaaacaaaattgtttttgatgataagcttgtgttggctaacacacaagaattctttgatggaaattttccagtggattcttggttaccaatttttgtgaattgtctttatcctgtaagtcaattaccttcagaagctgtcgttgtaaatgttacat

SEQ ID NO: 79373 - DNA, 353 bp, Glycine max
  unsure (1)..(353): unsure at all n locations
gttttgatggtttgattaccaagcaagttatgagcaagatggcagaaatgataaacagtctttgtggtggtgatgaaaaattgatgcgtgaaaggacgcacctgctgttggcttgttgttcaaggatggcaatttgtaagaaagatgtttggagagttgaatgtggaatcccttctggatttccgctcacagttatttgcaatagcatttttaatgagatgctcattagatatagctatgaaaaattactgcgccaggctaaagctccaagtatgtttttacaatccttcaaaaatttntgttctttgtgtgtgtatggggatgataacttaattagtgttcatgaatatgtc

SEQ ID NO: 79374 - DNA, 451 bp, Glycine max
gggaggagctggtgcaaagaatgctattctcatgaatatgccaaatgctgttctttcaatgtggagatattttgttggagatctcgtctttgaagtttctaagatgacttctccctacattaaatgtacagtctctttcttcatagcatttggaaatttggctgatgataccatcaattttgaggcttttccccacaagctggtgcagtttggagagattcaggaaaaagttgtattgaaattttcacaagaggaatttcttacagcttggtcaactcaagtgcgtcctgcaacaactctgttggctgatgggtgtccatatttgtatgcaatggtgcatgatagttcagtgtctacaataccaggtgattttgtcattggtgtcaagttgacaaccataaacaatatgtgtgcatatgggctcaatcctggtatttcaggttctcgcttt

SEQ ID NO: 79375 - DNA, 149 bp, Glycine max
caactattaagcactaaaaagttgacagacatatgaagtttccagcaggtagctggccatactccagtcctagtataacaaaagaaactacatatgtctgtcaactttttaccgcttaatactagaaattttttgttatgcaactgagg

SEQ ID NO: 79376 - DNA, 479 bp, Glycine max
ccaggacctattgtgttttaaatccacaaaatccttttgtgttaaataggtggatgggaaaattgactttcccccagggcacttcccgaagtgttaagagaatgcctctttctatagggggaggagctggtgcaaagaatgctattctcatgaatatgccaaatgctgttctttcaatgtggagatattttgttggagatctcgtctttgaagtttctaagatgacttctccctacattaaatgtacagtctctttcttcatagcatttggaaatttggctgatgataccatcaattttgaggcttttccccacaagctggtgcagtttggagagattcaggaaaaagttgtattgaaattttcacaagaggaatttcttacagcttggtcaactcaggtgcgtcctgcaacaactctgttggctgatgggtgtccatatttgtatgcaatggtgcatgatagttcagtgtctacaata

SEQ ID NO: 79377 - DNA, 405 bp, Glycine max
agctaacacactctgcacattatgccttgttcatagaacgaaaaatattatagggagaggcacatggtgctaagaagacaacactgatcaatacacgcctgagccacccaacgacgatgctatacgacgaggctcagatgcttctgtgaaccgctattatgacgatggccgtacacgaaacctacggtgcacaaagattatagcatctggaagcactgatgcggactcaagatgagcaaagggctgtccgacgagcatgcctgcacgactagagtagcaaggacagattcattgggacaatgtacaataacgaaacccgacgacctcgcccaaatatgcagtgaccagccacagatcctaaggacaccacgagcctaaatcggtaaacactgtaatctggacgag

SEQ ID NO: 79378 - DNA, 465 bp, Glycine max
ggtgattttgtcattggtgtcaagttgacaaccataaacaatatgtgtgcatatgggctcaatcctggtatttcaggttctcgtcttttgggcaccattcctcagtccatttcacagcaaactgtttggaatcaaatggcaacagtgagaacaccattgaattttgattctagcaagcagagcttttgtcagttttctattgaccttctcggtggaggaatcttagtggacaaaactggagattggatcacacttatacaaaattctccaattagtaacttattgagagttgctgcttggaagaaaggctgtttaatggtcaagattgtgatgtctgggaatgcagcagtcaaaaggagtgattgggcctcattggtacaagtgtttttaacaaacagcaacagtacagagcattttgatgcatgtaagtggacaaaatcagaaccacattccttggaaatgatc

SEQ ID NO: 79379 - DNA, 186 bp, Glycine max
acacaaggcagaaagcaagctcatcctagagttttaaaaatggcagcagcctcctccatggctctctcttccccatccttggctggcaagggcctgaaacttggcccattaaccccccaaagtcggaagggtcagcatgaggaagaccgtcaccaagcaggcctcctccggaagcccatggtacgg

SEQ ID NO: 79380 - DNA, 474 bp, Glycine max
gcaacagtgagaacaccattgaattttgattctagcaagcagagcttttgtcagttttctattgaccttctcggtggaggaatcttagtggacaaaactggagattggatcacacttatacaaaattctccaattagtaacttgttgagagttgctgcttggaagaaaggctgtttaatggtcaagattgtgatgtctgggaatgcagcagtcaaaaggagtgattgggcctcattggtacaagtgtttttaacaaacagcaacagtacagagcattttgatgcatgtaagtggacaaaatcagaaccacattcctgggaattgatcttcccaatagaggtatgtggtcctaataatggttttgaaatgtggagttctgagtgggcaaatcaaacttcatggcatttgagtttccttattgacaatcccaaacagtctacagtttttgatattctcttgggaatctctcaagat

SEQ ID NO: 79381 - DNA, 464 bp, Glycine max
  unsure (1)..(464): unsure at all n locations
gaaggaaagctctctctcgtattgaatggctgcaaaaagctgatgtgcctaccatagcacagattgaagagttccattcgatgcagaggatgatgaatgctcctgattcaaatgataatattgatttactgttgagcattgatttgttgggtttacaaggagcaggtaaagcttttccaaacaaaattgtttttgatgataagcttgtgttggctaacacacaagaattctttgatggaaattttccagtggattcttggttaccaatttttgtgaattgtctttatcctgtaagtcaattaccttcagaagctgtcgttgtaaatgttacatgtggtagtggacgntcggtttacccaccactgcttggatagttctgagttaacaatcgctcctcagatataacaaaaagattcgcacagcacttgggaaaggaagaaaattgttttcttactagagtgatc

SEQ ID NO: 79382 - DNA, 102 bp, Glycine max
atgaattttcacgggtctgaaaatgctgggaacaagcaacatcaaaatattgcttcaaatggcacctctagcgtagtggactaacatggatgggagaaacct

SEQ ID NO: 79383 - DNA, 296 bp, Glycine max
ctcgagccgaatcggctcgagcagtttttgatattctcttgggaatctctcaagattttgaaattgctggtaatactcttatgccagctttttctgttccacaggctactgccagatcttctgaaaatgcggaatcctctgcatgatctggaatttgtgttttctttcgcttgttcgtttgtttaattcaataaaggaaattaggcatgaccctcttgttgagtatgctctgcctatttaaaaatttccacacctcttttaattgtcgtaatgatgtgtgaagtgtgtgttatttt

SEQ ID NO: 79384 - DNA, 118 bp, Glycine max
acgtcgcatgcacccgtacgtaacctcggatttcggttcgagaaagcctaacccttccttacacctccaaacacaaaaacataatcatccatggttgcctccgtctccactgtcggac

SEQ ID NO: 79385 - DNA, 284 bp, Glycine max
ctccgagcatccacaagcgacatcatgccaggcaagtctgacgacacggtcatcgaggagttcaacgagtatgtgaacatgtccgtcaaggagctcgaggagtggctcgagacggaggactcgcagggcgccggctggggcgacggcgatgagagcgtatgacatcaaagtggacgaaagatcgttgacatccttcagcgtaacccgaagaaggacccgagcaagtacacggacgaagatctggcccacatgcgcaaggtcgcctcgtactgcaagcgccacct

SEQ ID NO: 79386 - DNA, 463 bp, Glycine max
tgcaactttgcaatttagaaagttagcagattgtgattttctcaagagaaactttaagcagatgtctaatgttttgtgggtggctcctgaggacaaggcgagtttatggtcacaacttcattatgtttcgtgtaataatctggaaatgcaagaagcttatcttgtcaatctcgtaaatgtgttacgagaattgtatttgcacagtccagaggaagctcgccaattgagaaggaaagctctctctcgtattgaatggctgcaaaaagctgatgtgcctaccatagcacagattgaagagttccattcgatgcaaaagatgatgaatgctcctgattcaaatgataatattgatttactggtgagcattgatttgttgggtttacaaggagcaaggtaagcttttccaaacaaaattgtttttgatgataaagcttgtgtggctaacacacaagaattctttgat

SEQ ID NO: 79387 - DNA, 384 bp, Glycine max
tggactgccaccccaatgcaggatgttcaggttacaattgattggtttatttcctctcaggaatgtgttcccaggacctattgtgttttaaatccacaaaatccttttgtgttaaataggtggatgggaaaattgactttcccccagggcacttcccgaagtgttaagagaatgcctctttctatagggggaggagctggtgcaaagaatgctattctcatgaatatgccaaatgctgttctttcaatgtggagatatcttgttggagatctcgtctttgaagtttctaagatgacttctccctacattaaatgtacagtctctttcttcatagcatttggaaatttggctgatgataccatcaattttgaagcttttccccac

SEQ ID NO: 79388 - DNA, 473 bp, Glycine max
aagaagcttatcttgtcaatctcgtaaatgtgttacgagaattgtatttgcacagtccagaggaagctcgccaattgagaaggaaagctctctctcgtattgaatggctgcaaaaagctgatgtgcctaccatagcacagattgaagagttccattcgatgcagaggatgatgaatgctcctgattcaaatgataatattgatttactgttgagcattgatttgttgggtttacaaggagcaggtaaagcttttccaaacaaaattgtttttgatgataagcttgtgttggctaacacacaagaattctttgatggaaattttccagtggattcttggttaccaatttttgtgaattgtctttatcctgtaagtcaattaccttcagaagctgtcgttgtaaatgttacatgtggtagtggacgcttgtgttacccaccactgcttggattagttctgcagttaacaatcgct

SEQ ID NO: 79389 - DNA, 471 bp, Glycine max
gaaattttcacaagaggaatttcttacagcttggtcaactcaggtgcgtcctgcaacaactctgttggctgatgggtgtccatatttgtatgcaatggtgcatgatagttcagtgtctacaataccaggtgattttgtcattggtgtcaagttgacaaccataaacaatatgtgtgcacatgggctcaatcctggtatttcaggttctcgtcttttgggcaccattcctcagtccatttcacagcaaactgtttggaatcaaatggcaacagtgagaacaccattgaattttgattctagcaagcagagcttttgtcagttttctattgaccttctcggtggaagaatcttagtggacaaaactggagattggatcacacttatacaaaattctccaattagtaacttattgagagttgctgcttggaaaaaaagctgtttaatggtcaagattgtgatgtcttggaatgc

SEQ ID NO: 79390 - DNA, 248 bp, Glycine max
cggctcgaggtgaattgtggaatcctgcttgcacaaaagcaatgactatgtcatttaatccaaacccgtgttctgatgcatggagtttggaatttctgaagcgtactggatttcattgcgatatcatttgtgtcactggatggactgccaccccaatgcaggatgttcaggttacaattgattggtttatttcctctcaggaatgtgttcccaggacctattgtgttttaaatccacaaaatcctttt

SEQ ID NO: 79391 - DNA, 477 bp, Glycine max
gcctctttctatagggggaggagctggtgcaaagaatgctattctcatgaatatgccaaatgctgttctttcaatgtggagatattttgttggagatctcgtctttgaagtttctaagatgacttctccctacattaaatgtacagtctctttcttcatagcatttggaaatttggctgatgataccatcaattttgaggcttttccccacaagctggtgcagtttggagagattcaggaaaaagttgtattgaaattttcacaagaggaatttcttacagcttggtcaactcaggtgcgtcctgcaacaactctgttggctgatgggtgtccatatttgtatgcaatggtgcatgatagttcagtgtctacaataccaggtgattttgtcattggtgtcaagttgacaaccataaacaatatgtgtgcatatgggctcaatcctggtatttcaggttctcgtcttttgggcaccat

SEQ ID NO: 79392 - DNA, 304 bp, Glycine max
agcaaattgttgggaatcaaagggcaccggtgggaccacccttgaattttgattctagcaagcaaagcttttgtcagttttttatggaccttctcggtggaggaatcttagtggacaaaactggagattggatcacacttatacaaaattctccaattagtaactttgtgagagttgctgcttggaagaaaggctgtttaatggtcaagattgtgatgtctgggaatgcagcaatcaaaaagagtgattgggcctcattggtacaagtgtttttaacaaacagcaacagtacaaagcattttga

SEQ ID NO: 79393 - DNA, 342 bp, Glycine max
attatgctagttttgatggtttgattaccaagcaagttatgagcaagatggcagaaatgataaacagtctttgtggtggtgatgaaaaattgatgcgtgaaaggacgcacctgctgttggcttgttgttcaaggatggcaatttgtaagaaagatgtttggagagttgaatgtggaatcccttctggatttccgctcacagttatttgcaatagcatttttaatgagatgctcattagatatagctatgaaaaattactgcgccaggctaaagctccaagtatgtttttacaatccttcaaaaattttgtttctttgtgtgtgtatggggatgataacttaa

SEQ ID NO: 79394 - DNA, 472 bp, Glycine max
gttctcgtcttttgggcaccattcctcagtccatttcacagcaaactgtttggaatcaaatggcaacagtgagaacaccattgaattttgattctagcaagcagagcttttgtcagttttctattgaccttctcggtggaggaatcttagtggacaaaactggagattggatcacacttatacaaaattctccaattagtaacttgttgagagttgctgcttggaagaaaggctgtttaatggtcaagattgtgatgtctgggaatgcagcagtcaaaaggagtgattgggcctcattggtacaagtgtttttaacaaacagcaacagtacagagcattttgatgcatgtaagtggacaaaatcagaaccacattcctgggaattgatcttcccaatagaggtatgtggtcctaataatggttttgaaatgtggagttctgagtgggcaaatcaaacttcatggcatttgag

SEQ ID NO: 79395 - DNA, 432 bp, Glycine max
gttctcgtcttttgggcactattcctcagtccatttcacagcaaactgtttggaatcaaatggcaacagtgagaacaccattgaattttgattctagcaagcagagcttttgtcagttttctattgaccttctcggtggaggaatcttagtggacaaaactggagattggatcacacttatacaaaattctccaattagtaacttattgagagttgctgcttggaagaaaggctgtttaatggtcaagattgtgatgtctgggaatgcagcagtcaaaaggagtgattgggcctcattggtacaagtgtttttaacaaacagcaacagtacagaacattttgatgcatgtaagtggacaaaatcagaaccacattcctgggaattgatctttccaataaaagtatgtggtcctaataatggttttgaaatgt

SEQ ID NO: 79396 - DNA, 348 bp, Glycine max
tggagattggatcacacttatacaaaattctccaattagtaacttattgagagttgctgcttggaagaaaggctgtttaatggtcaagattgtgatgtctgggaatgcagcagtcaaaaggagtgattgggcctcattggtacaagtgtttttaacaaacagcaacagtacagagcattttgatgcatgtaagtggacaaaatcagaaccacattcctgggaattgatcttcccaatagaggtatgtggtcctaataatggttttgaaatgtggagttctgagtgggcaaatcaaacttcatggcatttgagtttccttattgacaatcccaaacaatctacaagttt

SEQ ID NO: 79397 - DNA, 370 bp, Glycine max
caaatggcaacagtgagaacaccattgaattttgattctagcaagcagagcttttgtcagttttctattgaccttctcggtggaggaatcttagtggacaaaactggagattggatcacacttatacaaaattctccaattagtaacttattgagagttgctgcttggaagaaaggctgtttaatggtcaagattgtgatgtctgggaatgcagcagtcaaaaggagtgattgggcctcattggtacaagtgtttttaacaaacagcaacagtacagagcattttgatgcatgtaagtggacaaaatcagaaccacattcctgggaattgatcttcccaataaaagtatgtggtcctaataaatggtttg

SEQ ID NO: 79398 - DNA, 441 bp, Glycine max
aaaaattactacattgtaatggatgcaatcgacacacttttcacggatcacagaacattctttggtatacaagttaagatgggtgagggaaaactttctacgcattgagcgcgaacaggtggtagtgataggctgatcataatgatgtgcgacggctatatgacgtctggagttgagttcctgtatagtaggagaacgaatgactgagtatgtaatgcgaacactatcgagtatctatcagtatcggagacgattgttttgcatatcagattgatggtattggcgtagaaacaaatcaacagacattggctaactaacagatgaacagacagaacatgtgacctatcgttggcctacaaagagaacttgagctatggaattttttaagatacatgctactagtcaagatggttattctttatgtggatctagagagaatac

SEQ ID NO: 79399 - DNA, 477 bp, Glycine max
gtactgatgatcttggaggaacaccctgaaaattatcgtaacagactttaagcatctttaagcatactgtgccaaaaaagaagatactgtaccaaaaaagcatctctaagcatgaaaatgagttatttttttaatgcaacatctggataaaaaaaaagttctaacacaaggcttctaatcaattgcattagctgatacaataacaatccacgaatatcaaccatgtaaataggaagtttcttctaacacctataaacttcatggaaaaagggcaaaaaggagagggggtaaaagattaccccgatgattatggtttacctagaaggatgcttgagcttaaactaatataatttgttccccacaccaccttagaatcacctcagaagtgttaatcaaattgaaaataccttgcagaaggtgggaatgggagcataaaagggaaagaaaaatgaaaaggtaacccacattggataaact

SEQ ID NO: 79400 - DNA, 505 bp, Glycine max
  unsure (1)..(505): unsure at all n locations
tgacgtcgcatgcaccgcgtacgtaangctcggaatttcggcttcgagccggcctcgagccggcttcgagatatttttgacccaaggaacggttctttcgaaccttctttaatttaagcaattccaattgttaggaatgaggaattcttagtcgtacccagtacaagattaatgggggctacaacntnncaaatcnnataagnntgagggattggaaccctaggacangnntatcttacnncaaatacctacncaccnnncaaaattctnnatgttagtgccgtacccatctccnnnatatgaattgtttaattttaacctgtacccaaaataataaaaagaaagggtaccaattctaagttcttaagtttgtttttaaacaaatagtgctgaaagtgcattatttgcaaggtagccctaaagaatgtcaagcatatcccctctgttattaatttggcccattntgtttcacttnggaaataganaattcattctttcgattgtt

SEQ ID NO: 79401 - DNA, 323 bp, Glycine max
ttctgaagcgtactggatttcattgcgatatcatttgtgtcactggatggactgccaccccaatgcaggatgttcaggttacaattgattggtttatttcctctcaggaatgtgttcccaggacctattgtgttttaaatccacaaaatccttttgtgttaaataggtggatgggaaaattgactttcccccagggcacttcccgaagtgttaagagaatgcctctttctatagggggaggagctggtgcaaagaatgctattctcatgaatatgccaaatgctgttctttcaatgtggagatattttgttggaaatctcgtc

SEQ ID NO: 79402 - DNA, 261 bp, Glycine max
atggcaacagtgagaacaccattgaattttgattctagcaagcagagcttttgtcagttttctattgaccttctcggtggaggaatcttagtggacaaaactggagattggatcacacttatacaaaattctccaattagtaacttattgagagttgctgcttggaagaaaggctgtttaatggtcaagattgtgatgtctgggaatgcagcagtcaaaaagagtgattgggcctcattggtacaagtgtttttaacaaac

SEQ ID NO: 79403 - DNA, 228 bp, Glycine max
aaaaaaaaataatttaaaaaaaaaaaaacaaaaaagcagtgggaaaaaaaaaaaaaaaaaaaaaaaaaaaaaaaaaaaaaaaaaaaaaaaaaaaaaaaaaaaaaaaaaaaaaaaaaaaaaggggggcggccgccccctaggggcctcgtccccccgggatttatttccggcccggtccctgggggcgtcccagttttccttttggggggtcgttttaaagctgggcga

SEQ ID NO: 79404 - DNA, 345 bp, Glycine max
acaataccaggtgattttgtcattggtgtcaagttgacaaccataaacaatatgtgtgcatatgggctcaatcctggtatttcaggttctcgtcttttgggcaccattcctcagtccatttcacagcaaactgtttggaatcaaatggcaacagtgagaacaccattgaattttgattctagcaagcagagcttttgtcagttttctattgaccttctcggtggaggaatcttagtggacaaaactggagattggatcacacttatacaaaattctccaattagtaacttgttgagagttgctgcttggaagaaaagcttgttaatggtcaagattgtgatgtct

SEQ ID NO: 79405 - DNA, 331 bp, Glycine max
gcaaatcaaacttcatggcatttgagtttccttattgacaatcccaaacagtctacagtttttgatattctcttgggaatctctcaagattttgaaattgctggtaatactcttatgccagctttttctgttccacaggctactgccagatcttctgaaaatgcggaatcctctgcatgatctggaatttgtgttttctttcgcttgttcgtttgtttaattcaataaaggaaattaggcatgaccctcttgttgagtatgctctgcctatttgaaaatttccacacctcttttaattgtcgtaatgatgtgtgaagtgtgtgttatttta

SEQ ID NO: 79406 - DNA, 479 bp, Glycine max
ctcaggtgcgtcctgcaacaactctgttggctgatgggtgtccatatttgtatgcaatggtgcatgatagttcagtgtctacaataccaggtgattttgtcattggtgtcaagttgacaaccataaacaatatgtgtgcatatgggctcaatcctggtatttcaggttctcgtcttttgggcaccattcctcagtccatttcacagcaaactgtttggaatcaaatggcaacagtgagaacaccattgaattttgattctagcaagcagagcttttgtcagttttctattgaccttctcggtggaggaatcttagtggacaaaactggagattggatcacacttatacaaaattctccaattagtaacttattgagagttgctgcttggaagaaaggctgtttaatggtcaagattgtgatgtctgggaatgcagcagtcaaaaggagtgattgggcctcattggtacaagtgttttta

SEQ ID NO: 79407 - DNA, 447 bp, Glycine max
ctaaattgaaaagctttctagctagtcataacatcaccattactgatggtattgacaaaactagtgcaactttgcaatttagaaagttagcagattgtgattttctcaagagaaactttaagcagatgtctaatgttttgtgggtggctcctgaggacaaggcgagtttatggtcacaacttcattatgtttcgtgtaataatctggaaatgcaagaagcttatcttgtcaatctcgtaaatgtgttacgagaattgtatttgcacagtccagaggaagctcgccaattgagaaggaaagctctctctcgtattgaatggctgcaaaaagctgatgtgcctaccatagcacagattgaagagttccattcgatgcaaaggatgatgaatgctcctgattcaaatgataatattgatttactgttgagcattgatttggtgggtttac

SEQ ID NO: 79408 - DNA, 463 bp, Glycine max
atcaaatggcaacagtgagaacaccattgaattttgattctagcaagcagagcttttgtcagttttctattgaccttctcggtggaggaatcttagtggacaaaactggagattggatcacacttatacaaaattctccaattagtaacttgttgagagttgctgcttggaagaaaggctgtttaatggtcaagattgtgatgtctgggaatgcagcagtcaaaaggagtgattgggcctcattggtacaagtgttttttaacaaacagcaacagtacagagcattttgatgcatgtaagtggacaaaatcagaaccacattcctgggaattgatcttcccaatagaggtatgtggtcctaataatggttttgaaatgtggagttctgagtgggcaaatcaaacttcatggcatttgagtttccttattgacaatcccaaacagtctacagttttgatattct

SEQ ID NO: 79409 - DNA, 332 bp, Glycine max
ggaatctgcaccataacaaaatcagcaacaaatattcataaaaaaggggaaaattaaaaaagggaaagggaaagggaaagggatttctgttgaatgattaagaacctacccttttgtgcttattgggaataaaaaccccaacaaggtggagttaaaaaaatattacttggttccaaaaggggttgccgaacccttttaccaaccggaagtgaaaggaaagaaaaaaaatggttgaatttgattggttaaattggggagaaaaaaattaataacacttgctttgagagttggcattgaatttccctttaaagattccaaattttgtttgtgcc

SEQ ID NO: 79410 - DNA, 402 bp, Glycine max
gaaactttaagcagatgtctaatgttttgtgggtggctcctgaggacaaggcgagtttatggtcacaacttcattatgtttcgtgtaataatctggaaatgcaagaagcttatcttgtcaatctcgtaaatgtgttacgagaattgtatttgcacagtccagaggaagctcgccaattgagaaggaaagctctctctcgtattgaatggctgcaaaaagctgatgtgcctaccatagcacagattgaagagttccattcgatgcagaggatgatgaatgctcctgattcaaatgataatattgatttactggtgagcatttgattgttgggtttacaaggagcacgtaaagcttttccaaacaaaattgtttttgatgataaagctgtgttggctaacacac

SEQ ID NO: 79411 - DNA, 345 bp, Glycine max
cgaatctgcaccatttcaaaatcagcaacaaacatccatacgggggggaaatataaagaaggagacggagaaagacaatgagatttccgtcaaatgaccaggaacctaccctcttgtgctgatcgaaaatacccaccaaaacaggttccacctaacaacatttacctcgttccagacatgaatacccaacccatctaacaaaccgtgtgtcaatgacacgattacatacgctttaatctcatcaataaactccttaacatgcacatgaatcacactcccttgaatgcccatcatcaatacgctttcaacctatacctttccttccatgttttaaaaaaactcaac

SEQ ID NO: 79412 - DNA, 431 bp, Glycine max
catgaatatgtcaagccttactttagtggttctaaattgaaaagctttctagctagtcataacatcaccattactgatggtattgacaaaactagtgcaactttgcaatttagaaagttagcagattgtgattttctcaagagaaactttaagcagatgtctaatgttttgtgggtggctcctgaggacaaggcgagtttatggtcacaacttcattatgtttcgtgtaataatctggaaatgcaagaagcttatcttgtcaatctcgtaaatgtgttacgagaattgtatttgcacagtccagaggaagctcgccaattgagaaggaaagctctctctcgtattgaatggctgcaaaaagctgatgtgcctaccatagcacagaatggagagttccattcgatgcaaaggatgatgaatgctcctgattc

SEQ ID NO: 79413 - DNA, 209 bp, Glycine max
gccaaatgctgttctttcaatgtggagatattttgttggagatctcgtctttgaagtttctaagatgacttctccctacattaaatgtacaggctctttcttcataacatttggaaatttggctgatgataccatcaattttgaggcttttccccacaagctggtgcaatttggagagattcaagaaaaagttgtattgaaattttcac

SEQ ID NO: 79414 - DNA, 435 bp, Glycine max
  unsure (1)..(435): unsure at all n locations
ggagagttgaatgtggaatcccttctggatttccgctcacagttatttgcaatagcatttttaatgagatgctcattagatatagctatgaaaaattactgcgccaggctaaagctccaagtatgtttttacaatccttcaaaaattttgtttctttgtgtgtgtatggtgatgataacttaattagtgttcatgaatatgtcaagccttactttagtggttctaaattgaaaagctttctagctagtcataacatcaccattactgatggtattgacaaaactagtgcaactttgcaatttagaaagttagcagattgtgattttctcaagagaaactttaagcagatgtctaatgttttgtgggtggctcctgaggacaaggggagtttatggtcacaacttcattatgtntcgtgtaataatctggaaatgc

SEQ ID NO: 79415 - DNA, 173 bp, Glycine max
ccgggcttaatcttaatgtaatacccgtgggatttaaaggattgcttgggccttccgggggattatcttttcccttttttaattgaccgcttggattttaaggggacacataaaacccgcggggacattttggcttttttttgggaagaaatttttcttttcccaagcgaatt

SEQ ID NO: 79416 - DNA, 469 bp, Glycine max
attttgttggagatctcgtctttgaagtttctaagatgacttctccctgcgttaaatgtacagtctctttcttcatagcatttggaaatttggctgatgataccatcaattttgaggcttttccccacaagctggtgcagtttggagagattcacgaaaaagttgtattgaaattttcacaagaggaatttcttacagcttggtcaactcaggtgcgtcctgcaacaactctgttggctgatgggtgtccatatttgtatgcaatggtgcatgatagttcagtgtctacaataccaggtgattttgtcattggtgtcaagttgacaaccataaacaatatgtgtgcatatgggctcaatcctggtatttcaagttctcgtcttttgggcaccattcctcagtccatttcacagcaaactgtttggaatcaaatggcaacagtgagaacaccattgaatttgattctagc

SEQ ID NO: 79417 - DNA, 293 bp, Glycine max
ttacaagtatttgccataacctttttaatgggatgctcctttgatattacttttgaaaaatactgggcccgggttaaacttccaagatttttttaccatccctcaaaaaatttggttctttggggggggattggggagataacctaaataggggtcattgatattggcaagcctaacttaaggggtcttaaatggaaaagctttttacctggccttaccttcccctttcctgttggttttgccaaacctggggcacctttgcaattaaaaaagttggccaatgggattttttt

SEQ ID NO: 79418 - DNA, 400 bp, Glycine max
ctgtcaacagagctcttttgaacctgaatggttctggagctggagcttcagctcccagttcagccttctttgggaccagcttgaagaaggttattgcctcaagggtccccaacagcaaggtttccggtggaagcttcaagattgttgctgtagaagagaagaaagagattgaagagacccagcagaccgacaaggacagatggaagggtcttgcctatgatatctcagacgaccaacaagacatcacaagaggaaagggtttggttgactcccttttccaagctccacaagatgctggaactcactatgcagtcatgagctcctacgagtacctcagcactggactttggccagtacttggacaacaaaatggatggattctacattgctccagctttta

SEQ ID NO: 79419 - DNA, 412 bp, Glycine max
  unsure (1)..(412): unsure at all n locations
gttcaggttacaattgattggtttatttcctctcaggaatgtgttcccaggacctattgtgttttaaatccacaaaatccttttgtgttaaataggtggatgggaaaattgactttcccccagggcactttccgaagtgttaagagaatgcctctttctatagggggaggagctggtgcaaagaatgctattctcatgaatatgccaaatgctgttctttcaatgtggagatattttgttggagatctcgtctttgaagtttctaagatgacttctccctacattaaatgtacagtctctttcttcatagcatttggaaatttggctgatgataccatcaattttgaggcttttccccacaagctggtgcagtttggagagattcangaaaaagttgtatcgaaattttcac

SEQ ID NO: 79420 - DNA, 434 bp, Glycine max
  unsure (1)..(434): unsure at all n locations
ggagttctgagtgggcaaatcaaacttcatggcatttgagttgccttattgacaatcccaaacagtctacagtttttgatattctcttgggaatctctcaagattttgaaattgctggtaatactcttatgccagctttttctgttccacaggctactgccagatcttctgaaaatgcggaatcctctgcatgatctggaatttgtgttttctttcgcttgttcgtttgtttaattcaataaaggaaattaggcatgaccctcttgttgagtatgctctgcctatttaaaaatttccacacctcttttaattgtcgtaatgatgtgtgaagtgtgtgttattttnaaaaaaaaaaatataaattatatttataatacttttatttaaataaagggcggcctgcccctagtgagctcgtctacccgggaattaat

SEQ ID NO: 79421 - DNA, 447 bp, Glycine max
  unsure (1)..(447): unsure at all n locations
acgccactaatcctatgctgacgcgacttcttgagaactgtgagagtctcaaatatctggttgatgagtgtccttttgcatttgtgaactagtatgtagtattttattcacttaaataaagcgcattactatgtgcaatgagtgtgtttaaatttaaaaaaaaaaaaaaaaaaaaaaaaaaaaaaaaaaaaaaaaaaaaaaaaaaaaaaaaaaaaaaaaaaaaaaaaaaaaaaaaataaaaaaaaaaaaaaaaaaaaaaaaaataacaaacaaanannnaaaaaaaaaaaaaaaaataaaaataaaaaaaaaaaanngggggggcccccccattttgggcccctcccccccggaattttaattggggccgggctttgggggggcacaatttttttttttaggggggttttttaaacgcgggcgaaaaaaggggaaaagttgtttttt

SEQ ID NO: 79422 - DNA, 412 bp, Glycine max
gaagggtcgtgtttccctgcttcagtttcagcttcggcttcgagaagcgtcgattgggtccttaagctgttccttctatgtttctgatgacaagcgcttggacaaatatgagctttgcaatcaaacatagggatatagagagggaatgggagaatcggggtggagttatggttatttttttaaaattattggagattcttgctcactctcagaagatgtatgcctgctaatatactggaatggatgaagagatcaaatttaatttcaatattgatatagctttggagcattttggagcacatgagcaatggagcttgtggagcacggctcacctcaaggattgctctcttgacaaactgtataactgctatcaaacatgagcggtcgcttttctcgcacaatttatgtcggc

SEQ ID NO: 79423 - DNA, 170 bp, Glycine max
gttttctattgaccttctcggtggaggaatcttattggacaaaactggggattggatcacacttatacaaaattctccaattaggaacttgttcagagttgctgcttgcaccaaaggctgtttaaaactaaaaagtgcgaggtctaggaatgcaccagtcaaaaggagtt

SEQ ID NO: 79424 - DNA, 467 bp, Glycine max
gctctctctcgtattgaatggctgcaaaaagctgatgtgcctaccatagcacagattgaagagttccattcgatgcagaggatgatgaatgctcctgattcaaatgataatattgatttactgttgagcattgatttgttgggtttacaaggagcaggtaaagcttttccaaacaaaattgtttttgatgataagcttgtgttggctaacacacaagaattctttgatggaaattttccagtggattcttggttaccaatttttgtgaattgtctttatcctgtaagtcaattaccttcagaagctgtcgttgtaaatgttacatgtggtagtggacggtgtgtttacccaccactgcttggattagttctgcagttaacaatcgctcctcagatatcaacaaaaagattcgcacagcacttgggaaaggtaagaaaattgtttttcttactaaaagtgatcctttt

SEQ ID NO: 79425 - DNA, 295 bp, Glycine max
aaaaaaaaaaaaaattttaattttaaaaaaaaaaaaaaaaaagtgaaagtgaaaaataaaaatattgaaaaattaataaaaaaaaaaaaaaaaataataaaatttaaaaaatacatttttaattataaaaaaaaaaaaaaaacgggggcgcccccctctttttaacttttccaccccggaaataaattcggacccgttccctttaagccgttccaatttttctattatgaagtctttttaaaccttggcaaaataatgtcaaaacttttttctttttaaaattttttttcctttt

SEQ ID NO: 79426 - DNA, 493 bp, Glycine max
cgcatgcacgcgtacgagccgaatcggctcgagctaacacagcactagcggttactgcctgttcaagctgcgcatttgggtgtttctctctaagtgccctcttgccaggctctgccactctttattactgtattttcattcttctgggggcgatgtgcggtgagcgttgctctacgcaagatctaccaggccaagggtgaccgcggcctctactccggtcttgaggccgaagtccttaaaggcttcctcaatcacagcttgacgatggagatgaaggatcgggtgcacgttgcggacatccagctatactatgctttgctgaaggtcacgaacaaatggacggttgagcttgaaatggtacatgccgaagcgactcactgtgtttaccctgcgaaggacaaggtacaggcttctgcggttcatgctttcgaggaggttaaagaacacgcttagagtgtttgcatttttgtagtggacagcggctaacaggttg

SEQ ID NO: 79427 - DNA, 381 bp, Glycine max
ccaatggtgattttgttcaagggaaagatctcgcaatggttaaagttaatgtagcatgtgctgctgttggcttgacatcaagttacactccaactccattgttggaatctggtttgcaaaaagacagagggttaattgtggagtattttggaaggatgtcttacgttgctcataacgttaatcagccccaagagaaagatttgttggagggaaatttttcctttgatattaaatctcgctctagattggaaaaagtttcctctacaaaagcacaatttgttagtggaaaaaccttcaaatatgatataattggtgctggttcacattcttcagaagattttcctgaaaagggaagatcaagaaaaacccaaaaaggatgat

SEQ ID NO: 79428 - DNA, 226 bp, Glycine max
atcttctgctgtgctcaggaagcaataatctccattggcctgtgttggattgatactttgatcaaaaatggttggaaaaacttttttcaaataactagaaagtggattggggcttattaataatattggcattccaaaagggcttgggatttggagagggcttgaacttatattaatactggtggtattgggtctgggggtttttctcttggaatgggcactttcc

SEQ ID NO: 79429 - DNA, 325 bp, Glycine max
cttggtgttgcttcaggatccgcagattgacacagacagtggagttttaacgaagctttcagcggggagaacacttgtgaagacatccaaggcgcagtcattaatcccaccggtggtagcttattggatcggatctttaccagcagggggtcagagttgaattggataaaggctagaaagaaagacttctgatggaagagtggttgatttgcacaagagcaacaaaacagctcaccacgcagagaagtgaattaggctccatctgaaacaaagcagaaacaatggttctttcttgcagtgatcaaaacccgcttttacccgctta

SEQ ID NO: 79430 - DNA, 466 bp, Glycine max
gcatttggaaatttggctgatgataccatcaattgtgaggcttttccccacaagctggtgcagtttggagagattcaggaaaaagttgtattgaaattttcacaagaggaatttcttacagcttggtcaactcaggtgcgtcctgcaacaactctgttggctgatgggtgtccatatttgtatgcaatggtgcatgatagttcagtgtctacaataccaggtgattttgtcattggtgtcaagttgacaaccataaacaatatgtgtgcatatgggctcaatcctggtatttcaggttctcgtcttttgggcaccattcctcagtccatttcacagcaaactgtttggaatcaaatggcaacagtgagaacaccattgaattttgattctagcaagcagagcttttgtcagttttctattgaccttctcggtggaggaatcttagtggacaaaactggagattgga

SEQ ID NO: 79431 - DNA, 330 bp, Glycine max
  unsure (1)..(330): unsure at all n locations
gcaaaacaatcagccaaataattgaacatgaaatcaatggtcgaacaagtttgaaccaaaattgttaaaatccttaatacaaattttttaataaaagtttttttaaattattgaaaaaaaaaaaaaaaaaaattataataaaaaaaaaaaaaaaaaaataaaaaaaaaaaattaaaaaaaattaaaaaaaaaaaataaaaaanggggccgccccccactattggactctttaaccccggaatttatttcggacccggtccttgaagctttacaatttttcttataaggaggcttatttaaactttggctaaataatggaaaaactttttt

SEQ ID NO: 79432 - DNA, 260 bp, Glycine max
ccatgacagtttatgcgacgatcgtccgcccgaacggtgagaccttgcgcggtatgcagaaagagaatgacgtacttattttcaacatattcactgccgaagcgatctgcaaactctatgcgtacgaaactaagaccacgttgtatggaccagctgatataacaaagaaattgtctggtggttttatataactagtgcggcacattacatagctgaatgcaggtttacttcagaataggagaatttctcaagaaaatttt

SEQ ID NO: 79433 - DNA, 463 bp, Glycine max
ggtgattttgtcattggtgtcaagttgacaaccataaacaagatgtgtgcatatgggctcaatcctggtatttcaggttctcgtcttttgggcaccattcctcagtccatttcacagcaaactgtttggaatcaaatggcaacagtgagaacaccattgaattttgattctagcaagcagagcttttgtcagttttctattgaccttctcggtggaggaatcttagtggacaaaactggagattggatcacacttatacaaaattctccaattagtaacttgttgagagttgctgcttggaagaaaggctgtttaatggtcaagattgtgatgtctgggaatgcagcagtcaaaaggagtgattgggcctcattggtacaagtgtttttaacaaacagcaacagtacagaacattttgatgcatgtaagtggacaaaatcagaaccacattcctgggaattga

SEQ ID NO: 79434 - DNA, 454 bp, Glycine max
ctcgagccgaatcggctcgagtctccctacattaaatgtacagtctctttcttcatagcatttggaaatttggctgatgataccatcaattttgaggcttttccccacaagctggtgcagtttggagagattcaggaaaaagttgtattgaaattttcacaagaggaatttcttacagcttggtcaactcaggtgcgtcctgcaacaactctgttggctgatgggtgtccatatttgtatgcaatggtgcatgatagttcagtgtctacaataccaggtgattttgtcattggtgtcaagttgacaaccataaacaatatgtgtgcatatgggctcaatcctggtatttcaggttctcgtcttttgggcaccattcctcagtccatttcacagcaaactgtttggaatcaaatggcaacagtgagaacaccattgaattttgattctagcaagc

SEQ ID NO: 79435 - DNA, 261 bp, Glycine max
  unsure (1)..(261): unsure at all n locations
gtcaaatttacatttataaacaaaaaaggcgcagggggagtggatcctggtatccaaggtcctcgcctnaccngaacaactattctgggcatggtacaccaacatggttgggatgaactggacaccactagttatcaaacaagtggtattattagtatgctgggttccagagaggaacctataggttggatgggttacctgatttttgagaaaaacttatacgttgaggtaccatctgtaatggcaatgactgatgctgaa

SEQ ID NO: 79436 - DNA, 469 bp, Glycine max
ggtgatgataacttaattagtgttcatgaatatgtcaagccgtactttagtggttctaaattgaaaagctttctagctagtcataacatcaccattactgatggtattgacaaaactagtgcaactttgcaatttaaaaagttagcagattgtgattttctcaagagaaactttaagcagatgtctaatgttttgggggtggctcctgaagacaaggcgagtttatggtcacaacttcattatggttcgggtaataatctggaaatgccagaagcttatttttgtaaattcgtaaatgtgttacgagaattgtatttgcacagtccagaggaagctcgccaattgagaaagaaagctctctctcgtattgaatggctgcaaaaagctgatgtgcctaccatagcacagattgaagagttccattcgatgcaaaggatgatgaatgctcctgattcaaatgataatattg

SEQ ID NO: 79437 - DNA, 150 bp, Glycine max
ttggaatcaacccatactccatggaatggactggtttggccgatagatgactgagtaagggcaatgatattctgtgttgcgataatgctagttttgatggttcgattaccaagcaagttatgagcaagatggcagaaatgataaacagtc

SEQ ID NO: 79438 - DNA, 268 bp, Glycine max
  unsure (1)..(268): unsure at all n locations
tgacgtngcatgcacgcgtacggtagctcgggattcgggtcgaggggtgggctctttaaacttgggccctccctcaatttctcttcttctctggcggctaccgtcggaattacaattcggggccaaggtttaaggcacaacccctttaacaacttaattttttttaaaccgacaccaaagccgggaaaccctgagaaagccgaggtcgggagaaaccaaggtattgattgggggatatttggttgacccctgagccttaaaaagggga

SEQ ID NO: 79439 - DNA, 303 bp, Glycine max
cacggccagggtctcagctcatactcctaccgccaccttgcccaatccctcgccgccaacggactccacgttacctccctcgacctccccggacacggcttcttcgacaagtccgtcgaggctttcgtcgagggcgtaaacggggtttttgggagggtttggtacgtttacagcgagattcaagagaggggtcttttctgggcgtttgatcagatggtggaaaccgggcaaaattccggacgaggaaattcaagctcgtatgtcgaagagaaaaacaagaaagcctattgatttgggtccaca

SEQ ID NO: 79440 - DNA, 415 bp, Glycine max
ggaaatttggctgatgataccatcaattttgaggcttttccccacaagctggtgcagtttggagagattcaggaaaaagttgtattgaaattttcacaagaggaatttcttacagcttggtcaactcaggtgcgtcctgcaacaactctgttggctgatgggtgtccatatttgtatgcaatggtgcatgatagttcagtgtctacaataccaggtgattttgtcattggtgtcaagttgacaaccataaacaatatgtgtgcatatgggctcaatcctggtatttcaggttctcgtcttttgggcaccattcctcagtccatttcacagcaaactgtttggaatcaaatggcaacagtgagaacaccattgaattttgattctagcaagcaaagcttttgtcagttttctattg

SEQ ID NO: 79441 - DNA, 155 bp, Glycine max
  unsure (1)..(155): unsure at all n locations
tgaataggtttagaatgacacataaccctctaaagtgtataaaaacatttgaaaaaatatatattcatggaattttctnttaaatgaanaggtttatattgacacatatatttttttattttatatagataattttattgaatttattatttttt

SEQ ID NO: 79442 - DNA, 347 bp, Glycine max
cggctcgagggagagttgaatgtggaatcccttctggatttccgctcacaggtatttgcaatagcatttttaatgagatgctcattagatatagctatgaaaaattactgcgccaggctaaagctccaagtatgtttttacaatccttcaaaaattttggttctttgtgtgtgtatggcgatgataacttaattagtgttcatgaatatgtcaagccttactttagtggttctaaattgaaaagctttctagctagtcataacatcaccattactgatggtattgacaaaactagtgcaactttgcaatttagaaagttagcagattgtgattttctcaagagaaac

SEQ ID NO: 79443 - DNA, 375 bp, Glycine max
ctcgagccgaatcggctcgagtgaaattttcacaagaggaattgcttacagcttggtcaactcaggtgcgtcctgcaacaactctgttggctgatgggtgtccatatttgtatgcaatggtgcatgatagttcagtgtctacaataccaggtgattttgtcattggtgtcaagttgacaaccataaacaatatgtgtgcatatgggctcaatcctggtatttcaggttctcgtcttttgggcaccattcctcagtccatttcacagcaaactgtttggaatcaaatggcaacagttggaacaccattgaattttgattctagcaagctgagcttttgtcaagtttttattgaccttctcggtggaggtattttag

SEQ ID NO: 79444 - DNA, 270 bp, Glycine max
ggacaaaactggagattggatcacacttatacaaaattctccaattagtaacttattgagagttgctgcttggaagaaaggctgtttaatggtcaagattgtgatgtctgggaatgcagcagtcaaaaggagtgattgggcctcattggtacaagtgtttttaacaaacagcaacagtacagagcatttttacgcatgtaagtggacaatatcagaaccacatttcttggaattgatctttccattagaggtttgttgtctaataattgt

SEQ ID NO: 79445 - DNA, 319 bp, Glycine max
tgtcaacctgctgcgcaattgttcgatataagactgatacttcgttcatcagtccatccttcgtttacaactctcgctgtatagcaattccacacccgttacctcgataaacagtccgatcgatcttctgaggatgaagtccttcgccgtactcgcccttgctgccactggcgtattggctcagagctctcctccatcaggatgccaggcttcgcgtgctggaaccttcaacgtccagactgtcaatgtcacccgttccgcgaagcgtgagctcgcagcgcgccagcaagctggtactttgaccttgactctacaagat

SEQ ID NO: 79446 - DNA, 276 bp, Glycine max
cagtttttgatattctcttgggaatctctcaagattttgaaattgctggtaatactcttatgccagctttttctgttccacaggctactgccagatcttctgaaaatgcggaatcctctgcatgatctggaatttgtgttttctttcgcttgttcgtttgtttaattcaataaaggaaattaggcatgaccctcttgttgagtatgctctgcctatttgaaaatttccacacctcttttaattgtcgtaatgatgtgtgaagtgtgtgttatttta

SEQ ID NO: 79447 - DNA, 459 bp, Glycine max
tgcaactttgcaatttagaaagttagcagattgtgattttctcaagagaaactttaagcagatgtctaatgttttgtgggtggctcctgaggacaaggcgagtttatggtcacaacttcattatgtttcgtgtaataatctggaaatgcaagaagcttatcttgtcaacctcgtaaatgtgttacgagaattgtatttgcacagtccagaggaagctcgccaattgagaaggaaagctctctctcgtattgaatggctgcaaaaagctgatgtgcctaccatagcacagattgaagagttccattcgatgcagaagatgatgaatgctcctgattcaaatgataatattgatttactgttgagcattgatttgttgggtttacaaggagcaggtaatagctttccaaacaaaattgtttttgatgataagcttgtgttggctacacacaataattcttt

SEQ ID NO: 79448 - DNA, 448 bp, Glycine max
ttgaccttctcggtggaggaatcttagtggacaaaactggagattggatcacacttatacaaaattctccaattagtaacttgttgagagttgctgcttggaagaaaggctgtttaatggtcaagattgtgatgtctgggaatgcagcagtcaaaaggagtgattgggcctcattggtacaagtgtttttaacaaacagcaacagtacagagcattttgatgcatgtaagtggacaaaatcagaaccacattcctgggaattgatcttcccaatagaggtatgtggtcctaataatggttttgaaatgtggagttctgagtgggcaaatcaaacttcatggcatttgagtttccttattgacaattccaaacagtctacagtttttgatattctcttgggaatcttttaagaatttgaaattgctggtaatactcttatgccagcttt

SEQ ID NO: 79449 - DNA, 323 bp, Glycine max
  unsure (1)..(323): unsure at all n locations
caggccgactctagaggatcccctcggggaattccaattccacattttcaagaaataaggaggcaaaaatgttcatatatgaatnggaattatttgttttcttattaggcctatcctgaagccaaaggaaatgagatcggaattcctcggggaattccaattccacattttcaagaaataaggaggcaaaaatgttcatatatgaattggaattatttgttttcttattaggcctatcctgaagccaaaggaaatgagatcggaattcctcggggaattccaactccacattttcaagaattaaggaggcaaaaatgttcata

SEQ ID NO: 79450 - DNA, 275 bp, Glycine max
ctacaataccaggtgattttgtcattggtgtcaagttgacaaccataaacaatatgtgtgcatatgggctcaatcctggtatttcaggttctcgtcttttgggcaccattcctcagtccatttcacagcaaactgtttggaatcaaatggcaacagtgagaacaccattgaattttgattctagcaagcagagcttttgtcagttttctattgaccttctcggtggaggaatcttagtggacaaaactggagattggatcacacttatacaaaat

SEQ ID NO: 79451 - DNA, 252 bp, Glycine max
gtgagaacaccattgaattttgattctagcaagcagagcttttgtcagttttctattgaccttctcggtggaggaatcttagtggacaaaactggagattggatcacacttatacaaaattctccaattagtaacttattgagagttgctgcttggaagaaaggctgtttaatggtcaagattgtgatgtctgggaatgcagcagtcaaaaggagtgattgggcctcattggtacaagtgtttttaacaaac

SEQ ID NO: 79452 - DNA, 391 bp, Glycine max
ctcgagccgaatcggctcgagggaatggactggtttggccaatagattactgagtaagggcaatgatattctgtgttgcgattatgctagttttgatggtttgattaccaagcaagttatgagcaagatggcagaaatgataaacagtctttgtggtggtgatgaaaaattgatgcgtgaaaggacgcacctgctgttggcttgttgttcaaggatggcaatttgtaagaaagatgtttggagagttgaatgtggaatcccttctggatttccgctcacagttatttgcaatagcatttttaatgagatgctcattagatatagctatgaaaaattactgcgccaggctaaagctccaagtatgtttttacaatccttcaaaaaatttgtt

SEQ ID NO: 79453 - DNA, 322 bp, Glycine max
atttgttggagggaaatttttcctttgatattaaatctcgctctagattggaaaaagtttcctctacaaaagcacaatttgttagtggaaaaaccttcaaatatgatataattggtgctggttcacattcttcagaagattttcctgaaaaggaagatcaagaaaaacccaaaaagattgatgccagattgagacaaagaatagatcctcaatacaatgaggttcaagctcaaatggaaacaaatttgtttaaattggctcttgatgatgttgaaactcctaaaagttccatgttggatctgaaaatttctcaatctaaaat

SEQ ID NO: 79454 - DNA, 376 bp, Glycine max
  unsure (1)..(376): unsure at all n locations
ggaatcttagtggacaaaactggagattggatcacacttatacaaaattctccaattagtaacttattgagagttgctgcttggaagaaaggctgtttaatggtcaagattgtgatgtctgggaatgcagcagtcaaaaggagtgattgggcctcattggtacaagtgtttttaacaaacagcaacagtacagagcattttgatgcatgtaagtggacaaaatcagaaccacattcctgggaattgatcttcccaatagaggtatgtggtcctaataatggttttgaaatgtggagttctgagtgggcaaatcaaacttcatggcatttgagtttncttattgacaatcccaaacagtctacaagttttgatattc

SEQ ID NO: 79455 - DNA, 111 bp, Glycine max
gtattttggaaggatgtcttacgttgctcataacgttaatcagccccaagagaaagatttgttggagggaaatttttcctttgatattaaatctcgctctaaattggaaaa

SEQ ID NO: 79456 - DNA, 303 bp, Glycine max
ctagttttgatggtttgattaccaagcaagttatgagcaagatggcagaaatgataaacagtctttgtggtggtgatgaaaaattgatgcgtgaaaggacgcacctgctgttggcttgttgttcaaggatggcaatttgtaagaaagatgtttggagagttgaatgtggaatcccttctggattttcgctcacagttatttgcaatagcatttttaatgagatgctcattagatatagctatgaaaaattactgcgcccgggctaaagctccaagtatgtttttacaatccttcaaaaatttt

SEQ ID NO: 79457 - DNA, 84 bp, Glycine max
ctcaggaatgtgttcccaggacctattgtgttttaaatccacaaaatccttttgtgttaaataggtggatgggaaaattgactt

SEQ ID NO: 79458 - DNA, 331 bp, Glycine max
tgggtgtccatatttgtatgcaatggtgcatgatagttcagtgtctacaataccaggtgattttgtcattggtgtcaagttgacaaccataaacaatatgtgtgcatatgggctcaatcctggtatttcaggttctcgtcttttgggcaccattcctcagtccatttcacagcaaactgtttggaatcaaatggcaacagtgagaacaccattgaattttgattctagcaagcagagcttttgtcagttttctattgaccttctcggtggaggaatcttagtggacaaaactggagattggatcacacttatacaaaattctccaattagt

SEQ ID NO: 79459 - DNA, 231 bp, Glycine max
gtttttcttactagagttgatccttttccagtagctttactggctgttctttttggcgttaagaatgaaattctgagttctaacgccactaatcctatgctgacgcgacttcttgagaactgtaagagtctcaaatatctggttgatgagtgtccttttgcatttgtgaactagtatgtagtattttattcacttaaataaagcgcattactatgtgcaatgagtgtgttt

SEQ ID NO: 79460 - DNA, 296 bp, Glycine max
cgtaaatgtgttacgagaattgtatttgcacagtccagaggaagctcgccaattgagaaggaaagctctctctcgtattgaatggctgcaaaaagctgatgtgcctaccatagcacagattgaagagttccattcgatgcagaggatgatgaatgctcctgattcaaatgataatattgatttactgttgagcattgatttgttgggtttacaaggagcaggtaaagcttttccaaacaaaattgtttttgatgataagcttgtgttggctaacacacaagaattctttgatggga

SEQ ID NO: 79461 - DNA, 353 bp, Glycine max
attcctcagtccatttcacagcaaactgtttggaatcaaatggcaacagtgagaacaccattgaattttgattctagcaagcagagcttttgtcagttttctattgaccttctcggtggaggaatcttagtggacaaaactggagattggatcacacttatacaaaattctccaattagtaacttgttgagagttgctgcttggaagaaaggctgtttaatggtcaagattgtgatgtctgggaatgcagcagtcaaaaggagtgattgggcctcattggtacaagtgtttttaacaaacagcaacagtacagagcattttgatgcatgtaagtggacaaaatcagaaccaca

SEQ ID NO: 79462 - DNA, 384 bp, Glycine max
gccaaatgctgttctttcaatgtggagatattttgttggagatctcgtctttgaagtttctaagatgacttctccctacattaaatgtacagtctctttcttcatagcatttggaaatttggctgatgataccatcaattttgaggcttttccccacaagctggtgcagtttggagagattcaggaaaaagttgtattgaaattttcacaagaggaatttcttacagcttggtcaactcaggtgcgtcctgcaacaactctgttggctgatgggtgtccatatttgtatgcaatggtgcatgatagttcagtgtctacaataccaggtgattttgtcattggtgtcaagttgacaaccataaacaatatgtgtgcatatgggct

SEQ ID NO: 79463 - DNA, 406 bp, Glycine max
ggtgatgataacttaattagtgttcatgaatatgtcaagccttactttagtggttctaaattgaaaagctttctagctagtcataacatcaccattactgatggtattgacaaaactagtgcaactttgcaatttagaaagttagcagattgtgattttctcaagagaaactttaagcagatgtctaatgttttgtgggtggctcctgaggacaaggcgagtttatggtcacaacttcattatgtttcgtgtaataatctggaaatgcaagaagcttatcttgtcaatctcgtaaatgtgttacgagaattgtatttgcacagtccagaggaagctcgccaattgagaaggaaagctctctctcgtattgaatggctgcaaaaagctgatgtgcctaccatagcac

SEQ ID NO: 79464 - DNA, 337 bp, Glycine max
tgcaattgaagttaaaagccttagccttccctacaactccaaacacaaagacatcatcatccatggctgcctccgtctccactgtcggagctgtcaacagagctcttttgaacctgaatggttctggagctggagcttcagctcccagttcagccttctttgggaccagcttgaagaaggttattgcctcaagggtccccaacagcaaggtttccggtggaagcttcaagattgttgctgtagaagagaagaaagagattgaagagacccagcagaccgacaaggacagatggaagggtcttgcctatgatatctcagacgaccaacaagacatcac

SEQ ID NO: 79465 - DNA, 360 bp, Glycine max
tttttaatgagatgctcattagatatagctatgaaaaattactgcgccaggctaaagctccaagtatgtttttacaatccttcaaaaattttgtttctttgtgtgtgtatggtgatgataacttaattagtgttcatgaatatgtcaagccttactttagtggttctaaattgaaaagctttctagctagtcataacatcaccattactgatggtattgacaaaactagtgcaactttgcaatttagaaagttagcagattgtgattttctcaagagaaactttaagcagatgtctaatgttttgtgggtggctcctgaggacaaggcgagtttatggtcacaacttcattatggttcgt

SEQ ID NO: 79466 - DNA, 416 bp, Glycine max
ggcagaaatgataaacagtctttgtggtggtgatgaaaaattgatgcgtgaaaggacgcacctgctgttggcttgttgttcaaggatggcaatttgtaagaaagatgtttggagagttgaatgtggaatcccttctggatttccgctcacagttatttgcaatagcatttttaatgagatgctcattagatatagctatgaaaaattactgcgccaggctaaagctccaagtatgtttttacaatccttcaaaaattttgtttctttgtgtgtgtatggtgatgataacttaattagtgttcatgaatatgtcaagccttactttagtggttctaaattgaaaagctttctagctagtcataacatcaccattactgatggtattgacaaaactagtgcaactttgcaatttaaaa

SEQ ID NO: 79467 - DNA, 288 bp, Glycine max
  unsure (1)..(288): unsure at all n locations
atcccaaacagtctacagtttttgatattctcttgggaatctctcaagattttgaaattgctggtaatactcttatgccagctttttctgttccacaggctactgccagatcttctgaaaatgcggaatcctctgcatgatctggaattngtgttttctttcgcttgttcgtttgtttaattcaataaaggaaattaggcatgaccctcttgttgagtatgctctgcctatttgaaaatttccacacctcttttaattgtcgtaatgatgtttgaagtgtgtgttatt

SEQ ID NO: 79468 - DNA, 397 bp, Glycine max
gccaccccaatgcatgatgttcaggttaaaattgattggtttatttcctctcacgaatgtgttcccaggacctattgtgttttaaatccacaaaatccttttgtgttaaataggtggatgggaaaattgactttcccccagggcacttcccgaagtgttaagagaatgcctctttctatagggggaggagctggtgcaaagaatgctattctcatgaatatgccaaatgctgttctttcaatgtggagatattttgttggagatctcgtctttgaagtttctaagatgacttctccctacattaaatgtacagtctctttcttcatagcatttggaaatttggctgatgataccatcaattttgaggcttttccccacaagctggtgcaagttggag

SEQ ID NO: 79469 - DNA, 387 bp, Glycine max
gtctttgtggtggtgatgaaaaattgatgcgtgaaaggacgcacctgctgttggcttgttgttcaaggatggcaatttgtaagaaagatgtttggagagttgaatgtggaatcccttctggatttccgctcacagttatttgcaatagcatttttaatgagatgctcattagatatagctatgaaaaattactgcgccaggctaaagctccaagtatgtttttacaatccttcaaaaattttgtttctttgtgtgtgtatggtgatgataacttaattagtgttcatgaatatgtcaagccttactttagtggttctaaattgaaaagctttctagctagtcataacatcaccattactgatggtattgacaaaactagtgcaactt

SEQ ID NO: 79470 - DNA, 133 bp, Glycine max
ttcaaaattttgttttcctgaatccttaaataccagaagcacttaatctgtatatgctttctaaaaccgtttttcttatttgcccttactgtagatcgtgatatataatatacctgatgtattatatcattgt

SEQ ID NO: 79471 - DNA, 266 bp, Glycine max
aaaacaaaaataattgaattaaataatggagaaaaaaaaaaaaaaaaaaaaaaaaaaaaaaaaaaagggccggcccccaataaaaaacctctcaaccccggaaataaattcggacccggtccttgaagggtaacaacttttccttatatgaggccgaataaaacttgggcttaataatggcaaaacttattccctggtgaaaatagttttccgttacaatttcaaaaaaaaatataacccgaaagaataaacttaaaaccctgggg

SEQ ID NO: 79472 - DNA, 287 bp, Glycine max
aaaaaaaaaaataaatttaaaaaaaaaaaaaaaaaaaaaagggaaggaaaaaaaaaaaaaaggaaaataaaaaaataaaaaaaaaaaaaaaaaaaaaaaaaaaaaaaaaaaaaaaaaaaaaaaaaaaaaaaaaaaagggggggggccgccaattaggggctttgtcaccccggaaataaattcgggccggggcctggaggggtacccatttttctttttggggggggttttaaaacttgggggaaaaaagggaaaaacttgtttcctggggaaaaattttttccttt

SEQ ID NO: 79473 - DNA, 416 bp, Glycine max
  unsure (1)..(416): unsure at all n locations
ctttaagcagatgtctaatgttttgtgggtggctcctgaggacaaggcgagtttatggtcacaacttcattatgtttcgtgtaataatctggaaatgcaagaagcttatcttgtcaatctcgtaaatgtgttacgagaattgtatttgcacagtccagaggaagctcgccaattgagaaggaaagctctctctcgtattgaatggctgcaaaaagctgatgtgcctaccatagcacagattgaagagttccattcgatgcagaggatgatgaatgctcctgattcaaatgataatattgatttactgttgagcattgatttgttgggtttacaaggagcaggtaaagcttttccaaaacaaaatgtttttgatgataagcttgtgtnggctaacacacaagaattctttgatggaa

SEQ ID NO: 79474 - DNA, 170 bp, Glycine max
gaagattccgcaacagagagtagaaaagatggcgcggttgatcacagtggtgtggtgcgcggtggcggtgctactgtgcgccgcggcgggcgcgtcgtgggtggaggaagcggcgaacccgatacgaatggtggcgggggtggaggcggaagtggttccggtgatagggc

SEQ ID NO: 79475 - DNA, 150 bp, Glycine max
gcacgcgtccgtaagctcggatttcggttcgaggccaaacctggggcaccttggcatttaaaaaggttgccaaatggggatttcttcagaagaacctttagccgaaggcttaaggtttggggggtggctccgggggccagggcaggtttt

SEQ ID NO: 79476 - DNA, 336 bp, Glycine max
cggctcgagtggtgatgataacttaattagtgttcatgaatatgtcaagccttactttagtggttctaaattgaaaagctttctagctagtcataacatcaccattactgatggtattgacaaaactagtgcaactttgcaatttagaaagttagcagattgtgattttctcaagagaaactttaagcagatgtctaatgttttgtgggtggctcctgaggacaaggcgagtttatggtcacaacttcattatgtttcgtgtaataatctggaaatgcaagaagcttatcttgtcaatctcgtaaatgtgttacgagaattgtatttgcacagtcc

SEQ ID NO: 79477 - DNA, 335 bp, Glycine max
cggctcgaggcttgaagaaggttattgcctcaagggtccccaacagcaaggtttccggtggaagcttcaagattgttgctgtagaagagaagaaagagattgaagagacccagcagatcgacaaggacagatggaagggtcttgcctatgatatctcagacgaccaacaagacatcacaagaggaaagggtttggttgactcccttttccaagctccacaagatgctggaactcactatgcagtcatgagctcctacgagtacctcagcactggacttcgccagtacttggacaacaaaatggatggattctacattgctccagcttttatggac

SEQ ID NO: 79478 - DNA, 426 bp, Glycine max
  unsure (1)..(426): unsure at all n locations
gtaagtggacaaaatcagaaccacattcctgggaattgatcttcccaatagaggtatgtggtcctaataatggttttgaaatgtggagttctgagtgggcaaatcaaacttcatggcatttgagtttccttattgacaatcccaaacagtctacagtttttgatattctcttgggaatctctcaagattttgaaattgctggtaatactcttatgccagctttttctgttccacaggctactgccagatcttctgaaaatgcggaatcctctgcatgatctggaattgtgttttctttcgcttgttcgtttgtttaattcaataaaggaaattaggccttgacccctttgtgagtatgctcttgcctatttgaaaattncacaccctctttaattgtcgtaatgatgtgtgaagtgtgtgtatttt

SEQ ID NO: 79479 - DNA, 280 bp, Glycine max
gttcgtttgtttaattcaataaaggaaattaggcatgaccctcttgttgagtatgctctgcctatttgaaaatttccacacctcttttaattgtcgtaatgatgtgtgaagtgtgtgttattttaaaaaaaaaaaaaaaaaaaaaaaaataaaaaaaaaaaaaaaaaaaaaaaaaaataaaaaattagtctaaaaaattataatatataaaaatcttaaataaaaatctatcacatactataataatatatcaacttatataaaatataagttaaatata

SEQ ID NO: 79480 - DNA, 234 bp, Glycine max
aaaaaaaaaaataaaaaaaaaaaaaaaaaaaaaaaaaaaaaaaaaaaaaaaaaaaaaaaaaaaaaaaaaaaaaaaaaaaaaaaaaaaaaaaaaaaaaaaaaaaaaaaaaaaaaaaaaagggggcggcccccttttagtgagcttttcaccccggaattaatttccggaccggtccttgaaggcttaccatttttccttttagggagtcgttttaaaccttggctaaataagggc

SEQ ID NO: 79481 - DNA, 402 bp, Glycine max
ctcatgaatatgccaaatgctgttctttcaatgtggagatattttgttggagatctcgtctttgaagtttctaagatgacttctccctacattaaatgtacagtctctttcttcatagcatttggaaatttggctgatgataccatcaattttgaggcttttccccacaagctggtgcagtttggagagattcaggaaaaagttgtattgaaattttcacaagaggaatttcttacagcttggtcaactcaggtgcgtcctgcaacaactctgttggctgatgggtgtccatatttgtatgcaatggtgcatgatagttcagtgtctacaataccaaggtgatttgtcattggtgtcaaagtgacaaccataaacaatatgtgtgcatatgggctcaatcct

SEQ ID NO: 79482 - DNA, 332 bp, Glycine max
ggcaaatcaaacttcatggcatttgagtttccttattgacaatcccaaacagtctacagtttttgatattctcttgggaatctctcaagattttgaaattgctggtaatactcttatgccagctttttctgttccacaggctactgccagatcttctgaaaatgcggaatcctctgcatgatctggaatttgtgttttctttcgcttgttcgtttgtttaattcaataaaggaaattaggcatgaccctcttgttgagtatgctctgcctatttgaaaatttccacacctcttttaattgtcgtaatgatgtgtgaagtgtgtgttatttta

SEQ ID NO: 79483 - DNA, 327 bp, Glycine max
gttatagaacgtgagcggccggactgtcttcaatgggctcggatgggtacttcattaggatctaacatccatgaaaatggccaaactgaattttattcaaagatgtctggttcacagactgatatgtcattaactccggaatcaagtgtttcttcagacacgaagtatgtccagcaggctgatgacactaaaaatgttcaagctaggccctctggcagatatgattctagatcatcaaatactctctttccaatgtctatctacaataatacaaccacatttatgcaatcaccaactgattcaatgatggtttcccaaaattacttg

SEQ ID NO: 79484 - DNA, 395 bp, Glycine max
  unsure (1)..(395): unsure at all n locations
gtgttaaataggtggatgggaaaattgactttcccccagggcacttcccgaagtgttaagagaatgcctctttctatagggggaggagctggtgcaaagaatgctattctcatgaatatgccaaatgctgttctttcaatgtggagatattttgttggagatctcgtctttgaagtttctaagatgacttctccctacattaaatgtacagtctctttcttcatagcatttggaaatttggctgatgataccatcaattntgaggcttttccccacaagctggtgcagtttggagagattcaggaaaaagttgtattgaaattttcacaagaggaatttcttacagcttggtcaactcaggtgcgtcctgcaacaaactctgtggctgatgggtg

SEQ ID NO: 79485 - DNA, 424 bp, Glycine max
atttgtaatagcatttttaatgagatgctcattagatatagctatgaaaaattactgcgccaggctaaagctccaagtatgtttttacaatccttcaaaaattttgtttctttgtgtgtgtatggtgatgataacttaattagtgttcatgaatatgtcaagccttactttagtggttctaaattgaaaagctttctagctggtcataatatcaccattactgatggtattgacaaaactagtgcaactttgcaatttagaaagttagcagattgtgattttctcaagagaaactttaagcagatgtctaatgttttgtgggtggctcctgaggataaggcgagtttatggtcacaacttcattatgtttcgtgtaataatctggaaatgcaagaagcttatcttgtcaatctcgtaaatgtgt

SEQ ID NO: 79486 - DNA, 403 bp, Glycine max
  unsure (1)..(403): unsure at all n locations
ctcgagccgaatcggctcgggaaaaaaaaaaaaaaaaaaggggggggtatataaatgaaggaatggtagtataaattaaattagatattatattaattaaaagaaaagatgtaaggagtagatttatattatgtgattatttatgaagtatattttatatataaaatnggggggggggccccctcctgggggccctcccccccggggattaatttcgggccgggccctggggggggccccgttttcccttttggggggtcgtttagggctggggggaaaccggggccaagggggttcccggggggaattggtttccccttccaattcccccccaaattccggccggggaccttaaggggaaaccccggggggccctagggggggcccccccccctttattggg

SEQ ID NO: 79487 - DNA, 285 bp, Glycine max
  unsure (1)..(285): unsure at all n locations
cacgaccacactcgcggagagtcacaaccatgccgtccaaaatggcttcagaactgctggatttcgacatggaccgctatgtaaatccatggctacctcataatcgtgtgggctacctacctgcgcccatatcacgatttctcggatacagaaaaggcacatacaaagagccaccagcattagtccaatggttttcagcattcgtcggcgcttttcgtggcattctactgatcggcgcaatattcaaatacgcccctggagtngtcgacaaacaccctccgatca

SEQ ID NO: 79488 - DNA, 66 bp, Glycine max
aatcaggcaggacctgaggcaggcatacctcctttaatttggccaccaggttggattttgaataat

SEQ ID NO: 79489 - DNA, 300 bp, Glycine max
  unsure (1)..(300): unsure at all n locations
tggtgcatgatagttcagtgtctacaataccaggtgattttgtcattggtgtcaagttgacaaccataaacaatatgtgtgcatatgggctcaatcctggtatttcaggttctcgtcttttgggcaccattcctcagtccatttcacagcanactgtttggaatcaaatggcaacagtgagaacaccattgaattttgattctagcaagcagagcttttgtcagttttctattgaccttctcggtggaggaatcttagtggacaaaactggagaatggatcacacttatacaaaattctc

SEQ ID NO: 79490 - DNA, 375 bp, Glycine max
  unsure (1)..(375): unsure at all n locations
ctcgagccgaatcggctcgaggtccagaggaagctcgccaagtgagaaggaaagctctctctcgtattgaatggctgcaaaaagctgatgtgcctaccatagcacagattgaagagttccattcgatgcagaggatgatgaatgctcctgattcaaatgataatattgatttactgttgagcattgatttgttgggtttacaaggagcaggtaaagcttttccaaacaaaattgtttttgatgataagcttgtgttggctaacacacaagaattctttgatggaaattttccagtggattcttggttaccaatttttgtgaattgctntatcctgtagtcaattaccttcagaagctgtcgtgtaatgtacatgt

SEQ ID NO: 79491 - DNA, 212 bp, Glycine max
caaaattgtttttgatgataagcttgtgttggctaacacacaagagttctttgatggaaattttccagtggattcttggttaccaatttttgtgaattgtctttatcctgtaagtcaattaccttcagaagctgtcgttgtaaatgttacatgtggtagtggacgtggtggtttacccaccactgcttggattagttctgcagttaacaatc

SEQ ID NO: 79492 - DNA, 412 bp, Glycine max
ctcctgaggacaaggcgagtttatggtcacaacttcattatgtttcgtgtaataatctggaaatgcaagaagcttatcttgtcaatctcgtaaatgtgttacgagaattgtatttgcacagtccagaggaagctcgtcaattgagaaggaaagctctctctcgtattgaatggctgcaaaaagctgatgtgcctaccatagcacagattgaagagttccattcgatgcagaggatgatgaatgctcctgattcaaatgataatattgatttactgttgagcattgatttgttgggtttacaaggagcaggtaaagcttttccaaacaaaattgtttttgatgataagcttgtgttggctaacacacaagaattctttgatggaaatttccagtggattctggttaccaattt

SEQ ID NO: 79493 - DNA, 394 bp, Glycine max
tgaaattttcacaagaggaatttcttacagcttggtcaactgaggtgcgtcctgcaacaactctgatggctgatgggtgtccatatttgtatgcaatggtgcatgatagttcagtgtctacaataccaggtgattttgtcattggtgtcaagttgacaaccataaacaatatgtgtgcatatgggctcaatcctggtatttcaggttctcgtcttttgggcaccattcctcagtccatttcacagcaaactgtttggaatcaaatggcaacagtgagaacaccattgaattttgattctagcaagcagagcttttgttcagttttctattgaccttctcggtggaggaatcttagtggacaaaactggagattggatcacacttatgcaaaatt

SEQ ID NO: 79494 - DNA, 365 bp, Glycine max
gtttatggtcacaacttcattatgtttcgtgtaataatctggaaatgcaagaagcttatcttgtcaatctcgtaaatgtgttacgagaattgtatttgcacagtccagaggaagctcgccaattgagaaggaaagctctctctcgtattgaatggctgcaaaaagctgatgtgcctaccatagcacagattgaagagttccattcgatgcagaggatgatgaatgctcctgattcaaatgataatattgatttactgttgagcattgatttgttgggtttacaaggagcaggtaaagcttttccaaacaaaattgtttttgatgataagcttgtgttggctaacacacaagaattctttgatgga

SEQ ID NO: 79495 - DNA, 125 bp, Glycine max
atgagggttaggattgcattagctgaaaagggtgttgagtatgaatacaaggaagaaaatctcaggaacaagagtcctttgcttttgcaaatgaacccaattcacaagaaaattccagttctgat

SEQ ID NO: 79496 - DNA, 374 bp, Glycine max
  unsure (1)..(374): unsure at all n locations
cgaagtgttaagagaatgcctctttctatagggggaggagctggtgcaaagaatgctattctcatgaatatgccaaatgctgttctttcaatgtggagatattttgttggagatctcgtctttgaagtttctaagatgacttctccctacattaaatgtacagtctctttcttcatagcatttggaaatttggctgatgataccatcaattntgaggcttttccccacaagctggtgcagtttggagagattcangaaaaagtngtattgaaattttcacaagaggaatttcttacagcttggtcaactcangtgcgtnctgcaacaacttctgttgcttgatggtgtccattattgtatgcaatggtgcatga

SEQ ID NO: 79497 - DNA, 309 bp, Glycine max
tgaatatgccaaatgctgttctttcaatgtggagatattttgttggagatctcgtctttgaagtttctaagatgacttctccctacattaaatgtacagtctctttcttcatagcatttggaaatttggctgatgataccatcaattttgaggcttttccccacaagctggtgcagtttggagagattcaggaaaaagttgtattgaaattttcacaagaggaatttcttacagcttggtcaactcaggtgcgtcctgcaacaactcttgtggctgatgggtgtccataattgtatgcaatggtgcatg

SEQ ID NO: 79498 - DNA, 275 bp, Glycine max
gttaaacatgtatatacacacaaaatacagacctgtctggcggacgccttcccataacactgaaaacacacgaccgacgatgcacaagaccatggggaagtcctgcgtaggcggcaaggacgcggccgagaacgatggcacgacccatactggtgatgtctgtaccatcgaggagaaccgtgactcgatcgactctgaactcgccgcgatgccccctcaagagcgcgtcgcctacctgaaagaattcgaagactcagacaagcacgacacgccaa

SEQ ID NO: 79499 - DNA, 376 bp, Glycine max
ggtatttcaggttctcgtcttttgggcaccattcctcagtccatttcacagcaaactgtttggaatcaaatggcaacagtgagaacaccattgaattttgattctagcaagcagagcttttgtcagttttctattgaccttctcggtggaggaatcttagtggacaaaacttgagattggatcacacttatacaaaattctccaattagtaacttgttgagagttgctgcttggaagaaaggctgtttaatggtcaagattgtgatgtctgggaatgcagcagtcaaaaggagtgattgggcctcattggtacaagtgtttttaacaaacagcaacagtacagagcattttgatgcatgtaagtggacaaaatcag

SEQ ID NO: 79500 - DNA, 361 bp, Glycine max
  unsure (1)..(361): unsure at all n locations
ggaaagctctctctcgtattgaatggctgcaaaaagctgatgtgcctaccatagcacagattgaagagttccattcgatgcagaggatgatgaatgctcctgattcaaatgataatattgatttactgttgagcattgatttgttgggtttacaaggagcaggtaaagcttttccaaacaaaattgtttttgatgataagcttgtgttggctaacacacaagaattctttgatggaaattttccagtggattcttggttaccaattattgtgaattgtctttatcctgtaagtcatttaccttcagaagctgtncgtgtaaatgttacatgtggtagtggacgtggtggttacccaccact

SEQ ID NO: 79501 - DNA, 194 bp, Glycine max
gctttaatatgggcctcgctgtcggcgattctacagatatgggatcatgtcatatccagatccgatacagtgttctagaacatgtttgttaaacctacaactaaaagattgtagacactgatgatgcgaggaagatatgctcgacttatgggggaggttagcaggatactatacaactcgtagagtggaatgat

SEQ ID NO: 79502 - DNA, 137 bp, Glycine max
caccaagtaaggaacacaacttacttggtgcattttcaactgtgtagaatttaatatgatgtaatttgcttgtttgtacatccatattttgttatgcccttggttctatgaaatcttgcattaacttcttttttaaa

SEQ ID NO: 79503 - DNA, 464 bp, Glycine max
caacaactctgttggctgatgggtgtccatatttgtatgcaatggtgcatgatagttcagtgtctacaataccaggtgattttgtcattggtgtcaagttgacaaccataaacaatatgtgtgcatatgggctcaatcctggtatttcaggttctcgtcttttgggcaccattcctcagtccatttcacagcaaactgtttggaatcaaatggcaacagtgagaacaccattgaattttgattctagcaagcagagcttttgtcagttttctattgaccttctcggtggaggaatcttagtggacaaaactggagattggatcacacttatacaaaattctccaattagtaacttattgagagttgctgcttggaagaaaggctgtttaatggtcaagattgtgatgtctgggaatgcagcaatcaaaaggagtgattgggcctcattggtacaagtgttttta

SEQ ID NO: 79504 - DNA, 64 bp, Glycine max
ggcgaagctagtagagagatagacctagtttgttaaactggagagagaatacatgctcaatcat

SEQ ID NO: 79505 - DNA, 440 bp, Glycine max
  unsure (1)..(440): unsure at all n locations
accaggtgattttgtcattggtgtcaagttgacaaccataaacaatatgtgtgcatatgggctcaatcctggtatttcaggttctcgtcttttgggcaccattcctcagtccatttcacagcaaactgtttggaatcaaatggcaacagtgagaacaccattgaattttgattctagcaagcagagcttttgtcagttttctattgaccttctcggtggaggaatcttagtggacaaaactggagattggatcacacttatacaaaattctccaattagtaacttgttgagagttgctgcttggaagaaaggctgtttaatggtcaagattgtgatgtctgggaatgcagcagtcaaaaggagtgattgggcctcattggtacaagtgtttttaacanacagcaacagtacagagcattttgatgcatgtaagtggacaa

SEQ ID NO: 79506 - DNA, 315 bp, Glycine max
tggcatttgagtttccttattgacaatcccaaacagtctacagtttttgatattctcttgggaatctctcaagattttgaaattgctggtaatactcttatgccagctttttctgttccacaggctactgccagatcttctgaaaatgcggaatcctctgcatgatctggaatttgtgttttctttcgcttgttcgtttgtttaattcaataaaggaaattaggcatgaccctcttgttgagtatgctctgcctatttgaaaatttccacacctcttttaattgtcgtaatgatgtgtgaagtgtgtgttatttt

SEQ ID NO: 79507 - DNA, 409 bp, Glycine max
cagatgtctaatgttttgtgggtggctcctgaggacaaggcgagtttatggtcacaacttcattatgtttcgtgtaataatctggaaatgcaagaagcttatcttgtcaatctcgtaaatgtgttacgagaattgtatttgcacagtccagaggaagctcgccaattgagaaggaaagctctctctcgtattgaatggctgcaaaaagctgatgtgcctaccatagcacagattgaagagttccattcgatgcagaggatgatgaatgctcctgattcaaatgataatattgatttactgttgagcattgatttgttgggtttacaaggagcaggtaaagcttttccaaacaaaattttttttgatgataagctttgtgtggctaacacacaagatttctttgatggaa

SEQ ID NO: 79508 - DNA, 445 bp, Glycine max
cattggtgtcaagttgacaaccataaacaatatgtgtgcatatgggctcaatcctggtatttcaggttctcgtcttttgggcaccattcccagtccatttcacagcaaactgtttggaatcaaatggcaacagtgagaacaccattgaattttgattctagcaagcagagcttttgtcagttttctattgaccttctcggtggaggaatcttagtggacaaaactggagattggatcacacttatacaaaattctccaattagtaacttgttgagagttgctgcttggaagaaaggctgtttaatggtcaagattgtgatgtctgggaatgcagcagtcaaaaggagtgattgggcctcattggtacaagtgtttttaacaaacagcaacagtacagagcattttgatgcatgtaagtggacaaaatcagaaccacattcctggg

SEQ ID NO: 79509 - DNA, 470 bp, Glycine max
gtttttaacaaacagcaacagtacagagcattttgatgcatgtaagtggacaaaatcagaaccacattcctgggaattgatcttcccaatagaggtatgtggtcctaataatggttttgaaatgtggagttctgagtgggcaaatcaaacttcatggcatttgagtttccttattgacaatcccaaacagtctacagtttttgatattctcttgggaatctctcaagattttgaaattgctggtaatactcttatgccagctttttctgttccacaggctactgccagatcttctgaaaatgcggaatcctctgcatgatctggaatttgtgttttctttcgcttgttcgtttgtttaattcaataaaggaaaattaggcatgaccctcttgttgagtatgctctgcctatttgaaaatttccacacctcttttaattgtcgtaatgatgtgtgaagtgtgttgtatttt

SEQ ID NO: 79510 - DNA, 484 bp, Glycine max
tgttcccaggacctattgtgttttaaatccacaaaatccttttgtgttaaataggtggatgggaaaattgactttcccccagggcacttcccgaagtgttaagagaatgcctctttctatagggggaggagctggtgcaaagaatgctattctcatgaatatgccaaatgctgttctttcaatgtggagatattttgttggagatctcgtctttgaagtttctaagatgacttctccctacattaaatgtacagtctctttcttcatagcatttggaaatttggctgatgataccatcaattttgaggcttttccccacaagctggtgcagtttggagagattcaggaaaaagttgtattgaaattttcacaagaggaatttcttacagcttggtcaactcaggtgcgtcctgcaacaactctgttggctgatgggtgtccatatttgtatgcaatggtgcatgatagttcagtgtctacaata

SEQ ID NO: 79511 - DNA, 399 bp, Glycine max
ctcgagccgcggcgggtgctgtccacgctctgagcactgccgtcggcggtggccaggagcgcaccgacggctcttcgcgggccacgccgaccgaggccagcagccgaacagctccgacgggcggcgcacgcatccgcactccggcgcccttcgtcggcggcgactatggccttgagcacctgtacgccgtcgtcgacgcagcagcgcggcgcgacccgcgtcgtgcctctccgtcggccaaggccagcatgcccatctcgcctcgctcgcgcgccgcggccctctcgccgcaggtggccggtctctttgcgccgcaggtgccgccattcgaaggcccggccaagacgcgcgagtcgtacgtcaggctcgacaatcagctgaacgcgcctgaagacacac

SEQ ID NO: 79512 - DNA, 287 bp, Glycine max
tgcgattctcctctgttcttccttctccgatacacatggtccacaacatcacactcttcctctcaagctcttagctttatccgaaaccaacccaccccatcttcctcttcttccttctcttccaccaccatgcctcttcttctcgcacgcaccccaccatcctcactctctccattccctcttcaaaacgcacgcgcgcctctaatcactgcctctcagaagcgcttccctcttgccgcaactcgaatagttcttttcacttcccggcgcagcattctagcatcccc

SEQ ID NO: 79513 - DNA, 383 bp, Glycine max
cacaacttcattatgtttcgtgtaataatctggaaatgcaagaagcttatcttgtcaatctcgtaaatgtgttacgagaattgtatttgcacagtccagaggaagctcgccaattgagaaggaaagctctctctcgtattgaatggctgcaaaaagctgatgtgcctaccatagcacagattgaagagttccattcgatgcagaggatgatgaatgctcctgattcaaatgataatattgatttactgttgagcattgatttgttgggtttacaaggagcaggtaaagcttttccaaacaaaattgtttttgatgataagcttgtgttggctaacacacaagaattctttgatggaaattttccagtggattcttggttacca

SEQ ID NO: 79514 - DNA, 292 bp, Glycine max
  unsure (1)..(292): unsure at all n locations
cttaattagtgttcatgaatatgtcaagccttactntagtggttctaaattgaaaagctttctagctagtcataacatcaccattactgatggtattgacaaaactagtgcaactttgcaatttagaaagttagcagattgtgattttctcaagagaaactttaagcagatgtctaatgttttgtgggtggctcctgaggacaaggcgagtttatggtcacaacttcattatgtttcgtgtaataatctggaaatgcaagaagcttatcttgtcaatctcgtaaatgtgtta

SEQ ID NO: 79515 - DNA, 464 bp, Glycine max
  unsure (1)..(464): unsure at all n locations
ctggtatttcaggttctcgtcttttgggcaccattcctcagtccatttcacagcaaactgtttggaatcaaatggcaacagtgagaacaccattgaattttgattctagcaagcagagcttttgtcagttttctattgaccttctcggtggaggaatcttagtggacaaaaactggagattggatcacacttatacaaaattctccaattagtaacttattgagagttgctgcttggaagaaaggcttgttaatggtcaagattgtgatgtctgggaatgcagcagtcaaaaggagtgattgggcctcattggtacaagtgtttttaacaaacagcaacagtacagagcattttgatgcatgtaagtggacaaaatcagaaccacattcctgggaatngatcttcccaatagaggtatgtggtcctaaatatggttttgaaatgtggagttctgagtgggcaaa

SEQ ID NO: 79516 - DNA, 89 bp, Glycine max
gctctgcctatttgaaaatttccacacctcttttaattgtcgtaatgatgtgtgaagtgtgtgttattttaaaaaaaacaaagagaaca

SEQ ID NO: 79517 - DNA, 428 bp, Glycine max
  unsure (1)..(428): unsure at all n locations
tggaaatgcaagaagcttatcttgtcaatctcgtaaatgtgttacgagaattgtatttgcacagtccagaggaagctcgccaattgagaaggaaagctctctctcgtattgaatggctgcaaaaagctgatgtgcctaccatagcaccagattgaagagttccattcgatgcagaggatgatgaatgctcctgattcaaatgataatattgatttactgttgagcattgatttgttgggtttacaaggagcaggtaaagcttttccaaacaaaattgtttttgatgataagcttgtgttggctaacacacaagaattctttgatggaaattttccagtggattcttggttaccaatttttgtgaattgtctntatcctgtaagtcaattaccttcagaagctgtcgttgtaaatgttacatgtggtag

SEQ ID NO: 79518 - DNA, 457 bp, Glycine max
caacagtacagagcattttgatgcatgtaagtggacaaaatcagaaccacattcctgggaattgatcttcccaatagaggtatgtggtcctaataatggttttgaaatgtggagttctgagtgggcaaatcaaacttcatggcatttgagtttccttattgacaatcccaaacagtctacagtttttgatattctcttgggaatctctcaagattttgaaattgctggtaatactcttatgccagctttttctgttccacaggctactgccagatcttctgaaaatgcggaatcctctgcatgatctggaatttgtgttttctttcgcttgttcgtttgtttaattcaataaaggaaattaggcatgaccctcttgttgagtatgctctgcctatttgaaaatttccacacctcttttaattgtcgtaaatgatgttgtgaaagtgtgtgttatttt

SEQ ID NO: 79519 - DNA, 429 bp, Glycine max
gggcaaagcaacctttatcgcatttgagattccttaaagacaaacggctacagtcgacagagttggatattctcttgtgaatcatctaagatgtcggaatagccggtaatacgctgatgccaggttctgctgagccacaagctgctgccagaccttctgaaaaagcctaatacgatccatgatcggggatttgggtaaactttcgctagatgcgcagtggacaatagtaacacaaactaggcctgaccctatggatggaatgctctgtctatttgtaaagtgccacacctatcataattgtcgacataatgtttgaggtgatgatgatcttgctctacaactagccatggaaagtggaacgaaatctgacactgggagaacccacaattgacttttgaaatgtactttacatagatttgatatgtaaat

SEQ ID NO: 79520 - DNA, 108 bp, Glycine max
atttgcttagttttctatcggtatgtatataggtgaatggtcgaacatgcctttttgtgaagtaaaaaaactaccctcgatccatgcctcaaaagggttgataataat

SEQ ID NO: 79521 - DNA, 494 bp, Glycine max
gctgtttaatggtcaagattgtgatgtctgggaatgcagcagtcagaaaggagtgattgggcctcattggtacaagtgtttttaacaaacagcaacagtacagagcattttgatgcatgtaagtggacaaaatcagaaccacattcctgggaattgatcttcccaatagaggtatgtggtcctaataatggttttgaaatgtggagttctgagtgggcaaatcaaacttcatggcatttgagtttccttattgacaatcccaaacagtctacagtttttgatattctcttgggaatctctcaagattttgaaattgctggtaatactcttatgccagctttttctgttccacaggctactgccagatcttctgaaaatgcggaatcctctgcatgatctggaattgtgttttctttcgcttgttcgtttgtttaattcaataaaggaaattaggcatgaccctcttgttgagtatgctctgcctatttgaaaat

SEQ ID NO: 79522 - DNA, 358 bp, Glycine max
cttacagcttggtcaactcaggtgcgtcctgcaacaactctgttggctgatgggtgtccatatttgtatgcaatggtgcatgatagttcagtgtctacaataccaggtgattttgtcattggtgtcaagttgacaaccataaacaatatgtgtgcatatgggctcaatcctggtatttcaggttctcgtcttttgggcaccattcctcagtccatttcacagcaaactgtttggaatcaaatggcaacagtgagaacaccattgaattttgattctagcaagcagagcttttgtcagttttctattgaccttctcggtggaagaatcttagtggacaaaactggagattggatcacac

SEQ ID NO: 79523 - DNA, 342 bp, Glycine max
ggtgtccatatttgtatgcaatggtgcatgatagttcagtgtctacaataccaggtgattttgtcattggtgtcaatttgacaaccataaacaatatgtgtgcatatgggctcaatcctggtatttcaggttctcgtcttttgggcaccattcctcagtccatttcacagcaaactgtttggaatcaaatggcaacagtgagaacaccattgaattttgattctagcaagcagagcttttgtcagttttctattgaccttctcggtggaggaatcttagtggacaaaactggagattggatcacacttatacaaaattctccaattagtaaacttgtgagag

SEQ ID NO: 79524 - DNA, 268 bp, Glycine max
  unsure (1)..(268): unsure at all n locations
gtctggcctacaatctgttggatagagcgggaagttgggtgccctggggaggctatgatgatttcactgcatccttgcctgaaaaggattgccctgttgctcttgtggtctctcgtagctcctatcatgaacccagaaagggggttctgagcattaggttcgtcaggtccgagtttatgacggaaaacgtgccgcctaactactatatatgccagtggtgtngatgtttataattggatatacggactgcatctatatgagcctgcat

SEQ ID NO: 79525 - DNA, 97 bp, Glycine max
cgcacacgtgaatgcatgaggaaactccttgagggactatgatgcagaacgagcatggcctggaacggtggaagagttatactacgatgcaacacat

SEQ ID NO: 79526 - DNA, 370 bp, Glycine max
cggctcgagattgaccttctcggtggaggaatcttagtggacaaaactggagattggatcacacttatacaaaattctccaattagtaacttattgagagttgctgcttggaagaaaggctgtttaatggtcaagattgtgatgtctgggaatgcagcagtcaaaaggagtgattgggcctcattggtacaagtgtttttaacaaacagcaacagtacagagcattttgatgcatgtaagtggacaaaatcagaaccacattcctgggaattgatcttcccaatagaggtatgtggtcctaataatggttttgaaatgtggagttctgagtgggcaaatcaaacttcatggcatttgagtttccttattg

SEQ ID NO: 79527 - DNA, 368 bp, Glycine max
  unsure (1)..(368): unsure at all n locations
caactccaaacacaaagacatcatcatccatggctgcctccgtctccactgtcggagctgtcaacagagctcttttgaacctgaatggttctggagctggagcttcagctcccagttcagccttctttgggaccagcttgaagaaggttattgcctcaagggtccccaacagcaaggtttccggtggaagcttcaagattgttgctgtagaagagaagaaagagattgaagagacccagcagaccgacaaggacagatggaagggtcttgcctatgatatctcagacgaccaacaagacatcacangaggaaagggtttggttgactcccttttccaagctccacaggatgctggaactcactatgca

SEQ ID NO: 79528 - DNA, 371 bp, Glycine max
gcttttgtcagttttctattgaccttctcgggggaggaatcttagtggacaaaactggagattggatcacacttatacaaaattctccaattagtaacttattgagagttgctgcttggaagaaaggctgtttaatggtcaagattgtgatgtctgggaatgcagcagtcaaaaggagtgattgggcctcattggtacaagtgtttttaacaaacagcaacagtacagagcattttgatgcatgtaagttgacaaaatcagaaccacattcctgggaattgatcttcccaatagaggtatgtggtcctaataatggttttgaaatgtggagttcttagtgggcaaatcaaacttcatggcatttgagtttt

SEQ ID NO: 79529 - DNA, 354 bp, Glycine max
ggaatcccttctggatttccgctcacagttatttgcaatagcatttttaatgagatgctcattagatatagctatgaaaaattactgcgccaggctaaagctccaagtatgtttttacaatccttcaaaaattttgtttctttgtgtgtgtatggtgatgataacttaattagtgttcatgaatatgtcaagccttactttagtggttctaaattgaaaagctttctagctagtcataacatcaccattactgatggtattgacaaaactagtgcaactttgcaatttagaaagttagcagattgtgattttctcaagagaaactttaagcagatgtctaatgttttgtgggtg

SEQ ID NO: 79530 - DNA, 374 bp, Glycine max
gtctgggaatgcagcagtcaaaaggagtgattgggcctcattggtacaagtgtttttaacaaacagcaacagtacagagcattttgatgcatgtaagtggacaaaatcagaaccacattcctgggaattgatcttcccaatagaggtatgtggtcctaataatggttttgaaatgtggagttctgagtgggcaaatcaaacttcatggcatttgagtttccttattgacaatcccaaacagtctacagtttttgatattctcttgggaatctctcaagattttgaaattgctggtaatactcttatgccagctttttctgttccacaggctactgccagatcttctgaaaatgcggaatcctctgcatgatctg

SEQ ID NO: 79531 - DNA, 365 bp, Glycine max
atttacccgagcaactctctctctccctctctcttggaagctactgtctaaccattttttttttttactccttttgcttttgtgcggcgccaccaaccctaaactttgacacctccaacgagcaaagaaaggggaaagagatatgagcggaaagaagggatggcggcggtggtgcgagcggcggtgatgaggcggtgcgagtggtggcgtgagcagcggcgaagcgagatagaggaaagggaaaataaagggggctacacggatgttttccggcgacctggactacgattgcgagggttcgtggcggcgctggcagcggtgctttggctaacggatccagagcggcggcgacagatgcaggcgga

SEQ ID NO: 79532 - DNA, 365 bp, Glycine max
gaaaaattgatgcgtgaaaggacgcacctgctgttggcttgttgttcaaggatggcaatttgtaagaaagatgtttggagagttgaatgtggaatcccttctggatttccgctcacagttatttgcaatagcatttttaatgagatgctcattagatatagctatgaaaaattactgcgccaggctaaagctccaagtatgtttttacaatccttcaaaaattttgtttctttgtgtgtgtatggtgatgataacttaattagtgttcatgaatatgtcaagccttactttagtggttctaaattgaaaagctttctaactagtcataacatcaccattactgatggtattgacaaaactagtgc

SEQ ID NO: 79533 - DNA, 374 bp, Glycine max
tgctgcttggaagaaaggctgtttaatggtcaagattgtgatgtctgggaatgcagcagtcaaaaggagtgattgggcctcattggtacaagtgtttttaacaaacagcaacagtacagagcattttgatgcatgtaagtggacaaaatcagaaccacattcctgggaattgatcttcccaatagaggtatgtggtcctaataatggttttgaaatgtggagttctgagtgggcaaatcaaacttcatggcatttgagtttccttattgacaatcccaaacagtctacagtttttgatattctcttgggaatctctcaagattttgaaattgctggtaatactcttatgccagctttttctgttccacaggcta

SEQ ID NO: 79534 - DNA, 371 bp, Glycine max
ccattcctcagtccatttcacagcaaactgtttggaatcaaatggcaacagtgagaacaccattgaattttgattctagcaagcagagcttttgtcagttttctattgaccttctcggtggaggaatcttagtggacaaaactggagattggatcacacttatacaaaattctccaattagtaactttttgagagttgctgcttggaagaaaggctgtttaatggtcaagattgtgatgtctgggaatgcagcagtcaaaaggagtgattgggcctcattggtacaagtgtttttaacaaacagcaacagtacagagcattttgatgcatgtaagtggacaaaatcagaaccacattcctgggaattgatc

SEQ ID NO: 79535 - DNA, 358 bp, Glycine max
caactctgttggctgatgggtgtccatatttgtatgcaatggtgcatgatagttcagtgtctacaataccaggtgattttgtcattggtgtcaagttgacaaccataaacaatatgtgtgcatatgggctcaatcctggtatttcaggttctcgtcttttgggcaccattcctcagtccatttcacagcaaactgtttggaatcaaatggcaacagtgagaacaccattgaattttgattctagcaagcagagcttttgtcagttttctattgaccttctcggtggaggaatcttagtggacaaaactggagattggatcacacttatacaaaattctccaattagtaacttgttgag

SEQ ID NO: 79536 - DNA, 245 bp, Glycine max
attgcttcccttctaaaaaaaaaaaaaaaaaaaaagaaaaaaaaaaaaaaaaaaagaaaaaaaaaaaaaaaaaaaaaaaaaaaaaaaaaaaaaaaaaaaaaaaaaaaaaaaaaaaaaaaataaaaaataaataaacaaaaggattacgaacaaaactagggaaaaggtaagaaaaatgaaaaaaatatactatagttgggcgctgtcctaattattgtacttggccgcccgataataataattaa

SEQ ID NO: 79537 - DNA, 100 bp, Glycine max
gaaattaggcatgaccctcttgttgagtatgctctgcctatttgaaaatttccacacctcttttaattgtcgtaatgatgtgtgaagtgtgtgttatttt

SEQ ID NO: 79538 - DNA, 368 bp, Glycine max
cttttgtcagttttctattgaccttctcggtggaggaatcttagtggacaaaactggagattggatcacacttatacaaaattctccaattagtaacttgttgagagttgctgcttggaagaaaggctgtttaatggtcaagattgtgatgtctgggaatgcagcagtcaaaaggagtgattgggcctcattggtacaagtgtttttaacaaacagcaacagtacagagcattttgatgcatgtaagtggacaaaatcagaaccacattcctgggaattgatcttcccaatagaggtatgtggtcctaataatggttttgaaatgtggagttctgagtgggcaaatcaaacttcatggcatttgagtt

SEQ ID NO: 79539 - DNA, 261 bp, Glycine max
aaaaaatttaattaaaaaaaaaaaaaaaaaaaaaaagaaaataaaaaaaaaaaaaaaaaaaaaaaaaaaaaaaataataaaaaaaaaaaaaaaaaaaaaaaaaaaaaaaaaaaaagggggcggcccccacttattaacctcttcaacccggaaattaattccgaaccggtccctgcaggcttcccacttttccttttatggagccgttttaaaccttggcgtaataatggccatagctttttcctgtgtaaaatttttttc

SEQ ID NO: 79540 - DNA, 209 bp, Glycine max
aattactgcgccaggctaaagctccaagtatgtttttacaatccttcaaaaattttgtttctttgtgtgtgtatggtgatgataacttaattagtgttcatgaatatgtcaagccttactttagtggttctaaattgaaaagctttctagctagtcataacatcaccattactgatggtattgacaaaactagtgcaactttgcaattt

SEQ ID NO: 79541 - DNA, 365 bp, Glycine max
gaaaaagttgtattgaaattttcacaagaggaatttcttacagcttggtcaactcaggtgcgtcctgcaacaactctgttggctgatgggtgtccatatttgtatgcaatggtgcatgatagttcagtgtctacaataccaggtgattttgtcattggtgtcaagttgacaaccataaacaatatgtgtgcatatgggctcaatcctggtatttcaggttctcgtcttttgggcaccattcctcagtccatttcacagcaaactgtttggaatcaaatggcaacagtgagaacaccattgaattttgattctagcaagcagagcttttgtcagttttctattgaccttctcggtggaggaatctt

SEQ ID NO: 79542 - DNA, 371 bp, Glycine max
tggagattgcatcacacttatacaaaattctgcaattagtaacttattgagagttgctgcttggaagaaaggctggttaatggtcaagattgtgatgtctgggaatgcagcagtcaaaaggagtgattgcgcctcattggtacaagtgtttttaacaaacagcaacagtacagagcattttgatgcatgtaagtggacaaaatcagaaccacattcctgggaattgatcttcccaatagaggtatgtggtcctaataatggttttgaaatgtggagttctgagtgggcaaatcaaacttcatggcatttgagtttccttattgacaatgccaaacagtctacagattttgatattctcttgggaatctctc

SEQ ID NO: 79543 - DNA, 384 bp, Glycine max
aataaaaaaaaaaaaaaaaaaaaaaaaaaaaaggaaagaaaaaaaaaaaaaaaaaaaaaaaaaaaaaaaaaaaaaaaaaaaaaaaaaaaataaaaaaaaaaaaaaaaaaaaaaaaaaaaaaaaaaaaaaataaggggggcccgccacatcttgggttggttcccccggaaattaattcgggccgggtccctgaggggtcccaacttttctttatttggggccttttaaaacctggggaatacaagggatatagtgttttcctggggaaaattgttttccgttcaaaattccacaaaaaaaacaccccggaggcttaagtggaaaagccgggggggcctaaggggggacctacctcactttaatggggtggccctccctgcccct

SEQ ID NO: 79544 - DNA, 95 bp, Glycine max
aaaaaaaaaaaaaaaaaaaaaaaaaaaaaaaggaaaaaaaaaaaaaaaaaaaaaaaaaaaaaaaaaaaaaaaaaaaaaaaaaaaaaaaaaaaaaa

SEQ ID NO: 79545 - DNA, 313 bp, Glycine max
atgcacgcgtacgtaagctcggattgtggttatcgactagggtcagaacctagggctcatattcttctgttttgctcaatccttgcaatctcgcgttacgcatgcgatgcttctacgctcagttaattcaattggagctagccctgatctatcgaaaactcaaggcctctgaggtctgagggtttactgatctaaattttgataaatgaaggcagagacgatgactatgaatacgaatgccctggtgattatggatgtgcagatcgatggagatcccgatctaaggattgctgtagagctaccctatgatgat

SEQ ID NO: 79546 - DNA, 380 bp, Glycine max
aaacaatatgtgtgcatatgggctcaatcctggtatttcaggttctcgtcttttgggcaccattcctcagtccatttcacagcaaactgtttggaatcaaatggcaacagtgagaacaccattgaattttgattctagcaagcagagcttttgtcagttttctattgaccttctcggtggaggaatcttagtggacaaaactggagattggatcacacttatacaaaattctccaattagtaacttgttgagagttgctgcttggaagaaaggctgtttaatggtcaagattgtgatgtctgggaatgcagcagtcaaaaggagtgattgggcctcattggtacaagtgtttttaacaaacagcaacagtacagagcatt

SEQ ID NO: 79547 - DNA, 382 bp, Glycine max
gtaataatctggaaatgcaagaagcttatcttgtcaatctcgtaaatgtgttacgagaattgtatttgcacagtccagaggaagctcgccaattgagaaggaaagctctctctcgtattgaatggctgcaaaaagctgatgtgcctaccatagcacagattgaagagttccattcgatgcagaggatgatgaatgctcctgattcaaatgataatattgatttactgttgagcattgatttgttgggtttacaaggagcaggtaaagcttttccaaacaaaattgtttttgatgataagcttgtgttggctaacacacaagaattctttgatggaaattttccagtggattcttggttaccaatttttgtgaattgtcttta

SEQ ID NO: 79548 - DNA, 368 bp, Glycine max
gaaactttaagcagatgtctaatgttttgtgggtggctcctgaggacaaggcgagtttatggtcacaacttcattatgtttcgtgtaataatctggaaatgcaagaagcttatcttgtcaatctcgtaaatgtgttacgagaattgtatttgcacagtccagaggaagctcgccaattgagaaggaaagctctctctcgtattgaatggctgcaaaaagctgatgtgcctaccatagcacagattgaagagttccattcgatgcagaggatgatgaatgctcctgattcaaatgataatattgatttactgttgagcattgatttgttgggtttacaaggagcaggtaaagcttttcaaacaaaattg

SEQ ID NO: 79549 - DNA, 356 bp, Glycine max
gagagattcaggaaaaagttgtattgaaattttcacaagaggaatttcttacagcttggtcaactcaggtgcgtcctgcaacaactctgttggctgatgggtgtccatatttgtatgcaatggtgcatgatagttcagtgtctacaataccaggtgattttgtcattggtgtcaagttgacaaccataaacaatatgtgtgcatatgggctcaatcctggtatttcaggttctcgtcttttgggcaccattcctcagtccatttcacagcaaactgtttggaatcaaatggcaacagtgagaacaccattgaattttgattctagcaagcagagcttttgtcagttttctattgac

SEQ ID NO: 79550 - DNA, 326 bp, Glycine max
aaaatgaagaaacaattcgcgagttcattactgaggaaattaagaaccctttgcacgtcgccatcattcttatagaatgattttgagtcagtttatgaaaatgtagaatgatgggtaatcatttgaatcagtttattacaacattcaaggaaagtatgtctttcgagtaaaaaaaaaaaaacaacaagaaagggcccaacatcactagttaaattcgtcgagccatgtgtccaactgtgctcttgactcaatacaaaaattcacgtcaacttatttttagaaataatagggggggggcgcgaatatgggtgcttgttaacccggga

SEQ ID NO: 79551 - DNA, 367 bp, Glycine max
caagctggtgcagtttggagagattcaggaaaaagttgtattgaaattttcacaagaggaatttcttacagcttggtcaactcaggtgcgtcctgcaacaactctgttggctgatgggtgtccatatttgtatgcaatggtgcatgatagttcagtgtctacaataccaggtgattttgtcattggtgtcaagttgacaaccataaacaatatgtgtgcatatgggctcaatcctggtatttcaggttctcgtcttttgggcaccattcctcagtccatttcacagcaaactgtttggaatcaaatggcaacagtgagaacaccattgaattttgattctagcaagcagagcttttgtcagttttct

SEQ ID NO: 79552 - DNA, 357 bp, Glycine max
  unsure (1)..(357): unsure at all n locations
caattttgaggcttttccccacaagctggtgcagtttggagagagtcaggaaaaagttgtattgaaattttcacaagaggaatttcttacagcttggtcaactcaggtgcgtcctgcaacaactctgttggctgatgggtgtccatatttgtatgcaatggtgcatgatagttcagtgtctacaataccaggtgattttgtcattggtgtcaagttgacaaccataaacaatatgtgtgcatatgggctcaatcctggtatttcaagttctcgtcttttgggcaccattcctcantccatttcacagcaaactgtttggaatcaaatggcaacagtgagaacaccattgaattttga

SEQ ID NO: 79553 - DNA, 299 bp, Glycine max
ctcgagccgattcggctcgagaaaaaaaaaaaaaagggaaaaaaaaaaaaaaaaaaaaaaaaaaaaaaaaaaaaaaaaaaaaaaaaaaaaaaaaaaaaaaaaaaaaaaaaaaaaaaaaaaaaaaaaaaaaaaaaaaaaaaaaaaaaaaaaaaaaaaaaaaaaaaaaagggaaaaaaaaaaaaaaaaaaaggggggggccacccaataaaaattccccacaccggaaaaaaaattaagcacggaccccaaagggctgacaagtttaacaattgaggggacataaaaaaatcggggaaaaa

SEQ ID NO: 79554 - DNA, 317 bp, Glycine max
gtctgggaatgcagcagtcaaaaggagtgattgggcgcgcattggtacaagtgtttttaacaaacagcaacagtacagagcattttgatgcatgtaagtggacaaaatcagaaccacattcctgggaattgatcttcccaatagaggtatgtggtcctaataatggttttgaaatgtggagttctgagtgggcaaatcaaacttcatggcatttgagtttccttattgacaatcccaaacagtctacagtttttgatattctcttgggaatctctcaagattttgaaattgctggtaatactcttatgccagctttt

SEQ ID NO: 79555 - DNA, 347 bp, Glycine max
  unsure (1)..(347): unsure at all n locations
ttcggggtttccaaattagatgagttgttgttcttgctctgccatggccttccttctcaaagcaccttcctttctccctcctcttaaccaaaagttgaattatacccataaaagcttttctccataaacctgcaatccaaattttaccatgctagtgtcagaaatgggagatggaacgttcctagcatgacaataaaagctcangcagctgttgaaggggatgtactacttgacgaagaatccatctgtgtcaatgaagaaagtgattacggggtcgtttgtatgcaccatgttggaattttatgtgaaaacctagaaagatcacttgacttttatcaaaatgttct

SEQ ID NO: 79556 - DNA, 366 bp, Glycine max
ctcgtattgaatggctgcaaaaagctgatgtgcctaccatagcgcacattgaagagttccattcgatgcagaggatgatgaatgctcctgattcaaatgataatattgatttactgttgagcattgatttgttgggtttacaaggagcaggtaaagctcttccaaacaaaattgtttctgatgataagcttgtgttggctaacacacacgaattctttgatggaaattttccagaggattcttggttaccaattttagtgaattgactttatcctgcaagtcaattaccttcagaagctgttggtgtaaatgttacatgtggtagtggacgtggtggcttacccaccaatgcttggattacttgtg

SEQ ID NO: 79557 - DNA, 358 bp, Glycine max
ggaagctcgccaattgagaaggaaagctctctctcgtattgaatggctgcaaaaagctgatgtgcctaccatagcacagattgaagagttccattcgatgcagaggatgatgaatgctcctgattcaaatgataatattgatttactgttgagcattgatttgttgggtttacaaggagcaggtaaagcttttccaaacaaaattgtttttgatgataagcttgtgttggctaacacacaagaattctttgatggaaattttccagtggattcttggttaccaatttttgtgaattgtctttatcctgtaagtcaattaccttcagaagctgtcgttgtaaatgttacatgtggtagt

SEQ ID NO: 79558 - DNA, 290 bp, Glycine max
gtcagagtacacactcgcactttgacaaggctaaacaggggtttgggggtggcatatgcacgtttgcgcaaacacagcgcgctctcatcctttggtaacgcgcgttccaaatggtgagggggatttggcgaacctggatctaacttgcccgctcgaacttgtggcttggatatacctggttcgaggaggcattacttgttgacaagtgcgcagtcgtgaagaccacctctttgttctgcctcaccctgctttccaccaaaacacacgccattctagctgggtttctcatt

SEQ ID NO: 79559 - DNA, 356 bp, Glycine max
caacaactctgttggctgatgggtgtccatatttgtatgcaatggtgcatgatagttcagtgtctacaataccaggtgattttgtcattggtgtcaagttgacaaccataaacaatatgtgtgcatatgggctcaatcctggtatttcaggttctcgtcttttgggcaccattcctcagtccatttcacagcaaactgtttggaatcaaatggcaacagtgagaacaccattgaattttgattctagcaagcagagcttttgtcagttttctattgaccttctcggtggaggaatcttagtggacaaaactggagattggatcacacttatacaaaattctccaattagtaactta

SEQ ID NO: 79560 - DNA, 192 bp, Glycine max
cgacagtgaaccttaccgtgcgcattccaacaccatggctgaatacggcctgaacgggattaacaatttgaactaaatccacatctagatcgactacagaaataacgtgcccatggactttaatgcaacctaggatgggggcacacgtggcataagctgcgctgcggacattaactgacagagccctagtga

SEQ ID NO: 79561 - DNA, 228 bp, Glycine max
ggtaatactcttatgccagctttttctgttccacaggctactgccagattttatgagaatgcggaatcctctgcatgatctggaattagtgttatctttcgcttgttcgtttgtctaattcaataaaggaaattaggcatgaccctcttgttgagtatgctctgcctatttgaaaatttccacacctatcctaattgacgtaatgatgtgtgaagtgtgtgttatttt

SEQ ID NO: 79562 - DNA, 305 bp, Glycine max
cttcattatgtttcgtgtaataatctggaaatgcaagaagcttatcttgtcaacctcgtaaatgtgttacgagaattgtatttgcacagtccagaggaagctcgccaattgagaaggaaagctctctctcgtattgaatggctgcaaaaagctgatgtgcctaccatatcacacattgaagagttccattctatgcacaggatgatgaatgctcctgattcaaatgataatattgatttactgttgagcattgatttgttggggttacaaagagcacgggtaaagcttttccacacaaaattgtt

SEQ ID NO: 79563 - DNA, 366 bp, Glycine max
cgaagtgttaagagaatgcctctttctatagggggaggagctggtgcaaagaatgctattctcatgaatatgccaaatgctgttctttcaatgtggagatattttgttggagatctcgtctttgaagtttctaagatgacttctccctacattaaatgtacagtctctttcttcatagcatttggaaatttggctgatgataccatcaattttgaggcttttccccacaagctggtgcagtttggagagattcaggaaaaagttgtattgaaattttcacaagaggaatttcttacagcttggtcaactcaagtgcgtcctgcaacaactctgttggctgatgggtgtccatatttgtatgcaatg

SEQ ID NO: 79564 - DNA, 243 bp, Glycine max
cctaccatagcacagattgaagagttccattcgatgcagaggatgatgaatgctcctgattcaaatgataatattgatttactgttgagcattgatttgttgggtttacaaggagcaggtaaagcttttccaaacaaaattgtttttgatgataagcttgtgttggctaacacacaagaattctttgatggaaattttccagtggattcttggttaccaatttttgtgaattgtctttatcct

SEQ ID NO: 79565 - DNA, 147 bp, Glycine max
tggaaacagtgaaaacaaccattgaattgtgattatagcagggcgggcgtcggctagtgagcttattgacccggtaattaattgcagaccggtgcctgcaagcgtaccaggtttccctatatatgcgtcaatttacaactaggcgac

SEQ ID NO: 79566 - DNA, 367 bp, Glycine max
cctgattcaaatgataatattgatttactgttgagcattgatttgttgggtttacaaggagcaggtaaagcttttccaaacaaaattgtttttgatgataagcttgtgttggctaacacacaagaattctttgatggaaattttccagtggattcttggttaccaatttttgtgaattgtctttatcctgtaagtcaattaccttcagaagctgtcgttgtaaatgttacatgtggtagtggacgtggtggtttacccaccactgcttggattagttctgcagttaacaatcgctcctcagatatcaacaaaaagattcgcacagcacttgggaaaggtaagaaaattgtttttcttactagagttg

SEQ ID NO: 79567 - DNA, 324 bp, Glycine max
gggaaagacacagtttgcatcatagaggccaaagctgtacaggtgctaaaagggatggatcaggacctgaatctccatctggaaaaagtattaaaatctggagacattcagaggttttcatgcagaatgtctcagacacacattgataggaaaggacaaatgggcatttattgatatgagtgcacgtcccttatgatggcgaccagctaattgtggacaaagagtgcgtacagaatcaagtttaccgactgtgtaaaaaacaatacgttctgttttagaaatgtaagaacaaaaagctgaagaccgatcgcaaaatggtataca

SEQ ID NO: 79568 - DNA, 360 bp, Glycine max
ttttgtgttaaataggtggatgggaaaattgactttcccccagggcacttcccgaagtgttaagagaatgcctctttctatagggggaggagctggtgcaaagaatgctattctcatgaatatgccaaatgctgttctttcaatgtggagatattttgttggagatctcgtctttgaagtttctaagatgacttctccctacattaaatgtacagtctctttcttcatagcatttggaaatttggctgatgataccatcaattttgaggcttttccccacaagctggtgcagtttggagagattcaggaaaaagttgtattgaaattttcacaagaggaatttcttacagcttggtcaac

SEQ ID NO: 79569 - DNA, 361 bp, Glycine max
cacaacttcattatgtttcgtgtaataatctggaaatgcaagaagcttatcttgtcaatctcgtaaatgtgttacgagaattgtatttgcacagtccagaggaagctcgccaattgagaaggaaagctctctctcgtattgaatggctgcaaaaagctgatgtgcctaccatagcacagattgaagagttccattcgatgcagaggatgatgaatgctcctgattcaaatgataatattgatttactgttgagcattgatttgttgggtttacaaggagcaggtaaagcttttccaaacaaaattgtttttgatgataagcttgtgttggctaacacacaagaattctttgatggaaattt

SEQ ID NO: 79570 - DNA, 357 bp, Glycine max
caaaactggagattggatcacacttatacaaaattctccaattagtaacttattgagagttgctgcttggaagaaaggctgtttaatggtcaagattgtgatgtctgggaatgcagcagtcaaaaggagtgattgggcctcattggtacaagtgtttttaacaaacagcaacagtacagagcattttgatgcatgtaagtggacaaaatcagaaccacattcctgggaattgatcttcccaatagaggtatgtggtcctaataatggttttgaaatgtggagttctgagtgggcaaatcaaacttcatggcatttgagtttccttattgacaatcccaaacagtctacagtttttga

SEQ ID NO: 79571 - DNA, 350 bp, Glycine max
tgtatttgcacagtccagaggaagctcgccaattgagaaggaaagctctctctcgtattgaatggctgcaaaaagctgatgtgcctaccatagcacagattgaagagttccattcgatgcagaggatgatgaatgctcctgattcaaatgataatattgatttactgttgagcattgatttgttgggtttacaaggagcaggtaaagcttttccaaacaaaattgtttttgatgataagcttgtgttggctaacacacaagaattctttgatggaaattttccagtggattcttggttaccaatttttgtgaattgtctttatcctgtaagtcaattaccttcagaagct

SEQ ID NO: 79572 - DNA, 363 bp, Glycine max
agagagtgatttcattgagtgatcggtgttcacttgatctcatcataatcgtcagcgtcaattgaagaagatgccgatcagaaacatcgccgtcggaaggcctgaagaggcgactcaccccgacacgttgaaggcggctttggctgagttcatctcaaccttcatcttcgtgttcgccggctcaggctccggcatcgcctacaacaagctcaccgacaacggcgctgccacccctgccggcctcatctccgcctccatcgcccatgcattcgccctcttcgtcgccgtctccgtcggcgccaacatcttcggcggccacgtcaaccccgccgtcaccttcggcgccttcgtcggcggcaacat

SEQ ID NO: 79573 - DNA, 321 bp, Glycine max
ccttgagttgtaaagatcacggttcagatacactcaattattcatacacatagctatagtgcatcggtacaaaaagctatgtgtatgaataattgagtgtatctgaaccttgagttgtaaagatcacgaagataagtggttgccaataactttgatatctcattggtagttgctttccatatgccggggaatctaaattacttaaatgaaaggagggtgctatggttataatgctgtgtaagataagatggtgttggtgtttttattttttatttttatatctactttttggattataaattaagataaggtgttgttggt

SEQ ID NO: 79574 - DNA, 353 bp, Glycine max
ggaaaattgactttcccccagggcacttcccgaagtgttaagagaatgcctctttctatagggggaggagctggtgcaaagaatgctattctcatgaatatgccaaatgctgttctttcaatgtggagatattttgttggagatctcgtctttgaagtttctaagatgacttctccctacattaaatgtacagtctctttcttcatagcatttggaaatttggctgatgataccatcaattttgaggcttttccccacaagctggtgcagtttggagagattcaggaaaaagttgtattgaaattttcacaagaggaatttcttacagcttggtcaactcaagtgcgtcctgc

SEQ ID NO: 79575 - DNA, 359 bp, Glycine max
agcaaatggcttcctcaatgatctcttccccagctgttaccactgtcaaccgtgccggtgccggcatggttgctccattcactggcctcaagtccatggctggcttccccaccagaaagaccaacaatgacattacctccattgctagcaacggtggaagagtgcaatgcatgcaggtgtggccaccagttggcaagaagaagtttgagactctttcctacctgccagaccttgatgatgcacaattggcaaaggaagtagaataccttcttaggaagggatggattccttgcttggaattcgagttggagcacggtttcgtgtaccgtgagcacaacaagtcaccaggatactacgat

SEQ ID NO: 79576 - DNA, 364 bp, Glycine max
agcatttggaaatttggctgatgataccatcaattttgaggcttttccccacaagctggtgcagtttggagagattcaggaaaaagttgtattgaaattttcacaagaggaatttcttacagcttggtcaactcaggtgcgtcctgcaacaactctgttggctgatgggtgtccatatttgtatgcaatggtgcatgatagttcagtgtctacaataccaggtgattttgtcattggtgtcaagttgacaaccataaacaatatgtgtgcatatgggctcaatcctggtatttcaggttctcgtcttttgggcaccattcctcagtccatttcacagcaaactgtttggaatcaaatggcaaca

SEQ ID NO: 79577 - DNA, 307 bp, Glycine max
gatacttgtaaaattactgaagcccaatttgaaagtggaaggtcttattattgctgcatgttcatcaggaaatatgggtaaccttcctattgtaatcatccctgctatctgtgatgagaaaggaggcccatttggtgcacgtgatatttgccgcaataatgcactctcttatgcatctttctctatggcgcttggtggcatcttcatttggacctacacataccagacggtaaaaagcagatctttgaaatttaaagcactggaagctgctgagattgtaagggttccaacaaaaatttgatgctat

SEQ ID NO: 79578 - DNA, 358 bp, Glycine max
tactgatggtattgacaaaactagtgcaactttgcaatttagaaagttagcagattgtgattttctcaagagaaactttaagcagatgtctaatgttttgtgggtggctcctgaggacaaggcgagtttatggtcacaacttcattatgtttcgtgtaataatctggaaatgcaagaagcttatcttgtcaatctcgtaaatgtgttacgagaattgtatttgcacagtccagaggaagctcgccaattgagaaggaaagctctctctcgtattgaatggctgcaaaaagctgatgtgcctaccatagcacagattgaagagttccattcgatgcagaggatgatgaatgctcctgat

SEQ ID NO: 79579 - DNA, 348 bp, Glycine max
ctcgagccggtctattgttttgtgggtggctcctgaggacaaggcgagtttatggtcacaacttcattatgtttcgtgtaataatctggaaatgcaagaagcttatcttgtcaatctcgtaaatgtgttacgagaattgtatttgcacagtccagaggaagctcgccaattgagaaggaaagctctctctcgtattgaatggctgcaaaaagctgatgtgcctaccatagcacagattgaagagttccattcgatgcaaaggatgatgaatgctcctgattcaaatgataatattgatttactgttgagcattgatttgttgggtttacaaggagcaggtaaaagctt

SEQ ID NO: 79580 - DNA, 359 bp, Glycine max
gccaaatgctgttctttcaatgtggagatattttgttggagatctcgtctttgaagtttctaagatgacttctccctacattaaatgtacagtctctttcttcatagcatttggaaatttggctgatgataccatcaattttgaggcttttccccacaagctggtgcagtttggagagattcaggaaaaagttgtattgaaattttcacaagaggaatttcttacagcttggtcaactcaagtgcgtcctgcaacaactctgttggctgatgggtgtccatatttgtatgcaatggtgcatgatagttcagtgtctacaataccaagtgattttgtcattggtgtcaagttgacaacca

SEQ ID NO: 79581 - DNA, 303 bp, Glycine max
gaggaatcttactgtacaaaactggagattggatcacacttatggggaattatccaattagtgacttgctaacagtaaatgcttggaagaaaggctgtttaatggtcaagattgtgatgtctgggaatgcacacaccaaaaggagtgattgggccttattggtacaagtgtttttaacaaacagcgaccggacagagcattttgatgcatgtaaatggacaaaatcagaaccacattcctgggaattgatcttcccaatacaggtatgcgggcctaataatggttttgaaatgtgaaattctg

SEQ ID NO: 79582 - DNA, 356 bp, Glycine max
ggagtgagaaatggaccttccatggtgcccccatttaatccctccagctttcactctctttcccctcaacccccactctcctcttctcttcttttccaaaaacaatgaagctcattagcaccatcaaccccaaaaacctcaaactaagccccaaacgcttctttcgtaaaaaggaaccatctttagtctcacgctccgacccgccttctttcggatccggatcctcttccgttgactcttccaccgcaaatcacaaaccttccgccggtaaccaaactccgaccagcgttctcccggacgtctccggcgagtggtccgaggtcgccaccgccgccgttgacgtgcggtgggacctc

SEQ ID NO: 79583 - DNA, 263 bp, Glycine max
  unsure (1)..(263): unsure at all n locations
ctttttggcgttaagaatgaaattctgagttctaacgccactaatcctatgctgacgcgacttcttgagaactgtaagagtctcaaatatctggttgatgagtgtccttttgcatttgtgaactagtatgtagtattttattcacttaaataaagcgcattactatgtgcaatgagtgggtttaattntnnnnnaaaaaaacaaaaaaaaaaatcaatataataaaattaaaaaaaataaaaaaataaaaagtcataataata

SEQ ID NO: 79584 - DNA, 53 bp, Glycine max
ctcgagccgaatcggctcgaggtcgtaatgatgtgtgaagtgtgtgttatttt

SEQ ID NO: 79585 - DNA, 361 bp, Glycine max
gagcttttgtcagttttctattgaccttcggggtggaggaatcttagtggacaaaactggagattggatcacacttatacaaaattctccaattagtaacttgttgagagttgctgcttggaagaaaggctgtttaatggtcaagattgtgatgtctgggaatgcagcagtcaaaaggagtgattgggcctcattggtacaagtgtttttaacaaacagcaacagtacagagcattttgatgcatgtaagtggacaaaatcagaaccacattcctgggaattgatctttccaataaaagtatgtggtcctaataatgggttttgaaatgtggagttttttagtgggcaaattaaactttat

SEQ ID NO: 79586 - DNA, 352 bp, Glycine max
caaaaattttgtttctttgtgtgtgtatggtgatgataacttaattagtgttcatgaatatgtcaagccttactttagtggttctaaattgaaaagctttctagctagtcataacatcaccattactgatggtattgacaaaactagtgcaactttgcaatttagaaagttagcagattgtgattttctcaagagaaactttaagcagatgtctaatgttttgtgggtggctcctgaggacaaggcgagtttatggtcacaacttcattatgtttcgtgtaataatctggaaatgcaagaagcttatcttgtcaatctcgtaaatgtgttacgagaattgtatttgcacagt

SEQ ID NO: 79587 - DNA, 358 bp, Glycine max
gtgatgataacttaattagtgttcatgaatatgtcaagccttactttagtggttctaaattgaaaagctttctagctagtcataacatcaccattactgatggtattgacaaaactagtgcaactttgcaatttagaaagttagcagattgtgattttctcaagagaaactttaagcagatgtctaatgttttgtgggtggctcctgaggacaaggcgagtttatggtcacaacttcattatgtttcgtgtaataatctggaaatgcaagaagcttatcttgtcaatctcgtaaatgtgttacgagaattgtatttgcacagtccagaggaagctcgccaattgagaaggaaagctct

SEQ ID NO: 79588 - DNA, 347 bp, Glycine max
gcaatttagaaagttagcagattgtgattttctcaagagaaactttaagcagatgtctaatgttttgtgggtggctcctgaggacaaggcgagtttatggtcacaacttcattatgtttcgtgtaataatctggaaatgcaagaagcttatcttgtcaatctcgtaaatgtgttacgagaattgtatttgcacagtccagaggaagctcgccaattgagaaggaaagctctctctcgtattgaatggctgcaaaaagctgatgtgcctaccattgcacatattgaatagttgcattcgatgcataggatgatgaatgctcctgattcaaatgataatattgatttac

SEQ ID NO: 79589 - DNA, 102 bp, Glycine max
ctcgagccgctcgagccgctcgagccgtttgcatttgtgaactagtatgtagtattttattcacttaaataaagcgcattactatgtgcaatgagtgtgttt

SEQ ID NO: 79590 - DNA, 316 bp, Glycine max
tatagaagagcatgacgacgcacgcacgcgtacgcatagctattaatctcgcgaaagattgcctataaaaataaaaaaaaaaaaaaaaaaaggaaaaaataaaaaaaaaaaaaaaaaaaaaaaaaaaaaaaaaaaaaaaaaaaaaaaaaaaaaaaaagggggcggccgccgtttagggagcccgtcaacccggaatttaattccggcccggtccctgaaggcttcccacctttccttttagggagtcgatttaaaccttggcgaattcatggccatagctgttcccggtgtgaaaaaaatacccgttcacaattcc

SEQ ID NO: 79591 - DNA, 179 bp, Glycine max
ctacattgagagagctgaaccaagatcaagccccatttgtacaacttattgtcagtttggtaatgagttgtttagttagggaggtggggatgaggatcggtgataaaatgaactagtatgtataatcggtagtttcattcacatgaactcattaattcacctatttttttatgtttttc

SEQ ID NO: 79592 - DNA, 464 bp, Glycine max
  unsure (1)..(464): unsure at all n locations
tcggaattccggctcgagcctcattttttaaacgattcnncttttgagnnttgagttcagaataccccagaaannaccgaagtgaagggggagggggagagatgaccagtaccctgtctcncttctctttttctctgcccaaagttnnngcattcttcnnttttctttgtntgcccnnntctaaaanntccaagcctnnatcatcantnncagctaccaannatagannattcaacannaaaaccccacntnntcttaaatccacgcccattaganngctttggaccctnntgatcaaaanncacggttgtggcttatannagtgtaggccccttgttagtgtgnngctgttgggaattgggcattcccagtgttctaaatgaaacccaannatcgataatgcttgcttaagcgaagacaaccacgcagcnncctgtttcccatgccaatggatcntggctctc

SEQ ID NO: 79593 - DNA, 333 bp, Glycine max
aaaaaaaaattaaaaaaaaaaaaaaaaataaaaaaaagggggaaaataaaaaagaagaaaagaaaaaaaaaaaaaaaataaaaaaaaaaaaaaaaaaaaaaaataaaaaaacataaaaaaaaaaaaaaaaaaaataaaaaaaaataaaggggggggcccccctcctagggcccccgtccccccggatataatttcggcccgggcccctgggggctcccaccttttctaaatggggggcttgtttaatttcgggtcgtttttaggccagcttactttttgggggcaaaaatttaacccttataatacccccacaaaatatttgctcggggacaa

SEQ ID NO: 79594 - DNA, 108 bp, Glycine max
tgctgcaaaagctgatgtgcctacatagcacagattgagagttccattcgatgcagaggatgatgaatgcttctgattcaaatgataatattgatttactggtgagca

SEQ ID NO: 79595 - DNA, 347 bp, Glycine max
ccaccacacaccgtcagccaccagcaaccatgggaaacatcatctccgccatcgcgggagcgatcaactcggtcatctctgccattgcctcgttcatcatggccatcttcagcggtatcgcccgcgttctcatcgccatctggaacttcatcacgtgtggagtctgctccggcggccgtcgtgggggaagaggcacagtctagtgggtggtgggacgaccaagctctcatcaccctaaacccttcctcccggtctcgttcagttcgcatccgcttaattccaagaccttgtccacggacaccttgtagcttataatacacgacatgcaacgacgactactgccttag

SEQ ID NO: 79596 - DNA, 60 bp, Glycine max
tttatttatcccataactttctaattcatccataaataaatccagccaaaatatccaatt

SEQ ID NO: 79597 - DNA, 224 bp, Glycine max
tttcccccagggcacttcccgaagtgttaagagaatgcctctttctatagggggaggagctggtgcaaagaatgctattctcatgaatatgccaaatgctgttctttcaatgtggagatattttgttggagatctcgtctttgaagtttctaagatgacttctccctacattaaatgtacagtctctttcttcatagcattttgaaatttggcttgatgatacc

SEQ ID NO: 79598 - DNA, 321 bp, Glycine max
  unsure (1)..(321): unsure at all n locations
ctttaaggattgtgttcccaggacctatggtgttttaaatccacaaaatccttttgtgttaaataggtggatgggaaaattgactttcccccagggcacttcccgaagtgttaagagaatgcctctttctatagggggaggagctggtgcaaagaatgctattctcatgaatatgccaaatgctgttctttcaatgtggagatattttgttggagatctcgtctttgaagtttctaagatgacttctccctacattaaatgtacagtctctttcttcatagcatntggaaatttggctgatgataccatcaattttgaggc

SEQ ID NO: 79599 - DNA, 394 bp, Glycine max
cattcctcagtccatttcacagcaaactgtttggaatcaaatggcaacagtgagaacaccattgaattttgattctagcaagcagagcttttgtcagttttctattgaccttctcggtggaggaatcttagtggacaaaactggagattggatcacacttatacaaaattctccaattagtaacttgttgagagttgctgcttggaagaaaggctgtttaatggtcaagattgtgatgtctgggaatgcagcagtcaaaaggagtgattgggcctcattggtacaagtgtttttaacaaacagcaacagtacagagcattttgatgcatgtaagtggacaaaatcagaaccacattcctgggaattgatcttcccaatagaggtatgtggtcct

SEQ ID NO: 79600 - DNA, 384 bp, Glycine max
ctcgagccgaatcggctcgagggacctattgtgttttaaatccacaaaatccttttgtgttaaataggtggatgggaaaattgactttcccccagggcacttcccgaagtgttaagagaatgcctctttctatagggggaggagctggtgcaaagaatgctattctcatgaatatgccaaatgctgttctttcaatgtggagatattttgttggagatctcgtctttgaagtttctaagatgacttctccctacattaaatgtacagtctctttcttcatagcatttggaaatttggctgatgataccatcaattttgaggcttttccccacaagctggtgcagtttggagagattcaggaaaaagttgtattgaaaatttcac

SEQ ID NO: 79601 - DNA, 393 bp, Glycine max
cacaaaagcaatgactatgtcatttaatccaaacccgtgttctgatgcatggagtttggaatttctgaagcgtactggatttcattgcgatatcatttgtgtcactggatggactgccaccccaatgcaggatgttcaggttacaattgattggtttatttcctctcaggaatgtgttcccaggacctattgtgttttaaatccacaaaatccttttgtgttaaataggtggatgggaaaattgactttcccccagggcacttcccgaagtgttaagagaatgcctctttctatagggggaggagctggtgcaaagaatgctattctcatgaatatgccaaatgctgttctttcaatgtggagatattttgttggagatctcgtctttgagtt

SEQ ID NO: 79602 - DNA, 373 bp, Glycine max
tggaaatgcaagaagcttatcttgtcaatctcgtaaatgtgttacgagaattgtatttgcacagtccagaggaagctcgccaattgagaaggaaagctctctctcgtattgaatggctgcaaaaagctgatgtgcctaccatagcacagattgaagagttccattcaatgcagaggatgatgaatgctcctgattcaaatgataatattgatttactgttgagcattgatttgttgggtttacaaggagcaggtaaagcttttccaaacaaaattgtttttgatgataagcttgtgttggctaacacacaagaattctttgatggaaattttccagtggattcttggttaccaatttttgtgaattgtcttta

SEQ ID NO: 79603 - DNA, 268 bp, Glycine max
agaaaattgtttttcttactagagttgatccttttccagtagctttactggctgttctttttggcgttaagaatgaaattctgagttctaacgccactaatcctatgctgacgcgacttcttgagaactgtaagagtctcaaatatctggttgatgagtgtccttttgcatttgtgaactagtatgtagtattttattcacttaaataaagcgcattactatgtgcaatgagtgtgtttaaattttaaaaaaaaaaaaaaaatattaa

SEQ ID NO: 79604 - DNA, 392 bp, Glycine max
gggccatgtttaggcatgcttttcttaacttaataagagacgtggaacggaggtagaggaccgggttgtaggaattccagggtctcgccaacgaggaacccgtgatatgagggtccacaaaatgaagggaagagatattttttttgttttttgtttcatttcaaagcagcggttaaacgtgaaaagtgaaaatcgccggtaaaagtgaaagatagtgacgggttggtggcagtggaagtacttgtagaaactagctagaaatggaagaaggaagaggggacatgcaactgcaactgtaactgcacgctcagtattttatttatttattgtattattgattttgatatttaagaggggtaaaaacaaaatgggccagtttttaaagttgaagt

SEQ ID NO: 79605 - DNA, 406 bp, Glycine max
gacgtcgcatgcacgccttcctaagcctcggaattcggttcgagattcctaagtccatttaacagcaaactgtttggaatcaaatggcaacagtgagaacaccattgaattttgattctagcaagcagagctttttgtcagttttctattgaccttctcggtggaggaatcttagtggacaaaactggagattggatcacacttatacaaaattctccaattagtaacttattgagagttgctgcttggaagaaaggctgtttaatggtcaagattgtgatgtctgggaatgcagcagtcaaaaggagtgattgggcctcattggtacaagtgtttttaacaaacagcaacagtacagagcattttgatgcatgtaagtggacaaaatcagaaccacattcctggg

SEQ ID NO: 79606 - DNA, 378 bp, Glycine max
agaactttaccgtcccttccccccgtccgtaagctcggaattcggctcgggaaaaaatttttaaaaaaaaaaaaaaaaaaaaaaaaaaaaggaaaaataaaaaaaaaaaaaaatataaaaaaaaaaaaaaaaaaaaaaatttaataaaaaaaaaaaaaaattaaaaaaaaaaaaaaaaaggggcggcccccccttattgaccccttccccccggaatttatttccggcccggtccctgagggcttcccacttttccttttatggggccgttttaaaccttggcgaaaacatggacataccttttccctggggaaaaatttaatccctataaaatcccacaaaaaaaacaacccggaactttaaagttaaaaccctggg

SEQ ID NO: 79607 - DNA, 371 bp, Glycine max
attctccctatggagtttaatcttgtggtccgtcaaaagtttttaaattttgtgaggttcattatgaagaaaagggacaaacttagttgtcaagttggaatcaacccatactccatggaatggactggtttggccaatagattactgagtaagggcaatgatattctgtgttgcgattatgctagttttgatggtttgattaccaagcaagttatgagcaagatggcagaaatgataaacagtctttgtggtggtgatgaaaaattgatgcgtgaaaggacgcacctgctgttggcttgttgttcaaggatggcaatttgtaagaaagatgtttggagagttgaatgtggaatcccttctggatttccgct

SEQ ID NO: 79608 - DNA, 371 bp, Glycine max
gatgaatgctcctgattcaaatgataatattgatttactgttgagcattgatttgttgggtttacaaggagcaggtaaagcttttccaaacaaaattgtttttgatgataagcttgtgttggctaacacacaagaattctttgatggaaattttccagtggattcttggttaccaatttttgtgaattgtctttatcctgtaagtcaattaccttcagaagctgtcgttgtaaatgttacatgtggtagtggacgtgtggtttacccaccactgcttggattagttctgcagttaacaatcgctcctcagatatcaacaaaaggattcgcacagcacttgggaaaggtaagaaaattgtttttcttactag

SEQ ID NO: 79609 - DNA, 390 bp, Glycine max
  unsure (1)..(390): unsure at all n locations
ccaggacctattgtgttttaaatccacaaaatccttttgtgttaaataggtggatgggaaaattgactttcccccagggcacttcccgaagtgttaagagaatgcctctttctatagggggaggagctggtgcaaagaatgctattctcatgaatatgccaaatgctgttctttcaatgtggagatattttgttggagatctcgtctttgaagtttctaagatgacttctccctacattaaatgtacagtctctttcttcatagcatttggaaatttggctgatgataccatcaattttgaggcttttccccacaagctggtgcagtttggagagattcagganaaagttgtattgaaattttcacaagaggaatttcttacagcttggt

SEQ ID NO: 79610 - DNA, 377 bp, Glycine max
ccccaagctcgacaatcaggtgtgttctcacgcaagtgggcaaacaccaagagttttcagtttctgcactttcttccccaaaagcgccagatctgaagcttccagagctccctagaacgaaccagcgtcaatcaacctgtccactcttttaaactacttccgtcgctcgcttaaatccgtctcttcgttcaaaatgtttggaaaacgctcctttgctagctcaaaagaccgttccggcaagataaccaagcagcaaacgacgaagagatcctttcgcgatgcttccaagcagaagcaggccgtcgccgagaagctcgacacgcgcaaggatagtccgatgatggagggctccccgagccttaccagcgccatcgtga

SEQ ID NO: 79611 - DNA, 350 bp, Glycine max
ggttcacattcttcagaagattttcctgaaaaggaagatcaagaaaaacccaaaaagattgatgccagattgagacaaagaatagatcctcaatacaatgaggttcaggctcagatggaaacaaatttggttaaaatggtctcttgatgatgttgaaactcctaaaggttccatgttggatctgaaaatttctcaatctaaaattgcacttcccaagaacacagttggaggaaccattctgcgtagtgatctattggcaaattttttgacagagggcaattttagagcaagtgttgatttgcagcgcactcatcgtattagaggaatgattaaaatggtggccacagttg

SEQ ID NO: 79612 - DNA, 387 bp, Glycine max
ctcgagccgcgagaattgtatttgcacagtccagaggaagctcgccaattgagaaggaaagctctctctcgtattgaatggctgcaaaaagctgatgtgcctaccatagcacagattgaagagttccattcgatgcagaggatgatgaatgctcctgattcaaatgataatattgatttattgttgagcattgatttgttgggtttacaaggagcaggtaaagcttttccaaacaaaattgtttttgatgataagcttgtgttggctaacacacaagaattctttgatggaaattttccagtggattcttggttaccaatttttgtgaattgtctttatcctgtaagtcaattaccttcagaagctgtcgttgtaaatgttacatgt

SEQ ID NO: 79613 - DNA, 322 bp, Glycine max
gtttccaaatggtaatagtagcattatcctcctcccttcccgccggaagaaacctcttctcctccattccaccaacgccgccaccccccaccaccgtcttcgccaccccacaaccaccaatcccaatccccaaatacccccctccccgcaaaaaaccccaaccacccccaccacagaaccccgcccttaaacaccaccgccgctccaagtaccaccggccagttccccgtgacggcggcatcatcgcctccgacggcgcggaccgcgccgtcgaaatcggggagtccggcgtgtcgtaccttgctccccgcgcgccgttcga

SEQ ID NO: 79614 - DNA, 387 bp, Glycine max
gtgggttgatttgttgaggttgagtttgatgttgatgttgttgctgccattgttgttgaccctgaaaaagcgtgggatcagagggtggttggtgttggttttgctgggaagggaatctttgatactcgtgtggaagtgcagacgtggttagagattttgtagttaggggttgggtgaagtggttgccatagataaagtgtgttcgaagcttgaaggaggaagagagcatattggttcgcgcacgctgaatctatgtgaacgtcgccattactgagtgaaacactggcagaaacaactagggtctagggagggaggacgcttttgtatttttattccaagggggacattttgattgggctactcattttgtttttgggccatgggttt

SEQ ID NO: 79615 - DNA, 160 bp, Glycine max
acctcgaaattcggttcaagaaaaaaaattaaaaaaaaaaaaaaaaaaaaaaaaaaaaggaaaaaaaaaaaaaaaaaaaaaaaaaaaaaaaaaaaagggggcggccgccaactagggacctcgtcaacccggaaataaattccgaaccggaccttgaagg

SEQ ID NO: 79616 - DNA, 375 bp, Glycine max
ggaaatttggctgatgataccatcaattttgaggcttttccccacaagctggtgcagtttggagagattcaggaaaaagttgtattgaaattttcacaagaggaatttcttacagcttggtcaactcaggtgcgtcctgcaacaactctgttggctgatgggtgtccatatttgtatgcaatggtgcatgatagttcagtgtctacaataccaggtgattttgtcattggtgtcaagttgacaaccataaacaatatgtgtgcatatgggctcaatcctggtatttcaggttctcgtcttttgggcaccattcctcagtccatttcacagcaaactgtttggaatcaaatggcaacagtgagaacaccattgaat

SEQ ID NO: 79617 - DNA, 385 bp, Glycine max
tgggtgtccatatttgtatgcaatggtgcatgatagttcagtgtctacaataccaggtgattttgtcattggtgtcaagttgacaaccataaacaatatgtgtgcatatgggctcaatcctggtatttcaggttctcgtcttttgggcaccattcctcagtccatttcacagcaaactgtttggaatcaaatggcaacagtgagaacaccattgaattttgattctagcaagcagagcttttgtcagttttctattgaccttctcggtggaggaatcttagtggacaaaactggagattggatcacacttatacaaaattctccaattagtaacttattgagagttgctgcttggaagaaaggctgtttaatggtcaagattgtg

SEQ ID NO: 79618 - DNA, 261 bp, Glycine max
aaaaaaaaaaaaaaaaaaaaaaaaaaaaaaaaaaagggaaaaaaagaaagaaagaagaaaaaaaaaaaaaaaaaaacagaaaataaattaaaagacaggaacatgaaggcgtaccaaacatttacctatagtgagtcaaattaaaagataggcgtaatcatggacatagttgttacctgtgtggggggggggtccgctttcggttctcctcccccctctttttttttcgcctcgggttttaaggctggggtgctttttgtt

SEQ ID NO: 79619 - DNA, 314 bp, Glycine max
gtttttaaattttgtgaggttcattatgaagaaaagggacaaacttagttgtcaagttggaatcaacccatactccatggaatggactggtttggccaatagattactgagtaagggcaatgatattctgtgttgcgattatgctagttttgatggtttgattaccaagcaagttatgagcaagatggcagaaatgataaacagtctttgtggtggtgatgaaaaattgatgcgtgaaaagacgcacctgctgttggcttgttgttcaaggatggcaatttgtaaaaaaagatgtttggagagttgaatgtgga

SEQ ID NO: 79620 - DNA, 379 bp, Glycine max
aaaaaaaaaaaaaaaaaaaaaaaaaaaaaaaaaaagagaaaaaaaaaaaaaaaaaaaaaaaaaaaaaaaaaaaaaaaaaaaaaaaaaaaaaaaaaaaaaaaaaaaaaaaaaaaaaaaaaaaaaaaaaaaaaaaaaaaaaaaaaaaaaaaaaaaaaaaaagggggggggcccccctttgggggcctctccccccgggatattttttggggcggggccccggggggttccccattttcccttttggggggtgttttaaggctgggggaaaatagggggataggggttcccgggggaaaaattttttccctttaaaattcccccaaaacatacagccgggattataaaagtgaaactccggggggcccaaggggggggccac

SEQ ID NO: 79621 - DNA, 372 bp, Glycine max
ggaaaaagttgtattgaaattttcacaagaggaatttcttacagcttggtcaactcaggtgcgtcctgcaacaactctgttggctgatgggtgtccatatttgtatgcaatggtgcatgatagttcagtgtctacaataccaggtgattttgtcattggtgtcaagttgacaaccataaacaatatgtgtgcatatgggctcaatcctggtatttcaggttctcgtcttttgggcaccattcctcagtccatttcacagcaaactgtttggaatcaaatggcaacagtgagaacaccattgaattttgattctagcaagcagagcttttgtcagttttctattgaccttctcggtggaggaatcttagtgga

SEQ ID NO: 79622 - DNA, 375 bp, Glycine max
gggcactttctgaagtgttaagagaatgcctctttctatagggggaggagctggtgcaaagaatgctattctcatgaatatgccaaatgctgttctttcaatgtggagatattttgttggagatctcgtctttgaagtttctaagatgacttctccctacattaaatgtacagtctctttcttcatagcatttggaaatttggctgatgataccatcaattttgaggcttttccccacaagctggtgcagtttggagagattcaggaaaaagttgtattgaaattttcacaagaggaatttcttacagcttggtcaactcaggtgcgtcctgcaacaactctgttggctgatgggtgtccatatttgtatgcaat

SEQ ID NO: 79623 - DNA, 248 bp, Glycine max
gagcattctatccagcttagtggcattggctcctcgggggcacaaggatctgctattgactcttacatatcaagcttccaccacgaggtcagatggtgcccgtttggcactgagaattaggcgaaggtgtgtaaccttaaagaaccctggcttgttgtgctccatgcaccgcggtgccgcctctgctatgcactggaggaaccatcatgtttatttggtagtaacattagctgagtcaggaatgaatg

SEQ ID NO: 79624 - DNA, 345 bp, Glycine max
tgacgttgcatgcacgcgtacagtctggctctgaattctgctcgagtgataacttaattagtgttcatgaatatgtcaagccttactttagtggttctaaattgaaaagctttctagctagtcataacatcaccattactgatggtattgacaaaactagtgcaactttgcaatttagaaagttagcagattgtgattttctcaagagaaactttaagcagatgtctaatgttttgtgggtggctcctgaggacaaggcgagtttatggtcacaacttcattatgtttcgtgtaataatctggaaatgcaagaagcttatcttgtcaatctcgtaaatgtgttac

SEQ ID NO: 79625 - DNA, 367 bp, Glycine max
caaaactagtgcaactttgcaatttagaaagttagcagattgtgattttctcaagagaaactttaagcagatgtctaatgttttgtgggtggctcctgaggacaaggcgagtttatggtcacaacttcattatgtttcgtgtaataatctggaaatgcaagaagcttatcttgtcaatctcgtaaatgtgttacgagaattgtatttgcacagtccagaggaagctcgccaattgagaaaggaaggctctctctcgtattgaatggctgcaaaaagctgatgtgcctaccatagcacagattgaagagttccattcgatgcagaggatgatgaatgctcctgattcaaatgataatatttgatttac

SEQ ID NO: 79626 - DNA, 215 bp, Glycine max
gcgggcacgcgtacgtaagctcggaattctgctcgaggtacattttttccaccttaacggcaatagagcctccgtggcacataaacctggcgctgtcgcatacatcttcaacttccaccatgatgtcatcttgttcacctctgggttagacatcatttctcaagaggttatcctctctagaaccccccctcgttgtgctttattcaccactgtgc

SEQ ID NO: 79627 - DNA, 369 bp, Glycine max
gtgagaacaccattgaattttgattctagcaagcagagcttttgtcagttttctattgaccttctcggtggaggaatcttagtggacaaaactggagattggatcacacttatacaaaattctccaattagtaacttgttgagagttgctgcttggaagaaaggctgtttaatggtcaagattgtgatgtctgggaatgcagcagtcaaaaggagtgattgggcctcattggtacaagtgtttttaacaaacagcaacagtacagagcattttgatgcatgtaagtggacaaaatcagaaccacattcctgggaattgatcttcccaatagaggtatgtggtcctaataatggttttgaaatgtggagt

SEQ ID NO: 79628 - DNA, 370 bp, Glycine max
ccgccgaccgcttccaccgcccccaatcctccctcttcgccgcccgcgtctacggcttcggccaccactccccctccaacgactacaagctcctgagcattacctacttcgtggatctccagaaacgcaccttcgattcccaggtccagctctacaccctcaaatccgactcctggaagaacctccccagcatgccctacgccctctgctgcgcccgcaccatgggcgtcttcgtctccggctccctccactggctcgtcaccagaaaactccaaccccacgaacccgatctcatcgtctcctttgacctcacgcgcgagacattccatgaagtgcctctccctgtaaccgtcaacggagatttcgacat

SEQ ID NO: 79629 - DNA, 368 bp, Glycine max
ctcaatcctggtatttcaggttctcgtcttttgggcaccattcctcagtccatttcacagcaaactgtttggaatcaaatggcaacagtgagaacaccattgaattttgattctagcaagcagagcttttgtcagttttctattgaccttctcggtggaggaatcttagtggacaaaactggagattggatcacacttatacaaaattctccaattagtaacttgttgagagttgctgcttggaagaaaggctgtttaatggtcaagattgtgatgtctgggaatgcagcagtcaaaaggagtgattgggcctcattggtacaagtgtttttaacaaacagcaacagtacagagcattttgatgcatg

SEQ ID NO: 79630 - DNA, 370 bp, Glycine max
tccattgttggaatctggtttgcaaaaagacagagggttaattgtggagtattttggaaggatgtcttacgttgctcataacgttaatcagccccaagagaaagatttgttggagggaaatttttcctttgatattaaatctcgctctagattggaaaaagtttcctctacaaaagcacaatttgttagtggaaaaaccttcaaatatgatataattggtgctggttcacattcttcagaagattttcctgaaaaggaagatcaagaaaaacccaaaaagattgatgccagattgagacaaagaatagatcctcaatacaatgaggttcaggctcagatggaaacaaatttgtttaaattgtctcttgat

SEQ ID NO: 79631 - DNA, 326 bp, Glycine max
atcaaacttcatggcatttgagtttccttattgacaatcccaaacagtctacagtttttgatattctcttgggaatctctcaagattttgaaattgctggtaatactcttatgccagctttttctgttccacaggctactgccagatcttctgaaaatgcggaatcctctgcatgatctggaatttgtgttttctttcgcttgttcgtttgtttaattcaataaaggaaattaggcatgaccctcttgttgagtatgctctgcctatttgaaaatttccacacctcttttaattgtcgtaatgatgtgtgaagtgtgtgttatttt

SEQ ID NO: 79632 - DNA, 366 bp, Glycine max
catgaatatgtcaagccttactttagtggttctaaattgaaaagctttctagctagtcataacatcaccattactgatggtattgacaaaactagtgcaactttgcaatttagaaagttagcagattgtgattttctcaagagaaactttaagcagatgtctaatgttttgtgggtggctcctgaggacaaggcgagtttatggtcacaacttcattatgtttcgtgtaataatctggaaatgcaagaagcttatcttgtcaatctcgtaaatgtgttacgagaattgtatttgcacagtccagaggaagctcgccaattgagaaggaaagctctctctcgtattgaatggctgcaaaaagctgat

SEQ ID NO: 79633 - DNA, 92 bp, Glycine max
ataaattttaaaaaaataaattatttatattttttttttttttttaaattaaaaaaaaaaaaaaaaaaaataaaaaaaataaaattataata

SEQ ID NO: 79634 - DNA, 371 bp, Glycine max
gttgacaaccataaacaatatgtgtgcatatgggctcaatcctggtatttcaggttctcgtcttttgggcaccattcctcagtccatttcacagcaaactgtttggaatcaaatggcaacagtgagaacaccattgaattttgattctagcaagcagagcttttgtcagttttctattgaccttctcggtggaggaatcttagtggacaaaactggagattggatcacacttatacaaaattctccaattagtaacttattgagagttgctgcttggaagaaaggctgtttaatggtcaagattgtgatgtctgggaatgcatcagtcaaaaggagtgattgggcctcattggtacaagtgtttttaacaa

SEQ ID NO: 79635 - DNA, 371 bp, Glycine max
attttcacaagaggaatttcttacagcttggtcaactcaggtgcgtcctgcaacaactctgttggctgatgggtgtccatatttgtatgcaatggtgcatgatagttcagtgtctacaataccaggtgattttgtcattggtgtcaagttgacaaccataaacaatatgtgtgcatatgggctcaatcctggtatttcaggttctcgtcttttgggcaccattcctcagtccatttcacagcaaactgtttggaatcaaatggcaacagtgagaacaccattgaattttgattctagcaagcagagcttttgtcagttttctattgaccttctcggtggaggaatcttagtggacaaaactggagattgga

SEQ ID NO: 79636 - DNA, 370 bp, Glycine max
gggaaatttttcctttgatattaaatctcgctctagattggaaaaagtttcctctacaaaagcacaatttgttagtggaaaaaccttcaaatatgatataattggtgctggttcacattcttcagaagattttcctgaaaaggaagatcaagaaaaacccaaaaagattgatgccagattgagacaaagaatagatcctcaatacaatgaggttcaggctcagatggaaacaaatttgtttaaattgtctcttgatgatgttgaaactcctaaaggttccatgttggatctgaaaatttctcaatctaaaattgcacttcccaagaacacagttggaggaaccattctgcgtagtgatctattggcaaat

SEQ ID NO: 79637 - DNA, 370 bp, Glycine max
agcatttggaaatttggctgatgataccatcaattttgaggcttttccccacaagctggtgcagtttggagagattcaggaaaaagttgtattgaaattttcacaagaggaatttcttacagcttggtcaactcaggtgcgtcctgcaacaactctgttggctgatgggtgtccatatttgtatgcaatggtgcatgatagttcagtgtctacaataccaggtgattttgtcattggtgtcaagttgacaaccataaacaatatgtgtgcatatgggctcaatcctggtatttcaggttctcgtcttttgggcaccattcctcagtccatttcacagcaaactgtttggaatcaaatggcaacagtgaga

SEQ ID NO: 79638 - DNA, 354 bp, Glycine max
gcacctacgtagctcggatttcgctcgaggtttattggtcaaaattgtgatgtctgggaatgcagcagtcaaaaggagtgattgggcctcattggtacaagtgtttttaacaaacagcaacagtacagagcattttgatgcatgtaagtggacaaaatcagaaccacattcctgggaattgatcttcccaatagaggtatgtggtcctaataatggttttgaaatgtggagttctgagtgggcaaatcaaacttcatggcatttgagtttccttattgacaatcccaaacagtctacagtttttgatattctcttgggaatctctcaagattttgaaattgctggtaatactct

SEQ ID NO: 79639 - DNA, 367 bp, Glycine max
ctctgttggctgatgggtgtccatatttgtatgcaatggtgcatgatagttcagtgtctacaataccaggtgattttgtcattggtgtcaagttgacaaccataaacaatatgtgtgcatatgggctcaatcctggtatttcaggttctcgtcttttgggcaccattcctcagtccatttcacagcaaactgtttggaatcaaatggcaacagtgagaacaccattgaattttgattctagcaagcagagcttttgtcagttttctattgaccttctcggtggaggaatcttagtggacaaaactggagattggattacacttatacaaaattctccaattagtaacttattgagagttgctgcttg

SEQ ID NO: 79640 - DNA, 363 bp, Glycine max
attgaccttctcggtggaggaatcttagtggacaaaactggagattggatcacacttatacaaaattctccaattagtaacttgttgagagttgctgcttggaagaaaggctgtttaatggtcaagattgtgatgtctgggaatgcagcagtcaaaaggagtgattgggcctcattggtacaagtgtttttaacaaacagcaacagtacagagcattttgatgcatgtaagtggacaaaatcagaaccacattcctgggaattgatcttcccaatagaggtatgtggtcctaataatggttttgaaatgtggagttctgagtgggcaaatcaaacttcatggcatttgagtttccttattgac

SEQ ID NO: 79641 - DNA, 364 bp, Glycine max
agaaaattcagtgctgaaacatggcttcggctactctctctgtagccaaaccagcccttcaggcaaatgggaaaggcttctctgaattctctggcctccgaagctcatcaggcttccttcccttttctagaaaatcttcagaggatttccattctgtcattgccttccagacctatgcagttggaagcagtggaggatacaagaagggtgtgacagaagcaaaactgaaggttgccataaacgggtttggaaggattggaaggaacttcttgaggtgctggcacggtcgcaaagactcccctcttgatgtcattgccatcaacgacaccggcggcgtgaaacaagcctctcaccttttcaaata

SEQ ID NO: 79642 - DNA, 335 bp, Glycine max
tgaaaatgcggaatcctctgcatgatctggaatttgtgttttctttcgcttgttcgtttgtttaattcaataaaggaaattaggcatgaccctcttgttgagtatgctctgcctatttgaaaatttccacacctcttttaattgtcttaatgatgtgtgaagtgtgtgttattttaaaaaaaaaaaaaaaaaaaaaaaaaaaaaaaaaaaaaaaaaaaaaaaaaaaaaaaaaaaaaaaaaaaaaaaaaaaaaaaaaaaaaaataataaaaaaaaaaaaaaaaaaaaaaaatggggggggcccccactattggacctcttcaccccggaattaaat

SEQ ID NO: 79643 - DNA, 354 bp, Glycine max
ggcgaagtacatcatgctcgactgcgacaacacgctcgtccagtctgagcgttttgcgttcgaggcctgcgccgacctcaccaaccaggtcatggagaggcacaacatcgatgcccgctacacagccgagtcattgctcgaggacttcgtcggccacaacttccgcggcatgctcaagggcctgcaggagaagcacaagttcaagatgcccgacgacgagatggaggactttgtcgcacaagaactcggcgccgtcactctcaagctcagccagaaggctgtcgagtgccctggcgtgactgagcagctcaccaagctcaaggaggagggctaccctatgtctgttgtctctac

SEQ ID NO: 79644 - DNA, 234 bp, Glycine max
aaaaatttaaaaaaaaaaaaaaaaaaaaaaagaaaaaaaaaataaaaaaaaaaaaaaaaaaaaaaaaaaaaaaaaaaaaaaaaaaaaaaaaaaaaaaaaaaaaaaaaaggaagagggggcggccgccgcttagggggctcgtggccccgggatttatttccggcccggtccctgcgggcggtccatttttccttttggggggtcgttttagggctgggggtgatcagggccttc

SEQ ID NO: 79645 - DNA, 366 bp, Glycine max
  unsure (1)..(366): unsure at all n locations
ctcaggaatgtgttcccaggacctattgtgttttaaatccacaaaatccttttgtgttaaataggtggatgggaaaattgactttcccccagggcacttcccgaagtgttaagagaatgcctctttctatagggggaggagctggtgcaaagaatgctattctcatgaatatgccaaatgctgttctttcaatgtggagatattttgttggagatctcgtctttgaagtttctaagatgacttctccctacattaaatgtacagtctctttcttcatagcatttggaaatttggctgatgataccatcaattttgaggcttttccccacaagctggtgcagtttggagagattcangaaaaagttg

SEQ ID NO: 79646 - DNA, 345 bp, Glycine max
gggggaggagctggtgcaaagaatgctattctcatgaatatgccaaatgctgttctttcaatgtggagatattttgttggagatctcgtctttgaagtttctaagatgacttctccctacattaaatgtacagtctctttcttcatagcatttggaaatttggctgatgataccatcaattttgaggcttttccccacaagctggtgcagtttggagagattcaggaaaaagttgtattgaaattttcacaagaggaatttcttacagcttggtcaactcaggtgcgtcctgcaacaactctgttggctgatgggtgtccatatttgtatgcaatggtgcatgat

SEQ ID NO: 79647 - DNA, 374 bp, Glycine max
gaaaattgactttcccccagggcacttcccgaagtgttaagagaatgcctctttctatagggggaggagctggtgcaaagaatgctattctcatgaatatgccaaatgctgttctttcaatgtggagatattttgttggagatctcgtctttgaagtttctaagatgacttctccctacattaaatgtacagtctctttcttcatagcatttggaaatttggctgatgataccatcaattttgaggcttttccccacaagctggtgcagtttggagagattcaggaaaaagttgtattgaaattttcacaagaggaatttcttacagcttggtcaactcaggtgcgtcctgcaacaactctgttggctgatggg

SEQ ID NO: 79648 - DNA, 375 bp, Glycine max
gaaatactgaataacccctattatagtgatactagactcttaaaataagccaacaaattataaaatgaaaaccactcgtaagatatcttctaagtcattgacacttgacaggatcattttttcccttctgtgcatggctgaatttctcttaacttttccttcatatttgacatggtggcaggaaacaaggaggaattatagttgcaggcccgggtaaaaacaacatctcataccttcacagagtatgtgcaagtgcaacaccctctattatgctccatcctttatataatatattttccttggtatttattagcttgacagcaattagttgtcaatcagcataatattcatgtcatataaacgtttttctgatat

SEQ ID NO: 79649 - DNA, 367 bp, Glycine max
cattttgatgcatgtaagtggacaaaatcagaaccacattcctgggaattgatcttcccaatagaggtatgtggtcctaataatggttttgaaatgtggagttctgagtgggcaaatcaaacttcatggcatttgagtttccttattgacaatcccaaacagtctacagtttttgatattctcttgggaatctctcaagattttgaaattgctggtaatactcttatgccagctttttctgttccacaggctactgccagatcttctgaaaatgcggaatcctctgcatgatctggaatttgtgttttctttcgcttgttcgtttgtttaattcaataaaggaaattaggcatgaccctcttgttga

SEQ ID NO: 79650 - DNA, 79 bp, Glycine max
gtattttctatgttgtattaaacattaagaattcagatacaatcgaaaaacaaaataaagttcaacaaaaggttttgtt

SEQ ID NO: 79651 - DNA, 373 bp, Glycine max
gctttagaattctatttcattttattgttgttgttgttgttgttgttgttgttattattattattattattattattattattattattattataactgttctttcttcaaattatgcgtttcacatattcagagtagttttagtgtttttcttaattgataagcaatgttattgtctttggaatctgaaactattaaaaaacgaatttcttatgtactccacatgtcaattaagaatttattcttgtgtgtaattttttttacaacattttttttactttagggtttatgttatgaatatctgatatctcaagtttttgtattttttcttagacaatgattttcttacattatttgtgagaagattatactg

SEQ ID NO: 79652 - DNA, 238 bp, Glycine max
ccatctttttctgttccacaggctactgccagatcttctgaaaatgcggaatcctctgcatgatctggaatttgtgttttctttcgcttgttcgtttgtttaattcaataaaggaaattaggcatgaccctcttgttgagtatgctctgcctatttgaaaatttccacacctcttttaattgtcgtaatgatgtgtgaagtgtgtgttattttaaaaaaaaaaaaaaatttatattgt

SEQ ID NO: 79653 - DNA, 222 bp, Glycine max
ctctagtccttaaaaaaaaaaaaaaaaaaaaaggaagaaatttacattcataaactaaaaaaaaattaatacccaaaaattaatattataattaaaacctaaaatcaataccaaattaacctaaaaattgggcggcccccatcttggggtcttctttccccgggatttaattccgtcccgaacccttttgccttcccaatttcccctataatgcgttcctta

SEQ ID NO: 79654 - DNA, 372 bp, Glycine max
gagattcaggaaaaagttgtattgaaattttcacaagaggaatttcttacagcttggtcaactcaggtgcgtcctgcaacaactctgttggctgatgggtgtccatatttgtatgcaatggtgcatgatagttcagtgtctacaataccaggtgattttgtcattggtgtcaagttgacaaccataaacaatatgtgtgcatatgggctcaatcctggcatttcaggttctcgtcttttgggcaccattcctcagtccatttcacagcaaactgtttggaatcaaatggcaacagtgagaacaccattgaattttgattctagcaagcagagcttttgtcagttttctattgaccttctcggtggaggaatc

SEQ ID NO: 79655 - DNA, 365 bp, Glycine max
atcagaaccacattcctgggaattgatcttcccaatagaggtatgtggtcctaataatggttttgaaatgtggagttctgagtgggcaaatcaaacttcatggcatttgagtttccttattgacaatcccaaacagtctacagtttttgatattctcttgggaatctctcaagattttgaaattgctggtaatactcttatgccagctttttctgttccacaggctactgccagatcttctgaaaatgcggaatcctctgcatgatctggaatttgtgttttctttcgcttgttcgtttgtttaattcaataaaggaaattaggcatgaccctcttgttgagtatgctctgcctatttgaaaatt

SEQ ID NO: 79656 - DNA, 373 bp, Glycine max
gttcccaggacctattgtgttttaaatccacaaaatccttttgtgttaaataggtggatgggaaaattgactttcccccagggcacttcccgaagtgttaagagaatgcctctttctatagggggaggagctggtgcaaagaatgctattctcatgaatatgccaaatgctgttctttcaatgtggagatattttgttggagatctcgtctttgaagtttctaagatgacttctccctacattaaatgtacagtctctttcttcatagcatttggaaatttggctgatgataccatcaattttgaggcttttccccacaagctggtgcagtttggagagattcaggaaaaagttgtattgaaattttcacaag

SEQ ID NO: 79657 - DNA, 365 bp, Glycine max
gtaaatgtgttacgagaattgtatttgcacagtccagaggaagctcgccaattgagaaggaaagctctctctcgtattgaatggctgcaaaaagctgatgtgcctaccatagcacagattgaagagttccattcgatgcagaggatgatgaatgctcctgattcaaatgataatattgatttactgttgagcattgatttgttgggtttacaaggagcaggtaaagcttttccaaacaaaattgtttttgatgataagcttgtgttggctaacacacaagaattctttgatggaaattttccagtggattcttggttaccaatttttgtgaattgtctttatcctgtaagtcaattaccttcaga

SEQ ID NO: 79658 - DNA, 367 bp, Glycine max
gacaaccataaacaatatgtgtgcatatgggctcaatcctggtatttcaggttctcgtcttttgggcaccattcctcagtccatttcacagcaaactgtttggaatcaaatggcaacagtgagaacaccattgaattttgattctagcaagcagagcttttgtcagttttctattgaccttctcggtggaggaatcttagtggacaaaactggagattggatcacacttatacaaaattctccaattagtaacttattgagagttgctgcttggaagaaaggctgtttaatggtcaagattgtgatgtctgggaatgcagcagtcaaaaggagtgattgggcctcattggtacaagtgtttttaaca

SEQ ID NO: 79659 - DNA, 358 bp, Glycine max
ggcttatatcaaatccatcttttgaacctttatatatatataccgaattagtttgagaatcacaagaataatagaatgcaacccaagttcgtcgccttaacctttttggtgttgtggtcacggtggagctttgagggtgcagtaggagaccctcaactctttttactagtatcagagtgtagtggattcggggtacccaacttgtccaacttctaccaaaatctaaacgcaagttttgcagacctgagagcacaggtgagcaacaatagcaagcactttgccacggctcaatcagtcaccggaacaagccctgtctatgctatgtttcaatgcgtcaactacctctccatcactgact

SEQ ID NO: 79660 - DNA, 335 bp, Glycine max
gaaagatctcgcaatggttaaagttaatgtagcatgtgctgctgttggcttgacatcaagttacactccaactccattgttggaatctggtttgcaaaaagacagagggttaattgtggagtattttggaaggatgtcttacgttgctcataacgttaatcagccccaagagaaagatttgttggagggaaatttttcctttgatattaaatctcgctctagattggaaaaagtttcctctacaaaagcacaatttgttagtggaaaaaccttcaaatatgatataattggtgctggttcacattcttcagaagattttcctggaaaggaagatc

SEQ ID NO: 79661 - DNA, 256 bp, Glycine max
cataatcacttgacgcgaggaacatgacaaaccacatacctgggcttctatagtgatcatatttcgtcggagaacatctcgttgaagcatctaacatgacttctaactacagaacaagctcagcctatttgaaaaccccatctggctatctggctccagataccatcaccaatggcgctctctctcactaactggaacggtctgtatagactcatggccaacggatattgcaacactcacaccaggcatgtgttcc

SEQ ID NO: 79662 - DNA, 378 bp, Glycine max
atctggttcaatgatctctgattttcatttagtaaatggattttatgtgtgataacacggttcaatattgtgttggttctcaacatgtaaatggctgatgttaattcactaaaagttgagtgattttctatccaattatgttcaaaatctctgcacaactgcgcctttgaaatctacctgtctggtctaggaatttgattcaatcttgcagaatgcaaagtacatttgcactagtagtctagtaccatgtttttctaaagttcttgttttgcatttcatggcctctttagaactgcatatgagaaaatgttagtgtaattttgccaacacagatggtgtcacttaaactctcttgatgccaaaatagaaagaaaaaga

SEQ ID NO: 79663 - DNA, 376 bp, Glycine max
tttacaaggagcaggtaaagcttttccaaacaaaattgtttttgatgataagcttgtgttggctaacacacaagaattctttgatggaaattttccagtggattcttggttaccaatttttgtgaattgtctttatcctgtaagtcaattaccttcagaagctgtcgttgtaaatgttacatgtggtagtggacgtggtggtttacccaccactgcttggattagttctgcagttaacaatcgctcctcagatatcaacaaaaggattcgcacagcacttgggaaaggtaagaaaattgtttttcttactagagttgatccttttccagtagctttactggctgttctttttggcgttaagaatgaaattctgagt

SEQ ID NO: 79664 - DNA, 353 bp, Glycine max
gcacagtgaataaaaccaactggggtgagtcggttagggttttcaagaagtggggttggtcccaggaacacgttcttatggcgtttaagaagcatccttcttgtatgctgacggaacctgatgagatagatgctgtgttcagttattgggttaaggagttaggtgggagttctttggagcttgtcaagtatcctgttatttttcggttgagccttaagaagtggattgctcccagggcttccgtcgttcggtttcttgcagcgcaaggtctattggaaaggagtggcaacatggtcgcgctgtttattatgtctgagaaaagattcctggacacgtttgtgaaacgttatgag

SEQ ID NO: 79665 - DNA, 209 bp, Glycine max
gacgatgggagcatggctacattgaccacttcattgcaagcactatggaaaacactgctttcatacatcggtggctacccttatggctctcagccaccactctccccaacaagacgctgaggctgtcaccaaggcttgagaaggatgggggtccgaagagaagcctgtgatagtaatactgcttcatcgaactgcctatcacaggcagt

SEQ ID NO: 79666 - DNA, 348 bp, Glycine max
ctcgagccgcggtggaggaatcttagtggacaaaactggagattggatcacacttatacaaaattctccaattagtaacttgttgagagttgctgcttggaagaaaggctgtttaatggtcaagattgtgatgtctgggaatgcagcagtcaaaaggagtgattgggcctcattggtacaagtgtttttaacaaacagcaacagtacagagcattttgatgcatgtaagtggacaaaatcagaaccacattcctgggaattgatcttcccaatagaggtatgtggtcctaataatggttttgaaatgtggagttctgagtgggcaaatcaaacttcatggcatttgag

SEQ ID NO: 79667 - DNA, 358 bp, Glycine max
atttttgtaagagaaatcatcctactttactgccttaggccacacaattgttacacgtgtattatatatttaaactaatcggtaacccgtgcgtacgcacgggtctttgtctaaaaaaaaaaaaaaaaaaaaaaaaaaaaaaaaaaaaaaaaaaaaaaaaaaaaaaaaaaaaaaaaaaaaaaaaaaaaaaaatctgggaatgcaacaatcaaaaaggagagattgggcctaattggtacaagaaaaaaaaataataaaaaaaaaataaagaaaataaaaatggggggggccctcccttttttgattatttctcccaagaataaattctgggccgggaccttggggggttacaattttt

SEQ ID NO: 79668 - DNA, 349 bp, Glycine max
cattgtgatatcatttgtgtcactggatggactgccactccaatgcaggatgttcaggttacaattgattggtttatttcctctcaggaatgtgttcccaggacttattgtgttttaaatccacaaaatccttttgtgttgaataggtggatggggaaactgactttcccccagggcacttcccgaagtgttaagagaatgcctctttctatagggggaggagctggtgcaaagaatgctattctcatgaatatgccaaatgctgttctttcaatgtggagatattttgttggagatctcgtctttgaagtttctaagatgacttctccctacattaaatgtacagtct

SEQ ID NO: 79669 - DNA, 359 bp, Glycine max
cttacagcttggtcaactcaggtgcgtcctgcaacaactctgttggctgatgggtgtccatatttgtatgcaatggtgcatgatagttcagtgtctacaataccaggtgattttgtcattggtgtcaagttgacaaccataaacaatatgtgtgcatatgggctcaatcctggtatttcaggttctcgtcttttgggcaccattcctcagtccatttcacagcaaactgtttggaatcaaatggcaacagtgagaacaccattgaattttgattctagcaagcagagcttttgtcagttttctattgaccttctcggtggaggaatcttagtggacaaaactggagattggatcacact

SEQ ID NO: 79670 - DNA, 362 bp, Glycine max
ctcgagccgtgaattttgattctagcaagcagagcttttgtcagttttctattgaccttctcggtggaggaatcttagtggacaaaactggagattggatcacacttatacaaaattctccaattagtaacttgttgagagttgctgcttggaagaaaggctgtttaatggtcaagattgtgatgtctgggaatgcagcagtcaaaaggagtgattgggcctcattggtacaagtgtttttaacaaacagcaacagtacagagcattttgatgcatgtaagtggacaaaatcagaaccacattcctgggaattgatcttcccaatagaggtatgtggtcctaataatggttttgaaatgtgg

SEQ ID NO: 79671 - DNA, 254 bp, Glycine max
ggaaccaaattttttattaatttatggcgtaaggggctgggcaaattggtttttctccttgaatttggtaaaaaaattattgatttttacagggaacaagtcagaggggtttttattgtacaaacataattctgggactggggggtttgattatgcaacatataattcgggttttccatcaaaggataaacccatgaacttttcaccatccacagtgtttttttctattaaaagtttatcaagctttggaagga

SEQ ID NO: 79672 - DNA, 330 bp, Glycine max
gaagttaaaagccttagccttccctacaactccaaacacaaagacatcatcatccatggctgcctccgtctccactgtcggagctgtcaacagagctcttttgaacctgaatggttctggagctggagcttcagctcccagttcagccttctttgggaccagcttgaagaaggttattgcctcaagggtccccaacagcaaggtttccggtggaagcttcaagattgttgctgtagaagagaagaaagagattgaagagacccagcagaccgacaaggacagatggaagggtcttgcctatgatatctcagacgaccaacaagacatcac

SEQ ID NO: 79673 - DNA, 336 bp, Glycine max
tcggggaattccaattccacattttcaagaaataaggaggcaaaaatgttcatatatgaattggaattatttgttttcttattaggcctatcctgaagccaaaggaaatgagatcggaattcctcggggaattccaattccacattttcaagaaataaggaggcaaaaatgttcatatatgaattggaattatttgttttcttattaggcctatcctgaagccaaaggaaatgagatcggaattcctcggggaattccaattccacattttcaagaaataaggaggcaaaaatgttcatatatgaattggaattatttgttttcttattaggccta

SEQ ID NO: 79674 - DNA, 364 bp, Glycine max
gtttttacaatccttcaaaaattttgtttctttgtgtgtgtatggtgatgataacttaattagtgttcatgaatatgtcaagccttactttagtggttctaaattgaaaagctttctagctagtcataacatcaccattactgatggtattgacaaaactagtgcaactttgcaatttagaaagttagcagattgtgattttctcaagagaaactttaagcagatgtctaatgttttgtgggtggctcctgaggacaaggcgagtttatggtcacaacttcattatgtttcgtgtaataatctggaaatgcaagaagcttatcttgtcaatctcgtaaatgtgttacgagaattgtatttgcac

SEQ ID NO: 79675 - DNA, 362 bp, Glycine max
gagttccattcgatgcagaggatgatgaatgctcctgattcaaatgataatattgatttactgttgagcattgatttgttgggtttacaaggagcaggtaaagcttttccaaacaaaattgtttttgatgataagcttgtgttggctaacacacaagaattctttgatggaaattttccagtggattcttggttaccaatttttgtgaattgtctttatcctgtaagtcaattaccttcagaagctgtcgttgtaaatgttacatgtggtagtggacgtggtggtttacccaccactgcttggattagttctgcagttaacaatcgctcctcagatatcaacaaaaggattcgcacagcact

SEQ ID NO: 79676 - DNA, 361 bp, Glycine max
ctcgagccgatttcattgcgatatcatttgtgtcactggatggactgccaccccaatgcaggatgttcaggttacaattgattggtttatttcctctcaggaatgtgttcccaggacctattgtgttttaaatccacaaaatccttttgtgttaaataggtggatgggaaaattgactttcccccagggcacttcccgaagtgttaagagaatgcctctttctatagggggaggagctggtgcaaagaatgctattctcatgaatatgccaaatgctgttctttcaatgtggagatattttgttggagatctcgtctttgaagtttctaagatgacttctccctacattaaatgtacagtc

SEQ ID NO: 79677 - DNA, 299 bp, Glycine max
tatagaatagccgtcacgtcccctccacccttacctaagctcgcaattccggtcgagattttttctgattgcccccaaatactacaccatggggacaaagtgaaccatgctaccctccacatatcacttatcagtccgtcccatcgctgattgtgtattactccttatatggacatgtaaacaccatggctagagaagtgcaccaaatggctgctgcaaaaacaactctcctagcatcactttgcttcatgagtggtgtgctgtggacttttaaaataaaaatcattcggtgactattc

SEQ ID NO: 79678 - DNA, 215 bp, Glycine max
ctcgtattgaatggctgcaaaaagctgatgtgcctaccatagcacagattgaagagttccattcaatgcataggatgatgaatgctcctgattcaaatgataatattgatttactgctgagcattgatttgttgggtttacaaggagcaggtaaagcttttccaaacaaaattgtttttgatgataagcttgtgttggctaacacacaaaaattt

SEQ ID NO: 79679 - DNA, 358 bp, Glycine max
gagcattttgatgcatgtaagtggacaaaatcagaaccacattcctgggaattgatcttcccaatagaggtatgtggtcctaataatggttttgaaatgtggagttctgagtgggcaaatcaaacttcatggcatttgagtttccttattgacaatcccaaacagtctacagtttttgatattctcttgggaatctctcaagattttgaaattgctggtaatactcttatgccagctttttctgttccacaggctactgccagatcttctgaaaatgcggaatcctctgcatgatctggaatttgtgttttctttcgcttgttcgtttgtttaattcaataaaggaaattaggcatga

SEQ ID NO: 79680 - DNA, 353 bp, Glycine max
gcttgaacagttggatcgtttcgcaatacaaggccttttacttgaaacatgggacgtcatcagcgaagcgtctaccatctcaaagcgtccaccgcgaaggaaaagtttcgcggaattcccctgcgaatggtttctcgatcaaaggccatcatcgcaggaaagcagtgcatgggttcgggcctattcaatagaggcgcgcccaaacatccaggcatcttgcttcgccagtacgctcaggagtatagtccgaagcgggtaccgagactaccttcgctcgaagcttggaagcgaatagtaaaatccgaccctcactgggcgaagttacgagaaaccatcgatataaagctcgatgt

SEQ ID NO: 79681 - DNA, 345 bp, Glycine max
gatgaatgctcctgattcaaatgataatattgatttactgttgagcattgatttgttgggtttacaaggagcaggtaaagcttttccaaacaaaattgtttttgatgataagcttgtgttggctaacacacaagaattctttgatggaaattttccagtggattcttggttaccaatttttgtgaattgtctttatcctgtaagtcaattaccttcagaagctgtcgttgtaaatgttacatgtggtagtggacgtggtggtttacccaccactgcttggattagttctgcagttaacaatcgctcctcagatatcaacaaaaggattcgcacagcacttgggaa

SEQ ID NO: 79682 - DNA, 331 bp, Glycine max
gcttgcacaaaagcaatgactatgtcatttaatccaaacccgtgttctgatgcatggagtttggaatttctgaagcgtactggatttcattgcgatatcatttgtgtcactggatggactgccaccccaatgcaggatgttcaggttacaattgattggtttatttcctctcaggaatgtgttcccaggacctattgtgttttaaatccacaaaatccttttgtgttaaataggtggatgggaaaattgactttcccccaaggcacttcccgaagtgttaagagaatgcctctttctatagggggaggagctggtgcaaaaaatgctattc

SEQ ID NO: 79683 - DNA, 358 bp, Glycine max
ctcgtctttgaagtttctaagatgacttctccctacattaaatgtacagtctctttcttcatagcatttggaaatttggctgatgataccatcaattttgaggcttttccccacaagctggtgcagtttggagagattcaggaaaaagttgtattgaaattttcacaagaggaatttcttacagcttggtcaactcaggtgcgtcctgcaacaactctgttggctgatgggtgtccatatttgtatgcaatggtgcatgatagttcagtgtctacaataccaggtgattttgtcattggtgtcaagttgacaaccataaacaatatgtgtgcatatgggctcaatcctggtatttcag

SEQ ID NO: 79684 - DNA, 287 bp, Glycine max
  unsure (1)..(287): unsure at all n locations
cggctcgagctcgagccgaatcggctcgagcagagttgagaatgtactatacatgtaacatcgtgaaattttaatttatcttttgatcagttcaagtttgtgttggtagttaacagataacaaatatattaaatgatcctttggatacgagcaaaaaaaaaaaaaaaaaaaaaaaaaaaaaaaaaaaaaaaaaaaaaaaaaaaaaaaaanaanaaaaaaaaaaaaaaaaaaaaaaaaaaaaaaaaaaaaaaaaaaaaaaaaaaaaaaaaaaaaagggggggggcccc

SEQ ID NO: 79685 - DNA, 335 bp, Glycine max
atccggcctccggtacaggaataccatccattcattctttctttcacccacacactcctttatctagagtccgagactcgatagcccactcccccagactcaaatacactcctttgctgatctattcctacgatctgagatctcgatacccccttcaataacgacatcatgctcaccaacatcttcgctgttacggcggccatggccgccaccgcttctgcttttgactgccatggcaactacttcagcttcttcaaccgcgctggacccatgagctaccagcagattgaccctgctctcttttcttggaagcagagccctcattttcactcctt

SEQ ID NO: 79686 - DNA, 165 bp, Glycine max
cagatgtgcaatgcacaacagaaatgctcaattcaacctgatctatgtcatgaagggctggtgatagatattttgccacttgtacagagagtgctgacccatcatggagcgcaagcgcgagtgaggattttggcgggggcaatggatgcatgactgttgaacata

SEQ ID NO: 79687 - DNA, 207 bp, Glycine max
ttttaattcaataaaggaaattaggcatgaccctcttgttgagtatgctctgcctatttgaaaatttccacacctcttttaattgtcgtaatgatgtgtgaagtgtgtgttattttaaaaaaaaaaaaaaaaaaaaaaaaataaaaaaaaaaaaaaaaattaaataaataaaaaaataaataaaaaaaattaaatattaaaattttt

SEQ ID NO: 79688 - DNA, 340 bp, Glycine max
tgaaggtgatgagagtcgcgagcagcagcagcagcaacgggttgagcgtggtagccaaaatgagaagaagcagcagcgtttctttgttctccgttcgagcctgccatgatctccctcatggaccttcctgcatctacgttggccccctccacaccgcaacccaagagaccctcgaagctctttactctcaggcacgggatgcatattacagcggagagcctttgattcttgatgacatgtttgatagactagagttgaagcttaagtggtatggttctaagtcagttgtcaagtatcccagatgcagtatcagaaggcattcaacatatgctgatgctga

SEQ ID NO: 79689 - DNA, 345 bp, Glycine max
ggcttttccccacaagctggtgcagtttggagagagtcaggaaaaagttgtattgaaattttcacaagaggaatttcttacagcttggtcaactcaggtgcgtcctgcaacaactctgttggctgatgggtgtccatatttgtatgcaatggtgcatgatagttcagtgtctacaataccaggtgattttgtcattggtgtcaagttgacaaccataaacaatatgtgtgcatatgggctcaatcctggtatttcaggttctcgtcttttgggcaccattcctcagtccatttcacagcaaacttgttggaatcaaatggcaacagtgaagacaccatttgaatt

SEQ ID NO: 79690 - DNA, 243 bp, Glycine max
aaaaaaaaattttaaataaataaaaaaaaaaaaaaaaaaaggaaaaaaataaagggtggaaataacttataataataataaaaaaaatttattaaaaaattaataaaaaaaaataattaaataaatattaaaaaaaaaaaaaaatggggcccccccccctcttttaatctctctcccccggaatttttttccggcccgttcctttgaggcttcccatttttcctttttgggggtctttttaaa

SEQ ID NO: 79691 - DNA, 347 bp, Glycine max
attccattctctctgtgtatttccctacctctcccttcaagatgcagatcttcgtcaagaccctcaccggcaagaccatcacccttgaggtggaaagctctgacaccatcgacaacgtcaaggccaagatccaggacaaggaaggaatccccccggaccagcaacgtctcattttcgccggaaagcaacttgaggacggccgtacccttgctgactacaacattcagaaggagagtactcttcacctcgtcctccgtctccgtggtggcatgcagatcttcgttaagacactcatcggcaagaccataaccctagaggttgaaagctccgacaccatcgataacgtc

SEQ ID NO: 79692 - DNA, 329 bp, Glycine max
agatggcagaaatgataaacagtctttgtggtggtgatgaaaaattgatgcgtgaaaggacgcacctgctgttggcttgttgttcaaggatggcaatttgtaagaaagatgtttggagagttgaatgtggaatcccttctggatttccgctcacagttatttgcaatagcatttttaatgagatgctcattagatatagctatgaaaaattactgcgccaggctaaagctccaagtatgtttttacaatccttcaaaaattttgtttctttgtgtgtgtatggtgatgataacttaattagtgttcatgaatatgtcaagccttacttt

SEQ ID NO: 79693 - DNA, 158 bp, Glycine max
ctgtggcttaatctgctcttggggatgcaacacttattgaagacgctaaccgggaagactatgactttggatgtggagagcaacgttacgaccaaatacgacaaggcgaagatgaacgataaggaaagggtatcagccactcatcaggaaaggatctt

SEQ ID NO: 79694 - DNA, 341 bp, Glycine max
caggttacaattgattggtttatttcctctcaggaatgtgttcccaggacctattgtgttttaaatccacaaaatccttttgtgttaaataggtggatgggaaaattgactttcccccagggcacttcccgaagtgttaagagaatgcctctttctatagggggaggagctggtgcaaagaatgctattctcatgaatatgccaaatgctgttctttcaatgtggagatattttgttggagatctcgtctttgaagtttctaagatgacttctccctacattaaatgtacagtctctttcttcatagcatttggaaatttggctgatgataccatcaattt

SEQ ID NO: 79695 - DNA, 165 bp, Glycine max
gtcaagccttactttagtggttctaaattgaaaagctttctagctagtcataacatcaccattactgatggtattgacaaaactagtgcaactttgcaatttagaaagttagcagattgtgattttctcaagaaaaactttaagcagatgtctaatggtttgggg

SEQ ID NO: 79696 - DNA, 357 bp, Glycine max
gccaccccaatgcaggatgttcaggttacaattgattggtttatttcctctcaggaatgtgttcccaggacctattgtgttttaaatccacaaaatccttttgtgttaaataggtggatgggaaaattgactttcccccagggcacttcccgaagtgttaagagaatgcctctttctatagggggaggagctggtgcaaagaatgctattctcatgaatatgccaaatgctgttctttcaatgtggagatattttgttggagatctcgtctttgaagtttctaagatgacttctccctacattaaatgtacagtctctttcttcatagcatttggaaatttggctgatgataccatc

SEQ ID NO: 79697 - DNA, 332 bp, Glycine max
gtacatagcacgctgatagtttagttgattgacttgtatcagctgtacagacacggagggcactttttaagggtcacgcttgatatttgatgtacagctgttccacacgaaccttaatcattaaaatttcagtcatttactagcaaaatataatagaccacttttattgttcataacataaactgaagtcatgaatatttcaagccttactttagtggttctaaatataaaagctttgtatctagtcataacatcaccatgtgctgaggtgtgttacacaaattttgccactttgcaattttacaaacttagcacattggggtttttttatg

SEQ ID NO: 79698 - DNA, 357 bp, Glycine max
atttttcctttgatattaaatctcgctctagattggaaaaagtttcctctacaaaagcacaatttgttagtggaaaaaccttcaaatatgatataattggtgctggttcacattcttcagaagattttcctgaaaaggaagatcaagaaaaacccaaaaagattgatgccagattgagacaaagaatagatcctcaatacaatgaggttcaggctcagatggaaacaaatttgtttaaattgtctcttgatgatgttgaaactcctaaaagttccatgttggatctgaaaatttcttaatctaaaattgcacttcccaagaacacagttggaggaaccattctgcgtaatgatctat

SEQ ID NO: 79699 - DNA, 354 bp, Glycine max
gtgatatttaaaagtcctccggtgcttcaagaagttggatatagcgatgatgatgtttttataaagcgtgtggttgcaaaggcaggtgatattgtggaggtaagatctctggataagagcattcatactcttgtttcgtgatgctggcttttcattgtttgttcaattccttgatgaacaaattttattgtgcattgttctatctcatggctagtgactacaactaattgttacattttcattcgtggtcctgttcttgtcttttgcttgtccctggatttgttttaccacttgcttgttttcttgtttttagagggaagtttattcttttctagttcaaaagtttggttaact

SEQ ID NO: 79700 - DNA, 348 bp, Glycine max
cacaaaggcgggaaccagtttttgtcgcagaagagcaggtacactgacaaaagtgacatctttagttttggcatgatactaggtgttttgttaactggtaaggatcctacagatccattctttggagaagcagccagtgggggaagtttgggatgttggctgagacacttgcagcaagcgggcgaggcgcacgaagctctagataagagcatgttaggggaagaaggtgaggaagatgagatgctaatggcggttaggattgctgctgcatgcctctctgatatgcctgcagataggccttctagtgatgagcttggtcacatgctaacgcaactgcacagttttttg

SEQ ID NO: 79701 - DNA, 334 bp, Glycine max
  unsure (1)..(334): unsure at all n locations
gtttttgatattctcttgggaatctctcaagattttgaaattgctggtaatactcttatgccagctttttctgttccacaggctactgccagatcttctgaaaatgcggaatcctctgcatgatctggaatttgtgttttctttcgcttgttcgtttgtttaattcaataaaggaaattaggcatgaccctcttgttgagtatgctctgcctatttgaaaatttccacacctcttttaattgtcgtaatgatgtgtgaagtgtgtgttattttaaaaaaaaaaatanaaaatatttattaaataaaaaaaaggggcggccggcgactagtgagc

SEQ ID NO: 79702 - DNA, 339 bp, Glycine max
accaggtgattttgtcattggtgtcaagttgacaaccataaacaatatgtgtgcatatgggctcaatcctggtatttcaggttctcgtcttttgggcaccattcctcagtccatttcacagcaaactgtttggaatcaaatggcaacagtgagaacaccattgaattttgattctagcaagcagagcttttgtcagttttctattgaccttctcggtggaggaatcttagtggacaaaactggagattggatcacacttatacaaaattctgcaattagtaacttgttgagagttgctgcttggaagaaaggctgtttaatggtcaagattgtgatgtc

SEQ ID NO: 79703 - DNA, 304 bp, Glycine max
ctcgagccgaatcggctcgagatgatgaatgctcctgattcaaatgataatattgatttactgttgagcattgatttgttgggtttacaaggagcaggtaaagcttttccaaacaaaattgtttttgatgataagcttgtgttggctaacacacaagaattctttgatggaaattttccagtggattcttggttaccaatttttgtgaattgtctttatcctgtaagtcaattaccttcagaagctgtcgttgtaaatgttacatgtggtagtggacgtggtgggttacccaccactgcttgga

SEQ ID NO: 79704 - DNA, 332 bp, Glycine max
atattatagatgtaataatataattctctcccagaagaatggaaaacaaatttttttaataaataatcaatcttctgtctagaaagatgtggtttagattaggaaatagcagctaacaaaaaataccagctaacaataatgtcaactaattttactctgtcatctattacaaaatttgacctgattgtcttattttgaccttcaaaggttgttgctttctcctgttagacttggagcttaagcattttcatgggctgctggaaaattagaatcaaatggcttatgattacctacatcaccatcatcatcagatgttcagaaaccggtgttgc

SEQ ID NO: 79705 - DNA, 352 bp, Glycine max
ctcttgttctgttctcagagttccattatcatgctatggttgtttttcgcccccaagttaagggtgttttatttcaaagctagtattaaagcctgactgtggagtttcaaagcctgaattgcagtttatttgtcttacttgtgatgggttggtttgactctctttcaaatcccaaatgtccaagtttgaattaaggggaactcactttacagtgatttctcatgggggtaaaccctctttgtgtgtgttaatcaagtactttttttcattctttattattatagttagtggttttgctcatacatagtgagaaggactattctatgcaagaggggaagaatattaaagggca

SEQ ID NO: 79706 - DNA, 365 bp, Glycine max
gtttggagagttgaatgtggaatcccttctggatttccgctcacagttatttgcaatagcatttttaatgagatgctcattagatatagctatgaaaaattactgcgccaggctaaagctccaagtatgtttttacaatccttcaaaaattttgtttctttgtgtgtgtatggtgatgataacttaattagtgttcatgaatatgtcaagccttactttagtggttctaaattgaaaagctttctagctagtcataacatcaccattactgatggtattgacaaaactagtgcaactttgcaatttagaaagttagcagattgtgattttctcaagagaaactttaagcagatgtctaatgtttt

SEQ ID NO: 79707 - DNA, 186 bp, Glycine max
gacctatacaagacctatgatgcacgcgtacgcagctcgaaattcggatcgaggtagcgtttttctcgatgcaagaaagcaacaacaacgctcaggaatcgaaacacagtttctgttaacactaaacacttctgtgactgaggatacaacgggatattcaagcatctctcaataacatcactgacc

SEQ ID NO: 79708 - DNA, 337 bp, Glycine max
ctttgcgcagttccctacctctcctttcaagatgcagatcttcgtcaagaccctcaccggaaagaccatcacccttgaggtggaaagctctgacaccatcgacaacgtcaaggccaagatccaggacaaggaaggaattcccccggatcagcaacgtctcatcttcgccggaaagcagctcgaggacggccgtaccctcgccgactacaacatccagaaggagtcaacccttcaccttgtccttcgtctccgtggtggcatgcagatcttcgtcaagactctcactggcaaaaccataaccctagaggtcgaaagctctgacaccattgacaacgtc

SEQ ID NO: 79709 - DNA, 372 bp, Glycine max
gctgtttactgtcgctcagattcctattgaagcgagaaggaaaggtctctgtcgcatgtaatgcatgacaaatgattatgaaacatccttcttctaatttgcactgacctaaatgaccatcctggtgagacttgctcatgactaaaatgactaacactatgactcgggaggacatacataaatataacactatgtgcgcactcaacaccggacttgacaaaacggattttgaacattatggtgtactgcttctatcacacaaatgctttgatgcaaccctttcaagatattgtcctctaccatatttggttgagagaatatgtatatgcaaatagtgaccgtgctaatcttgcaattgtaaatgatcactgg

SEQ ID NO: 79710 - DNA, 378 bp, Glycine max
aaagcacaaagcaaagctcatccttgagttaaaaaatggcagcagcttcttccatggctctctcatccccatccttggctggcaaggccgtgaagctgggcccatcagccccagaagtgggaagggtgagcatgaggaagaccgtcaccaagcaggtctcctcaggaagcccatggtacggcccagaccgagtcaagtacttgggcccattctctggcgagcccccgtcctacctaaccggtgagttcccaggcgactacggctgggacactgctgggctttccgcagacccagaaaccttcgccaagaaccgtgaactcgaagtgatccactccaggtgggccatgctcggagccttgggctgcgtcttcccggagt

SEQ ID NO: 79711 - DNA, 100 bp, Glycine max
ggctgtcaaacttaacaccgtggactacagcttctatccagctcccctttggttaaaaatttataaaccttctttgggctggattacaacctactacaac

SEQ ID NO: 79712 - DNA, 295 bp, Glycine max
tgacaatcccaaacagtctacagtttttgatattctcttgggaatctctcaagattttgaaattgctggtaatactcttatgccagctttttctgttccacaggctactgccagatcttctgaaaatgcggaatcctctgcatgatctggaatttgtgttttctttcgcttgttcgtttgtttaattcaataaaggaaattaggcatgaccctcttgttgagtatgctctgcctatttgaaaatttccacacctcttttaattgtcgtaatgatgtgtgaagtgtgtgttatttt

SEQ ID NO: 79713 - DNA, 356 bp, Glycine max
attcaactcgatcacttggaatttagacaagagggggtctgtcttcctttgtacctggatcacaatactggtcaaacatgtgttgagttttcttgagcacagtgaaacaaatactctactgggagccactctaccgagtttcataagaacttaaaatagtcggcacaattaatagttgtgctgtatgagtgttacaagacagttcaaaacactgcaggtgtatgtacttgcaagtttgcacttttaagtttggagatagtacgtgtgtagtatttatgctcgactcgagtaaatgagtaataaataaagtttcaaggtacaacttacatcataaaaaaaaaaaaaaaaaagggcgg

SEQ ID NO: 79714 - DNA, 373 bp, Glycine max
  unsure (1)..(373): unsure at all n locations
tcgtctttgaagtttctaagatgacttctccctacattaaatgtacagtctctttcttcatagcatttggaaatttggctgatgataccatcaattttgaggcttttccccacaagctggtgcagtttggagagattcaggaaaaagttgtattgaaattttcacaagaggaatttcttacagcttggtcaactcaggtgcgtcctgcaacaactctgttggctgatgggtgtccatatttgtatgcaatggtgcatgatagttcagtgtctacaataccaggtgattntgtcattggtgtcaagttgacaaccataaacaatatgtgtgcatatgggctcaatccttgtatttcaggttctcgtcttttggg

SEQ ID NO: 79715 - DNA, 369 bp, Glycine max
acgagaattgtatttgcacagtccagaggaagctcgccaattgagaaggaaagctctctctcgtattgaatggctgcaaaaagctgatgtgcctaccatagcacagattgaagagttccattcgatgcagaggatgatgaatgctcctgattcaaatgataatattgatttactgttgagcattgatttgttgggtttacaaggagcaggtaaagcttttccaaacaaaattgtttttgatgataagcttgtgttggctaacacacaagaattctttgatggaaattttccagtggattcttggttaccaatttttgtgaattgtctttatcctgtaagtcaattaccttcagaagctgtcgttgtaaa

SEQ ID NO: 79716 - DNA, 319 bp, Glycine max
ctcgatatatattgggagcggtcgccctgaccaccggcatttgggctgatagggacataaagaccatccgatcgtgaggcaaactggccaacatgcccatttatgcatgctatgcctgacaaagtgagagaagatttaagggcaacccaacatgtaaggctacggatggtgactcctgctaacaagcttgatgttgactgaagagatctatacccgactagttttatgatagcagctgctacaatggactctggcgtaacatctaagacgacaacatcgcctgctctgctactgacaaccactgtgacaccaatgcgac

SEQ ID NO: 79717 - DNA, 212 bp, Glycine max
ctaaacccgggaaagggtcacaaatcttcaacttacggcgcatgctgacttattgttagaccaatgtggcaagaacggctgagactcgggcactattgctatgtccaaaagggctgcggacgaaatggatgatgaccactaactggcacatgctgatctatcgggcagaagcaactctgaatatatttctgcatgatgggagactaaatcag

SEQ ID NO: 79718 - DNA, 374 bp, Glycine max
cctgattcaaatgataatattgatttactgttgagcattgatttgttgggtttacaaggagcaggtaaagcttttccaaacaaaattgtttttgatgataagcttgtgttggctaacacacaagaattctttgatggaaattttccagtggattcttggttaccaatttttgtgaattgtctttatcctgtaagtcaattaccttcagaagctgtcgttgtaaatgttacatgtggtagtggacgtggtggtttacccaccactgcttggattagttctgcagttaacaatcgctcctcagatatcaacaaaaagattcgcacagcacttgggaaaggtaagaaaattgtttttcttactagagttgatccttt

SEQ ID NO: 79719 - DNA, 347 bp, Glycine max
ggaaaaagttgtattgaaattttcacaagaggaatggcttacagcttggtcaactcaggtgcgtcctgcaacaactctgttggctgatgggtgtccatatttgtatgcaatggtgcatgatagttcagtgtctacaataccaggtgattttgtcattggtgtcaagttgacaaccataaacaatatgtgtgcatatgggctcaatcctggtatttcaggttctcgtcttttgggcaccattcctcagtccatttcacagcaaactgtttggaatcaaatggcaacagtgagaacaccattgaattttgattctagcaagcagagcttttgtcagttttctattgacc

SEQ ID NO: 79720 - DNA, 292 bp, Glycine max
tcctaataatggttttgaaatgtggagttctgagtgggcaaatcaaacttcatggcatttgagtttccttattgacaatcccaaacagtctacagtttttgatattctcttgggaatctctcaagattttgaaattgctggtaatactcttatgccagctttttctgttccacaggctactgccagatcttctgaaaatgcggaatcctctgcatgatctggaatttgtgttttctttcgcttgttccgttgtttaattcaataaaggaaattatgcatgacccttttgttg

SEQ ID NO: 79721 - DNA, 326 bp, Glycine max
ccacgatttctcgcttcagccacccgactcattcatctggacagagaccctgacgctttgctagaaacgacaaactacagtttgctcgcagcaacacaacacccaacacccacatcttcatatatccatcaacaatatggtgtcaagagcagtttccatgggccttcgtgcctggcagttgatctgcgccatcctcgtcaccgcgttcatgggtaacaacattgcgcgcgcttactcgggtgtgcactccatcgacaactactcgctctatgtcggtgactggtggatgttcactttgctgtacttcctacctacatacgggatca

SEQ ID NO: 79722 - DNA, 369 bp, Glycine max
ggagcaggtaaagcttttccaaacaaaattgtttttgatgataagcttgtgttggctaacacacaagaattctttgatggaaattttccagtggattcttggttaccaatttttgtgaattgtctttatcctgtaagtcaattaccttcagaagctgtcgttgtaaatgttacatgtggtagtggacgtggtggtttacccaccactgcttggattagttctgcagttaacaatcgctcctcagatatcaacaaaaggattcgcacagcacttgggaaaggtaagagaattgtttttcttactaaagttgatccttttccagagactttactggttgttctttttggcgttaagaatgaaattctgagt

SEQ ID NO: 79723 - DNA, 287 bp, Glycine max
aatggatcttaaagttttcttataaatgtcgaggcacgtttttaacacgagtacctccgtccagctgtagtggtctgggatcaagtgggatactaccaatcttcaaaagacccgaagactcggcaaatgcattaactttgacttgcagttgagcctactgggataacatcgagcggatccttattagcagcactgatgccagatggtgcagtctccgcctgttttggggtaatagtaactgagccgatcttaaggtcaggagctagatgtcccttctaaaaagaacc

SEQ ID NO: 79724 - DNA, 372 bp, Glycine max
acaaaatcagaaccacattcctgggaattgatcttcccaatagaggtatgtggtcctaataatggttttgaaatgtggagttctgagtgggcaaatcaaacttcatggcatttgagtttccttattgacaatcccaaacagtctacagtttttgatattctcttgggaatctctcaagattttgaaattgctggtaatactcttatgccagctttttctgttccacaggctactgccagatcttctgaaaatgcggaatcctctgcatgatctggaatttgtgttttctttcgcttgttcgtttgtttaattcaataaaggaaattaggcatgaccctcttgttgagtatgctctgcctatttgaaaatttc

SEQ ID NO: 79725 - DNA, 246 bp, Glycine max
aaaaatttattttaaaaaaaaaaaaaaaaaaaaaaaaggggggaaaaaaaaaaaaagggaaaaaaaaaaaaaaaaaaaaaaaaaaatgggagaccggcatttattgatgatccttaacccgtaaacttattagaagaccggggcttgccggctttccgggtttccctttagtgggtggtttttttggtgtgtttgtttttttggttggggcctttttctttttttgatcctttttttctctccctt

SEQ ID NO: 79726 - DNA, 352 bp, Glycine max
gtcaattttctattgaccttctcggtggaggaattttagtggacaaaactggagattggatcacacttatacaaaattctccaattagtaacttgttgagagttgctgcttggaagaaaggctgtttaatggttaaaattgtgatgtctgggaatgcagcagtcaaaaggagtgattgggcctcattggtacaagtgtttttaacaaacagcaacagtacagagcatttcgatgcatgtaagtggacaaaatcggaaccacattcctgggaattgatcttcccaatagaggtatgtggtcctaataatggttttgaaatgtggagttctgagtgggcaaatcaaacttcatg

SEQ ID NO: 79727 - DNA, 177 bp, Glycine max
gaaaatttccacacctcttttaattgtcgtaatgatgtgtgaagtgtgtgttattttaaaaaaaaaaaaaaaaaaaaaaaaaaaaaaaaaaaaaaaaaaaaaaaaaaaaaaaaaaaaaaaaaaaaaaaaaaaaaaaaaaaaaaaaaaaaaaaaaaaaaaaaaaaaaaaaaaacaaaa

SEQ ID NO: 79728 - DNA, 358 bp, Glycine max
ggtcaagattgtgatgtctgggaatgcagcagtcaaaaggagtgattgggcctcattggtacaagtgtttttaacaaacagcaacagtacagagcattttgatgcatgtaagtggacaaaatcagaaccacattcctgggaattgatcttcccaatagaggtatgtggtcctaataatggttttgaaatgtggagttctgagtgggcaaatcaaacttcatggcatttgagtttccttattgacaatcccaaacagtctacagtttttgatattctcttgggaatctctcaagattttgaaattgctggtaatactcttatgccagctttttctgttccacaggctactgccagatct

SEQ ID NO: 79729 - DNA, 349 bp, Glycine max
caaaaattttgtttctttgtgtgtgtatggtgatgataacttaattagtgttcatgaatatgtcaagccttactttagtggttctaaattgaaaagctttctagctagtcataacatcaccattactgatggtattgacaaaactagtgcaactttgcaatttagaaagttagcagattgtgattttctcaagagaaactttaagcagatgtctaatgttttgtgggtggctcctgaggacaaggcgagtttatggtcacaacttcattatgtttcgtgtaataatctggaaatgcaagaagcttatcttgtcaatctcgtaaatgtgttacgagaattgtatttgcac

SEQ ID NO: 79730 - DNA, 372 bp, Glycine max
gcagcagtcaaaaggagtgattgggcctcattggtgcaagtgtttttaacaaacagcaacagtacagagcattttgatgcatgtaagtggacaaaatcagaaccacattcctgggaattgatcttcccaatagaggtatgtggtcctaataatggttttgaaatgtggagttctgagtgggcaaatcaaacttcatggcatttgagtttccttattgacaatcccaaacagtctacagtttttgatattctcttgggaatctctcaagattttgaaattgctggtaatactcttatgccagctttttctgttccacaggctactgccagatcttctgaaaatgcggaatcctctgcatgatctggaaattgt

SEQ ID NO: 79731 - DNA, 302 bp, Glycine max
caatatgtgtgtatatgggctcaatcctggtatttgaggtgtctcgtcttttgggcaccattcctcagtccatttcacagcaaactgtttggaatcaaatggcaacagtgagaacaccattgaattttgattctagcaagcagagcttttgtcagttttctattgaccttctcggtggaggaatcttagtggacaaaactggagattggatcacacttatacaaaattcttcaattagtaacttgttgagagttgctgcttggaagaaaagctgtttaatggtcaaaattgtgatgttttgg

SEQ ID NO: 79732 - DNA, 377 bp, Glycine max
caaccataaacaatatgtgtgcatatgggctcaatcctggtatttcaggttctcgtcttttgggcaccattcctcagtccatttcacagcaaactgtttggaatcaaatggcaacagtgagaacaccattgaattttgattctagcaagcagagcttttgtcagttttctattgaccttctcggtggaggaatcttagtggacaaaactggagattggatcacacttatacaaaattctccaattagtaacttgttgagagttgctgcttggaagaaaggctgtttaatggtcaagattgtgatgtctgggaatgcagcagtcaaaaggagtgattgggcctcattggtacaagtgtttttaacaaacagcaacagt

SEQ ID NO: 79733 - DNA, 159 bp, Glycine max
gttgttttagtaaactaggaattaaatgtgccaagaggcgtgcttgtatttactggtggggttgatatgagtggattaatccgaccttttagggagaaaggagaaatggattattggaagaagtttttgagtgttgccaagatcaatataactcctggg

SEQ ID NO: 79734 - DNA, 346 bp, Glycine max
caaacatacaaactctcctctcacaagggcaagacagtaattccacattcccaacaacggagccaaccaaccaaaacctttctccttcttcctcttcctccccaattcccattcagatccgattaagccttaaccctaattcccctcccaccacccaccaacaatgggggacttcaacctggcgctggtgatcgtggcgatcgtggtgtgcgtcatcgtgttcctcttcaacgtctacctcctcgtcaacttccagcaccccgacgacgtcaaccaggcttacttccccaaattcgtcgtcgtcctcggcctctccgtcgctgccatcttcatcctcatgctcccc

SEQ ID NO: 79735 - DNA, 376 bp, Glycine max
gagagattcaggaaaaagttgtattgaaattttcacaagaggaatttcttacagcttggtcaactcaggtgcgtcctgcaacaactctgttggctgatgggtgtccatatttgtatgcaatggtgcatgatagttcagtgtctacaataccaggtgattttgtcattggtgtcaagttgacaaccataaacaatatgtgtgcatatgggctcaatcctggtatttcaggttctcgtcttttgggcaccattcctcagtccatttcacagcaaactgtttggaatcaaatggcaacagtgagaacaccattgaattttgattctagcaagcagagcttttgtcagttttctattgaccttctcggtggaggaatctt

SEQ ID NO: 79736 - DNA, 222 bp, Glycine max
aaaaaaaaaaaaaaaaaaaaaaaaaaaaaaaaaaaaaaaaaaaaaaaaaaaaaaaaaaaaaaaaaaaaaaaaaaaaaaaaaaaaaaaaaaaaaaaaaaaaaaaaaaaaaaaaaaaaaggggggggccgccccttagggggctcgtccccccgggatttaattccggcccggtccctgggggggtcccagttttccttttggggggtcgttttagagctgggg

SEQ ID NO: 79737 - DNA, 348 bp, Glycine max
  unsure (1)..(348): unsure at all n locations
gtggagttctgagtgggcaaatcaaacttcatggcatttgagtttccttattgacaatcccaaacagtctacagtttttgatattctcttgggaatctctcaagattttgaaattgctggtaatactcttatgccagctttttctgttccacaggctactgccagatcttctgaaaatgcggaatcctctgcatgatctggaatttgtgttttctttcgcttgttcgtttgtttaattcaataaaggaaattaggcatgaccctcttgttgagtatgctctgcctatttgaaaatttccacacctcttttaattgtcgtaatgatgtgtgaagtgtgtgttattttnt

SEQ ID NO: 79738 - DNA, 372 bp, Glycine max
gccaaatgctgttctttcaatgtggagatattttgttggagatctcgtctttgaagtttctaagatgacttctccctacattaaatgtacagtctctttcttcatagcatttggaaatttggctgatgataccatcaattttgaggcttttccccacaagctggtgcagtttggagagattcaggaaaaagttgtattgaaattttcacaagaggaatttcttacagcttggtcaactcaggtgcgtcctgcaacaactctgttggctgatgggtgtccatatttgtatgcaatggtgcatgatagttcagtgtctacaataccaagtgattttgtcattggtgtcaagttgacaaccataaacaatatgtg

SEQ ID NO: 79739 - DNA, 90 bp, Glycine max
aaaaaaaaaaaaaaaaagagaaaaaaaaaaaaaaaaaaaaaaaaaaaaaaaaaaaaaaaaaaaaaaaaaaaaaaaaaaaaaaaaaaaaaa

SEQ ID NO: 79740 - DNA, 243 bp, Glycine max
gtttggagagttgaatgtggaatcccttctggatttccgctcacagttatttgcaatagcatttttaatgagatgctcattagatatagctatgaaaaattactgcgccaggctaaagctccaagtatgtttttacaatccttcaaaaattttgtttctttgtgtgtgtatggtgatgataacttaattagtgttcatgaatatgtcaagccttactttagtggttctaaattgaaaagcttt

SEQ ID NO: 79741 - DNA, 273 bp, Glycine max
  unsure (1)..(273): unsure at all n locations
aaatactatttgggtactccttgcatgacatcatatatgaaagagcagtgaagactgactatggaacatgtattgcattcatataggactactaactttgcgatttttatgattgatcatgtgaattgcggtgagtttctatgatgactagtgtaactataattgcagtgagtatgaatctgcttgactatgaatattaatatatttgcttgggatatactccgcnnaaaaaaaaaataaaaatgattaataattaatattaacattccctat

SEQ ID NO: 79742 - DNA, 277 bp, Glycine max
gcttggtcaactcaggtgcgtcctgcaacaactctgttggctgatgggtgtccatatttgtatgcaatggtgcatgatagttcagtgtctacaataccaggtgattttgtcattggtgtcaagttgacaaccataaacaatatgtgtgcatatgggctcaatcctggtatttcaggttctcgtcttttgggcaccattcctcagtccatttcacagcaaactgtttggaatcaaatggcaacagtgagaacaccattgaattttgattctagcaagc

SEQ ID NO: 79743 - DNA, 320 bp, Glycine max
gacaagatggctgaattccctttggcctcttgtgaggattctctcttccctgtccgtggaacttcatcaacttccgctcagtgctcttctggttcgccaaagagtgctgactgcttaatcacgaaggacaagtgtacaatccaagttgtggacaaggccagtgtcccttccagtggcagtgatgcttgtcctgctgctccagtttcacatggcaatgaatgctctgaacatgctgtttcaagccactcctctgctgagtctagcaggcacaggtttgacacctcgtcttaccagcaacgtgcataggccttggaaggttt

SEQ ID NO: 79744 - DNA, 377 bp, Glycine max
ctattgaccttctcggtggaggaatcttagtggacaaaactggagattggatcacacttatacaaaattctccaattagtaacttattgagagttgctgcttggaagaaaggctgtttaatggtcaagattgtgatgtctgggaatgcagcagtcaaaaggagtgattgggcctcattggtacaagtgtttttaacaaacagcaacagtacagagcattttgatgcatgtaagtggacaaaatcagaaccacattcctgggaattgatcttcccaatagaggtatgtggtcctaataatggttttgaaatgtggagttctgagtgggcaaatcaaacttcatggcatttgagtttccttattgacaatcccaaacag

SEQ ID NO: 79745 - DNA, 304 bp, Glycine max
ggcttttccccacaagctggtgcagtttggagagattcaggaaaaagttgtattgaaattttcacaagaggaatttcttacagcttggtcaactcaggtgcgtcctgcaacaactctgttggctgatgggtgtccatatttgtatgcaatggtgcatgatagttcagtgtctacaataccaggtgattttgtcattggtgtcaagttgacaaccataaacaatatgtgtgcatatgggctcaatcctggtatatcaagttttcgtattttgggcaccatttcttcagccatttcacagcaaact

SEQ ID NO: 79746 - DNA, 358 bp, Glycine max
aaataaaaaaaaaaaaaaaaaaaaaaaaaaaagggaaaaaaaaaaaaaaaaaaaaaaaaaaaaaaaaaaaaaaaaaaataaaaaaaaaaaaaaaaaaaaaaaaaaaaaaaaaaaaaaacaaaaaaaaaaaaaaaaaaaaaaaatggggccgccccccccctttatcctcctttaccccggatatttattccgccccgttccctttgggctcccctcttttcctttttaggactcttatttacccttggggtttcacgggtcttacttttttcctggggaaaattttttcccctctaaatttcctcctaaaataataatccgcaaaaattaaaatgtaaaccctgggtgccccaattgg

SEQ ID NO: 79747 - DNA, 350 bp, Glycine max
ggtggttacatttccgaataccattgtgcagggggaaccagacatgaattcaaggtttcagcttttgagtaccactaccaatggtgattttgttcaagggaaagatctcgcaatggttaaagttaatgtagcatgtgctgctgttggcttgacatcaagttacactccaactccattgttggaatctggtttgcaaaaagacagagggttaattgtggagtattttggaaggatgtcttacgttgctcataacgttaatcagccccaagagaaagatttgttggagggaaatttttcctttgatattaaatctcgctctagattggaaaaagttttctctacaaaagcac

SEQ ID NO: 79748 - DNA, 415 bp, Glycine max
atagaagagcatgacgtcccatgcacgcgtacgttagctattcggttcgggtcacaacttcattatgtttcgtgtaataatctggaaatgcaagaagcttatcttgtcaatctcgtaaatgtgttacgagaattgtatttgcacagtccagaggaagctcgccaattgagaaggaaagctctctctcgtattgaatggctgcaaaaagctgatgtgcctaccatagcacagattgaagagttccattcgatgcagaggatgatgaatgctcctgattcaaatgataatattgatttactgttgagcattgatttgttgggtttacaaggagcaggtaaagcttttccaaacaaaattgtttttgatgataagcttgtgttggctaacacacaagaattctttgatggaaattttc

SEQ ID NO: 79749 - DNA, 345 bp, Glycine max
tttaacaataggtcatttatgaagatctcccatcaaacttgtgtgcaataagagactatatcgagaacaagacagcatcaaatattttggaagcatgtaagcagaatacaaattcagggcaacaaactgttccatctggctttgaagatgatgacagctattgttcagctgaagacttgtctgattgcaatgctcaaagctcatctcaacaaagaccaagagttccaggcttacaaagagatattgaagtcctaaaatctgaacttctgaaattcattgcagaacatggacaggaaggatttatgccaatgaggaagcaacttcgtttgcatggaaaagtggata

SEQ ID NO: 79750 - DNA, 357 bp, Glycine max
gttccattcgatgcagaggatgatgaatgctcctgattcaaatgataatattgatttactgttgagcattgatttgttgggtttacaaggagcaggtaaagcttttccaaacaaaattgtttttgatgataagcttgtgttggctaacacacaagaattctttgatggaaattttccagtggattcttggttaccaatttttgtgaattgtctttatcctgtaagtcaattaccttcagaagctgtcgttgtaaatgttacatgtggtagtggacgtggtggtttacccaccactgcttggattagttctgcagttaacaatcgctcctcagatatcaacaaaaagattcgcacagc

SEQ ID NO: 79751 - DNA, 355 bp, Glycine max
caaaatccttttgtgttaaataggtggatgggaaaattgactttcccccagggcacttcccgaagtgttaagagaatgcctctttctatagggggaggagctggtgcaaagaatgctattctcatgaatatgccaaatgctgttctttcaatgtggagatattttgttggagatctcgtctttgaagtttctaagatgacttctccctacattaaatgtacagtctctttcttcatagcatttggaaatttggctgatgataccatcaattttgaggcttttccccacaagctggtgcagtttggagagattcaggaaaaagttgtattgaaattttcacaagaggaatttctta

SEQ ID NO: 79752 - DNA, 365 bp, Glycine max
ctcgagccggtctctttcttcatagcatttggaaatttggctgatgataccatcaattttgaggcttttccccacaagctggtgcagtttggagagattcaggaaaaagttgtattgaaattttcacaagaggaatttcttacagcttggtcaactcaggtgcgtcctgcaacaactctgttggctgatgggtgtccatatttgtatgcaatggtgcatgatagttcagtgtctacaataccaggtgattttgtcattggtgtcaagttgacaaccataaacaatatgtgtgcatatgggctcaatcctggtatttcaggttctcgtcttttgggcaccattcctcagtccatttcacagcaaac

SEQ ID NO: 79753 - DNA, 282 bp, Glycine max
gcatgacaaatcatcgtacacaataccaggggctaaagagattcatcgccagttgacaaccaataacaactggcgctcatatgggcttgatcgggggattaaaagttctaggctgtagcgcacaatgcctgcgtgcattatacaagaagactgatgggaatgactgggctacacagcgaacactattagcttttgcatttagcgagcagagcttaagacagaatgctatcgaccttatcgggggcggaaactgatgatatagaactggaaagatgatcacac

SEQ ID NO: 79754 - DNA, 360 bp, Glycine max
caaatggcaacagtgagaacaccattgaattttgattctagcaagcagagcttttgtcagttttctattgaccttctcggtggaggaatcttagtggacaaaactggagattggatcacacttatacaaaattctccaattagtaacttgttgagagttgctgcttggaagaaaggctgtttaatggtcaagattgtgatgtctgggaatgcagcagtcaaaaggagtgattgggcctcattggtacaagtgtttttaacaaacagcaacagtacagagcattttgatgcatgtaagtggacaaaatcagaaccacattcctgggaattgatcttcccaatagaggtatgtggtcctaat

SEQ ID NO: 79755 - DNA, 358 bp, Glycine max
gcttttgtcagttttctattgaccttctcggtggaggaatcttagtggacaaaactggagattggatcacacttatacaaaattctccaattagtaacttgttgagagttgctgcttggaagaaaggctgtttaatggtcaagattgtgatgtctgggaatgcagcagtcaaaaggagtgattgggcctcattggtacaagtgtttttaacaaacagcaacagtacagagcattttgatgcatgtaagtggacaaaatcagaaccacattcctgggaattgatcttcccaatagaggtatgtggtcctaataatggttttgaaatgtggagttctgagtgggcaaatcaaacttcatg

SEQ ID NO: 79756 - DNA, 358 bp, Glycine max
gttgagagttgctgcttggaagaaaggctgtttaatggtcaagattgtgatgtctgggaatgcagcagtcaaaaggagtgattgggcctcattggtacaagtgtttttaacaaacagcaacagtacagagcattttgatgcatgtaagtggacaaaatcagaaccacattcctgggaattgatcttcccaatagaggtatgtggtcctaataatggttttgaaatgtggagttctgagtgggcaaatcaaacttcatggcatttgagtttccttattgacaatcccaaacagtctacagtttttgatattctcttgggaatctctcaagattttgaaattgctggtaatactcttatg

SEQ ID NO: 79757 - DNA, 360 bp, Glycine max
gtgcggaccgttctggaccgccgcacgtcgaagggaacagggtcaactaacacgtttacctgatcccctccaatcaagacagtccgccaacgggtctacaaccgcccaccatgttccgtctcataaccaacctgggaatcgcgcccctgaccgtcttgctcgtcgctacgtacttctccttcttctgcgccgggatgcttgaggtcatccgccccatccccatcatacagaacaaggtctctgcggtgaacctgaagccctcgcacagggtggccatctggtctcgtttcttccaacgggctgcggttgctataatcggcgctgcattgaccaacaccgtggtgtccttctacactgcac

SEQ ID NO: 79758 - DNA, 359 bp, Glycine max
gtcaatctcgtaaatgtgttacgagaattgtatttgcacagtccagaggaagctcgccaattgagaaggaaagctctctctcgtattgaatggctgcaaaaagctgatgtgcctaccatttcgcagattgaagagttacattcgatgcagaggatgatgaatgctcctgattcaaatgataatattgatttactgttgagcattgatttgttgggtttacaaggagcaggtaaagcttttccaaacaaaattgtttttgatgataagcttgtgttggctaacacataagaattctttgatggaaattttccagtggattcttggttaccaatttttgcgaattgactctatcctgtaag

SEQ ID NO: 79759 - DNA, 354 bp, Glycine max
gtcactggatggactgccaccccaatgcaggatgttcaggttacaattgattggtttatttcctctcaggaatgtgttcccaggacctattgtgttttaaatccacaaaatccttttgtgttaaataggtggatgggaaaattgactttcccccagggcacttcccgaagtgttaagagaatgcctctttctatagggggaggagctggtgcaaagaatgctattctcatgaatatgccaaatgctgttctttcaatgtggagatattttgttggagatctcgtctttgaagtttctaagatgacttctccctacattaaatgtacagtctctttcttcatagcatttggaaat

SEQ ID NO: 79760 - DNA, 360 bp, Glycine max
ttacaatccttcaaaaattttgtttctttgtgtgtgtatggtgatgataacttaattagtgttcatgaatatgtcaagccttactttagtggttctaaattgaaaagctttctagctagtcataacatcaccattactgatggtattgacaaaactagtgcaactttgcaatttagaaagttagcagattgtgattttctcaagagaaactttaagcagatgtctaatgttttgtgggtggctcctgaggacaaggcgagtttatggtcacaacttcattatgtttcgtgtaataatctggaaatgcaagaagcttatcttgtcaatctcgtaaatgtgttacgagaattgtatttgcac

SEQ ID NO: 79761 - DNA, 140 bp, Glycine max
  unsure (1)..(140): unsure at all n locations
gtcccatattcacatgctattttaatttgcttacaatgtgcagagccaatgtctgactgtnccttataacaaaacatcatttactatggggggtaacaattgagatgtgaaccatcattttaaaccccttattatgttgg

SEQ ID NO: 79762 - DNA, 357 bp, Glycine max
tgagattttattactacagtcagaacttgacgagtggaagaatcgagcgaatttcgcaagagaaaaattccaaagcctcaagagagaatcaaattaccaggtaattaataggcgataagaattgagggctgtccaagcaattgagacactttagtacaacatttccttcttttttctttttacagttgcttgtgttgaagaatgaaaaggaatcaatagcagaggctgaaactagagctcgcaatgtgattcacagtttacataaaaagctaaaccacttgcaggttttggatttgactatttgaatttccagtacttgatagttgtgccattttttgagtatcaacctacttgggt

SEQ ID NO: 79763 - DNA, 355 bp, Glycine max
cattttgatgcatgtaagtggacaaaatcagaaccacattcctgggaattgatcttcccaatagaggtatgtggtcctaataatggttttgaaatgtggagttctgagtgggcaaatcaaacttcatggcatttgagtttccttattgacaatcccaaacagtctacagtttttgatattctcttgggaatctctcaagattttgaaattgctggtaatactcttatgccagctttttctgttccacaggctactgccagatcttctgaaaatgcggaatcctctgcatgatctggaatttgtgttttctttcgcttgttcgtttgtttaattcaataaaggaaattaggcatga

SEQ ID NO: 79764 - DNA, 351 bp, Glycine max
atcaaatggcaacagtgagaacaccattgaattttgattctagcaagcagagcttttgtcagttttctattgaccttctcggtggaggaatcttagtggacaaaactggagattggatcacacttatacaaaattctccaattagtaacttgttgagagttgctgcttggaagaaaggctgtttaatggtcaagattgtgatgtctgggaatgcagcagtcaaaaggagtgattgggcctcattggtacaagtgtttttaacaaacagcaacagtacagagcattttgatgcatgtaagtggacaaaatcagaaccacattcctgggaatttatcttcccaatagaggtat

SEQ ID NO: 79765 - DNA, 352 bp, Glycine max
caacaactctgttggctgatgggtgtccatatttgtatgcaatggtgcatgatagttcagtgtctacaataccaggtgattttgtcattggtgtcaagttgacaaccataaacaatatgtgtgcatatgggctcaatcctggtatttcaggttctcgtcttttgggcaccattcctcagtccatttcacagcaaactgtttggaatcaaatggcaacagtgagaacaccattgaattttgattctagcaagcagagcttttgtcagttttctattgaccttctcggtggaggaatcttagtggacaaaactggagattggatcacacttatacaaaattctccaattagtaa

SEQ ID NO: 79766 - DNA, 356 bp, Glycine max
ggaaatgcaagaagcttatcttgtcaatctcgtaaatgtgttacgagaattgtatttgcacagtccagaggaagctcgccaattgagaaggaaagctctctctcgtattgaatggctgcaaaaagctgatgtgcctaccatagcacagattgaagagttccattcgatgcagaggatgatgaatgctcctgattcaaatgataatattgatttactgttgagcattgatttgttgggtttacaaggagcaggtaaagcttttccaaacaaaattgtttttgatgataagcttgtgttggctaacacacaagaattctttgatggaaattttccagtggattcttggttaccaattt

SEQ ID NO: 79767 - DNA, 353 bp, Glycine max
aatccttcaaaaattttgtttctttgtgtgtgtatggggatgataacttaattagtgttcatgaatatgtcaagccttactttagtggttctaaattgaaaagctttctagctagtcataacatcaccattactgatggtattgacaaaactagtgcaactttgcaatttagaaagttagcagattgtgattttctcaagagaaactttaagcagatgtctaatgttttgtgggtggctcctgaggacaaggcgagtttatggtcacaacttcattatgtttcgtgtaataatctggaaatgcaagaagcttatcttgtcaatctcgtaaatgtgttacgagaattgtatttg

SEQ ID NO: 79768 - DNA, 317 bp, Glycine max
agcatttggaaatttggctgatgataccatcaattttgaggcttttccccacaagctggtgcagtttggagagattcaggaaaaagttgtattgaaattttcacaagaggaatttcttacagcttggtcaactcaggtgcgtcctgcaacaactctgttggctgatgggtgtccatatttgtatgcaatggtgcatgatagttcagtgtctacaataccaggtgattttgtcattggtgtcaagttgacaaccataaacaatatgtgtgcatatgggctcaatcctggtatttcaggttctcgtattttgggcacca

SEQ ID NO: 79769 - DNA, 363 bp, Glycine max
tgcttacagagtcccacggcttgattatgtttcgcaatttctttgctaccccttctgcctgaattagctattatagttcctttgcctttatagcctcaatggaagaagaggactttgaatgctgcctgaaagcattgaaaggaattagggttattgctgcgggtgatctcattcagcctcctagatgctgtcttccctactcttgaccagagtttctcagttgttggatattccaagtactcctccaagtcaaggaccacttggaatgcttgctctaaaagtctatccttgcttgatgcaatgatctctttgggtctctattgtatatcttcaacacctgtctaccaaactttaactaaacct

SEQ ID NO: 79770 - DNA, 358 bp, Glycine max
ggaaatgcaagaagcttatcttgtcaatctcgtaaatgtgttacgagaattgtatttgcacagtccagaggaagctcgccaattgagaaggaaagctctctctcgtattgaatggctgcaaaaagctgatgtgcctaccatagcacagattgaagagttccattcgatgcagaggatgatgaatgctcctgattcaaatgataatattgatttactgttgagcattgatttgttgggtttacaaggagcaggtaaagcttttccaaacaaaattgtttttgatgataagcttgtgttggctaacacacaagaattctttgatggaaattttccagtggattcttggttaccaattttt

SEQ ID NO: 79771 - DNA, 350 bp, Glycine max
attggtgtcaagttgacaaccataaacaatatgtgtgcatatgggctcaatcctggtatttaggttctcgtcttttgggcaccattcctagtccatttcacagcaaactgtttggaatcaaatggcaacagtgagaacaccattgaattttgattctagcaagcagagcttttgtcagttttctattgaccttctcggtggaggaatcttagtggacaaaactggagattggatcacacttatacaaaattctccaattagtaacttgttgagagttgctgcttggaagaaaggctgtttaatggtcaagattgtgatgtctgggaatgcagcagtcaaaaggagtgatt

SEQ ID NO: 79772 - DNA, 354 bp, Glycine max
cgccaattgagaaggaaagctctctctcgtattgaatggctgcaaaaagctgatgtgcctaccatagcacagattgaagagttccattcgatgcagaggatgatgaatgctcctgattcaaatgatgatattgatttactgttgagcattgatttgttgggtttacaaggagcaggtaaagcttttccaaacaaaattgtttttgatgataagcttgtgttggctaacacacaagaattctttgatggaaattttccagtggattcttggataccaatttttgtgaattgtctttatcctgtaagacaattaccttcagaagctgtcattgtcaatgttacatgtggtagtgga

SEQ ID NO: 79773 - DNA, 360 bp, Glycine max
cgtgaaaggacgcacctgctgttggcttgttgttcaaggatggcaatttgtaagaaagatgtttggagagttgaatgtggaatcccttctggatttccgctcacagttatttgcaatagcatttttaatgagatgctcattagatatagctatgaaaaattactgcgccaggctaaagctccaagtatgtttttacaatccttcaaaaattttgtttctttgtgtgtgtatggtgatgataacttaattagtgttcatgaatatgtcaagccttactttagtggttctaaattgaaaagctttctagctagtcataacatcaccattactgatggtattgacaaaactagtgcaactttt

SEQ ID NO: 79774 - DNA, 363 bp, Glycine max
caagttgacaaccataaacaatatgtgtgcatatgggctcaatcctggtatttcaggttctcgtcttttgggcaccattcctcagtccatttcacagcaaactgtttggaatcaaatggcaacagtgagaacaccattgaattttgattctagcaagcagagcttttgtcagttttctattgaccttctcggtggaggaatcttagtggataaaactggagattggatcacacttatacaaaattctccaattagtaacttattgagagttgctgcttggaagaaaggctgtttaatggtcaagattgcgatgtctgggaatgcagcagtcaaaacgagtgattgggcctcattggtacaagt

SEQ ID NO: 79775 - DNA, 348 bp, Glycine max
gttttctattgaccttctcggtggaggaatcttagtggacaaaactggagattggatcacacttatacaaaattctccaattagtaacttattgagagttgctgcttggaagaaaggctgtttaatggtcaagattgtgatgtctgggaatgcagcagtcaaaaggagtgattgggcctcattggtacaagtgtttttaacaaacagcaacagtacagagcattttgatgcatgtaagtggacaaaatcagaaccacattcctgggaattgatcttcccaatagaggtatgtggtcctaataatggttttgaaatgtggagttctgagtgggcaaatcaaacttcatg

SEQ ID NO: 79776 - DNA, 351 bp, Glycine max
atttgcaatagcatttttaatgagatgctcattagatatagctatgaaaaattactgcgccaggctaaagctccaagtatgtttttacaatccttcaaaaattttgtttctttgtgtgtgtatggtgatgataacttaattagtgttcatgaatatgtcaagccttactttagtggttctaaattgaaaagctttctagctagtcataacatcaccattactgatggtattgacaaaactagtgcaactttgcaatttagaaagttagcagattgtgattttctcaagagaaactttaagcagatgtctaatgttttgtgggtggctcctgaggacaaggcgagtttatgg

SEQ ID NO: 79777 - DNA, 376 bp, Glycine max
atagaagagcacggaccatgcacgcgcacgtacgctcgcaattcggttcgagggcgcctagattgcaataacgcgtaccctttcaaccgcgcaatgcatctacaaaccacaattctcaattctgccactttgttcattctacctgatcatatctttcaccattctcttattttctaaccatatttttggtgtctcaatttccaagggacatggggaggcttaggtgtcacttttataccatatttcttcgaaaccttgtgttaaaaagtgtgtccttctgaacttgaataacaatttggacttttttgtagattcatacgcacatactccgtgctggattggcactggttttacttgctccatcgctcttcacata

SEQ ID NO: 79778 - DNA, 207 bp, Glycine max
acgttcggaattcagctcgaggctctgcctatttaaaaatttccacacctcttttaattgtcgtaatgatgtgtgaagtgtgtgttattttaaaaaaaaaaaaaaaaaaaaaaaaaaaaaaaaaaaaaaaaaaaaaaaaaagaaaaaaaaaactaaaagaaggggaaatatagtgaatgcaaaagaaaaacaaaagctcccgatttc

SEQ ID NO: 79779 - DNA, 257 bp, Glycine max
gcaaaatccagatcgtcattgctgatttatcccaaggaagaaattatttggagggaggttttaattattgaatttaccaggggaattatttgaagcaagaacttcaaggtaccctggagaattttgccaaattaaaaaaatgagtctgctgaattggaaaaccttctaactttgtcaaacaaactgtgcaaagagctcgagctcgaggtctataagctcttatctgacctcactgaggttaatgaatctacacagaa

SEQ ID NO: 79780 - DNA, 360 bp, Glycine max
gagaagaagaaacttaatcgatcatcacttcacttcactaatacatcatggcagacgagacccagaacaagtatgagagctctgaggttgaggtccaggatcgtggtgtttttgactttctcggtaagaaaaaggatgaagaagacaagcctcatcctcaggaggaggtcatcgccaccgagtttcaaaaagtcactgtctcagaccaaggagagaacaagcacagcctcttagaaaagcttcaccgatctgacagcagctctagctcttcaagtgaggaggaaggagaagatggagagaaaaggaagaagaagaagaaggaaaagaaagggctgaaagagaagatcgaggagaaaatag

SEQ ID NO: 79781 - DNA, 350 bp, Glycine max
aatggaaacataagatgttcttgttggatgagactcgtattacatcatgcgtaatgttaccacttccatgttatttgctcgcacaagaagttcatatggagtgcaaccactgattgtaagtaggcagcagattcaaaatcaggttgttaggccattccttgactgttgcagagtagtgtcaatactttgttgaggtgacttaccactgtgatgaaacacaaatcctttctgaatagatttggttgtttccatgacagtacaccatgccaatgagttcaagttgaaaaactgtagataccattcatggacttcagaaatcagatcattcacttacaattttgacaaaatgc

SEQ ID NO: 79782 - DNA, 205 bp, Glycine max
gtcaactttttggcatcaaatgtcaacacatttaacaccagagtgtttagattctagcgggaacagttataacacctttgactttggctttttgcatggagggatcttgttggacttatatggacgattgtggcatgctgattcataatagaccaaactggatcttgggtcgagcttatgctaagttaaacagttatttactggt

SEQ ID NO: 79783 - DNA, 230 bp, Glycine max
aagctatgacgtcatgcacctactagctgaattcggtcgaggtcacaaggtccccactggtcctatgttgaaagacctgtctttttactgagcttttatattgccaactggggactttttggcagattctactggggcttcagaattaggatgggatggggtgggctgggtatctgctctacgttatgcatatatccctgttactcaaatcatcctttttttaagggagg

SEQ ID NO: 79784 - DNA, 312 bp, Glycine max
gttttaactccgaagacttggaggtggaggcgggcgcggaattgcatagagatgggagtcaaagatggcagcaataacaatgttttaatttcattggtagcatctgagtttgatggtttcaacgaagaaagaaaacaaaacccccatccttattcacctctctccctcccagagaggattgtaatcattcaaatctaataataatggcagcagtgtcaggaggaggagggactgatatatggaacgcccacacggctattgcgatggtgcaattatttaacggaggctatcacgtcatcaccaaagatgcac

SEQ ID NO: 79785 - DNA, 330 bp, Glycine max
aaaaaattaaaaaaaaaaaaaaaaaaaaaaaaaaaaaaaaaaaaaaaaaaaaaaaaaaaaaaaaaaaaaaaaaaaaaaaaaaaaaaaaaaaaaaaaaaaaaaaaaaaaaaaaaaaaaaaaaaaaaaaaaaaaaaaaaaaaaaaaaaaaaaaaaaaaaaaaaaaaatgggggccccccccattaaggggcttttcccccccgaaattttttttgggccggttcttttggggtgccccaatttttctttttggggggttttttaaaaattgggcaaaatagggggatggggtttttcctggaaaaaattttttcccttcaaatttcccccct

SEQ ID NO: 79786 - DNA, 282 bp, Glycine max
cacaaatttatttaaacaactccatacattttccagggggaatgacaaaaaagtgttgacaaatcctgaatttaactccaacttatgccatatcattaaatcaatatctaactccaacctgtttagaccaggcatgcttgcacacaggacaaccttctttttcctcaggatgcagaacgttatgcgagtgagcgtcccccactcgctcacgtcttttctaatcaccaagacagtacatatgctctagaagcacctaattgaacacattcagcacctcattaa

SEQ ID NO: 79787 - DNA, 304 bp, Glycine max
gataccatcaattttgaggcttttccccacaagctggtgcagtttggagagattcaggaaaaagttgtattgaaattttcacaagaggaatttcttacagcttggtcaactcaggtgcgtcctgcaacaactctgttggctgatgggtgtccatatttgtatgcaatggtgcatgatagttcagtgtctacaataccaggtgattttgtcattggtgtcaagttgacaaccataaacaatatgtgtgcatatgggctcaatcctggtatttcaggttctcgtcttttgggcaccattcctcagt

SEQ ID NO: 79788 - DNA, 342 bp, Glycine max
acttgttgagagttgctgcttggaagaaaggctgtttaatggtcaagattgtgatgtctgggaatgcagcagtcaaaaggagtgattgggcctcattggtacaagtgtttttaacaaacagcaacagtacagagcattttgatgcatgtaagtggacaaaatcagaaccacattcctgggaattgatcttcccaatagaggtatgtggtcctaataatggttttgaaatgtggagttctgagtgggcaaatcaaacttcatggcatttgagtttccttattgacaatcccaaacagtctacagtttttgatattctcttgggaatctctcaagattttgaaa

SEQ ID NO: 79789 - DNA, 348 bp, Glycine max
agcaagcagagcttttgtcagttttctattgaccttctcggtggaggaatcttagtggacaaaactggagattggatcacacttatacaaaattctccaattagtaacttgttgagagttgctgcttggaagaaaggctgtttaatggtcaagattgtgatgtctgggaatgcagcagtcaaaaggagtgattgggcctcattggtacaagtgtttttaacaaacagcaacagtacagagcattttgatgcatgtaagtggacaaaatcagaaccacattcctgggaattgatcttcccaatagaggtatgtggtcctaataatggttttgaaatgtggagttctgag

SEQ ID NO: 79790 - DNA, 352 bp, Glycine max
ctcgagccgcgagagctaagtaatgttgaaagtgatggcggtgtaactgacctaagttttggatagatcagccgcgagatgatcgagctgcagggcggcgaaatcggcgtcagatctcgacctggaaaaggcgctacattcgccttctacatcgccgctcgcactgcagatgcgccgccgccgtccgtgcaacaaagtctctcttctccggcgctaatgtcgggaagacgaccgtcggagaataccagagccagatattccatcctggtggtggaagacaacctggtcaaccagaagatcttgagaatgcagctccaaaagctcggccacgaggtgcacgtcgtctgccacg

SEQ ID NO: 79791 - DNA, 351 bp, Glycine max
gcaaactgtttggaatcaaatggcaacagtgagaacaccattgaattttgattctagcaagcagagcttttgtcagttttctattgaccttctcggtggaggaatcttagtggacaaaactggagattggatcacacttatacaaaattctccaattagtaacttattgagagttgctgcttggaagaaaggctgtttaatggtcaagattgtgatgtctgggaatgcagcagtcaaaaggagtgattgggcctcattggtacaattgtttttaacaaacagcaacagtacagagcattttgatgcatgtaagtggacaaaatcagaaccacattcctgggaattgatctt

SEQ ID NO: 79792 - DNA, 177 bp, Glycine max
ctcgagccgaagtcaattaccttcaaaagctgtcgctggagatgttacatgtggtagcggacgtggcggtttacccaccactgttggcattatcggtggaggaaacattcgctactaaaatgtcaacagaaggacacttacacaacttggtaaaggtaagaaaatagtgtgagttac

SEQ ID NO: 79793 - DNA, 343 bp, Glycine max
cagcaaactgtttggaatcaaatggcaacagtgagaacaccattgaattttgattctagcaagcagagcttttgtcagttttctattgaccttctcggtggaggaatcttagtggacaaaactggagattggatcacacttatacaaaattctccaattagtaacttgttgagagttgctgcttggaagaaaggctgtttaatggtcaagattgtgatgtctgggaatgcagcagtcaaaaggagtgattgggcctcattggtacaagtgtttttaacaaacagcaacagtacagagcattttgatgcatgtaagtggacaaaatcagaaccacattcctggg

SEQ ID NO: 79794 - DNA, 67 bp, Glycine max
aaaaaaaaaaaaaaaaaaaaaaaaaaaaaaaaagaaaaaaaaaaaaaaaaaaaaaaaaaaaaaaaaa

SEQ ID NO: 79795 - DNA, 350 bp, Glycine max
atccgttccaaaccacataagcttcaacaaaggtatcggcttgtccaatttaacaggttttcattcgcttaatcggttttcgttttttcaatttctgatttcgatctatgcctgcggttaatgtaatgatttcaatttgtaattggagatagaagtatgctgattttttttttttgttttctttttacataaaaaggtaaaatttaggaatgtgatgagtttgaagtttctcgattggaaatctttctgtgtggcatttataatttgcattttaaggatgtttgcattgcctctgaggatgagttgactgaaaaaagatgtggttcttttgagttgttctattcggagaa

SEQ ID NO: 79796 - DNA, 343 bp, Glycine max
ctcattttatatagctatgaaaaattactgcgccaggctaaagctccaagtatgtttttacaatccttcaaaaattttgtttctttgtgtgtgtatggtgatgataacttaattagtgttcatgaatatgtcaagccttactttagtggttctaaattgaaaagctttctagctagtcataacatcaccattactgatggtattgacaaaactagtgcaactttgcaatttagaaagttagcagattgtgattttctcaagagaaactttaagcagatgtctaatgttttgtgggtggctcctgaagacaaggcgagtttatggtcacaacttcattatgttt

SEQ ID NO: 79797 - DNA, 245 bp, Glycine max
aaaaaattaaaaaaaaaaaaaaaaaaaaaaaaagaaaaaaaaaaaaaaaagggggaaaaaaaaaaaaaaaaaaaaaaaaaaaaaaaaaaaaaaaaaaaaaaaaaaaaaaaaaaaaaaaaaaaaaaaataaaaaaaaaaaataaaaaaaaaataggggcccccctcccttttctgttctcttcccccctatattttttttcttgcctaatccttgggtttttctttctttcctattgtttagtttt

SEQ ID NO: 79798 - DNA, 322 bp, Glycine max
aaaaaataaaaaaaaaaaaaaaaaaaaaaaaaaggggaaaaaaaaaaaaaaaaaaaaaaaaaaaaaaaaaaaaaaaaaaaaaaaaaaaaaaaaaaaaaaaaaaaaaaaaaaaaaaaaaaaaaaaaaaaaaaaaaaaaaataaaaaaaaaggggcccccccccccttttgaattttttccccccgaaattattttcccccctgtccctttggggtaccccctttttttcttttttggggtttttttaatctctccctaaattatgctataggtgtggcgggggggaaaatttttttccctttcacatttcccccataaatctt

SEQ ID NO: 79799 - DNA, 350 bp, Glycine max
cggctcgaggggaggagctggtgcaaagaatgctattctcatgaatatgccaaatgctgttctttcaatgtggagatattttgttggagatcttgtctttgaagtttctaagatgacttctccctacattaaatgtacagtctctttcttcatagcatttggaaatttggctgatgataccatcaattttgaggcttttccccacaagctggtgcagtttggagagattcaggaaaaagttgtattgaaattttcacaagaggaatttcttacagcttggtcaactcaggtgcgtcctgcaacaactctgttggctgatgggtgtccatatttgtatgcaatggtgcatg

SEQ ID NO: 79800 - DNA, 206 bp, Glycine max
ccagattcacttcaattcttgcctaagcatatgccgaaactcacgctgtgggtgctcgaacttcccaattcccacgcttccaccatcatctcttcaaccactcgaactgtgcacaatgatgcatcccctcatacgttgaaacactcagaaaaaccctttcgtgttaggaaaggggaggaaactaccacaacaccagcgacttgtcc

SEQ ID NO: 79801 - DNA, 343 bp, Glycine max
gtgtctcttttgtattgaatatgcctctttatttcacatgttaatgtagtggtcaaatgttaaatccaatgaccaaaaagactatggtaatgcctaatcagtgaggttggttttgtttctcagatatgatgcattgctagtttctagaatgatgtaagtaattggtgagcagatggtagatttgattattgagcctttatttacttctctgatgaatgtttaatgactcaatgctattaaatttgtgtaatctgctgtgtcttactaagtaatttcatttattttttgtgacagaaacatatccaagcccagtagattttggctttggcatcattgaacgatg

SEQ ID NO: 79802 - DNA, 353 bp, Glycine max
ctgaggacaaggcgagtttatggtcacaacttcattatgtttcgtgtaataatctggaaatgcaagaagcttatcttgtcaatctcgtaaatgtgttacgagaattgtatttgcacagtccagaggaagctcgccaattgagaaggaaagctctctctcgtattgaatggctgcaaaaagctgatgtgcctaccatagcacagattgaagagttccattcgatgcagaggatgatgaatgctcctgattcaaatgataatattgatttactgttgagcattgatttgttgggtttacaaggagcaggtaaagcttttccaaacaaaattgtttttgatgataagcttgtgttg

SEQ ID NO: 79803 - DNA, 351 bp, Glycine max
gaaaaattgatgcgtgaaaggacgcacctgctgttggcttgttgttcaaggatggcaatttgtaagaaagatgtttggagagttgaatgtggaatcccttctggatttccgctcacagttatttgcaatagcatttttaatgagatgctcattagatatagctatgaaaaattactgcgccaggctaaagctccaagtatgtttttacaatccttcaaaaattttgtttctttgtgtgtgtatggtgatgataacttaattagtgttcatgaatatgtcaagccttactttagtggttctaaattgaaaagctttctagctagtcataacatcaccattactgatggtatt

SEQ ID NO: 79804 - DNA, 353 bp, Glycine max
gcgtgattggtctttgccaacagatgctgcaaaagatgaataaggttgaatattggggtgggttgaatccccgggttgaaccgtatcgcacatgacggctcttataagcgtgtctagctctctcacacatgtcccaactgtacgacggaggacatgttgcgttactgccaccaatccttctccgctccgagggcgtggtgcttcaccttctgaaggcgagagctccttcagactgcgctcttcttagctatgagcgggaatgcgtgcttctagctgcttgttaactcttttaattcaatactactaataagctaccacgctttcaaaataacagcaacaaacacttgcttact

SEQ ID NO: 79805 - DNA, 218 bp, Glycine max
aatttatttaataataaaaaaaaaataaaataggctaaaaattaaagctggggagaaaaaaaattaaattaaatcaaaacataaaaaaaacatctcaacttcaaaactattataatggggcggccctcctactttttactttttttccccgttattttattccctcccggatccttaaggttacccaatttttccctttatttattcacttataactt

SEQ ID NO: 79806 - DNA, 350 bp, Glycine max
caaatggcaacagtgagaacaccattgaattttgattctagcaagcagagcttttgtcagttttctattgaccttctcggtggaggaatcttagtggacaaaactggagattggatcacacttatacaaaattctccaattagtaacttgttgagagttgctgcttggaagaaaggctgtttaatggtcaagattgtgatgtctgggaatgcagcagtcaaaaggagtgattgggcctcattggtacaagtgtttttaacaaacagcaacagtacagagcattttgatgcatgtaagtggacaaaatcagaaccacattcctgggaattgatcttcccaatagaggtatg

SEQ ID NO: 79807 - DNA, 346 bp, Glycine max
cgcacctgctgttggcttgttgttcaaggatggcaatttgtaagaaagatgtttggagagttgaatgtggaatcccttctggatttccgctcacagttatttgcaatagcatttttaatgagatgctcattagatatagctatgaaaaattactgcgccaggctaaagctccaagtatgtttttacaatccttcaaaaattttgtttctttgtgtgtgtatggtgatgataacttaattagtgttcatgaatatgtcaagccttactttagtggttctaaattgaaaagctttctagctagtcataacatcaccattactgatggtattgacaaaactagtgcaac

SEQ ID NO: 79808 - DNA, 340 bp, Glycine max
gatccttttattgagctaattcaaaaccttgccactcacatattgcccggtggtgatgatagtcttgggaccgatgtacgagtgatggctgaggactgtttcgatagagttgatcaggaggattacacgagctaagtatccaccagtgcgtcccttaccggtctgtagcggtgatgactataacgcaagaattgctatagcctcgtctgatgaatatacttatgaccattctcacacaaatggtcaaaacgtacataagcgtttggtctctgccgatgataataatatgacacatgttccagctaccaatctcaagagacggttacaacgatctaatacc

SEQ ID NO: 79809 - DNA, 344 bp, Glycine max
atgagatgctcattagatatagctatgaaaaattactgcgccaggctaaagctccaagtatgtttttacaatccttcaaaaattttgtttctttgtgtgtgtatggtgatgataacttaattagtgttcatgaatatgtcaagccttactttagtggttctaaattgaaaagctttctagctggtcataatatcaccattactgatggtattgacaaaactagtgcaactttgcaatttagaaagttagcagattgtgattttctcaagagaaactttaagcagatgtctaatgttttgtgggtggctcctgaggataaggcgagtttatggtcacaacttcat

SEQ ID NO: 79810 - DNA, 347 bp, Glycine max
atttccgctcacagttatttgcaatagcatttttaatgagatgctcattagatatagctatgaaaaattactgcgccaggctaaagctccaagtatgtttttacaatccttcaaaaattttgtttctttgtgtgtgtatggtgatgataacttaattagtgttcatgaatatgtcaagccttactttagtggttctaaattgaaaagctttctagctagtcataacatcaccattactgatggtattgacaaaactagtgcaactttgcaatttagaaagttagcagattgtgattttctcaagagaaactttaagcagatgtctaatgttttgtgggtggctcctg

SEQ ID NO: 79811 - DNA, 346 bp, Glycine max
ctcgagccgctcgagccgtgtcaagccttactttagtgggtctaaattgaaaagctttctagctagtcataacatcaccattactgatggtattgacaaaactagtgcaactttgcaatttagaaagttagcagattgtgattttctcaagagaaactttaagcagatgtctaatgttttgtgggtggctcctgaggacaaggcgagtttatggtcacaacttcattatgtttcgtgtaataatctggaaatgcaagaagcttatcttgtcaacctcgtaaatgtgttacgagaattgtatttgcacagtccagaggaagctcgccaattgagaaggaaagctctc

SEQ ID NO: 79812 - DNA, 354 bp, Glycine max
gtgatgataacttaattagtgttcatgaatatgtcaagccttactttagcggttctaaatagaaaagctttctagctagtcataacatcaccattactgatggtattgacaaaactagtgcaactttgcaatttataaagttagcagattagtgattttctgaagagaaactttaagcagatgtctaatgttttgggggtggctcctgaggacaaggcgagtttatggtcacaacttcattatgttgcgtgtaataatctggaaatgcaagatgcttatcttgtcaacctcgtaaatgtgttacgagaattgtatttgcacagttcaaaggaagcttcccaattgagaaagaaa

SEQ ID NO: 79813 - DNA, 347 bp, Glycine max
ggtgtcaagttgacaaccataaacaatatgtgtgcatatgggctcaatcctggtatttcaggttctcgtcttttgggcaccattcctcagtccatttcacagcaaactgtttggaatcaaatggcaacagtgagaacaccattgaattttgattctagcaagcagagcttttgtcagttttctattgaccttctcggtggaggaatcttagtggacaaaactggagattggatcacacttatacaaaattctccaattagtaacttgttgagagttgctgcttggaagaaaggctgtttaatggtcaagattgtgatgtctgggaatgcagcagtcaaaaggagtga

SEQ ID NO: 79814 - DNA, 350 bp, Glycine max
gtgggggaccaaggagcattgcttttttcaggtttaactgccgagccaagcttatccagaaaaaagcagtgggggaccaaggagcattgctgcatttttttcaaaaaggtgcttgcccccgactggggaaggttcgaaacctggtgaaacttcaccactgccacccctgaaatcatcttctgccattgatgaacgacctcaaagttcatataacatataatctctgacatcttgttgcccagtggcattttactattttcagatttcttagtaccgactctttaaaagttggagatagtgtgggttgcacttgatgctcgtttaccactgtaggcaagttcctgattacc

SEQ ID NO: 79815 - DNA, 357 bp, Glycine max
gttgggtttacaaggagcaggtaaagcttttccaaacaaaattgtttttgatgataagcttgtgttggctaacacacaagaattctttgatggaaattttccagtggattcttggttaccaatttttgtgaattgtctttatcctgtaagtcaattaccttcagaagctgtcgttgtaaatgttacatgtggtagtggacgtggtggtttacccaccactgcttggattagttctgcagttaacaatcgctcctcagatatcaacaaaaggattcgcacagcacttgggaaaggtaagaaaattgtttttcttactagagttgatccttttccagtagctttactggctgttctttt

SEQ ID NO: 79816 - DNA, 260 bp, Glycine max
gctgactttacagacaaacatcaacgccttctccatcttgtgtgatgaacattttcaaatacctactggaccatgatttgaactggggcggaatattctacgactcagagaaggcatgttatttgtccgagaccaggagccccccctcagacaacaacctgattcttgcggcaacacggactaagcagcgagcgctataacaagtctttatagatacaactgtcaccatttaccgatgagtgcgctgcacgtacatgaac

SEQ ID NO: 79817 - DNA, 347 bp, Glycine max
gttctgcagagagagagagagagagtttcagaatttagagagagaattttattttgttttttcggttatctttattggtttctcttacatcgtttttgtaggcgctgaggaagaagctttggcagcataactttgttggggagcatgcattgcaacttctgctcgagtttttctttgctgaagtttggacaagccaactgttacgggactacaaagagttttaaagactaagtaggaaatcctaattagtagggatgcctaaacaaagaacatttatgatactgtacagatacgacagacactattcaaagatgaaaaaatgtgaggtgacaagggcaaataaaggg

SEQ ID NO: 79818 - DNA, 355 bp, Glycine max
gcatttggaaatttggctgatgataccatcaattttgaggcttttccccacaagctggtgcagtttggagagattcaggaaaaagttgtattgaaattttcacaagaggaatttcttacagcttggtcaactcaggtgcgtcctgcaacaactctgttggctgatgggtgtccatatttgtatgcaatggtgcatgatagttcagtgtctacaataccaggtgattttgtcattggtgtcaagttgacaaccataaacaatatgtgtgcatatgggctcaatcctggtatttcaggttctcgtcttttgggcaccattcctcagtccatttcacagcaaactgtttggaatcaaa

SEQ ID NO: 79819 - DNA, 272 bp, Glycine max
taagctcggaattcggcgttaggtcttttttacttcttctaggttaagtgacagctgctggaataagaagtggcgactttcaaatggtagatcctatgtcacgttttgtgggtggctcctcacgacaaggccagggtatggtcacaactcctttatttttccgctcataatctgggaaagcaagaagctgaacctgtcgatctccctcatgaggggccgtgcttgtcttaatctcatattggttggagcaatctgcttgagcagtttttatg

SEQ ID NO: 79820 - DNA, 343 bp, Glycine max
caaaatccttttgtgttaaataggtggatgggaaaattgactttcccccagggcacttcccgaagtgttaagagaatgcctctttctatagggggaggagctggtgcaaagaatgctattctcatgaatatgccaaatgctgttctttcaatgtggagatattttgttggagatctcgtctttgaagtttctaagatgacttctccctacattaaatgtacagtctctttcttcatagcatttggaaattttgctgatgataccatcaattttgaggcttttccccacaagctggtgcagtttggagagattcaggaaaaagttgtattgaaattttcacaag

SEQ ID NO: 79821 - DNA, 347 bp, Glycine max
taaaaacccagattgtcaattttgttctttttaattttgaatacatatttttatccaaaaaacaattgttgttattatgtttttgctgtctcattagtggaagttatatagttcactagagatagcatctggatgctacagttgcggttgactgccatgtcaaatgacaacagttattggtttccaagaattgataataactgctgatggagaaacagattactgagtttcaataccaaaataccaatgttgcaaatcaatttaaacaacaacgacccttactaacttgcagtcatttttcttttaccatacagattctaaccatgtatttaagatgaaactttaaa

SEQ ID NO: 79822 - DNA, 298 bp, Glycine max
ctcgtggtcgttgtcgtggtcgcggccgtcactctccatccactgcaccggttgttgttagatatgaggaatctgagcgcggtagtggcagtaaggagaagaattcatcagctgattctgattctgttgaaatgagagtgggaaagttaagtattggcgatgataagccggcagcatcagggttcgatatatgtccccctaaacaagctggaagcgttgttctgaaacctcctttgtttttaaagaacagagaaaagagacagtctagtaatagccgtagcaatgtggtcgtatcatt

SEQ ID NO: 79823 - DNA, 56 bp, Glycine max
caagaaacttgtacattttatagacttaaatatttcagtagtggttccatttctcc

SEQ ID NO: 79824 - DNA, 421 bp, Glycine max
tgatagttcagtgtctacaataccaggtgattttgtcattggtgtcaagttgacaaccataaacaatatgtgtgcatatgggctcaatcctggtatttcaggttctcgtcttttgggcaccattcctcagtccatttcacagcaaactgtttggaatcaaatggcaacagtgagaacaccattgaattttgattctagcaagcagagcttttgtcagttttctattgaccttctcggtggaggaatcttagtggacaaaactggagattggatcacacttatacaaaattctccaattagtaacttgttgagagttgctgcttggaagaaaggctgtttaatggtcaagattgtgatgtctgggaatgcagcagtcaaaaggagtgattgggcctcattggtacaagtgtttttaacaaac

SEQ ID NO: 79825 - DNA, 119 bp, Glycine max
ctatagcccattttctacgctaccaagccattccctcatggggggcaatttctgtcccttcatcgctatatctgcattttgtctcaacgctactttatcatgatctcaaattttgatca

SEQ ID NO: 79826 - DNA, 311 bp, Glycine max
cggctcgagcgcgtcctccgtcttaccggtttcaacgaggcggcggatattggaaaccgccgccgttttctgggcctaacacaacttcttgaaccgcttgcggaacccttcggcggttaattcggcaaaacaatcaaaaggtttatcggttcggtttcgaacaatgcttctgatcccgattgggaccgtgccacaggtcaagcgcttctcgcgaaaatgggaacggatttcactgcgcatacacactgggctgggtgcgctcaagaggaactcgcaagtgccggtgaaggacttgagaagtatgttatgac

SEQ ID NO: 79827 - DNA, 419 bp, Glycine max
ctcaagagaaactttaagcagatgtctaatgttttgtgggtggctcctgaggacaaggcgagtttatggtcacaacttcattatgtttcgtgtaataatctggaaatgcaagaagcttatcttgtcaatctcgtaaatgtgttacgggaattgtatttgcacagtccagaggaagctcgccaattgagaaggaaagctctctctcgtattgaatggttgcaaaaagctgatgtgcctaccatagcacagattgaagagttccattcgatgcagaggatgatgaatgctcctgattcaaatgataatattgatctactgttgagcattgatttgttgggtttacaaggagcaagtaaagcttttccaaacaagattgtttttgatgataagcttgtgttggctaacacacaagaattctt

SEQ ID NO: 79828 - DNA, 342 bp, Glycine max
cctcagtccatttcacagcaaactgtttggaatcaaatggcagcagtgagaacaccattgaattttgattctagcaagcagagcttttgtcaattttctattgaccttctcggtggaggaattttagtggacaaaactggagattggatcacacttatacaaaattctccaattagtaacttgttgagagttgctgcttggaagaaaggctgtttaatggtcaagattgtgatgtctgggaatgcagcagtcaaaaggagtgattgggcctcattggtacaagtgtttttaacaaacagctacagtacagagcattttgatgcatgtaagtggacaaaatca

SEQ ID NO: 79829 - DNA, 148 bp, Glycine max
ctaaaacagatttacagagcaaaccaatcattctctaaatattcgacaatactgtcaatacaaggttaaaattgtgatttgtgaagtacccatctcgatcttgtattaagattttataaatgaaattcgtaaaacagccattttattc

SEQ ID NO: 79830 - DNA, 271 bp, Glycine max
aatgcgttattaaagtgtgcgaggtacattatatatacaatgcacaagcttaacgcaccagatggaacgaaccaatactccactgaatggaccactctgaccaacacagtaccgatattaggcacacacattctgtgctgagatcatgccaaaccagaatgctagatcacgcaccaagctataaagcatatgtcgacaagcctataccatctaggtgcaagtgacctatgacagatgccgagacagactcacctgctgctgtcatgattgc

SEQ ID NO: 79831 - DNA, 420 bp, Glycine max
ctaagatgacttctccctacattaaatgtacagtctctttctgcatagcatttggaaatttggctgatgataccatcaattttgaggcttttccccacaagctggtgcagtttggagagattcaggaaaaagttgtattgaaattttcacaagaggaatttcttacagcttggtcaactcaggtgcgtcctgcaacaactctgttggctgatgggtgtccatatttgtatgcaatggtgcatgatagttcagtgtctacaataccaggtgattttgtcattggtgtcaagttgacaaccataaacaatatgtgtgcatatgggctcaatcctggtatttcaggttctcgtcttttgggcaccattcctcagtccatttcacagcatactgtttggaatcaaatggcaacagtgagaacac

SEQ ID NO: 79832 - DNA, 359 bp, Glycine max
acacatattgctccgctgtggagaaggatttgcgtttggagaggggaatgttaggcaatatgatggtgttcctcttcttaagaattcaaaatgggagagtactttggatgctgttgacaatgatagtgatagtgactagatgatagtcctcatcaacacttataacaaaccaaacatattattggcttcgtagaacgtagaaagtggaatatagcagtataaaagcatggttttgaggcagtgtttgtgatttgtgaggttcattttcctagtttgatatttctcctttttccgcccttttctcaataatattataaatcaaatggtatggtggtactgtagtgtagttccaatatcac

SEQ ID NO: 79833 - DNA, 258 bp, Glycine max
cagatagattggacaggtctctcacacttggtcacatgcaggggatgatgcaaatggcacttgtatggcatacagggcatgctattcatgaagatgtacctgatgaatttccaactatgattgttaacttcatttctcgtatcctaattggccctcatggtactgagatacctggcctctcctagccagcctctaccaaaccttgaatctggtatctgataaaccaagaacgaccaccactgccagatgaacatgatg

SEQ ID NO: 79834 - DNA, 428 bp, Glycine max
gtaaatgtgttactagaattgtatttgcacagtccagaggaagctcgccaattgagaaggaaagctctctctcgtattgaatggctgcaaaaagctgatgtgcctaccatagcacagattgaagagttccattcgatgcagaggatgatgaatgctcctgattcaaatgataatatcgatctactgttgagcattgatttgttgggtttacaaggagcaggtaaagcttttccaaacaagattgtttttgatgataagcttgtgttggctaacacacaagaattctttgatggaaattttccagtggattcttggttaccaatttttgtgaattgtctttatcctgtaagtcaattaccttcagaagctgtcgttgtaaatgttacatgtggtagtggacgtggtggtttacccaccactgcttggat

SEQ ID NO: 79835 - DNA, 418 bp, Glycine max
aaaaaaagcgttaaaatcgtctattcgctcatacttcgagaagaatagagaaaatataataaaaaaaaaaaaaaaaaaaaaaaaaaaaaaaaaaaaaaaaaaaaaaaaaaaaaaaaaaaaaaaaaaaaaaaaaaaaaaaaaaaaaaaaaaaaaaaaaaaaaaaaaaaaaaaaaaaaaaaaaaaaaagggggggggggccaattagggggctggtaaaccgggaaataaattggggacgggaacctgggggggaaaaagttttccttaagggaggcggaataaaagttgggcaaaacaagggaaaaaggtgttcccgggggaaaagtgtattcggtaaaaatcaaaaaaaaattagagccggaaagaaaaaagtaaaagggtgggggggctaatgaggggggaaacttaaatttatggg

SEQ ID NO: 79836 - DNA, 413 bp, Glycine max
ctcgagccgattcggctcgagggaaaaagttgtattgaaattttcctgaatctctccaaactgcaccagcttgtggggaaaagcctcaaaattgatggtgtagtttggagagattcaggaaaaagttgtattgaaattttcacaagaggaatttcttacagcttggtcaactcaggtgcgtcctgcaacaactctgttggctgatgggtgtccatatttgtatgctatggtgcatgatagttcagtgtctacaataccaggtgattttgtcattggtgttaagttgacaaccataaacaatatgtgtgcatatgggcttaatcctggtatttcaggttctcgtcttttgggcaccattcctcattccatttcacagcaaaccggtttggaatcaaatggcaacagtgagaaca

SEQ ID NO: 79837 - DNA, 418 bp, Glycine max
aatgataaacagtctttgtggtggtgatgaaaaattgatgcgtgaaaggacacatttgctgttggcttgttgttcaaggatggcaatttgtaagaaagatgtttggagagttgaatgtggaatcccttctggatttccgctcacagttatttgcaatagcatttttaatgagatgctcattagatatagctatgaaaaattactgcgccaggctagagctccaagtatgtttttacaatccttcaaaaattttgtttctttgtgtgtgtatggtgatgataactttaattagtgttcatgaatatgtcaagccttactttagtggttctaaattgaaaagctttctagctggtcataatatcaccattactgatggtattgacaaaactagtgcaactttgcaatttagaaagttagc

SEQ ID NO: 79838 - DNA, 383 bp, Glycine max
tgttgatcgagataactagaaacagtgtgatgaaaatgaaggtccttgttttcttcgttgctacaattttggtagcatggcaatgccatgcgtacgatatgttccctctccgaatgaacactggctatggtgcccgtactccggaggtgaaatgcgcaagttggaggcttgctgtggaagcacacaacatctttggctttgagaccattcctgaagagtgcgttgaagcaacaaaggaatacatccatggcgaacaatatagatcatactccaaaacagttaaccaacaagcttacttttatgccagagacctcgaagtccatcccaaggacacatttgtgttcagtatagatggcaccgtactctctaatattccatactac

SEQ ID NO: 79839 - DNA, 428 bp, Glycine max
attgaaaagctttctagctggtcataatatcaccattactgagggtattgataaaactagtgcaactttgcaatttagaaagttagcagattgtgattttctcaagagaaactttaagcagatgtctaatgttttgtgggtggctcctgaggacaaggcgagtttatggtcacaacttcattatgtttcgtgtaataatctggaaatgcaagaagcttatcttgttaatctcgtaaatgtgttacgagaattgtatttgcacagtccagaggaagctcgccaattgagaaggaaagctctctctcgtattgaatggctgcaaaaagctgatgtgcctaccatagcacagattgaagagttccattcgatgcaaaagatgatgaatgctcctgattcaaatgataatattgatctacttgtgagcattg

SEQ ID NO: 79840 - DNA, 51 bp, Glycine max
aaaaaaaaaaatataaaaaaaaaaaaaaaaaaaaaaaacaaaggagatact

SEQ ID NO: 79841 - DNA, 325 bp, Glycine max
gtaaatgtgttacgagaattgtatttgcacagtccagaggaagctcgccaattgagaaggaaagctctctctcgtattgaatggctgcaaaaagctgatgtgcctaccatagcacagattgaagagttccattcgatgcagaggatgatgaatgctcctgattcaaatgataatatcgatctactgttgagcattgatttgttgggtttacaaggagcaggtaaagcttttccaaacaagattgtttttgatgataagcttgtgttggctaacacacaagaattctttgatggaaattttccagtggattcttggtaccaatttt

SEQ ID NO: 79842 - DNA, 376 bp, Glycine max
  unsure (1)..(376): unsure at all n locations
tattgacaaaactagtgcaactttgcaatttagaaagttagcagattgtgattttctcaagagaaactttaagcagatgtctaatgttttgtgggtggctcctgaagacaaggcgagtttatggtcacaacttcattatgtttcgtgcaataatctggaaatgcaagaagcttatcttgtcaatctcgtaaatgtgttacgagaattgtatttgcacagtccagaggaagctcgccaattgagaaggaaagctctctctcgtattgaatggctgcaaaaagctgatgtgcctaccatagcacagattgaagagttccattcgatgcagaggatgatgaatgctcctgattcaaatgataatattgatcntactgtg

SEQ ID NO: 79843 - DNA, 426 bp, Glycine max
ctttgaagtttctaagatgacttctccctacattaaatgtacagtctctttcttcatagcatttggaaatttggctgatgacaccatcaattttgaggcttttccccacaagctggtgcagtttggagagattcaggaaaaagttgtattgaaattttcacaagaggaatttcttacagcttggtcaactcaggtgcgtcctgcaacaactctgttggctgatgggtgtccatatttgtatgctatggtgcatgatagttcagtgtctacaataccaggtgattttgtcattggtgttaagttgacaaccataaacaatatgtgtgcatatgggcttaatcctggtatttcaggttctcgtcttttgggcaccattcctcagtccatttcacagcaaactgtttggaatcaaatggcaacagtgag

SEQ ID NO: 79844 - DNA, 241 bp, Glycine max
taaaccctattaatcaacatcctattccgtcttcttgtctccttcgcgtctacattcaccatcctccttcgctaatcctaaccaaccacctccacccttattcctaattcccattcttttccgcttaatgctatcgctccagtctttccggctaacacaccaccacataatcacgatcacaatcacagctgtaaactgctggtgaacttttgtctttactaattgagatggtacttcttat

SEQ ID NO: 79845 - DNA, 343 bp, Glycine max
agaatggctcccaagggtttaacctttctggctgtgttaatatgcgtttcagcactgtcactgagtccttctgttgcgggggaagggcaaaataatggccttgttatgaacttctacaaggaatcatgccctcaggctgaagacatcatcacagaacaagtcaagcttctctacaagcgccacaagaacactgctttctcctggctcaggaacatcttccatgactgtgctgttcagagttgtgatgcttcactgttgctggactccacaagaaggagcttgtctgagaaggaaacagatagaagctttgggttgagaaattcaggtacattgagaccatcaa

SEQ ID NO: 79846 - DNA, 414 bp, Glycine max
  unsure (1)..(414): unsure at all n locations
gtcaagccttactttagtggttctaaattgaaaagctttctagctagtcataacatcaccattactgatggtattgacaaaactagtgcaactttgcaatttagaaagttagcagattgtgattttctcaagagaaactttaagcagatgtctaatgttttgtgggtggctcctgaggacaaggcgagtttatggtcacaacttcattatgtttcgtgtaataatctggaaatgcaagaagcttatcttgtcaacctcgtaaatgtgttacgagaattgtatttgcacagtccagaggaagctcgccaattgagaaggaaagctctctctcgtattgaatggctgcaaaanagctgatgtgcctaccatagcacagattgaagagttncattcgatgcanangatgatgaatgc

SEQ ID NO: 79847 - DNA, 430 bp, Glycine max
ctcgtctttgaagtttctaagatgacttctccctacattaaatgtacagtctctttcttcatagcatttggaaatttggctgatgacaccatcaattttgaggcttttccccacaagctggtgcagtttggagagattcaggaaaaagttgtgttgaaattttcacaagaggaatttcttacagcttggtcaactcaggtgcgtcccgcaacgactctgttggctgatgggtgcccatatttgtatgctatggtgcatgatagttcagtgtctacaataccaggtgattttgtcattggtgttaagttgacaaccattaaacaatatgtgtgcatatgggctcaatcctggtatttcaggttctcgtcttttgggcaccattcctcagtccatttcacagcatactgtttggaatcaaatggcaacagtg

SEQ ID NO: 79848 - DNA, 428 bp, Glycine max
gcggcctccacattggggaagggaataaagagaattatgcagattggaataacaataatctcaatatcatgaataataataacagcaacaataaggagctgcaggagatttcggaggagagtccaacgagcgtgattgagaataacaacgtggtggaagtggagaggttctcgctccctaagagcatttctgtgaggtccaatggctacttgaagacggctcagtccgctgctctcgcccccaataacatcaatgccactcgcaacaaatgcgccactcgcccacgcgccttcgccactccacctgaacccgttcaaaaggtatatgtgcgtggagggcagatagaggaagagcctcttgaaatgatagtgtataaccaagggatgttcaagactgagctgtgtaataagtggcaggaaactggaaca

SEQ ID NO: 79849 - DNA, 429 bp, Glycine max
attttgttggagatctcgtctttgaagtttctaagatgactggtccctacattaaatgtacagtctctttcttcatagcatttggaaatttggctgatgacaccatcaattttgaggcttttccccacaagctggtgcagtttggagagattcaggaaaaagttgtgttgaaattttcacaagaggaatttcttacagcttggtcaactcatgtgcgtcccgcaacgactctgttggctgatgggtgcccatatttgtatgctatggtgcatgatagttcagtgtctacaataccaggtgattttgtcattggtgttaagttgacaaccatatacaatatgtgtgcatatgggctcaatcctggtatttcaggttctcgtcttttgggcaccattcctcagtccatttcacagcatactgtttggaatc

SEQ ID NO: 79850 - DNA, 424 bp, Glycine max
ctcgagccgaatcggctcgagcgtaaatgtgttacgagaattgtatttgcacagtccagaggaagctcgccaattgagaaggaaagctctctctcgtattgaatggctgcaaaaagctgatgtgcctaccatagcacagattgaagagttccattcgatgcagaggatgatgaatgctcctgattcaaatgataatattgatctactgttgagcattgatttgttgggtttacaaggagcaggtaaagcttttccaaacaagattgtttttgatgataagcttgtgttggctaacacacaagaattctttgatggaaattttccagtggattcttggttaccaatttttgtgaattgtctttatcctgtaagtcaattaccttcagaagctgtcgttgtaaatgttacatgtggtagtggacgt

SEQ ID NO: 79851 - DNA, 274 bp, Glycine max
ataaattccactacctcaacttactataaggctaactttgagcaaatttttaaaaatctctctgcctacataaacaatgttgtctacaacccatacaatattccatttccacccacctctaattttctcattctctacactattaataggtccagcatacttgactagttcaacacacctactctccttattgctctttacctactctatataaccattagcccctcatacacaccactcaaactctcatttcacaaactctacaacatttttg

SEQ ID NO: 79852 - DNA, 363 bp, Glycine max
  unsure (1)..(363): unsure at all n locations
ctggtttgcaaaaagacagagggttaattgtggagtattttggaaggatgtcttacgttgctcataacgttaatcagccccaagagaaagatttgttggagggaaatttttcctttgatattaaatctcgctctagattggaaaaagtttcctctacaaaagcacaatttgttagtggaaaaaccttcaaatatgatataattggtgctggttcacattcttcagaagattttcctgaaaaggaagatcaagaaaaacccaaaaagattgatgccagattgagacaaagaatagatcctcaatacaatgaggttcatgctcagatggaaacanatttgtttaaattgtctcttgatgatgttg

SEQ ID NO: 79853 - DNA, 424 bp, Glycine max
tgaatatgtcaagccttactttagtggttctaaattgaaaagctttctagctggtcataatatcaccattactgatggtattgacaaaactagtgcaactttgcaatttagaaagttagcagattgtgattttctcaagagaaactttaagcagatgtctaatgttttatgggtggctcctgaggacaaggcgagtttatggtcacaacttcattatgtttcgtgcaataatctggaaatgcaagaagcttatcttgtcaatctcgtaaatgtgttacgagaattgtatttgcacagtccagaggaagctcgccaattgagaaggaaagctctctctcgtattgaatggctgcaaaaagctgatgtgcctaccatagcacagattgaagagttccattcgatgcagaggatgatgaatgctcct

SEQ ID NO: 79854 - DNA, 453 bp, Glycine max
  unsure (1)..(453): unsure at all n locations
cccacaagctggtgcagtttggagagattcaggaaaaagttgtgttgaaattttcacaagaggaatttcttacagcttggtcaactcaggtgcgtcccgcaacgactctgttggctgatgggtgcccatatttgtatgctatggtgcatgatagttcagtgtctacaataccaggtgattttgtcattggtgttaagttgacaaccataaacaatatgtgtgcatatgggctcaatcctggtatttcaggttctcgtcttttgggcaccattcctcagtccatttcacagcaaactgtttggaatcaaatggcaacagtgagaacaccattgaattttgattctagcaagcaaagcttttgtcaattttctattgaccttctcggtggaggaattttagtggacaaaactggagattggatcacacttatacanaatttctcaattagtaact

SEQ ID NO: 79855 - DNA, 293 bp, Glycine max
aaaggtttggcgcattgctttctgtacatttaaatttaggttggttgggttgctgagtaaaaactaaaatgaaagtagatacaaattgctttttttttctttaaaacaaaaaaatccgcaaccatatattaaatgaacattagcatcataatgaatgaaaaaagctaatgagataaaaaaattatcaggattataaagaactaataaaaaaaatgggggtgcagcttccatttgtgcctgttaccttaaaaattaaatcttaacggcttcttaacaaagttccatttttattt

SEQ ID NO: 79856 - DNA, 407 bp, Glycine max
gaagtggtgaactctggtccagaagacatgatttcagatttacgtaacagttacaacgcgataaatcatggaatttcagtgcgacttttagaggagcagttggcaactgcagagtctggagatgattttaagaggtcatttgtactctatgtgctgggaacgcttctgtgcccaacagctaggctggatgttagcccgtcattcctccactttttgacaaatatggatcttgtacatcagtataactggggtaaattcttgcttgataggctggttcgagaggtattgcgcttccatcaagggaagcaaagaactgttggtggttgtcttttatttttgcagcttttctactatgagaacatatctcttgaagggtcttctgctccagttccaacgattgttccata

SEQ ID NO: 79857 - DNA, 430 bp, Glycine max
agcaagcagagcttttgtcaattttctatcgaccttctcggtggaggaattttagtggacaaaactggagattggatcacacttatacaaaattctccaattagtaacttgttgagagttgctgcttggaagaaaggctgtttaatggtcaagattgtgatgtctgggaatgcagcagtcaaaaggagtgattgggcctcattggtacaagtgtttttaacaaacagcaacagtacagagcattttgatgcatgtaagtggacaaaatcagaaccacattcctgggaattgatcttcccaatagaggtatgtggtcctaataatggttttgaaatgtggagttctgagtgggcaaatcaaacttcatggcatttgagtttccttattgacaatcccaaacagtctacagtttttgatattctcttgggaa

SEQ ID NO: 79858 - DNA, 204 bp, Glycine max
cagaacttgactgtgtgtggctctgtaccagatcttggttccggtggtgtgaagaagggggtgttgctcagcccggttcatacaaggggctgatctcatatggcgtggaagtatcactgtgcctaaagggttccaatgccattacaggtattatgtcgtagatactgacaaagacgtacttatatgggagatgaggaacacgcg

SEQ ID NO: 79859 - DNA, 423 bp, Glycine max
gtttgttgttgtaactcgttcttcttcttttgttgttctgtgtgtgtgtttgttttttctctcacctgaaaatgtcttgctgcggtggtaactgtggttgcggaagctcctgcaagtgcggcaacggctgcggaggctgcaagatgtacccagacttgagctacactgagtcaaccaccaccgagaccttggtcatgggagtggcacctgttaaggctcaatttgagggtgctgaaatgggtgtgcccgctgagaacgatggctgcaaatgtggaccaaactgctcctgcaacccctgcacttgcaagtgaggtgttgggagagcaagcttcaagcagagatagcccttaattaggaataatgataaactattaatgtgtagctaaaaacttatgtattatgtctgtgatggttttcgtgcac

SEQ ID NO: 79860 - DNA, 241 bp, Glycine max
cggaaacatcaagagtcctgctggctctgggtgctagaaatgtgtgggcaaagaaaaacagtgtttccgtcttcgccagcacatatattccacataaaaacagtgtctctgcaacgctctaaaatattcatctgctttgccagatatttttctgtctgccctcaggctccagctcctccatgagatatggactactctttatcgaccactgtggctactctcaagcgtcattgtctcccta

SEQ ID NO: 79861 - DNA, 330 bp, Glycine max
cccatactccatggaatggactggtttggccaataaattactgagtaagggcaacgatattctggttgcgattatgctagttttgatggtttgattaccaagcaagttatgagcaagatggcagaaatgatataacagtctttgtggtggtgatggaaaattgatgcgtgaaaggacacacctgctgttggcttgttgttcaaggatggcaatttgtaagaaagatatttggagagttgaatgtggaatcccttctggatttccgctcacagttatttgcaatatcatttttaatgagatgctcattatatatagctatgaaaaattact

SEQ ID NO: 79862 - DNA, 445 bp, Glycine max
gtgcgtcctgcaacaactctgttggctgatgggtgtccatatttggatgcaatggtgcatgatagttcagtgtctacaataccaggtgattttgtcattggtgtcaagttgacaaccataaacaatatgtgtgcatatgggctcaatcctggtatttcaggttctcgtcttttgggcaccattcctcagtccatttcacagcaaactgtttggaatcaaatggcaacagtgagaacaccattgaattttgattctagcaagcagagcttttgtcagttttctattgaccttctcggtggaggaatcttagtggacaaaactggagattggatcacacttatacaaaattctccaattagtaacttgttgagagttgctgcttggaagaaaggcttgttaatggtcaagattgtgatgtctgggaatgcagcagtcaaaaggagtg

SEQ ID NO: 79863 - DNA, 278 bp, Glycine max
ggaagggagctgtttgaacatgaacccaagcattgacattcagacatatactatgctcatgtcccgacaagtccatcatgctgtatgaggatcgatccaaacgcacattttctttaaatctgatcaaccttgttcagtcctcactcacggtgtgcaccactctcattgcccgtatgcagaagcaattgaagccaaactggactactgtgttgcctctagaggtggaaacattctcgtcgctgacagttatgttgatgatgataaacacgtcttctact

SEQ ID NO: 79864 - DNA, 251 bp, Glycine max
  unsure (1)..(251): unsure at all n locations
ttaacttgcacaggagaggagagggacattgataaaaacctgtgttcggtactcagcatccgaagtttggcgggaagggaaatgaaaatgaacgggaaaatacgtctctccatccacatatgaaccaaattgctcattagtaaaataattatgtaaattgcttttgctgnaaacttgtatacaatgcatgtatacctatcttatgtctcattgcttctgccgaccttataatttattttattcccctcacc

SEQ ID NO: 79865 - DNA, 413 bp, Glycine max
  unsure (1)..(413): unsure at all n locations
tttaagcgatacagcaaggataatgttcacagtttagtttactttggttttgcaatttgttttattgttggacttggagaggagaggagagggattttgataaaagcctgtgtttggtactttggttccgaagtttggcgggaagggaaatgaaaatgaaagggaaaatccctctctccttccacatatgaaccaaattgctcattagtaaaataattttgtaaattgtttttggtgtaaacttctatacaatgcatgtatacctatcttttttctcattggttcttctaaccttataatttattttattccccccccccccccccccccttttacttttggtgacaagcanattctgtanagagattccacatttcatcttttatcttattcgttttggctcaaaatattct

SEQ ID NO: 79866 - DNA, 398 bp, Glycine max
ctatcacactaatatcattcgaaaatctatcttcctcacgggtgttctcttacaccctactatattctccaactctcaaaaacatcccttatacataaacaacaccacacgctttcacatacaccatagacattactatgattactcctacatccatcaaacacaagcattatgactagtatatactttgcaactcacacgtatctagaactacacataatcaccaccaccacaaaatcttttctcaacaccatctaccaacaactatcgacaacatcactgcacacatacattaacttcaagcttcacatgaaaaaatgacaactcttctataataaaaccacacaatctatatacacaaatatttggaatcacatactataaacatcacgtactta

SEQ ID NO: 79867 - DNA, 428 bp, Glycine max
gtccatatttgtatgctatggtgcatgatagttcagtgtgtacaataccaggtgattttgtaattggtgttaagttgacaaccataaacaatatgtgtgcatatgggctcaatcctggtatttcaggttctcgtcttttgggcaccattcctcagtctatttcacagcaaactgtttggaatcaaatggcaacagtgagaacaccattgaattttgattctagcaagcagagcttttgtcaattttctattgaccttctcggtggaggaattttagtggacaaaactggagattggatcacacttatacaaaattctccaattagtaacttgttgagagttgctgcttggaagaaaggctgtttaatggttaagattgtgatgtctgggaatgcagcagtcaaaaggagtgattgggcctcattggta

SEQ ID NO: 79868 - DNA, 328 bp, Glycine max
catatgagggattcacacattcagaaggcgctaatatgagcggcgggggttgctttcatcacaagccctgctcaggacatttgaacaggctgcgatcttgcctcctatcaagaattgtaatataccgactcttgaactcaaaaaccagtgaatgcaactggaagatagagcctgagagatggagacaccccttgtcatacagcactctgtgataattacagatcttggctatgacattcttaacagactgaatgaagatgatacatgatcatgccgcactatttgcctctatgaaatcttcatcgtactacctaatacatctgatcaa

SEQ ID NO: 79869 - DNA, 299 bp, Glycine max
aagctcggattcggctcgagctcgagccgtcaattttgaggcttttccccacaagctggtgcagttgggagagattcaggaaaaagttgtattgaaattttcacaagaggaatttcttacagcttggtcaactcaggtgcgtcctgcaacaactctgttggctgatgggtgtccatatttgtatgcaatggtgcatgatagttcagtgtctacaataccaggtgattttgtcattggtgtcatgttgacaaccatatacaatatgtgtgcatatgggctcaatcctggcatttcaggtt

SEQ ID NO: 79870 - DNA, 349 bp, Glycine max
caagctcggaatccggctcgagctgatccatgatctgtctaggaggccctgaatgcgggggcggggattgatcgaatctcgagagctgcacaggccattagagcaggctacgaggttgcatccaatcaggaattgaaatataccgactcttgaacccaaaaaacagtaaatgctactggaagatagcacctgagagatggacacaccccctgtttacagcctctgtgatattacagattttggcttgacatacttaacagactcaatgaagatgatacatgacttaagcacgctctatttccctctatgaaatcgtttatcttactacctaatacatctgatcaacaaa

SEQ ID NO: 79871 - DNA, 199 bp, Glycine max
gcatgcacccccacgtaacgctcttacattccgctcgtgaaaaaaaatttttcaaaaaaaaaaaaaaaaaaaaaaaaaacaaggaaaacaaaaaaaaaaaaaaaaaacaaaaaacaaaaaaaaaaaactaaaatcaatcccaaaacttaccaacccacccataccaaccctttccctcccacatccttcctaccccttc

SEQ ID NO: 79872 - DNA, 439 bp, Glycine max
tgctttgctacttccaccctgtacagcgtatttttcgtgaatgtgccccattgctgttcctcatgtaaagaagaagaagaaaagttctgcccagacaaagtgaaaaaggaaaaaaggaaaaagatgattatagtgactaaatgatgtacaaatttccagctagcttaaccatccattcgtaattgcaggatgcgatgacttccttttcagcttgtggactaatagaccctctttgttctcaaaacctcactcccaagcattccaccatcactgcaaccattgattctcagtcatcgatttgcgccactagtaatgttgggagcccagtctcagctaataaaccagagggcagagagaatcatacgaaaggagccacaagtggttcctctgagccatctgatgaggatgatgaagcaggtgctcgtgaacagagcacaaa

SEQ ID NO: 79873 - DNA, 53 bp, Glycine max
gtacttaagaaacccgataaacatgtagctatatattgtgagtgtttctgtgg

SEQ ID NO: 79874 - DNA, 422 bp, Glycine max
  unsure (1)..(422): unsure at all n locations
gtgactcgttcttcttcgtcgttatcttcttcttttgttgtttgtgtgtttgttttttctctcacctgaaaatgtcttgctgcggtggtaactgtggttgcggaagcgcctgcaagtgcggcaacggctgcggaggctgcaagatgtacccagacttgagctacaccgagtcaaccaccaccgagaccttggtcatgggagtggcaccagttaaggctcaattcgagagtgctgaaatgggtgttcccgctgagaacgatggctgcaaatgtggagctaactgcacctgcaacccctgcacttgcaagtgaggtgttggagagctaaagcttcaagcagaaatggcccttagaaataatgataaacactatatgtagtttcaaaacttcaaaattatgtagtatgtattatgtngcactctg

SEQ ID NO: 79875 - DNA, 445 bp, Glycine max
  unsure (1)..(445): unsure at all n locations
ctcctgctttcttcctttttcctttgcgcctgtgcatttcaggagggcaccacaatggccaccaatgcattcagctggcacatcatctctccatgcgatccgtcatgcctcaagcacaggcgtttgccttaattattggccctacatgatcttcaaatttcagccttgctagacagaacgttcctattagctggcacgcacacttaatttgcagcttgaggactagtgcagcctctttgctatcaacagctgactacgaagccttccaccatcactgccaccattgcttctccagcatctgatttgcgccactagtgaggatgagagcccactctcagctcataaaccagagggcacgagagaatcatacgaaaggagccacaagtgcttcctctgagccatctgatgaggatgatgaagcangtgcttgtgaacagagcacaaa

SEQ ID NO: 79876 - DNA, 356 bp, Glycine max
  unsure (1)..(356): unsure at all n locations
ctcgcgaattcagtctcgattgaaattaaaatataccgcgatcacaggttgccgcaccttaagacgggatacaaacgcaacccctacacccatctatacaaatcctacatttactacaactacatcctgatcaattccttaattcaccaatcattcccttctgcgagacctacaaaccccccacgctcctccatccccgtactccgtctccgtcgccccttcccccttcatcttctccaacctccctccaccgccaccccttcctanatcctccgtctccgccgtccctccgccccctcccccgccgcgcgcctaccatctcttcttcttattcgtctcctcccccaacactctca

SEQ ID NO: 79877 - DNA, 194 bp, Glycine max
  unsure (1)..(194): unsure at all n locations
ctggttggcgttaatatggcgggtttcttaccataccggggcacctatcttcctaatctctcattgacgagatctataaccctatcaatgccagcgttcaccaatcactcccttcggcgataccttctanncccccactcgcctacattctcgtctttcgattccgtctccccttccccttttatcttcttcaa

SEQ ID NO: 79878 - DNA, 179 bp, Glycine max
aatctcccctacaacatcaatatttattcaacccttttctcacaactcttcttctcttttttttacctaaccacctacattcctatatttttaaccttattcttattaaacaacttttacctctccacctcacttttctttactacttttttacatcattctctacctaaacttctttt

SEQ ID NO: 79879 - DNA, 153 bp, Glycine max
aattgggcaagtttctgcagatcgaatgttatgagctgataggaccattttatctggcttagtgagagaggtcttatacattataccacaattttaaaacaataatcacaggaaatagtaagttataatataaaaagaataattttttcagta

SEQ ID NO: 79880 - DNA, 214 bp, Glycine max
tgactagttgagtgtcactgctgacgagagaaccacgcaggacgtgaggcactgaagaagcacaagtggtgctacatctatgacttggtgttggtctggctctgaccagtgtgtctatcgtggaaagtgtagatgcatacagatactacacgtggactggggcatattggcttctttctccactaggtagtcctcaacaagtgggtcctatcga

SEQ ID NO: 79881 - DNA, 329 bp, Glycine max
  unsure (1)..(329): unsure at all n locations
gaacttggttccttctatgctgaatttcttaatggcagggccgagagtgggggagatcaattggtcaaagactttgattttctttctaatattgaaagtgctaatttatatgtagagcagccgngacctgacgtctattctacatgtatgagaaacatatcgcgtctgctctacattgaggcttcactgaataatactgattatacattttactcctaagtagaccgatcatgaggttgttaacttttgagattgttattctaaggcttgtgatcttgttaaatgagccgtttgtttttactttgaatggccttcaacagaggtaaaac

SEQ ID NO: 79882 - DNA, 58 bp, Glycine max
tacgtaagctcggaattcggctcgatcttgtgcacctcttaattcctgttatggcttc

SEQ ID NO: 79883 - DNA, 75 bp, Glycine max
gagagttttaatttactcttgcagttattagtgaaagattgagcggtctcatgttcattgctcagtttaatcatc

SEQ ID NO: 79884 - DNA, 260 bp, Glycine max
  unsure (1)..(260): unsure at all n locations
attgccattcttgaacaacaagccaacagcaatttgtaagaaagatgtttggagagttgaatgtggaatcccttctggatttccgctcacagttatttgtaatagcatttttaatgagatgctcattagatatagctatgaaaaattactgcgcgcggctnaagctncgaggattgttaaaacattcttggagctttagcctggcgccgttatttttttttcacattcttcatatgttcttttttttttattttatcttt

SEQ ID NO: 79885 - DNA, 343 bp, Glycine max
gtatggtgtggtcagtgttgagctttttctcagcggggaaatatcggagaaggagggtgtgttattgtctggagaatatttgaggcaaaccttcgtcctttcaaaacgaagcgtcctcccactttttctggaatcaaccattcacgccccccttttactcttcttcttccttttgcgtttactcatcgttgtttttgtttcactcttaaaagcatgttgctttatcgggtttgttggttcttttgaatagagtggttttgaggaaattgggtttctctgtttcgtcgtgaaaaaaaaaaaatgttagctttgctgtttgccctgatcatggtttctgatggtt

SEQ ID NO: 79886 - DNA, 342 bp, Glycine max
ctcgagccgcgccagttctgatatttacaccatctgctctcaagactgtgaagggtggaatcctgcttgcacaaaagcaatgactatgtcatttaatccaaacccgtgttctgatgcatggagtttggaatttctgaagcgtactggatttcattgcgatatcatttgtgtcactggatggactgccaccccaatgcaggatgttcaggttacaattgattggtttatttcctctcaggaatgtgttcccaggacctattgtgttttaaatccacaaaatccttttgtgttaaataggtggatgggaaaattgactttcccccagggcacttcccgaagtgt

SEQ ID NO: 79887 - DNA, 341 bp, Glycine max
gttccaagatataaaatctctcttttacaagagatttgtgctagaatcaaagggcaacacacacaatcaaggaaaagtgaaagggaaaatttcagaaacttttttattgagtcagaactttcgcactcatgctggagtgctgaaactatcccagagcaccattgaacttctttttcgttttttccctcattctattgatgttttgaagcctgagaccagtttgatatatggggaaggtccagtggttcttgaatgtggaagtaggaaaaatgcaattgtaactatttttggcaacagtggacatgtggctggaaaaattgttggctttggtgctgagcaag

SEQ ID NO: 79888 - DNA, 208 bp, Glycine max
cgatctatttatgaggaggtacaccagtgacgacaatcatagcttttcgaagatgctagcaaaagtgtattacatgaggaaagaaagggctgggtctttgaatgaggataggcaggggatcgagggcaggatgagggataggaatactggtggacatagaccctgatctcagcctgctggttcccttagctggtggtactacccatgc

SEQ ID NO: 79889 - DNA, 332 bp, Glycine max
ctacaaccgtctaccatcctttctgctcataccaaggattttctatctctctggcgcactctgtcatcatttttctacccataactttcattttaatttcattctttcaacctcaaatttatttcttcaacctagattatacgttaaatcactctaattggaaccaatgaaaaacgatacaatactaattactcaagaaattaaaattcttactaattactccaatttgaagacactatttgctaatctttttttacccaatttggggacacttaccaaatcctatttttattaacctaaccacctgaattttgattgcgatgataaatctc

SEQ ID NO: 79890 - DNA, 341 bp, Glycine max
attccaatatattccattctctctgtgtatttccggacctctcccttcaagatggagatcttcgtcaagaccctcaccggcaagaccatcacccttgaggtggaaagctctgacaccatcgacaacgtcaaggccaagatccaggacaaggaaggaatccccccggaccagcaacgtctcattttcgccggaaagcaacttgaggacggccgtacccttgctgactacaacattcagaaggagagtactcttcacctcgtcctccgtctccgtggtggcatgcatatcttcgttaagacactcaccggcaagaccataaccctagaagttgaaagctccga

SEQ ID NO: 79891 - DNA, 341 bp, Glycine max
agctggttcagtttggagagattcaggaaaaaggggtattgaaattttcacaagaggaatttcttacagcttggtcaactcaggtgcgtcctgcaacaactctgttggctgatgggtgtccatatctgtatgctatggtgcatgatagttcagtgtctacaataccaggtgattttgtcattggtgttaagttgacaaccataaacaatatgtgtgcatatgggctcaatcctggtatttcaggttctcgtcttttgggcaccattcctcagtctatttcacagcaaactgtttggaatcaaatggcaacagtgacaacaccattgaattttgattctagc

SEQ ID NO: 79892 - DNA, 332 bp, Glycine max
aaggaaacgtgttggataatatttctgaatctgggcatgatgttccttcaactctgagaatttcctctgacattcctctccgatctccatagcttgtctttccacacactgggaggatatttttattctctcaatgttggattcaatggagtcaatttgagaagtccttggtaggtgactgtcagagaagttgttacaatttccagtgtagagtaatagccatgaaatattaattgaaaatttgaaatccttccttttattttatttatttttcattttaactttgacgtttgggatttgagtgatccctttcaagcttccattcaaagcac

SEQ ID NO: 79893 - DNA, 320 bp, Glycine max
cgctatctatcacactgagtgagagtggctgaaggggggcttcagcaaggcacggtcttataatcacctcatgcaattcaaccgtcaactaaagaggtgtgtctattacttgaacgcatggataaaatgtagttatcctggatctgaacttaaaaagggctttgagctgccggaacaggatggtggaataggatgggaacgactgcaatccatggttagggacagagcatgacaaatggtgagtgcataatcagcacttgctaatgcttactttgataaataatgcttgtttgcattgtctatcatgcaaacactgagac

SEQ ID NO: 79894 - DNA, 296 bp, Glycine max
cgagttcttgaaacaccacacacgcctgggctctggatctctgctgtctctggtggttgggatgcattccctatgtcatgaactcgctcaaggacgttcagcacaagtgcggtcgttgcggcgtcctcctcgctacctggcatcgtagcggcaccaccgaggtgcacattcactcttaagtggtgtttgaatcagggcatgtacacatagtttgataacacaggaagaggcgacagaggaaggcgcataattgataccattggagtgagggggtctgcaagtgtcgcttcaagagg

SEQ ID NO: 79895 - DNA, 339 bp, Glycine max
gtcaaaagtttttaaattttgtgaggttcattatggagaaaagggacaagcttagttgtcaagttggaatcaacccatactccatggaatggactggtttggccaatagattactgagtaagggcaatgatattctgtgttgcgattatgctagttttgatggtttgattaccaagcaagttatgagcaagatggcagaaatgataaacagtctttgtggtggtgatgaaaaattgatgcgtgaaaggacgcacctgctgttggcttgttgttcaaggatggcaatttgtaagaaagatgtttggagagttgaatgtggaatcccttctggatttccgc

SEQ ID NO: 79896 - DNA, 227 bp, Glycine max
ctccaaaatgagagcaagttgtaagattttggagagtcaactaactggattaaaaggggtcactctaccttacaaataaatatcttccaactcctctttttctactcttccctataattaattacttaccttttcctacattcgtaccatctttccctataattattcattttatatcttttctttatcatattcatattcttttccttttttaaattgtttttctt

SEQ ID NO: 79897 - DNA, 337 bp, Glycine max
gcaagaagtcttatcttgtcaatctcgtaaatgtgtggcgagaattgtatttgcacaggccagaggaagctcgccaattgagaaggaaagctctctctcgtattgaatggctgcaaaaagctgatgtgcctaccatagcacagattgaagagttccattcgatgcagaggatgatgaatgctcctgattcaaatgataatattgatctactgttgagcattgatttgttgggtttacaaggagcaggtaaagcttttccaaacaagattgtttttgatgataagcttgtgttggctaacacacaagaattctttgatggaaattttccagtggattc

SEQ ID NO: 79898 - DNA, 340 bp, Glycine max
gggaaactgactttcccccagggcacttcccgaagggttaagagaatgcctctttgtatagggggaggagctggtgcaaagaatgctattctcatgaatatgccaaatgctgttctttcaatgtggagatattttgttggagatctcgtctttgaagtttctaagatgacttctccctacattaaatgtacagtctctttcttcatagcatttggaaatttggctgatgacaccatcaattttgaggcttttccccacaagctggtacagtttggagagattcaggaaaaagttgtattgaaattttcacaagaggaatttcttacagcttggtcaacct

SEQ ID NO: 79899 - DNA, 337 bp, Glycine max
tgagaaggaaagctctctctcgtattgaatgggtggaaaaagctgatgtgcctaccatagcacagattgaagagttccattcgatgcagaggatgatgaatgctcctgattcaaatgataatattgatctactgttgagcattgatttgttgggtttacaaggagcaggtaaagcttttccaaacaagattgtttttgatgataagcttgtgttggctaacacacaagaattctttgatggaaattttccagtggattcttggttaccaatttttgtgaattgtctctatcctgtaagtcaattaccttcaaaagctgtcgttgtaaatgttacatg

SEQ ID NO: 79900 - DNA, 235 bp, Glycine max
gtttacaaggagcaggtaaagcttttccaaacaagagtgtttttgatgataagcttgtgttggctaacacacaagaattctttgatggaaattttccagtggattcttggttaccaatttttgtgaattgtctctatcctgtaagtcaattaccttcagaagctgtcgttgtaaatgttacatgtggtagtggacgtggtggtttacccaccactgttttgattagttttgcagt

SEQ ID NO: 79901 - DNA, 336 bp, Glycine max
gtcaattttctattgaccttctcggtggaggaattgtagtggacaaaactggagattggatcacacttatacaaaattctccaattagtaacttgttgagagttgctgcttggaagaaaggttgtttaatggtcaagattgtgatgtctgggaatgcagcagtcaaaaggagtgattgggcctcattggtacaagtgtttttaacaaacagcaacagtacagagcattttgatgcatgtaagtggacaaaatcagaaccacattcctgggaattaatcttcccaatagaggtatgtggtcctaataatggttttgaaatgtggagttctgagtggg

SEQ ID NO: 79902 - DNA, 392 bp, Glycine max
gaagagctatgacctcgcgtggacgccttccttaacctcggaatccggctcgaggttttcttttaatacacacagagtcagactcaaacagtgattcaagacacagtgcagagaaaagcttatgctatcccccctaggcccaggaactaggaactaggaaaatgccccattcacaaaaaccctaataactaacctttttcagacccaccaaaccaatcactaccctcaattcccctctttacttattccctcccaaacatcaatctctttcgatttttcttctaaagctacttcctttcgcctttttttctcttctgggtacaccttcaccactttcttttttttccctctttggttcaaatcacgttctttcggtctgatctcaaacaccc

SEQ ID NO: 79903 - DNA, 286 bp, Glycine max
  unsure (1)..(286): unsure at all n locations
ttcttctctttcgcgtgcgtcaccctgtagcnngtagcccatggcttttnncagagttggagagagccgggagggaggggaatatgcctnncttctggcatagggttgttgcatgagacatatgcgtatagcacccgttcctggatatctgcagaggaaggaaaagttcaatcgctttatgtgatttttaataattgacgaagaaataagaaaagagggttgttggttgaaaaaaacctggtaaggccctgcttgatgagccctatgatgtatgttcaccctgcat

SEQ ID NO: 79904 - DNA, 305 bp, Glycine max
  unsure (1)..(305): unsure at all n locations
caacttatttatttctacacttaattcccaatgtcagggcgcgctgtctaattgagaaactatgagcaacgctatggagtctaccatccatcaacacactgtggaccactgtctgcatctgtggaactaccacttccaaccaatcactgatctgaatcctgcaacatccaaaccaacatggacaatcaaatctgaactgtaccacttttcctcangctcaggctataacactgcgactgtcaatccgaatgtttcttactctcagatttgggtcggcaactgcttcgtgtgtacttctaggaccg

SEQ ID NO: 79905 - DNA, 245 bp, Glycine max
atggatccgggtatggagggaggagtgagtatgaggagaaaccgagctatgggaggagcaactatgaaagccagggaggaggaggaggggttgagtatggttatgaggggcgtacacctcggcaggaggaggattgaggaggatgtgttctcgcaagccgctttttgataggatggttgatgatgatcttgataggtattgactcaaaggatatttatatacttaatatttaacacattcatttt

SEQ ID NO: 79906 - DNA, 357 bp, Glycine max
attttgttggagatctcgtctttgaagtttctaagatgacttctccctacattaaatgtacagtctctttcttcatagcatttggaaatttggctgatgacaccatcaattttgaggcttttccccacaagctggtgcagtttggagagattcaggaaaaagttgtgttgaaattttcacaagaggaatttcttacagcttggtcaactcaggtgcgtcccgcaacgactctgttggctgatgggtgcccatatttgtatgctatggtgcatgatagttcagtgtctacaataccaggtgattttgtcattggtgttaagttgacaaccataaacaatatgtgtgcatatgggctca

SEQ ID NO: 79907 - DNA, 353 bp, Glycine max
ccattcgatgcagaggatgatgaatgctcctgattgaaatgataatattgatctactgttgagcattgatttgttgggtttacaaggagcaggcaaagcttttccaaacaagattgtttttgatgataagcttgtgttggctaacacacaagaattctttgacggaaattttccagtggattcttggttaccaatttttgtgaattgtctttatcctgtaagtcaattaccttcagaagctgtcgttgtaaatgtcacatgtggtagtggacgtggtggtttacccaccactgcttggattagttctgcagttaacaatcgctccttagatatcaacaaaaggattcgcacag

SEQ ID NO: 79908 - DNA, 357 bp, Glycine max
tgagaacaccattgaattttgattctagcaagcagagcttttgtcagttttctattgaccttctcggtggaggaatcttagtggacaaaactggagattggatcacacttatacaaaattctccaattagtaacttgttgagagttgctgcttggaagaaaggctgtttaatggtcaagattgtgatgtctgggaatgcagcagtcaaaaggagtgattgggcctcattggtacaagtgtttttaacaaacagcaacagtacagagcattttgatgcatgtaagtggacaaaatcagaaccacattcctgggaattgatcttcccaatagaggtatgtggtcctaataatggttttg

SEQ ID NO: 79909 - DNA, 343 bp, Glycine max
ctgcgcctggctaaagctccaagtatgtttttacaatccttcaaaaattttgtttctttgtgtgtgtatggtgatgataacttaattagtgttcatgaatatgtcaagccttactttagtggttctaaattgaaaagctttctagctagtcataacatcaccattactgatggtattgacaaaactagtgcaactttgcaatttagaaagttagcagattgtgattttctcaagagaaactttaagcagatgtctaatgttttgtgggtggctcctgaggacaaggcgagtttatggtcacaacttcattatgtttcgtgtaataatctggaaatgcaagaag

SEQ ID NO: 79910 - DNA, 245 bp, Glycine max
ctggatgtgtgatcacgaaccctaaacatggcgctgattgaccatgatcttgacgcagcgctgctccaatctgatacactgcatggtgtgtatcaatcggctgaagatgagtacaagaggattatgagagcgaggaactttcgttgttggcgcgtaacataccaggagtgtgcctaggggatcctgtccggagtggaacacataacggcgttggcagtgcaacctcagtggattattgtgcattg

SEQ ID NO: 79911 - DNA, 252 bp, Glycine max
catgagtcttactaaatgatgtaggtccattccttatttagtgagtttcatatgaatttcaccaaataataaagaatatattgttgaaaagtttgtgtcaagtaatgtgatactagcatttgttatgtgtaaactatatcctccatagatcccagttgtaatttgcattctgtttgtgctaaaaatgatttgtaatgatcctgctccctcaaaaatgaaaataaaaatatttttaattaattagagaagaac

SEQ ID NO: 79912 - DNA, 245 bp, Glycine max
cgtgctaccacgccagcagcatctgctttttttgttattccttttggttctggggtggaatctacgtataaaagttgaaatctttgtttcgtttcttggtggaggaaaattgttttggagataacttggtgttgggttggtcctgatttttaatgcctttttgtttgttttctagttttttttttttttaaattgcataactctctctctctctctctctgggaaatgggggcctctatttggtt

SEQ ID NO: 79913 - DNA, 344 bp, Glycine max
ctatcgttctttttaactaaaaaattcgagctgaacactagcctaacgatacattgttgcgcgattgacacatgatcggctgaccctgaagtcgtaactgtagcgttgatcgatctcttttatgttggagactggtgtatcaggtgggctggcgcgtatggcactcaagctttgaccggttcgaagattaagaaggggtgggatgtggcttggtgaagcgtgaggacttagggatcactatgaaactctggtgttgagatcatgcaccagatgatgcgccagatgcattggatctaacatgacaggaactgcaactggactatcttgacctctatctgatccac

SEQ ID NO: 79914 - DNA, 351 bp, Glycine max
tctggaaatgcaagaagcttatcttgtcaatctcgtaaatgtgttacgagaatggtatttgcacagtccagaggaagctcgccaattgagaaggaaagctctctctcgtattgaatggctgcaaaaagctgatgtgcctaccatagcacagattgaagagttccattcgatgcagaggatgatgaatgctcctgattcaaatgataatattgatctactgttgagcattgatttgttgggtttacaaggagcaggtaaagcttttccaaacaagattgtttttgatgataagcttgtgttggctaacacacaagaattctttgatggaaattttccagtggattcttggtt

SEQ ID NO: 79915 - DNA, 354 bp, Glycine max
cttgtcacttttgacttaaagctatttctgggcttcttgatgtctgaatttgaccaacagaaagttgtatattctggcagctgtttgtaattgtttaatcattgttattgcttattattattgctgctgctttccttttctgataatttactcccaaccctgtttgattagtggacacatctcatgaaatttaaatgggattgtgctaaatgaaactaaagcatactcatccttcatttcagttagcacaatcccatttaaatgaaggatgagtatgctttagtttcattttttttcaaaaattatgctcacccttttttgttttgctcttgaagattgtttttgcactgtcag

SEQ ID NO: 79916 - DNA, 299 bp, Glycine max
aaaatattctttcattgctcgctgagaagagagagaggtaccgcccgatgaccgggaaggcttatcccaagaagcacacggcgtaagaaatcgccgcgaaggttgacgccgtcaccactaaccgtggctgatggaaggctcggcctgatggaccgatccggtttggagaaaggcggtcactcgaaatacgagtgccctcactgcaaagtgaccgctctggacgtgaaatcaatgcaatttcatcactacgcgcgtaactctaagttggcggttgcggatttacttcttttttttatttt

SEQ ID NO: 79917 - DNA, 355 bp, Glycine max
atgaccagatattttgagtatttgtatgcagtagaacttaactagtaagatatgacatatgaggaagtaaaatcgatagatttggaaagttatgtacatctcatgccttgttgctattgaaacatggaggagttgctagcaagtaaccctcttttcccttggatgtttggcaccaaatgctaaaactacaagaaaataaagcttgcaatctgatgccacattttattaagtgggtcattaaattttgcttattatatattcattatattggatatgtatatcttcttgactctgtcttcactgtttattgccagttccgcaaagctcctgagggttctctcaggaaaaatgcagc

SEQ ID NO: 79918 - DNA, 333 bp, Glycine max
taactcgaattccttcagctctgaacttccttctccacccttttccaggagagccaaacccaaaggggttattttaacccaccatcaatcaaaaatagaaagaaagaaagttttaaaaccaaaaaatgccaagaaaccaaaacaagaaaagaaaatgccatttttttccttctagcacccaacaacaacagcaccccttttgtttcttcaccaagaaccgattttccaccgacccattcctccaaatgcttctcctccgccaaaacgccgtcgtttcctccctcattctctgcttcttcttcccaccattgctctgcctcggaatccgctctt

SEQ ID NO: 79919 - DNA, 292 bp, Glycine max
ccttccttaagctcggaattcggttcaagcggttcgagatcaaaagttattttgcttgatagaaagatctcaaaagttatgttggagccagttgagtatgctagaattgaatttcctgacatcagtgtggtgaaggagaatcagcaaatggtatctgagtacttcaatttggcttctcaagatactaattctgctccttcaaagtgcaacattggagggtcactaccatttcttcaccttggtgcatctcctcaacttgatgattatgagatgactctgttgagctcaccag

SEQ ID NO: 79920 - DNA, 355 bp, Glycine max
tgaaattttcacaagaggaatttcttacagcttggggaactcaggtgcgtcccgcggcgactctgttggctgatgggtgcccatatttgtatgctatggtgcatgatagttcagtgtctacaataccaggtgattttgtcattggtgttaagttgacaaccataaacaatatgtgtgcatatgggctcaatcctggtatttcaggttctcgtcttttgggcaccattcctcagtccatttcacagcaaactgtttggaatcaaatggcaacagtgagaacaccattgaattttgattctagcaagcagagcttttgtcaattttctattgaccttctcggtggaggaattttagt

SEQ ID NO: 79921 - DNA, 62 bp, Glycine max
aaaaaattaaaaaaaaaaaaaaaaaaaaaaaaaggagaaaaaaaaaaaaaaaaggggagaaa

SEQ ID NO: 79922 - DNA, 355 bp, Glycine max
tttggagagttgaatgtggaatcccttctggattggcgctcacagttatttgcaggagcatttttaatgagatgctcattagatatagctatgaaaaattactgcgccaggctaaagctccaagtatgtttttgcaatccttcaaaaattttgtttctttgtgtgtgtatggtgatgataacttaattagtgttcatgaatatgtcaagccttactttagtggttctaaattgaaaagctttctagctagtcataacatcaccattactgatggtattgacaaaactagtgcaactttgcaatttagaaagttagcagattgtgattttctcaagagaaactttaagcagatgtc

SEQ ID NO: 79923 - DNA, 352 bp, Glycine max
ctgctgttgtgcttgttgttcaaggatggcaatttggaagaaagatgtttggagaggtgaatgtggaatcccttctggatttccgctcacagttatttgcaatagcatttttaatgagatgctcattagatatagctatgaaaaattactgcgccaggctaaagctccaagtatgtttttacaatccttcaaaaattttgtttctttgtgtgtgtatggtgatgataacttaattagtgttcatgaatatgtcaagccttactttaggggttctaaattgaaaagctttctagctagtcataacatcaccattactgatggtattgacaaaactagtgcaactttgcaattt

SEQ ID NO: 79924 - DNA, 352 bp, Glycine max
gagattcatgaaaaagttgtattgaaattttcacaggaggaatttcttacagcttggtcaactcaggtgcgtcctgcaacaactctgttggctgatgggtgtccatatttgtatgctatggtgcatgatagttcagtgtctacaataccaggtgattttgtcattggtgttaagttgacaaccataaacaatatgtgtgcatatgggcttaatcctggtatttcaggttctcgtcttttgggcaccattcctcagtccatttcacagcaaactgtttggaatcaaatggcaacagtgagaacaccattgaattttgattctagcaagcagagcttttgtcaattttctatcg

SEQ ID NO: 79925 - DNA, 353 bp, Glycine max
tcattttaaacacacctatctacttattttcgacgggatcaatcttggtgcctggatcagatgacaaacctttttgatcttctaccttgctacacttatagatatccttagtgatatgatcatcaatgtcgagcctaatgctaacttgtaccaggcaactgtgctcatggttttccaagatgtgtaacactctaagccagcagacttggcatcacattattcactgactgtatctatccttgcacagagtgatcaaagatccacaacggctctgttcaaaattgattttaatgcctcgggataacggtacaacgagcatccacaattgctctacgaggccaatctttacaata

SEQ ID NO: 79926 - DNA, 68 bp, Glycine max
aatttactttaagaggttgtccatgggatatggtgagagttcaccttaatttaatagctcagctatca

SEQ ID NO: 79927 - DNA, 347 bp, Glycine max
gcgattagaatggctcccaagggtttaatctttttggctgtgttatgcttctgagcactgtcactgagtcgttgtcttgcggaggataatggacttgttatgaacttctacaaggaatcatgccctcaggctgaagacatcatcaaagaacaagtcaagcttctctacaagcgccacaagaacactgctttctcctggctcagaaacatcttccatgactgtgctgttcagagttgtgatgcttcactgttgctggactccacaagaaggagcttgtctgagaaggaaacagatagaagctttgggttgagaaatttcaggtacattgagaccatcaaagaagcttt

SEQ ID NO: 79928 - DNA, 335 bp, Glycine max
gcaacattgagaacaccattgaattttgattctagcaagcagagcttttgtcaggtttctattgaccttctcggtggaggaattttagtggacaaaactggagattggatcacacttatacaaaattctccaattagtaacttgttgagagttgctgcttggaagaaaggttgtttaatggtcaagattgtgatgtctgggaatgcagcagtcaaaaggagtgattgggcctcattggtacaagtgtttttaacaaacagcaacagtacagagcattttgatgcatgttagtggacaaaatcaaaaccacattcctgggaattaatctttccaat

SEQ ID NO: 79929 - DNA, 355 bp, Glycine max
ttggagctttagcctggcgcagtaatttttttacaatccttcaaaaattttggttctttgtgtgtgtatggtgatgataacttaattagtgttcatgaatatgtcaagccttactttagtggttctaaattgaaaagctttctagctggtcataatatcaccattactgatggtattgacaaaactagtgcaactttgcaatttagaaagttagcagattgtgattttctcaagagaaactttaagcagatgtctaatgttttatgggtggctcctgaggacaaggcgagtttatggtcacaacttcattatgtttcgtgcaataatctggaaatgcaagaagcttatcttgtca

SEQ ID NO: 79930 - DNA, 352 bp, Glycine max
gcttgctcaaaagcaatgactatgtcatttaatccaaacccgtgttctgatgcatggagtttggaatttctgaagcgtactggatttcattgcgatatcatttgtgtcactggatggactgccaccccaatgcaggatgttcaggttacaattgattggtttatttcctctcaggaatgtgttcccaggacctattgtgttttaaatccacaaaatccttttgtgttaaataggtggatgggaaaattgactttcccccagggcacttcccgaagtgttaagagaatgcctctttctatagggggaggagctggtgcaaagaatgctattctcatgaatatgccaaatgctg

SEQ ID NO: 79931 - DNA, 143 bp, Glycine max
acccgtccttaacctcgaaatacgcctcgaggaaaactctttttctaaagttcaccatcaacctccacggactctttcatggcttgacgttcaaataaaaaacttctaaaacaattaacgagataagtaattttcctcataaa

SEQ ID NO: 79932 - DNA, 351 bp, Glycine max
atggactgccaccccaatgcaggatgttcaggttacaattgattggtttatttcctctcaggaatgtgttcccaggacctattgtgttttaaatccacaaaatccttttgtgttaaataggtggatgggaaaactgactttcccccagggcacttcccgaagtgttaagagaatgcctctttctatagggggaggagctggtgcaaagaatgctattctcatgaatatgccaaatgctgttctttcaatgtggagatattttgttggagatctcgtctttgaagtttctaagatgacttctccctacattaaatgtacagtctctttcttcatagcatttggaaatttggc

SEQ ID NO: 79933 - DNA, 89 bp, Glycine max
gaaagtgtaaccagtagcaccacaaccaccagcttccaaccacaagctgaaacatcaaacagcttcgcccaatcaaatatcctcaaagt

SEQ ID NO: 79934 - DNA, 295 bp, Glycine max
  unsure (1)..(295): unsure at all n locations
agcttgtgttggctaacacacaagaattctttgatggaaattttccagtggattcttggttaccaatttttgtgaattgtctctatcctgtaagtcaattaccttcagaagctgtcgttgtaaatgttacatgtggtagtggacgtggtggtttacccaccactgtttggtttatgtttgntgtttacaattgtttctcatacattaacaaaaggatttgctcagcacttggtaaagtttataaaatttttttttccaactggggtgggggtgcttttccaatatactttatttg

SEQ ID NO: 79935 - DNA, 341 bp, Glycine max
gttgacaaccataaacaatatgtgtgcatatgggctcaatcctggtatttcaggttctcgtcttttgggcaccattcctcagtctatttcacagcaaactgtttggaatcaaatggcaacagtgagaacaccattgaattttgattctagcaagcagagcttttgtcaattttctattgaccttctcggtggaggaattttagtggacaaaactggagattggatcacacttatacaaaattctccaattagtaacttgttgagagttgctgcttggaagaaaggctgtttaatggttaagattgtgatgtctgggaatgcagcagtcaaaaggagtgatt

SEQ ID NO: 79936 - DNA, 265 bp, Glycine max
atttagagttgaaatatctggacccaaaatagtcaacttcagtagattatttagaggtgaaatatctggacccaaaattgatatttttcatgtcctaaattaagttgttcagggaatatggatgggatgttttcgttcttgataaattttattcaacgggcttcttgtttcatttgtttacatgaatttaatgtttagccgaaaatgtgtttaaaacacttgacatttatttattcccaattgaaatttaaaatctagttgtttg

SEQ ID NO: 79937 - DNA, 374 bp, Glycine max
  unsure (1)..(374): unsure at all n locations
ccagcatacacccacctcggattcatccaacctccgcgtcttgcgactgccttggcatcactgggcttcaacaacagaggtactctgccgcggcagttacatgcacactgccacaaactactcccggagcatctgtgcagcggtctggttctccattgtgagaactgccctcacagcgttgcttcgcggcggtcggtcgcggctagtgctgtgaactttgctcggctggtttcagcggctggtctgcttgccatcgcgactgaaaggcccttggaaatttcctgctttggcttgtcagaacttggcgctcacatctgctcctggttggtctctgcagcgggctgttctccaacgcgagtactcccctncgagcc

SEQ ID NO: 79938 - DNA, 377 bp, Glycine max
  unsure (1)..(377): unsure at all n locations
aaattctccaattagtaacttgttgagagttgctgcttggaagaaaggctgtttaatggtcaagattgtgatgtctgggaatgcagcagtcaaaaggagtgattgggcctcattggtacaagtgtttttaacaaacagcaacagtacagagcattttgatgcatgtaagtggacaaaatcagaaccacattcctgggaattgatcttcccaatagaggtatgtggtcctaataatggttttgaaatgtggagttctgagtgggcaaatcaaacttcatggcatttgagtttccttattgacaatcccaaacagtctacagnttttgatattctcttgggaatctctcaagattttgaaattgctggtaatactctta

SEQ ID NO: 79939 - DNA, 378 bp, Glycine max
  unsure (1)..(378): unsure at all n locations
ctcaaaggccatgactgggaagatgttgcaaaacatgtgttagcaagagcaaactccagcaagtcaccaaagactcagacacagtgcaagaacaagattgagtccatgaagaaaaggtacagatcagagtctgccaccactgctgatgcctcatcttggcctttgtattctcgcctcgacgttctgctccgcgggacgggactgatatcttcttcgctgccaccaccaatagcagcaacagcgatagcagcaccatctcaatcaccacatgctactataaataataaccaggctttggtgttgttggagccaccttcactggctgtgttacaagcacctncttctgttgctcctccaccaattgcaattgcacaaaac

SEQ ID NO: 79940 - DNA, 376 bp, Glycine max
ctatacggtactatgcagagatgatggctgagactagtggtttgatcatatgactacagtgaaactgtatgaggaggacaatacgagggtaaggatatcacagcaatgggtgtgacagtgactatacactatattatatggccacttcacaatgactgctaagatgtgtgatctcatgcgatgcatacatgtagttgctcgaggataacccatagttagttcaaggacacaaatggagatgtgtgatagcgagcataacatccattgccagggcctatctcttattctggggacactcatgcctactaatgcattcgggtgtacatcacaataccaatatcacgacacggcgctcttaccactaaagaatgatttt

SEQ ID NO: 79941 - DNA, 366 bp, Glycine max
cttctacaaggaatcatgccctcaggctgaagacatcatcaaagaacaagtcaagcttctctacaagcgccacaagaacactgctttctcctggctcagaaacatcttccatgactgtgctgttcagagttgtgatgcttcactgttgctggactccacaagaaggagcttgtctgagaaggaaacagatagaagctttgggttgagaaatttcaggtacattgagaccatcaaagaagctttggaaagggaatgcccaggagttgtttcctgtgctgatatcctcgttctctctgccagagatggcattgtttcgctaggaggtccccatatccctcttaaaacaggaagaagggatggtagaag

SEQ ID NO: 79942 - DNA, 364 bp, Glycine max
agaacctattgtgttttaaatccacaaaatccttttgtgttaaataggtggatgggaaaactgactttcccccagggcacttcccgaagtgttaagagaatgcctctttctatagggggaggagctggtgcaaagaatgctattctcatgaatatgccaaatgctgttctttcaatgtggagatattttgttggagatctcgtctttgaagtttctaagatgacttctccctacattaaatgtacagtctctttcttcatagcatttggaaatttggctgatgacaccatcaattttgaggcttttccccacaagctggtgccagttggagagattcaggaaaaagttgtattgaaaatttcac

SEQ ID NO: 79943 - DNA, 367 bp, Glycine max
gattcaggtaaaaagttgtattgaaattttcacaagaggaatttcttacagcttggtcaactcaggtgcgtcctacaacaactctgttggctgatgggtgtccatatttgtatgctatggtgcatgatagttcagtgtctacaataccaggtgattttgtaattggtgttaagttgacaaccataaacaatatgtgtgcatatgggctcaatcctggtatttcaggttctcgtcttttgggcaccattcctcagtctatttcacagcaaactgtttggaatcaaatggcaacagtgagaacaccattgaattttgattctagcaagcagagcttttgtcaattttctattgaccttctcggtggagg

SEQ ID NO: 79944 - DNA, 246 bp, Glycine max
gccattcggaacaccacgaaccgcttgtgattcccggcgtgcgaagcggatcggatcgaggacacacttaaaccgtttttatcgcctataggggagatgtacaacagttacctcttaccgagataggaactactaaccggagactgattcatgatgaacacgaggcaagaactggataccgctgtaactaaggcggcgtgagaggaccggatataggtccattttacaaaaggagctgagtgttca

SEQ ID NO: 79945 - DNA, 233 bp, Glycine max
ctctcagttatgtgttcccaggacctattgtgttgggaatccacaaaatccttttgtgttaaataggtggatgggaaaactgactttccctcagggcacttcccgaagtgttaagagaatgcctctttctatagggggaggagctggtgcaaagaatgctattctcatgaatatgccaaatgctgatctttcaatgtggagatattttggaggagattttctctttcaatatt

SEQ ID NO: 79946 - DNA, 385 bp, Glycine max
  unsure (1)..(385): unsure at all n locations
tcggatttcggttcgggcttgaatttgtcaagcctaactttaggggttctaaattgaaaagctttctagctgggtcataaatatcaccattactgatggtattgacaaaactagtgcaactntgcaatttagaaagttagcagattgtgattttctcaagaaaaactttaagcagatgtctaatgttttgtgggtggctcctgaggacaaggcgagtttatggtcacaacttcattatgtttcgtgtaataatctggaaatgcaagaagcttatcttgtcaatctcgtaaatgtgttacgagaattgtatttgcacagtccagaggaagctcgccaattgagaaggaaagctctctctcgtattgaatggctgcaaaaagctgat

SEQ ID NO: 79947 - DNA, 331 bp, Glycine max
ggaatgctgtttttgtgtcggataaaagcctgatgtgtggggtgcacatggacaaactacatcacccgtctatcgcaggtcagctacgtctgcggctatgggacccacacacagtcccaccgtctggctactcattatggggcgaggaagcggaacggttcttcttgcttgaccaaatctgtggcagtgctacacctttgaaaacctttgtgcatggatggcatgctaaacaacacaatcttagagcttccctctatattttgaggggcaacacgacccgcaagaccctctctatatttgctgcatataaaaaggaaagggcaaaatcttc

SEQ ID NO: 79948 - DNA, 253 bp, Glycine max
cgtatacaaaaacctcaatctccgcgggttcaacactgtgttctgtgttctctctcacttctccgtagatctactttctctctctctctctgagaaatgcgtggggtctcgcttctggcgtttcttcttttcctatccctctgcgcctaaacttctgatcacgactacatttttgtgaaattctgccctctaacgttactttcttgtcctcctataatgcatctcaagtattcactttttttcccccaaccct

SEQ ID NO: 79949 - DNA, 367 bp, Glycine max
tggagattggatcacacttatacaaaattctccaattggtgacttgttgagagttgctgcttggaagaaaggttgtttaatggtcaagattgtgatgtctgggaatgcagcagtcaaaaggagtgattgggcctcattggtacaagtgtttttaacaaacagcaacagtacagagcattttgatgcatgtaagtggacaaaatcagaaccacattcctgggaattaatcttcccaatagaggtatgtggtcctaataatggttttgaaatgtggagttctgagtgggcaaatcaaacttcatggcatttgagtttccttattgacaatcccaaacagtctacagtttttgatattctcttgggaatc

SEQ ID NO: 79950 - DNA, 368 bp, Glycine max
gcttgttgttcaaggatggcaatttgtaagaaagatgtttggagagttgaatgtggaatcccttctggatttccgctcacagttatttgcaatagcatttttaatgagatgctcattagatatagctatgaaaaattactgcgccaggctaaagctccaagtatgtttttacaatccttcaaaaattttgtttctttgtgtgtgtatggtgatgataacttaattagtgttcatgaatatgtcaagccttattttagtggttctaaattgaaaagctttctagctggtcataatatcaccattactgatggtattgataaaactagtgcaactttgcaatttagaaagttagcaaattgtgattttct

SEQ ID NO: 79951 - DNA, 343 bp, Glycine max
cacagaatcactctctgaggctggaaatattcaggggtttaaatcctatttgactgatttgtcatgggcttgtcagatattgagtaagttggaaattatgagggagtttgtttacacattctttaacctcaagttttatgttgtcatcagctgtcaacaaaggggcatcatcatcttcagttagcatgtactcaagttgctcttgtgccgaagacttaagatcattcaattgtggaggtggagatgcggctcgagccatctttcctaattatggctaattctcatttctctcattattttggttttaagtattgataacatgatgattgggtggctgactatg

SEQ ID NO: 79952 - DNA, 333 bp, Glycine max
cggaattcggttcggggggcatttgagtttccttattgacaatcccaaacagtctacagtttttgatattctctttgggaatctctcaagaatttgaaaattgctgggaatactcttatgccagctttttctgttccacaggctactgccagatcttctgaaaatgcggaatcctctgcatgatctggaatttgtgttttctttcgcttgttcgtttgtttaattcaataaaggaaattaggcatgaccctcttgttgagtatgctctgcctatttgaaaatttccacacctcttttaattgtcgtaatgatgtgtgaagtgtgtgttatttt

SEQ ID NO: 79953 - DNA, 165 bp, Glycine max
  unsure (1)..(165): unsure at all n locations
tgataagcttgtgttggctaacacacaagaattctttgatggaaattttccagtggattcttggttaccaatttttgtgaattgtctttatcctgtaagtcaattaccttcagaagctgtcgttgtaaatgtcacatgtggtagtggacgtggtggnnnacccac

SEQ ID NO: 79954 - DNA, 373 bp, Glycine max
atcaccattactgatggtattgacaaaactagtgcagctttgcaatttagaaagttggcagattgtgattttctcaagagaaactttaagcagatgtctaatgttttatgggtggctcctgaggacaaggcgagtttatggtcacaacttcattatgtttcgtgcaataatctggaaatgcaagaagcttatcttgtcaatctcgtaaatgtgttacgagaattgtatttgcacagtccagaggaagctcgccaattgagaaggaaagctctctctcgtattgaatggctgcaaaaagctgatgtgcctaccatagcacagattgaagagttccattcgatgcaaaagatgatgaatgctcctgattcaaatg

SEQ ID NO: 79955 - DNA, 374 bp, Glycine max
ctcgagccgaatcggctcgagaaatcaaacttacttgaaaatacttccccttttccaacattcaataccttggtttctgtactgctctttaaaaactgaatttatataatttgcttacaaaaaagtatttccaataacatcacatccatcattaactaatgaagaaactttgattttctagtgaggaggagttctttctactttattagcctctcagcactttatagaagtgtctaacttgtaacttatacaagagatgcagtgagaagaaagatatgagatcccctaataagtaactcattcctatgagaatgcagtctgatgtacccacaataaaaccttgcactttatgttgagttgatgaggactggatt

SEQ ID NO: 79956 - DNA, 87 bp, Glycine max
gccaaggttctagcaagcttatgttgttaaggtgtacatgaagacactggtttagggaaaaactgtagagggcaaggctttgataaa

SEQ ID NO: 79957 - DNA, 262 bp, Glycine max
cgttattttatataaaacacacacacttcacacatcattacgacatttaaatgtgggggggtaatgatgtgagatgaggcagtcaccttcaagaccttcgccaccgttatcatcggggcgctttttttcgccgccgccgcctcctccgttcaggatttgcctccgccgccggcacccgaacccgatgcctaagcagccggatccgttttgagctcgatggccgtcattggagcttccgttgtgaatacattgctcgctatct

SEQ ID NO: 79958 - DNA, 208 bp, Glycine max
cgttgctgatatgacagagcttcctagtgtgctgccgctccaaataatggtaatgctggtccttatcaaaaggggcagcagcaacaatgagtgggggggatgggcttgcggctcttgcccaccacctatcaaattttcctttaaacttatcaaggggattaaagattgatgggggtatccgggggtttggctatattggactcaaaaa

SEQ ID NO: 79959 - DNA, 142 bp, Glycine max
tgacggcgcatgcacgcctacctaagcttgggatttgggttgaggccatggattggcctggttgggccaataaatactgggtaagggccaccattttctggggtgggaatattctaagtttggagggttggttaccaaacca

SEQ ID NO: 79960 - DNA, 248 bp, Glycine max
gaattgtatttgcacagtccagaggaagctcgccaattgagaaggaaagctctctgtcggattgaatggctgcaaaaagctgatgtgcctaccatagcacagattgaagagttccattcgatgcagaggatgatgaatgctcctgattcaaatgataatattgatctactgttgagcattgatttgtggggttacaaggggcagtaaggcttttccaaccaggatggtttttgatgttaagctggggt

SEQ ID NO: 79961 - DNA, 126 bp, Glycine max
atctcttactaattcatgacacaaccatttccatgcatcactaccttaagaaaattattgtgaaacttttttgtcaaacactcccattcccttttaatttatatttttttaataatctttccacac

SEQ ID NO: 79962 - DNA, 360 bp, Glycine max
agcaattttaaataatataacttttaatactgcgggggaacccaaaccgtgggagtgggcacattattatattaggggagattatactcaacagaaaaaaagaagaaaaaaaataacattaagaaattgcattaggaaacaaacaaacctattccttcaagggttacgaacaagctgtgaaatatttaaatcacatgtacataactggcgctaaacggtcctagacaaactcgaatctaaattggcttgtcatacttatccttgtcttggcagatacactcaataatgaatgtactatcccattaactacatatggtgtataggtaacacgtgattcacagactacaccaacttttacta

SEQ ID NO: 79963 - DNA, 366 bp, Glycine max
ttaatctctgtatttttatagcaaaatgctaaccgtcaaaagtgttaccagtattgattatttaattttactgtgttttgtaatgcaccttgaatttaatttattattatttattactgtgtttgaatttgagagttgagattggactttttgttgttgaaggtgtggaaacggtgaaggctgatagcgacgccgggaaggtgaccgtgaccggaaaagtggaccccacgaaagtgagggataacctggcggagaagataaggaagaaggtggaactggtgtctccgcagcccaagaaggagcaggagaacgagaaagagaacaaggatgctaaggcaaacaacaaatccgagaataacaaaaccc

SEQ ID NO: 79964 - DNA, 366 bp, Glycine max
atataattgtattcttacttggtagttcatttgtataacggaaattacaaactggggagatcattctaactacacaataacattgactttaaatatatttaataagataagcgggcaacatgaatatatcttttcctttatagagcagttatcatatttcttaccatgcatattttatttaataaatatattcttctgcactgttttaaaatttctaatatgggcgttccttcttctatttagttttttctccttttatttaattttcggaccggtacctttcatcttaccatttttccttattgttagtcattttatatctttttgtattcatttccttatttttttcttttgtatatatttttt

SEQ ID NO: 79965 - DNA, 361 bp, Glycine max
  unsure (1)..(361): unsure at all n locations
cgccaattgagaaggaaagctctctctcntagggagtggctgcaaaaagctggtgtgcctaccatagcacagattgaagagttccattcgatgcagaggatgatgaatgctcctgattcaaatgataatattgatctactgttgagcattgatttgttgggtttacaaggagcaggtaaagcttttccaaacaagattgtttttgatgataagcttgtgttggctaacacacaagaattctttgatggaaattttccagtggattcttggttaccaatttttgtgaattgtctttatcctgtaagtcaattaccttcagaagctgtcggtgtaaatgttacatgtggtaggggacgtggtg

SEQ ID NO: 79966 - DNA, 369 bp, Glycine max
ctgaattattctaacccacacatattccataatcgggcgtggtcaacgactgctaggattccaatttttctccatactctttatcctatacatcaacatccttaccttgcttaaacgacatatcgtacatcaccccttttgtcttgctcacagtcacagcagtggtagcttcccaaaaaagagtgccaatggcatcttcttcagactcatgggtgaaggaatataatgaagcactgaaacttgctgatgatatcagtcgcatgatttctgagcagagttcatttcctgcatctggaccagaaacccagcatcattcatctgctataaggagaaagattacaatattggggaccaggcttgatagcttgc

SEQ ID NO: 79967 - DNA, 358 bp, Glycine max
ctttcctccagggtacttcccgaagtgttaagagagtgcctctttctataggggggggagctggtgcaaagaatgctattctcatgaatatgccaaatgctgttctttcaatgtggagatattttgttggagatctcgtctttgaagtttctaagatgacttctccctacattaaatgtacagtctctttcttcatagcatttggaaatttggctgatgacaccatcaattttgaggcttttccccacaagctggtgcagtttggagagattcaacaaaaacttctattgaaattttcacaagaggaatttcttacagcttggtcaactcaggtgcgttctgcaacaactctgttggc

SEQ ID NO: 79968 - DNA, 113 bp, Glycine max
  unsure (1)..(113): unsure at all n locations
caaatgcaacagttctttaaatcttgcanatnttgctagtgatgacatgctggcgggggtataacacatactttatacatatcttaattgtattgaaacaaaaatttattctc

SEQ ID NO: 79969 - DNA, 358 bp, Glycine max
ctccgcctcctcaccaccaccactccttcaccgcggcgccgagcctcaccttgctggcgcctacaccatcgccgcccactacctcgcgtgagctgccaccatgcgttccaacagcatctcatccatctcctcttcctcctctgcctgggactgcgacgactccatgcagatcttcgtcaagaacatcgccggcgagactttccctctaactgtaccgtcggatacctcgatagaaacgctcaagagcctccttgccctgcgcaccgacctggcctcctcagacctgcgtctcgtgcatgccggcaagcatctgacgttggctgactcgaccctgaccgactacaacatcacccgagac

SEQ ID NO: 79970 - DNA, 363 bp, Glycine max
ctgagaatacaggtatagcattggcctgtgctatgaatagttcttttagggggcgcgccagttctgatatttacaccatctgctctcaagactgtgaattatggaatcctgcttgcacaaaagcaatgactatgtcatttaatccaaacccgtgttctgatgcatggagtttggaatttctgaagcgtaccggatttcattgtgatatcatttgtgtcactggatggactgccaccccaatgcaggatgttcaggttacaattgattggtttatttcctctcaggaatgtgttcccaggacctattgtgttttaaatccacaaaatccttttgtgttaaataggtggatgggaaaactgactt

SEQ ID NO: 79971 - DNA, 366 bp, Glycine max
tgcttcctcttcaacccttcttctttccatcatctgccaccactttcacgctgctgtggaatttacaacactaactcacataaaaccaaagttaaatgatgaatttcattgtaaattttcaattgaaatctgttgtggaaatttcctttgttcattgagattttttcgaggtgcagaagatttcccagttttgaagatatatttctcttcagacgggttttgaaactctgaactttttgcaagtcgtacgtgacaaggacgatcgctacttggccatcgtcgcagacagaagctcagaaatgtgattagtagttgagttttcggcatagatttgcattttccatagctctggaactgaaatctgga

SEQ ID NO: 79972 - DNA, 368 bp, Glycine max
ctctcatcacttttatctgtcctcttttattttgtgccgtttcccaggtcttcttggaaaagaaaagtcgttgtgcaggtaccttcatgctccaactacttccccttgcttcctcgtcattatcatcatctgtaatttcgtattagcgtacactacacacactcctcttcctagctgccttcacagcaaaatactgaccccagtggaggaagtgatggaagcagtttacaggttgaaacctcttttgccttgtctagaggaggaagtggttagagttgggaacgctactacttctgagatgcgtgttggatcaacggctaattgttgttacctgcagctggaagctcctcaacagaataatgtaaccg

SEQ ID NO: 79973 - DNA, 364 bp, Glycine max
ctcgagccagataaggtccatgcttattgaatggtgtgtgctcaccatcgagtgcgagagcattactgcatgggcccctacatgttgtatctatgtgtcttagtcataatgcaaaacaccctttcccactagggcgtctacccctttggctttttgctaattgccactagtactactagtactatactccatgtggtctcgatgaattcgccactgttcgttgttatttaaaacaacctcggtcaacactaacacatgtcacacaccaatatgattcctctttaaccatgaatcttccttcctttagcttttttccatcagggctttcttatgttattatgatttttactattttttcattctc

SEQ ID NO: 79974 - DNA, 316 bp, Glycine max
tggcatttgagtttccttattgacaatcccaaacagtctacagtttttgatattctcttgggaatctctcaagattttgaaattgctggtaatactcttatgccagctttttctgttccacaggctactgccagatcttctgaaaatgcggaatcctctgcatgatctggaattcgtgttttctttcgcttgttcgtttgtttaattcaataaaggaaattaggcatgaccctcttgttgagtatgctctgcctatctgaaaatttccacacctcttttaattgtcgtaatgatgtgtgaagtgtgtgttatttta

SEQ ID NO: 79975 - DNA, 368 bp, Glycine max
taaagattttatattttataaaaaaaaaataataacgtgggaaaaattaataaaatggtggggttaataaattatagataaaatggaaatatgagatatgtgtataatatgaaacagttattagagtatgattataatttgtaggattataatgatttttatgagattaatacttactaagttgtatcatattcttcttttcgaaagaagatataagagtattctttcaatcctagctgacaccattatgcaagataaagaataaacgcggagagagagataaatcttgtttttttactttcttaagaaaaccaaagtgcgattaagtttttgtgaaagtatccttgtgttaagaggtacattctttt

SEQ ID NO: 79976 - DNA, 365 bp, Glycine max
atcatttgtgtcactggatggactgccaccccgagtgcaggatgttcaggttacaattgattggtttatttcctctcaggaatgtgttcccaggacctattgtgttttaaatccacaaaatccttttgtgttaaataggtggatgggaaaactgactttccctcagggcacttcccgaagtgttaagagaatgcctctttctatagggggaggagctggtgcaaagaatgctattctcatgaatatgccaaatgctgttctttcaatgtggagatattttgttggagatctcgtctttgaagattctaagatgactttttcctacattaaatgtacagtctctttcttcatagcatttggaaatt

SEQ ID NO: 79977 - DNA, 368 bp, Glycine max
cgcacctgctgttggcttgttgttcaaggatggcaatttgtaagaaagatgtttggagagttgaatgtggaatcccttctggatttccgctcacagttatttgcaatagcatttttaatgagatgctcattagatatagctatgaaaaattactgcgccaggctaaagctccaagtatgtttttacaatccttcaaaaattttgtttctttgtgtgtgtatggtgatgataacttaattagtgttcatgaatatgtcaagccttactttagtggttctaaattgaaaagctttctagctagtcataacatcaccattactgatggtattgacaaaactagtgcaactttgcaatttagaaagttagca

SEQ ID NO: 79978 - DNA, 299 bp, Glycine max
gcaaatttcctggttgccttaacgctgtatgaaaaacggtatagccacaaacccatgtgactaacacaagctctgatgatatactcaatgatattcgactagcatgggggcgtgtgaacaaggccaagctgagagacttttatgcaagccacagacttggtgatatagacacacaggcacctccccagtgtatgcattgcactttacgatcaaaaaattgtctggtggtaaaatcatatcgtgatgaaaataatgcatacatctcaccaataaagagagttgaatcacaatctaatgaa

SEQ ID NO: 79979 - DNA, 344 bp, Glycine max
gtgtttttaacaaacagcaacagtacagagcattttgatgcatgtaagtggacaaaatcagaaccacattcctgggaattaatcttcccaatagaggtatgtggtcctaataatggttttgaaatgtggagttctgagtgggcaaatcaaacttcatggcatttgagtttccttattgacaatcccaaacagtctacagtttttgatattctcttgggaatctctcaagattttgaaattgctggtaatactcttatgccagctttttctgttccacaggctactgccagatcttctgaaaatgcggaatcctctgcatgatctggaattcgtgttttctttcg

SEQ ID NO: 79980 - DNA, 103 bp, Glycine max
tgtaatcttaagtaatgtttatgtggagaaggattaaaaaggaagctttcttcagatgtgattttccatttgctctactttgaatccaatctaacttttaagt

SEQ ID NO: 79981 - DNA, 339 bp, Glycine max
cttagttgtcaagttggaatcaacccatactccatggaatggactggtttggccaatagattactgagtaagggcaacgatattctgtgttgcgattatgctagttttgatggtttgattaccaagcaagttatgagcaagatggcagaaatgataaacagtctttgtggtggtgatgaaaaattgatgcgtgaaaggacacatttgctgttggcttgttgttcaaggatggcaatttgtaagaaagatgtttggagagttgaatgtggaatcccttctggatttccgctcacagttatttgcaatagcatttttaatgagatgctcattagatatagc

SEQ ID NO: 79982 - DNA, 341 bp, Glycine max
aaaagctgatgtgcctaccatagcacagattgaagagttccattcgatgcagaggatgatgaatgctcctgattcaaatgataatattgatctactgttgagcattgatttgttgggtttacaaggagcaggtaaagcttttccaaacaagattgtttttgatgataagcttgtgttggctaacacacaagaattctttgatggaaattttccagtggattcttggttaccaatttttgtgaattgtctctatcctgtaagtcaattaccttcagaagctgtcgttgtaaatgttacatgtggtagtggacgttgtggtttacccaccactgtttggatta

SEQ ID NO: 79983 - DNA, 333 bp, Glycine max
aattgattggtttatttcctctcaggaatgtgttcccaggacctattgtgttttaaatccacaaaatccttttgtgttaaataggtggatgggaaaactgactttccctcagggcacttcccgaagtgttaagagaatgcctctttctatagggggaggagctggtgcaaagaatgctattctcatgaatatgccaaatgctgttctttcaatgtggagatattttgttggagatctcgtctttgaagtttctaagatgacttctccctacattaaatgtacagtctctttcttcatagcatttggaaatttggctgatgacaccatcaattt

SEQ ID NO: 79984 - DNA, 327 bp, Glycine max
gtatggtgatgataacttaattagtgttcatgaatatgtcaagccttactttagtggttctaaattgaaaagctttctagctggtcataatatcaccattactgatggtattgacaaaactagtgcaactttgcaatttagaaagttagcagattgtgattttctcaagagaaactttaagcagatgtctaatgttttgtgggtggctcctgaggacaaggcgagtttatggtcacaacttcattatgtttcgtgtaataatctggaaatgcaagaagcttatcttgtcaatctcgtaatgtgttacgagaattgtatttgcacagt

SEQ ID NO: 79985 - DNA, 111 bp, Glycine max
cgtttcgagctcgagccattcacacctttaatggagttaacgaaattgttccggaccctataattgagtatcctctgtctatttgaaaacatccacacctactactaattg

SEQ ID NO: 79986 - DNA, 353 bp, Glycine max
ctcgagcttctcgagccgattcggctcgagaaagagaaaaaaaaaaaaaaaaaaagaaaaaaaaaaaaaaaaaaaaaaaaaaaaggaaaaaaaaaaaaaaaaaaaaaaaaaaaaacaaaaaataaaaaaaaaaacaaaaacctaaaaacaaacaaaaatatacatatagtaaaataaaataaaaaatagaaataaaaaatgtaaatagaataataattgtttgaaatttattattcactcacattttccactcaacattctatctctaagcttgaagggttgagcctttttactttaatgagtgatctaatttacattaattgcctttttcttactgccctttttctattttt

SEQ ID NO: 79987 - DNA, 343 bp, Glycine max
ctgctgttggcttgttgttcaaggatggcaatttgtaagaaagatgtttggagaggtgaatgtggaatcccttctggatttccgctcacagttatttgtaatagcatttttaatgagatgctcattagatatagctatgaaaaattactgcgccaggctaaagctccaagtatgtttttacaatccttcaaaaattttgtttctttgtgtgtgtatggtgatgataacttaattagtgttcatgaatatgtcaagccttactttagtggttctaaattgaaaagctttctagctggtcataatatcaccattactgatggtattgacaaaactagtgcaactt

SEQ ID NO: 79988 - DNA, 337 bp, Glycine max
attgaattttgattctagcaagcagagcttttgggaattttctattgaccttcgcggtggaggaattttagtggacaaaactggagattggatcacacttatacaaaattctccaattagtaacttgttgagagttgctgcttggaagaaaggttgtttaatggtcaagattgtgatgtctgggaatgcagcagtcaaaaggagtgattgggcctcattggtacaagtgtttttaacaaacagcaacagtacagagcattttgatgcatgtaagtggacaaaatcagaaccacattcctgggaattaatcttcccaatagaggtatgtggtcctaat

SEQ ID NO: 79989 - DNA, 340 bp, Glycine max
aaatgctgttctttcaatgtggagatattttgttggagatctcgtctttgaagttgctaagatgacttctccctacattaaatgtacagtctctttcttcatagcatttggaaatttggctgatgataccatcaattttgaggcttttccccacaagctggtgcagtttggagagattcaggaaaaagttgtattgaaattttcacaagaggaatttcttacagcttggtcaactcaggtgcgtcctgcaacaactcggctgatgggtgtccatatttgtatgcaatggtgcatgatagttcagtgtctacaataccaggtgattttgtcattggtgtca

SEQ ID NO: 79990 - DNA, 344 bp, Glycine max
catttgtgtcactggatggactgccaccccaatgcaggatgttcaggttacaattgattggtttatttcctctcaggaatgtgttcccaggacctattgtgttttaaatccacaaaatccttttgtgttaaataggtggatgggaaaactgactttccctcagggcacttcccgaagtgttaagagaatgcctctttctatagggggaggagctggtgcaaagaatgctattctcatgaatatgccaaatgctgttctttcaatgtggagatattttgttggagatctcgtctttgaagtttctaagatgacttctccctacattaaatgtacagtctctttct

SEQ ID NO: 79991 - DNA, 116 bp, Glycine max
aatttctgttagttttgtttgtggttttgcccgtgaatgttgtaatgctgttatgtggtccttgcatcgatgtatttttgctctaataggattttgcatcggtgttggttcaaaaa

SEQ ID NO: 79992 - DNA, 367 bp, Glycine max
ccgtccgtaagctcggaattcggttcgaggaaattttcacaggaggaatttcttacagcttggggaactcaggtgcgtcctgcagcaactctgttggctgatgggtgtccatatttgtatgctatggtgcatgatagttcagtgtctacaataccaggtgattttgtcattggtgttaagttgacaaccataaacaatatgtgtgcatatgggcttaatcctggtatttcaggttctcgtcttttgggcaccattcctcagtccatttcacagcaaactgtttggaatcaaatggcaacagtgagaacaccattgaattttgattctagcaagcagagcttttgtcaattttctatcgaccttctcg

SEQ ID NO: 79993 - DNA, 342 bp, Glycine max
tggaatcaacccatactccatggaatggactggtttggccaatagattactgagtaagggcaacgatattctgtgttgcgattatgctagttttgatggtttgattaccaagcaagttatgagcaagatggcagaaatgataaacagtctttgtggtggtgatgaaaaattgatgcgtgaaaggacacacctgctgttggcttgttgttcaaggatggcaatttgtaagaaagatgtttggagagttgaatgtggaatcccttctggatttccgctcacagttatttgcaatagcatttttaatgagatgctcattagatatagctatgaaaaattactgcg

SEQ ID NO: 79994 - DNA, 340 bp, Glycine max
aatcatgtgagcaatcctccatgttatatctgcaacaacttctcatcatcatgagcggcagcaccaccaaaacttaccttatagtaataattctcttcctgtggtgcgtcctgatgctagtgctttccagaggtatagacaagacttaggctccaacatggcctcaaatttcagaaggcaaagcctcatgaagaggtctcttgtgttctttagaaacatgaactttatgagaatgagagaacgcgttcaagcaacgtctcgtcccaccaatactcagcttcatcatatgatatcagagaggagaaggcgtgagaagctaaacgagaattttcaagcactt

SEQ ID NO: 79995 - DNA, 333 bp, Glycine max
ggaatccacacaatactttcgcgttcaataagcggatgggaaaactgactttacatcagggcgctatctggacagatacaagagtgcctatttgtatatgcagaggagcttacgcatacactgctcttatcatgaatacaccaaatgctgttctttgaatgttaaaatgtcaaattgctgatatcgtttataaaggtactaataaccattctacgctacataatactacgagaaactttataaatagcatttgtatagcagtctgttaacaccatccaatcagaggtttaatcccacatgaatgctctgccacacatagaatgaggcaaatgg

SEQ ID NO: 79996 - DNA, 346 bp, Glycine max
gcttgcacaaaagcaatgactatgtcatttaatccaaacccgtgttctgatgcatggagtttggaatttctgaagcgtactggatttcattgcgatatcatttgtgtcactggatggactgccaccccaatgcaggatgttcaggttacaattgattggtttatttcctctcaggaatgtgttcccaggacctattgtgttttaaatccacaaaatccttttgtgttaaataggtggatgggaaaattgactttcccccagggcacttcccgaagtgttaagagaatgcctctttctatagggggaggagctggtgcaaagaatgctattctcatgaatatgccaa

SEQ ID NO: 79997 - DNA, 337 bp, Glycine max
cccttattcagggtcaccgctgttagggttagggttagggttagggtttttccgcacattctttctctagcaatcttcttctaccactttcccctcattctctctcttagtctcttcaattgtaagttttttgcgctagggtttcctctgctatctcttgtactcgaagctcgtccctttttccggatctcgatctatggatatccgcaagaggggaagacccgaacccggcttcagcttaaatggtggattcaagaaatccaagcaagaaatggagtccttatcaactggtgtaggaagcaaatcgaagccatgtaccaagtttttcagcactgct

SEQ ID NO: 79998 - DNA, 342 bp, Glycine max
gtgtttttaacaaacagcaacagtacagagcattttgatgcatgtaagtggacaaaatcagaaccacattcctgggaattaatcttcccaatagaggtatgtggtcctaataatggttttgaaatgtggagttctgagtgggcaaatcaaacttcatggcatttgagtttccttattgacaatcccaaacagtctacagtttttgatattctcttgggaatctctcaagatttttgaattgctggtaatactcttatgccagctttttctgttccacaggctactgccagatctttttgaaatgcggaattctttgcatgatctggaattcgtgttttcttt

SEQ ID NO: 79999 - DNA, 341 bp, Glycine max
ggagatattttgttggagatctcgtctttgaagtttctaagatgacttctccctacattaaatgtacagtctctttcttcatagcatttggaaatttggctgatgacaccatcaattttgaggcttttccccacaagctggtgcagtttggagagattcaggaaaaagttgtgttgaaattttcacaagaggaatttcttacagcttggtcaactcaggtgcgtcccgcaacgactctgttggctgatgggtgcccatatttgtatgctatggtgcatgatagttcagtgtctacaataccaggtgattttgtcattggtgttaagttgacaaccataaac

SEQ ID NO: 80000 - DNA, 340 bp, Glycine max
aaatgataaacagtctttgtggtggtgatgaaaaattgatgcgtgaaaggacgcacctgctgttggcttgttgttcaaggatggcaatttgtaagaaagatgtttggagagttgaatgtggaatcccttctggatttccgctcacagttatttgcaatagcatttttaatgagatgctcattagatatagctatgaaaaattactgcgccaggctaaagctccaagtatgtttttacaatccttcaaaaattttgtttctttgtgtgtgtatggtgatgataacttaattagtgttcatgaatatgtcaagccttactttagtggctctaaattgaaaag

SEQ ID NO: 80001 - DNA, 355 bp, Glycine max
taatgagatgctcattagatatagctatgaaaaattactgcgccaggctaaagctccaagtatgtttttacaatccttcaaaaattttgtttctttgtgtgtgtatggtgatgataacttaattagtgttcatgaatatgtcaagccttactttagtggttctaaattgaaaagctttctagctggtcataatatcaccattactgatggtattgacaaaactagtgcaactttgcaatttagaaagttagcagattgtgattttctcaagagaaactttaagcagatgtctaatgttttatgggtggctcctgaggacaaggcgagtttatggtcacaacttcattatgtttcg

SEQ ID NO: 80002 - DNA, 362 bp, Glycine max
gttctgatatttacaccatctgctctcaagactgtgaattgtggaatcctgcttgcacaaaagcaatgactatgtcatttaatccaaacccgtgttctgatgcatggagtttggaatttctgaagcgtactggatttcattgcgatatcatttgtgtcactggatggactgccaccccaatgcaggatgttcaggttacaattgattggtttatttcctctcaggaatgtgttcccaggacctattgtgttttaaatccacaaaatccttttgtgttaaataggtggatgggaaaattgactttcccccagggcacttcccgaagtgttaagagaatgcctctttctatagggggaggagct

SEQ ID NO: 80003 - DNA, 359 bp, Glycine max
caaaaagctgatgtgcctaccatagcacagattgaagagtttcattcgatgcagaggatgatgaatgctcctgattcaaatgataatattgatctactgttgagcattgatttgttgggtttacaaggagcaggtaaagcttttccaaacaagattgtttttgatgataagcttgtgttggctaacacacaagaattctttgatggaaattttccagtggattcttggttaccaatttttgtgaattgtctttatcctgtaagtcaattacctccagaagctgtcgttgtaaatgttacatgtggtagtggacgctgtggtttacccaccactgcttggattagttctgcagttaacaa

SEQ ID NO: 80004 - DNA, 147 bp, Glycine max
caagattttccaatggtcaaagataagtggtggtgtgtgctatgtgaagtgggtgtttgcatcgcttgctaccacttttcatgcatcttggacatgggttgtgtttgagtagacaacttgattaagctattaaaataactgtttatc

SEQ ID NO: 80005 - DNA, 354 bp, Glycine max
ggacacacctgctgttggcttgttgttcaaggatggcaatttgtaagaaagatgtttggagagttgaatgtggaatcccttctggatttccgctcacagttatttgcaatagcatttttaatgagatgctcattagatatagctatgaaaaattactgcgccaggctagagctccaagcatgtttttacaatccttcaaaaattttgtttctttgtgtgtgtatggtgatgataacttaattagtgttcatgaatatgtcaagccttactttagtggttctaaattgaaaagctttctagctggtcataatatcaccattactgatggtattgacaaaactagtgcaactttgc

SEQ ID NO: 80006 - DNA, 359 bp, Glycine max
attcttttcttctctctccagttctctcttccctcagcacaaacatcccatagccactgcttaaccacgaagaaaccgagacaacaaaacacacttttcccccctgttctgctctgttctgtcctgttctttccacgctgttcttcaccgtttcaacaaaaacatgatccaccccatttcatgtttcctcttcctaccctcaaattctccataaagttcatctcttttcaatccattctcaactgggtcactcacaattccaaagggtgtcacatcgttagatctcaaattcttcagctccaatggcgtcgtgccccgcgaattccttcaacttcaacaccaccctctgcgcgtgcacc

SEQ ID NO: 80007 - DNA, 355 bp, Glycine max
ggagattttcacagtcttctcttctctgttgcctgtcataaattatggtcaaccatactttctcagctccatcaggtacgtgctcatgattggcctaccttaagttacgacagatcagagtttcccatagtccattattaaaccgtttgagatttctccaacccaatacaatggagcagctgacagaattgtgtggttttcacaaccagatattctaaaggcgggaacagcaaagaagaggaagaaatctgttaaaatggtccaagtaagaggatcaatatgccccatgcattgccaattttgttgtaccaagtcactgaaatattatgagtctgacgttgagcccgattttttt

SEQ ID NO: 80008 - DNA, 356 bp, Glycine max
gaattgatcttcccaatagaggtatgtggtcctaataatggttttgaaatgtggagttctgagtgggcaaatcaaacttcatggcatttgagtttccttattgacaatcccaaacagtctacagtttttgatattctcttgggaatctctcaagattttgaaattgctggtaatactcttatgccagctttttctgttccacaggctactgccagatcttctgaaaatgcggaatcctctgcatgatctggaatttgtgttttctttcgcttgttcgtttgtttaattcaataaaggaaattaggcatgaccctcttgttgagtatgctctgcctatttgaaaatttccacacctc

SEQ ID NO: 80009 - DNA, 330 bp, Glycine max
  unsure (1)..(330): unsure at all n locations
ggtttcgctttttttcttttcagatttatatatagagagaagaaaaaaaaagtagcagataacaggtttgagagagagagagagagagtgtgaggttttagattgagagagagagcgagagagagagattgttgctgaaaagaagatgaagaagaatttatctgaatttctcttgtgttcatcgatcaaactctgatcgtttaatttttttttaaattttctcttctaatnntttttttttttttttttnttttaggaagaaattaaacataaattttgggcccaagccatttccattgaattttccaccaccgcaccagaacccccttt

SEQ ID NO: 80010 - DNA, 359 bp, Glycine max
ccgcaacgactctgttggctgatgggtgcccatatttgtatgctatggtgcatgatagttcagtgtctacaataccaggtgattttgtcattggtgttaagttgacaaccataaacaatatgtgtgcatatgggctcaatcctggtatttcaggttctcgtcttttgggcaccattcctcagtccatttcacagcaaactgtttggaatcaaatggcaacagtgagaacaccattgaattttgattctagcaagcagagcttttgtcaattttctattgaccttctcggtggaggaattttagtggacaaaactggagattggatcacacttatacaaaattctccaattagtaacttg

SEQ ID NO: 80011 - DNA, 360 bp, Glycine max
cgctctgtttctgtctctgtgtttgcggctgaggattccgaacgagcgaccttcttcgtttctcgcaaagtttaagtcatcatgggtaaggaaaagactcacatcaacattgtcgtcattggacatgtcgactctgggaagtcaactaccactggtcatttgatctacaagcttggaggtattgacaagcgtgtgattgagaggttcgagaaggaggctgctgagatgaacaagaggtcattcaagtatgcttgggtgcttgacaagctcaaggctgagcgcgaaagacgaattaccattgatattgctttgtggaagtttgaaaccaccaagtactactgcacagtcatcgatgccccc

SEQ ID NO: 80012 - DNA, 362 bp, Glycine max
gaaaagctttctagctggtcataatatcaccattactgatggtattgacaaaactagtgcaactttgcaatttagaaagttagcagattgtgattttctcaagagaaactttaagcagatgtctaatgttttgtgggtggctcctgaggacaaggcgagtttatggtcacaacttcattatgtttcgtgtaataatctggaaatgcaagaagcttatcttgtcaatctcgtaaatgtgttacgagaattgtatttgcacagtccagaggaagctcgccaattgagaaggaaagctctctctcgtattgaatggctgcaaaaagctgatgtgcctaccatagcacagattgaagagttccatt

SEQ ID NO: 80013 - DNA, 356 bp, Glycine max
ggtggatgggaaaactgactttccctcagggcacttcccgaagtgttaagagaatgcctctttctatagggggaggagctggtgcaaagaatgctattctcatgaatatgccaaatgctgttctttcaatgtggagatattttgttggagatctcgtctttgaagtttctaagatgacttctccctacattaaatgtacagtctctttcttcatagcatttggaaatttggctgatgacaccatcaattttgaggcttttccccacaagctggtgcagtttggagagattcaggaaaaagttgtgttgaaattttcacaagaggaatttcttacagcttggtcaactcaggtgcgt

SEQ ID NO: 80014 - DNA, 351 bp, Glycine max
tacagagaaatccataagttaaatccctttattcaattttaaaggactctgataaatcttttcaactgagactattgcgaaaaatcagtaaaagcatgcattcaatatcttgatctaaagcccaagctgtgagcctctccttccctatcagactctcaaaagcaattgcatgaatataacagtaggtatctgccaggttgaatgtaagatttaatatatcattcacaattaaaatataattttggccacttccagtggcgtgtccctgaatgaaattggttcgaaggctgtatccaacaagttacagcagttgattgggtagctaagacagagttaagggcaatatccttc

SEQ ID NO: 80015 - DNA, 362 bp, Glycine max
gttgatcatactctctttgtgtaaattgagtgattgtgcggtataaagacacgtgtgttgagcatatatatacagaccctaaggtggcgggcatgcttgtgagcatagatcagaccacattattgggagataaggttacatatagacgtatgtgggcctaataaaccaggtgataagcagtgtcatgtgtgtgcatagatagcaacatccaccctgataggacttggactccaccacactctgtctacagatcaagagcctgcataaacagaactgaatggagcactgacctcagactaggctttagcatctgttcttcttgtcaaacaggattacgcttgaattcaacaccaagggaggaa

SEQ ID NO: 80016 - DNA, 258 bp, Glycine max
aggaaattgattggataactgccacgggggctgtcatacagaaagtcagatcagacacttcaatgacaataaccgaggataacacaaaggtatgtggatttggagggtggtttgatgtacattttcggggaagaagtgaaggatccagctgaacaagggctggcgtcaactacagagctcagtgtcccggtatttaacacactgccggcacctggaggcgctccagctttccctaatgcgtgtgagattagggcttga

SEQ ID NO: 80017 - DNA, 177 bp, Glycine max
ctcaattcgttagccctcactctcttgttccccaggctcccttaaatggtgcggggaatggcctaccagcttacctacaaccatttagctattttcaaggtttcctttaacctgtttcacatggactgcttttttatttttactactattttactcttaatttttattagattattt

SEQ ID NO: 80018 - DNA, 385 bp, Glycine max
  unsure (1)..(385): unsure at all n locations
caagaattctttgatggaaattttccagtggattcttggttaccaatttttgtgaattgtctttatcctgtaagtcaattaccttcagaagctgtcgttgtaaatgttacatgtggtagtggacgtggtggtttattcatcactgnttgttttttttcttttttttctatttttttttttttttttctttttttttttttcttttcttttttttgtttataacttattttttcttacttttttctttcttatttattatttttcttttctctactttaattctttttttccttaactcctttttatatctttatattatttttatctcttacttatattctcattctattttttccttcttttttttacctttactttttttttt

SEQ ID NO: 80019 - DNA, 363 bp, Glycine max
ccgccacttctgaatctattgaatcaacaatcatgtcggacgaagagcaccatttggagtccaaggccgacgccggagcctccaaaacctaccctcagcaagccggtaccatccgcaagaacggctacatcgtcatcaaaggccgcccctgcaaggttgtggaagtttcgacttccaaaactggaaagcacggtcacgctaagtgtcactttgttggaattgatattttcactgccaagaaacttgaggatattgtgccctcttctcacaactgtgatgttcctcatgtgaatcgtactgattaccagctcattgatattgctgaggatggatttttgagtctgcttactgaaaatggtaaca

SEQ ID NO: 80020 - DNA, 204 bp, Glycine max
ggtgggaaaaaaaaggataaagaaaagatggaggaaaggaagggaaagaaccaccttttcttcttttggggatgtaatggagtttacctacatgttctttctcctctcatttcttttctcttttatttattttggcttctaaggctatctatagccgtaacacaaacatttttttgacaaaaaaaaaaaaaaaaaggcgggccg

SEQ ID NO: 80021 - DNA, 206 bp, Glycine max
gggccaaaaacttaaaaattttttttttttggaaaattctaattttaaaaaataaggttttttattggttttccccaacccaagttttttttctttttttttgggggccccttttttttaaaaatatggcccccataagcccaggcccaaagggttttattttgtaaaacatttttttattttttttgaaaaaaatgtgtttttta

SEQ ID NO: 80022 - DNA, 368 bp, Glycine max
ctttcccccagggcacttcccgaagtgttaaaagaatgcctctttctataggaggaggagctggtgcaaagaatgctattctcatgaatatgccaaatgctgttctttcaatgtggagatattttgttggagatctcgtctttgaagtttctaagatgacttctccctacattaaatgtacagtctctttcttcatagcatttggaaatttggctgatgacaccatcaattttgaggcttttccccacaagttggtgcagtttggagagattcaggaaaaagttgtattgaaattttcacaagaggaatttcttacagcttggtcaactcaggtgcgtcctacaacaactctgttggctgatgggtgt

SEQ ID NO: 80023 - DNA, 199 bp, Glycine max
ggcaggctgcacacactgtcatggcctaaggcctatctagaagggacagagcgcgagatagctataccatggctgtacttgagcccattccagatgtggcaggcactcataacaactctgaagactactgacaaggctattctgctgattgagaacgcaacttacgacttcatacctttaatgagcaccattaacttgt

SEQ ID NO: 80024 - DNA, 371 bp, Glycine max
caacaagtactgcagattataactctagtagaagtcgtaagccaattgctgtggttggtgaagctgggttgagaccacctgatttccagcaagaccctaatcagaaagcatatgcatatctacaatccaaaccaccttaagaaagagcttaagacaaggctagtagtagttcatgcacaaagccaaaagaagctgtggaatctgatcctagacaaaatcaagcagttgcccaaaagttacttcagatggtcaaacacccaagtcagagatgatcgacatcataggggttgtgaacataggggcagggggcaacaagaagatccagttgtcttcactctggaagaatatgaaaacagaaaggcccatacaaa

SEQ ID NO: 80025 - DNA, 371 bp, Glycine max
ggaaatttttcctttgatattaaatctcgctctaggttggaaaaagtttcctctacaaaagcacaatttgttagtggaaaaaccttcaaatatgatataattggtgctggttcacattcttcagaagattttcctgaaaaggaagatcaagaaaaacccaaaaagattgatgccagattgagacaaagaatagatcctcaatacaatgaggttcaggctcagatggaaacaaatttgtttaaattgtctcttgatgatgttgaaactcctaaaggttccatgttggatcttaaaatttctcaatctaaaattgcacttcccaaaaacacagttggaggaaccattctgcgtagtgatccattggcaaattt

SEQ ID NO: 80026 - DNA, 367 bp, Glycine max
ctcacaaatccctcccccaaacattaatatgcagtgagtttgtactttcagttcaatatccttaatttctctcaggtcatccttagttataatatcgcctactcatactcaacaaaagaaaccagcatacatacatacaccaaccgctgcacagctcctcttctctaattatttggtctcgagtctcgtggttgtgtaagtgtgtccaaacaaaccataactagcaagccacagccacagtcacattcacatccttaattactttgcaaatattcaacagctccccgcgtgtttgacattccaggtctagagaagagagaaagaaaaaaaaagaccatgatgaacatgctttcggtgtcagcagcgc

SEQ ID NO: 80027 - DNA, 299 bp, Glycine max
gactaaacaacagcacaaaagcgggttactgtctgtgcaggctaccatctctctctgtctgtcttagtgcctccttgccagaagttaaaatggcccaagaaactttcctattcacatctgaatcagtgaacgaggggcaccctgacaagctctgtgaccagatctccgatgctgtgctcgatgcatgcttggagcaggaccctgacagcaaggttgcctgtgaaacctgcaccaagaccaacatggtgatggttttcggagagatcacaaccaaggccaacgtggactatgagaagatt

SEQ ID NO: 80028 - DNA, 369 bp, Glycine max
ctcgagccgtggagattggatcacacttatacaagattctccaattagtaacttgttgagagttgctgcttggaagaaaggctgtttaatggttaagattgtgatgtctgggaatgcagcagtcaaaaggagtgattgggcctcattggtacaagtatttttaacaaacagcaacagtacagagcattttgatgcatgtaagtggacaaaatcggaaccacattcctgggaattgatcttcccaatagaggtatgtggtcccaataatggttttgaaatgtggagttctgagtgggcaaatcaaacttcatggcatttgagtttccttattgacaatcccaaacagtctacagtttttgatattctctt

SEQ ID NO: 80029 - DNA, 368 bp, Glycine max
aaatccacaaaatccttttgtgttaaataggtgggtgggagaactgactttcccccagggcacttcccgaagtgttaagagaatgcctctttctatagggggaggagctggtgcaaagaatgctattctcatgaatatgccaaatgctgttctttcaatgtggagatattttgttggagatctcgtctttgaaatttctaagatgacttctccctacattaaatgtacagtctctttcttcatagcatttggaaatttggctgatgacaccatcaattttgaggcttttccccacaagctggtgcagtttggagagattcaggaaaaagttgtattgaaattttcacaagaggaatttcttacagctt

SEQ ID NO: 80030 - DNA, 367 bp, Glycine max
ctcgagccgatcgagaccgacgaggagcgcaggagcggctcctccaccccggcatgcgtcgagatggagggtgaggacggcaggagatgtgccaggggccccggcggtctcccgctctgggtctggcactagacgagagtgttagaagacgatggtcgttttggcattgtgttaaagaggcgggtttttttttttttttttttgctttgatacgagataccacggtttccggcgtttcatgggatctcgaatgaataacagggggaaaaaaaaaggcgttagatgggacttattcagggataagggatattgattcccaagacagactttagagaagacaatttcctctaatggtttctagacaagc

SEQ ID NO: 80031 - DNA, 190 bp, Glycine max
ctcgagccgattcggctcgagatcccagttccaggtgtacgtgaggtctcttcctatgcagaaagtaactgttttccctatcacagaccagatacatacatatctggctctggtgatgaggtaactagagtaatgacaagggcaactgcaaattattacatggattcttaaaattaagaatggcttaaaa

SEQ ID NO: 80032 - DNA, 343 bp, Glycine max
cttttgagtaccactaccaatggtgattttgttcagaggggaagatctcgcaatggttaaagttaatgtagcatgtgctgctgttggcttgacatcaagttacactccaactccattgttggaatctggtttgcaaaaagacagagggttaattgtggagtattttggaaggatgtcttacgttgctcataacgttaatcagccccaagagaaagatttgttggagggaaatttttcctttgatattaaatctcgctctagattggaaaaaggttcctctacaaaagcacaatttgttagtggaaaaaccttcaaatatgatataatttggtgctggttcaca

SEQ ID NO: 80033 - DNA, 368 bp, Glycine max
gagaaactttaatcagatgtctaatgttttatgggtggcgcctgaggacaaggcgagtggatggtcacaacttcattatgtttcgtgcaataatctggaaatgcaagaagcttatcttgtcaatctcgtaaatgtgttacgagaattgtatttgcacagtccagaggaagctcgccaattgagaaggaaagctctctctcgtattgaatggctgcaaaaagctgatgtgcctaccatagcacagattgaagagttccattcgatgcagaggatgatgaatgctcctgattcaaatgataatattgatctactgttgagcattgatttgttgggtttacaaggagcaggtttagcttttcaaacaagat

SEQ ID NO: 80034 - DNA, 367 bp, Glycine max
catacacactgcactataatagtttcaactccacaatcaatgatcaagatctcactctcatttgatcgctgtctacttcacttctcaatccctatgttccatttcgcatgcgcgcgcttttctgaaccgttaagggacagagaataagagcttcttggtctctcccctgttgcaggttcatgcgaggagacaatggacactttgtttttcgggataaagcttcgtgctcctttggaagttaacaacactatcaaaagggttttccctagaagcaagaggtgcaatgtttctgcaaaacatgttcgttacccatcgaggcatgcttttaggttttgtagccaaaatgtaaacttgttgaggaaacccc

SEQ ID NO: 80035 - DNA, 373 bp, Glycine max
gaaactttaagcagatgtctaatgttttgtgggtggctcctgaggacaaggcgagtttatggtcacaacttcattatgtttcgtgtaataatctggaaatgcaagaagcttatcttgtcaatctcgtaaatgtgttacgagaattgtatttgcacagtccagaggaagctcgccaattgagaaggaaagctctctctcgtattgaatggctgcaaaaagctgatgtgcctaccatagcacagattgaagagttccattcgatgcagaggatgatgaatgctcctgattcaaatgataatattgatttactgttgagcattgatttgttgggtttacaaggagcaggtaaagcttttccaaacaaaattgtttt

SEQ ID NO: 80036 - DNA, 352 bp, Glycine max
ggaatcccttctggatttccgctcacagttatttgcaatagcatttttaatgagatgctcattagatatagctatgaaaaattactgcgccaggctagagctccaagcatgtttttacaatccttcaaaaattttgtttttttgtgtgtgtatggtgatgataacttaattagtgttcatgaatatgtcaagccttactttagtggttctaaattgaaaagctttctagctggtcataatatcaccattactgatggtattgacaaaactagtgcaactttgcaatttagaaagttagcagattgtgattttctcaagagaaactttaagcagatgtctaatgttttgtggg

SEQ ID NO: 80037 - DNA, 204 bp, Glycine max
  unsure (1)..(204): unsure at all n locations
cggaatncggctcgagaccagcatttggaatggagcaaagcactggaagggcagacatagttaatttggcgggactcactgccactccaacatgacctggtaatgcttctgttgcggtaggtcttgacataccagtataagagggaggttattttctaccgacttttttcttttacaaatttttttttttaatcaaatttcttc

SEQ ID NO: 80038 - DNA, 323 bp, Glycine max
tgctgaagaagatataggaagacatggaatacctgtcccatcagctatgggaaatgcaactgctagcagaggattagaagtagcagttgctaatttacaggactactgcaatgaactggagaatagattgctttctcggtttgatgcagcatcacagaaaagagaattgaccacaatggcagaatgtgccaaaattttgtctcagtttaacaggggtacaagtgccatgcaacattatgtggcaacacgtccaatgtttattgatgtggaaataatgaatgcagacactaagctggttcttggtgaccaggcttgccaagcta

SEQ ID NO: 80039 - DNA, 295 bp, Glycine max
cacgtcttaccttccgagacccttttcttgaaggaaactctactccaccaaaaccttgccttttcttggtgaagaagaacaagaagaaaaataccaataataacaacaacaataataataaatatattattgttgttattgttattaaaaattatgacggatgtgctttagttgccttcattcataagctgatattgtttttcatgtgaacatctaatcaatatccatgtctcatttccagtcaacattatcaacgtttattgtgttggagatcattaaagcatacacttttctt

SEQ ID NO: 80040 - DNA, 342 bp, Glycine max
gaagagctttgacgtcgcatgccccccttccttaggttcgaaattcggttcgagcaccagttggtcctgctttagtttcataaacaaatgattgtcgtcggcttggttattctaccttctatgtctagaagactgtcttttttaaagatcatcttgtagttgtaacattaaatagtaagttgcactgttgagttacctatccacacattatgatctcacaaggtcttatgaatgctagttttgcgagtttgtattccacatgactaatctgtcttgtagtggcgatgtgattcttacaattgcaagatagcaattgtacgtagaaatatcagttcagtttag

SEQ ID NO: 80041 - DNA, 356 bp, Glycine max
gatgtctggagagttgaatgtggaatcccttctggatttccgctcacagttatttgcaatagcatttttaatgagatgctcattagatatagctatgaaaaattactgcgccaagctaaagctccaagtatgtttttacaatccttcaaaaattttgtttctctgtgtgtgtatggtgatgataacttaattagtgttcatgaatatgtcaagccttactttagtggttctaaattgaaaagctttctagctggtcataatatcaccattactgatggtattgacaaaactagtgcaactttgcaatttagaaagttagcagattgtgattttctcaagagaaactttaagcagat

SEQ ID NO: 80042 - DNA, 337 bp, Glycine max
ttccttgtttgagaccaacatctttcatcactttggggaccaacaaaatcgccctgggcatcatgaagaacaacacccttctcttccttgcacttgttgcatgcttcgagactgccacgtctctgcctgttgcaaatgagaactctcagtcgatcactgatcgtctgctgaaatatggcgacgctgagaagcgtgataactctattgcggaccgcctcctcaagtacggcgatgcatataagcgcgaggagtctattgccgaccgtctcctgaactacagtgacaagattcaaaagcgcgaggagtccattgccgaccgccttctaaagtatggcga

SEQ ID NO: 80043 - DNA, 354 bp, Glycine max
ggaatcctttctggatttccgctcacagttatttgcaatagcatttttaatgagatgctcattagatatagctatgaaaaattactgcgccaggctaaagctccaagtatgtttttacaatccttcaaaaattttgtttctttgtgtgtgtatggtgatgataacttaattagtgttcatgaatatgtcaagccttactttagtggttctaaattgaaaagctttctagctggtcataatatcaccattactgatggtattgacaaaactagtgcaactttgcaatttagaaagttagcagattgtgattttctcaagagaaactttaagcagatgtctaatgttttatgggtg

SEQ ID NO: 80044 - DNA, 208 bp, Glycine max
  unsure (1)..(208): unsure at all n locations
ctcgagccgttcagaagctgtcgttgtaaatgttacatgtggtagtggacgtggtggttnacccaccantgnttggatttatttttgttttaacattagattttcatatatnaacaaaaggtttcgcacagcactttctatcggaagataattgtttttcttactagatttgatcctttttcatttgctttactttcttttctttttg

SEQ ID NO: 80045 - DNA, 354 bp, Glycine max
caaaactagtgcaactttgcaatttagaaagttaggagattgtgattttctcaagagaaactttaagcagatgtctaatgttttgtgggtggctcctgaggacaaggcgagtttatggtcacaacttcattatgtttcgtgtaataatctggaaatgcaagaagcttatcttgtcaacctcgtaaatgtgttacgagaattgtatttgcacagtccagaggaagctcgccaattgagaaggaaagctctctctcgtattgaatggctgcaaaaagctgatgtgcctaccatagcacagattgaagagttccattcgatgcagaggatgatgaatgctcctgattcaaatgataa

SEQ ID NO: 80046 - DNA, 210 bp, Glycine max
ttccatggcacgcttccttaagctcggaattcggttcgaggttatttttgcgttttattcattggaaagagtgaaaggtggtgacaaggtggaaacaaacataacctaacaacaaaatcatgggtgggaattatttatggcttggcttacacatgtattcacttgtccccattatgaccaaaaatgtgttaggtttggtggaaaaataaa

SEQ ID NO: 80047 - DNA, 336 bp, Glycine max
tctctctcccggcaaatcaaagacatcagaaagaggcaattggcacgcccatgcattaattccaaattcactcgttttaaaagacttgtctccatttaacgtgcgaaccatcccagaagtcacttcctcaccctttggccgttgccttgttcttgaagtctctacctttcacccttgactttgctctctctgctatttccaaccacccaaaagccttctttttgttgctgacttgtttcttcttcttgttcagctcttaagtaaaatcccaaggtatcagtatatcttctccctgtcagatttttgctggcagctacttattgacaatgaacaatc

SEQ ID NO: 80048 - DNA, 335 bp, Glycine max
ggtcttaaccccatgccagaaaaagagactctaactaattcggagtttggccgggaggtaactaaaacttgaccaagaattgtttctaccaaagattgaactaagttcgaccttaattttaacacattaaccacgtgtacccaatcatttggttattttatgcttttgtttacttgcccaaattgaagaaaaacaaaatgtagagtcaaactgattgggaattattttgttagatattgcagttttaatcaatttagttcaacttgattaatggttaaactgagtttggttttggtgttttctaattccctgtctaagaatagtgaaagttgttt

SEQ ID NO: 80049 - DNA, 112 bp, Glycine max
attcaataaaggaaattaggcatgaccctcttgtgtgagtatgctctgcctatctgaaaatttccacacctcttttaattgtcgtaatgatgtgtgaagtgtgtgttatttt

SEQ ID NO: 80050 - DNA, 353 bp, Glycine max
cttagtttgcacctgtattcaattaatggaaagtatgttgctgcctctgaatccaatggacgccttaatgctgttcaattgagcagatgtggaaagtttttggtaggcgcaggtgaccagggacagatttttgttcgctctatgaacacccttgaagttgttaagaaatatcaaggagttggaaaggttttgacatctctggcagtaaccccagaagaatgcttcttagctggcacaaaagatggaagcctcctagtgtactcaatagaaaatcctcagattcgtaaaactagccacagcaaaagtacaaaatcaaaactgacataacagaaaatataacaatacagcagaag

SEQ ID NO: 80051 - DNA, 284 bp, Glycine max
cataagttggtggttaatctcccttatttctactgccgtgtcaataagttggtggttaatctcccttatttcttccaaaagggcatgattaacctcaatctttggtttcttgacacggtagtagacataagcaatgaagatgttgatccaacagctgctgttgctgctgctgaaagggcagaaaggatcattgtcaaatgctctttcattgtcgcggcttttaaccctagcttaaaatcccaatatgcttcagcacagatgtcacctatttaacccctgcgttt

SEQ ID NO: 80052 - DNA, 105 bp, Glycine max
cgagaattaaataaaagaccattttcgtccgcaccaactctcagaacatcaatcacttgatcacgtcacgcgaaaaccgaatggtagaagaagaaaaagaagaca

SEQ ID NO: 80053 - DNA, 352 bp, Glycine max
tatttgtatgttatggtgcatgatagttcagtgtctgcaataccaggtgattttgtcattggtgttaagttgacaaccataaacaatatgtgtgcatatgggcttaatcctggtatttcaggttctcgtcttttgggcaccattcctcagtccatttcacagcaaactgtttggaatcaaatggcaacagtgagaacaccattgaattttgattctagcaagcagagcttttgtcaattttctatcgaccttctcggtggaggaattttagtggacaaaactggagattggatcacacttatacaaaattctccaattagtaacttgttgagagttgctgcttggaagaaag

SEQ ID NO: 80054 - DNA, 76 bp, Glycine max
gctgaagccgttcgagccgctcgagccgaatcggctcgagcacgatcctactaaaaccaaacaacttcttggtgtg

SEQ ID NO: 80055 - DNA, 352 bp, Glycine max
gaaaaattgatgcgtgaaaggacacatttgctgttggcttgttgttcaaggatggcaatttgtaagaaagatgtttggagagttgaatgtggaatcccttctggatttccgctcacagttatttgcaatagcatttttaatgagatgctcattagatatagctatgaaaaattactgcgccaggctagagctccaagtatgtttttacaatccttcaaaaattttgtttctttgtgtgtgtatggtgatgataacttaattagtgttcatgaatatgtcaagccttactttagtggttctaaattgaaaagctttctagctggtcataatatcaccattactgatggtattg

SEQ ID NO: 80056 - DNA, 203 bp, Glycine max
cctcagaattcggatcgaggcgcgtgctaacataaaccctactcattttccatacctcaacgactaggttaaagagaccggaacacttttctgttcttcttgaccgaccacaacatcgacttggtttctctattttgccctaaagtactactcattcacaacagacaccgtcggggtcgcttcgacatcaatggctccgaaac

SEQ ID NO: 80057 - DNA, 358 bp, Glycine max
aagctttctagctggtcataatatcaccattactgatggtattgacaaaactagtgcaactttgcaatttagaaagttagcagattgtgattttctcaagagaaactttaagcagatgtctaatgttttgtgggtggctcctgaggataaggcgagtttatggtcacaacttcattatgtttcgtgtaataatctggaaatgcaagaagcttatcttgtcaatctcgtaaatgtgttacgagaattgtatttgcacagtccagaggaagctcgccaattgagaaggaaagctctctctcgtattgaatggctgcaaaaagctgatgtgcctaccatagcacagattgaagagttccat

SEQ ID NO: 80058 - DNA, 69 bp, Glycine max
gaagctttttgaatgcaaaccatgttctagagctagaactaatattgaccagtctgcaattttacacat

SEQ ID NO: 80059 - DNA, 361 bp, Glycine max
acaccatcaattttgaggcttttccccacaagctggtgcagtttggagagattcaggaaaaagttgtgttgaaattttcacaagaggaatttcttacagcttggtcaactcaggtgcgtcccgcaacgactctgttggctgatgggtgcccatatttgtatgctatggtgcatgatagttcagtgtctacaataccaggtgattttgtcattggtgttaagttgacaaccataaacaatatgtgtgcatatgggctcaatcctggtatttcaggttctcgtcttttgggcaccattcctcagtccatttcacagcaaactgtttggaatcaaatggcaacagtgagaacaccattgaattt

SEQ ID NO: 80060 - DNA, 363 bp, Glycine max
cataacatcaccattactgatggtattgacaaaactagtgcaactttgcaatttagaaagttagcagattgtgattttctcaagagaaactttaagcagatgtctaatgttttgtgggtggctcctgaggacaaggcgagtttatggtcacaacttcattatgtttcgtgtaataatctggaaatgcaagaagcttatcttgtcaacctcgtaaatgtgttacgagaattgtatttgcacagtccagaggaagctcgccaattgagaaggaaagctctctctcgtattgaatggctgcaaaaagctgatgtgcctaccatagcacagattgaagagttccattcgatgcagaggatgatgaat

SEQ ID NO: 80061 - DNA, 362 bp, Glycine max
ctcgagccgaatcggctcgagcttttccccacaagctggtgcagtttggagagattcaggaaaaagttgtgttgaaattttcacaagaggaatttcttacagcttggtcaactcaggtgcgtcccgcaacgactctgttggctgatgggtgcccatatttgtatgctatggtgcatgatagttcagtgtctacaataccaggtgattttgtcattggtgttaagttgacaaccataaacaatatgtgtgcatatgggctcaatcctggtatttcaggttctcgtcttttgggcaccattcctcagtccatttcacagcaaactgtttggaatcaaatggcaacagtgagaacaccattgaat

SEQ ID NO: 80062 - DNA, 359 bp, Glycine max
gcagtcaaaaggagtgattgggcctcattggtacaagtctttttaacaaacagcaacagtacagagcattttgatgcttgtaagtggacaaaatcggaaccacattcctgggaattgatcttcccaatagaggtatgtggtcctaataatggttttgaaatgtggagttctgagtgggcaaatcaaacttcatggcatttgagtttccttattgacaatcccaaacagtctacagtttttgatattctcttgggaatttctcaagattttgaaattgctggtaatactcttatgccagctttttctgtttcacaggctactgccagatcttctgaaaatgcggaatcctctgcatgatc

SEQ ID NO: 80063 - DNA, 353 bp, Glycine max
cacagtacatgtgttgttggagggacaagagctatcgtactgggtggtcaaaccggggaggaatggatgctaagcgagctccatgaactttccctggcaagttctgccatctaattccagtgaataaactctattgtagtgaagggaatactacatggctctgcttgaagtcgtgaatttgaacataagtttgcgggaaaggttgtattggtcactaactcgacaagcattggtctggtcagaatgtgtatattaagttgttacgaatatgcatttgcttgaatggttggttctggctcgttgagagtgacatgagacgaagttttttgtgaggttgtgtgagactttgccct

SEQ ID NO: 80064 - DNA, 359 bp, Glycine max
gtcacaacttcattatgtttcatgtaataatctggagatgcaagaagcttatcttgtcaatctcgtaaatgtgttacgagaattgtatttgcacagtccagaggaagctcgccaattgagaaggaaagctctctctcgtattgaatggctgcaaaaagctgatgtgcctaccatagcacagattgaagagttccattcgatgcagaggatgatgaatgctcctgattcaaatgataatatcgatctactgttgagcattgatttgttgggtttacaaggagcaggtaaagcttttccaaacaagattgtttttgatgataagcttgtgttggctaacacacaagaattctttgatggaa

SEQ ID NO: 80065 - DNA, 286 bp, Glycine max
gttttagtgcctactgattttggggtggtggagatggggtctgtgaggatggttggtgagagttttgcgttgttgcacgctgtcaaatctgacttttttgcacaggcatcatcattattattcccccacatggttaatccaactgcaccgctgaatttggttagggaaaagagagatgggagtgagagtgcaaatgctcttttatctgctttggcaattggggataagaatatgaatatttataacaatactagagaagactttattgtttttcgaatattttttc

SEQ ID NO: 80066 - DNA, 355 bp, Glycine max
taaagctccaagtatgtttttacaatccttcaaaaattttgtttctttgtgtgtgtatggtgatgataacttaattagtgttcatgaatatgtcaagccttactttagtggttctaaattgaaaagctttctagctggtcataatatcaccattactgatggtattgacaaaactagtgcaactttgcaatttagaaagttagcagattgtgattttctcaagagaaactttaagcagatgtctaatgttttgtgggtggctcctgaggataaggcgagtttatggtcacaacttcattatgtttcgtgtaataatctggaaatgcaagaagcttatcttgtcaatctcgtaaat

SEQ ID NO: 80067 - DNA, 361 bp, Glycine max
attccattctctctgtgtatttccctacctctcccttcaagatgcagatcttcgtcaagaccctcaccggcaagaccatcacccttgaggtggaaagctctgacaccatcgacaacgtcaaggccaagatccaggacaaggaaggaatccccccggaccagcaacgtctcattttcgccggaaagcaacttgaggacggccgtacccttgctgactacaacattcagaaggagagtactcttcacctcgtcctccgtctccgtggtggcatgcagatcttcgttaagacactcaccggcaagaccataaccctagaggttgaaagctccgacaccatcgataacgtcaaggccaagatcca

SEQ ID NO: 80068 - DNA, 300 bp, Glycine max
  unsure (1)..(300): unsure at all n locations
cttattgacaatcccaaacagtctacagtttttgagattctcttgggaatctctcaagattttgaaattgctggtaatactcttatgccagctttttctgttccacaggctactgccagatcttctgaaaatgcggaatcctctgcatgatctggaattcgtgttttctttcgcttgttcgtttgtttaattcaataaaggaaattaggcatgaccctcttgttgagtatgctctgcctatctgaaaatttccacacctcttttaattgtcgtaatgatgtgtgaagtgtgtgttntttt

SEQ ID NO: 80069 - DNA, 348 bp, Glycine max
ggccaaagttatgatttctctgtagttatgcagttggtgaccatgttgtccattaaaccttctgatggcttaaagggtttcatttgcattgtatacagatctctagcagatgctgttggttccttttccaagtggatatctgcttttaaggaaaattttagagccttgctattatttcttgctattgggatttcacaacctctatcttcgaatgcctgtgcatctgccttgcgtaaagtctgtgaagatgcttctgtagtaatttatgaaccttcaaatttggaaattttaatgtggataggagagggttgggacaagtggcatttatctttggaagatgaggaagaa

SEQ ID NO: 80070 - DNA, 353 bp, Glycine max
tgataacttaattagtgttcatgaatatgtcaagccttactttagtggttctaaattgaaaagctttctagctggtcataatatcaccattactgatggtattgacaaaactagtgcaactttgcaatttagaaagttagcagattgtgattttctcaagagaaactttaagcagatgtctaatgttttatgggtggctcctgaggacaaggcgagtttatggtcacaacttcattatgtttcgtgcaataatctggaaatgcaagaagcttatcttgtcaatctcgtaaatgtgttacgagaattgtatttgcacagtccagaggaagctcgccaattgagaaggaaagctc

SEQ ID NO: 80071 - DNA, 356 bp, Glycine max
actactcaatcttgacttaacatacttcattagcgcataacgcgctacacgctttgacaatgttttctcgacactcggtcagcaacgatgcctcccagaagagacagttggcgaggtcgttggcggcgaggatcggtgaggaccgcatgaaaacagtcggcactctagacgacctcaaaagggaatacggccgccttaagttgagcgacgacatgtccgttgcggactccaaatacgactgtgtgacgcaggtctcgatgccggagccgctacgccaccatgagcaccaccagaaagatgaaccggccccccaagaggtctggatggggccctggggtgaaattccccgatggaaa

SEQ ID NO: 80072 - DNA, 93 bp, Glycine max
ggcatgaccctcttgttgagtatgctctgcctatctgaaaatttccacacctcttttaattgtcgtaatgatgtgtgaagtgtgtgttatttt

SEQ ID NO: 80073 - DNA, 328 bp, Glycine max
cgcggcgtaagctcggaattcgactcgagggcaaactcattttgagcttcaaaggtacaaatgcggaagggatttcttttatagctgcatgatcttatactatttcactaaaaggatagtaccagtataatttcaacaaataatgttcaaaattttttttgcaagtattagtttacgatatccaaatatccaatttcctcaccctttccacccaccccaatttacacacttaattctgtatggtgttacatacaacttgctcctatatttaaagaaataattttttaaacgttatgattattactcaagctgcactttacttttttaa

SEQ ID NO: 80074 - DNA, 359 bp, Glycine max
ttacgcccctcttttactctttttcttccttttgcgtgtactcattgttgttttgtttcactcttaaaaagcatgttgctttgtcgagttttttggttctttggaatagactggttttgaggaattgggttgtttctctgtttcgtagtggaattttttttttttaaaaaatgttgctttgctgtttgcctgatcatggtttctgacgcttggctttcagcgtgttttgatttgaagggagtacgcaattgatggatggatattctggtaaaagagccattgatggggtggtagtccctagaaaggggatgggccttgcatttagagatactgctaatgctagagatcgaaatggtcag

SEQ ID NO: 80075 - DNA, 367 bp, Glycine max
tcggggaattccaattccacattttcaagaaataaggaggcaaaaaggtgcatatatgaattggaattatttgttttcttattaggcctatcctgaagccaaaggaaatgagatcggaattcctcggggaattccaattccacattttcaagaaataaggaggcaaaaatgttcatatatgaattggaattatttgttttcttattaggcctatcctgaagccaaaggaaatgagatcggaattcctcggggaattccaattccacattttcaagaaataaggaggcaaaaatgttcatatatgaattggaattatttgttttcttattaggcctatcctgaagccaaaggaaatgagatcggaatt

SEQ ID NO: 80076 - DNA, 364 bp, Glycine max
caaaatcagaaccacattcctgggaattaatcttccgaatagaggtatgtggtcctaataatggttttgaaatgtggagttctgagtgggcaaatcaaacttcatggcatttgagtttccttattgacaatcccaaacagtctacagtttttgatattctcttgggaatctctcaagattttgaaattgctggtaatactcttatgccagctttttctgttccacaggctactgccagatcttctgaaaatgcggaatcctctgcatgatctggaattcgtgttttctttcgcttgttcgtttgtttaattcaataaaggaaattaggcatgaccctcttgttgagtatgctctgcctatctga

SEQ ID NO: 80077 - DNA, 288 bp, Glycine max
tccactaggagcctgtcggtttcctttcaaggagaggccttttcgctgcccgttagcaagaccaaggccgccagcgccaccccgacgccgaggaaggccgccacgccggagagacggagggccactccggtgaaaggggagaattcccggccggcggatcagcaccggtggccggcgaggacccggcatgtggatcatctctccaagagtgtggatataattgataataagaagaaggttgttggaaatgggaaatgggaatgggtttgggattgtggtcttttcttt

SEQ ID NO: 80078 - DNA, 124 bp, Glycine max
cttgatccggtttatccccacaaactatttcaatttaatgagattgattcaagttttgtaattacaataacacaatatgacatccttacaacatttctaatttaatctcatacaccaacaattt

SEQ ID NO: 80079 - DNA, 354 bp, Glycine max
agcatactggtcacgtgaataaagatcaggatgctgaggctaaaactagatcaagtttaggtttaccttcaaatgataaagatcctcaacaaatgaatcattctgtacttgaagacactccatttataactttaataaatttaatcgggcaacaattatttggttggcctttttatttaatattcaactcttccggtcaggtttatgatggtcgttggacaaatcattttaatcctaattctcctatttttgatcctaaaaattttgttgacgtcattatctttgatattggtatcattatgggatcatcaactatcggtgatttctcttatgtctattcgctcattgtcgtag

SEQ ID NO: 80080 - DNA, 356 bp, Glycine max
aattttgaggcttttccccacaagctggtgcagtttggagagattcaggaaaaagttgtattgaaattttcacaagaggaatttcttacagcttggtcaactcaggtgcgtcctgcaacaactctgttggctgatgggtgtccatatttgtatgcaatggtgcatgatagttcagtgtctacaataccaggtgattttgtcattggtgtcaagttgacaaccataaacaatatgtgtgcatatgggctcaatcctggtatttcaggttctcgtcttttgggcaccattcctcagtccatttcacagcaaactgtttggaatcaaatggcaacagtgagaacaccattgaattttga

SEQ ID NO: 80081 - DNA, 347 bp, Glycine max
ggtgaaagcaattcaaagaaaacaacacattctgaggctggtggaatgaaatcaggcaaaggaaaaccttatccttctcaacaaccagatcatgatactggccaaaacagaaggcgtacaacatcacatgtcagaggaaaatctctttcttctgagccaacaactgcagtggaaacatcaaaggggcatacacgaacaatttccttagaatcaggaattcgcggtggtggttcatggcgtgtgcatccaaatctacccgattatgatgatttgagagctcgtcttttagctctcagacaaagataagaaacttacagcttcactagcaccagcatcagatagaactt

SEQ ID NO: 80082 - DNA, 218 bp, Glycine max
cggctcgagcggctcgagcggctcgagtgagagttgttatataatatctgtattatatataattttttttatttatctggtacagatgggggtatatgatcttgtttcatatttaataaattttttttgggggggtggggggttctgttctgttatttgagttttctatgctgtatttttgtaaaaaataatgaataaaaatatatggtttaattttt

SEQ ID NO: 80083 - DNA, 361 bp, Glycine max
atgataacttaattagtgttcatgaatatgtcaagccttactttagtggttctaaattgaaaagctttctagctagtcataacatcaccattactgatggtattgacaaaactagtgcaactttgcaatttagaaagttagcagattgtgattttctcaagagaaactttaagcagatgtctaatgttttgtgggtggctcctgaggacaaggcgagtttatggtcacaacttcattatgtttcgtgtaataatctggaaatgcaagaagcttatcttgtcaacctcgtaaatgtgttacgagaattgtatttgcacagtccagaggaagctcgccaattgagaaggaaagctctctctcg

SEQ ID NO: 80084 - DNA, 146 bp, Glycine max
ggaaaaagttgtgttgaaattttacaagagaaattcttacgcttgtcaactaggtgcgtcccgcaacgactctgttggctgatgggtgcccatatttgtatgctatggtgcatgatagttcagtgtctacaataccaggtgatttt

SEQ ID NO: 80085 - DNA, 375 bp, Glycine max
tgatttgttgggtttacaaggagcaggtaaagcttttccaaacaaaattgtttttgatgataagcttgtgttggctaacacacaagaattctttgatggaaattttccagtggattcttggttaccaatttttgtgaattgtctttatcctgtaagtcaattaccttcagaagctgtcgttgtaaatgttacatgtggtagtggaccgtgtggtttacccaccactgcttggattagttctgcagttaacaatcgctcctcagatatcaacaaaaggattcgcacagcacttgggaaaggtaagaaaattgtttttcttactagagttgatccttttccagtagctttactggctgttctttttggcgttaagaa

SEQ ID NO: 80086 - DNA, 342 bp, Glycine max
aaaaaattaaaaaaaaaaaaaaaaaaaaaaaaaatggggaaaatttaaaaaaaaaaaaaaaaaaaaaaaaaaaaataataaaaataaaaaaaggcgggacttaattctagtaacaaatacctccccccgtactaaaattttcctcttcttctgtcgaattaacccttttacctattcatggggggtcccccccccctttgtgaccttgttctcccctaatttttttcgggccagatcctttccggctccctttttttctttttatgggggtgcttaaggtttgggcttactcccgttaattttttttctcttggtgaccttttttccgtccccaaacccccc

SEQ ID NO: 80087 - DNA, 249 bp, Glycine max
aaaaaaaaaaaaaaaaaaaaaaaaaaaaaaaaaaaggaaaaaaaaaaaaaaaaaaaaaaaaaaaaaaaaaaaaaaaaaaaaaaaaaaaaaaaaaaaaaaaaaaaaaaaaaaaaaaaaaaaaaaaaaaaaagggggcggcccccccctagggacctcttccccccggaaataaattccggcccggtccctgggggcgtcccatttttccttatagggagtcttttaaaacctgggcgaaaaaatggcaaa

SEQ ID NO: 80088 - DNA, 372 bp, Glycine max
cgtctttgaagtttctaagatgacttctccgtacattaaatgtacagtctctttcttcatagcatttggaaatttggctgatgacaccatcaattttgaggcttttccccacaagctggtgcagtttggagagattcaggaaaaagttgtgttgaaattttcacaagaggaatttcttacagcttggtcaactcaggtgcgtcccgcaacgactctgttggctgatgggtgcccatatttgtatgctatggtgcatgatagttcagtgtctacaataccaggtgattttgtcattggtgttaagttgacaaccataaacaatatgtgtgcatatgggctcaatcctggtatttcaggttctcgtcttttggg

SEQ ID NO: 80089 - DNA, 202 bp, Glycine max
tttttttctctccatgttttgaccagtagtcgcatttataataaggctatagatgaatatacacacatatattatgtataatcggttagtgtatgaagatgcgaataatactataaaatgctgtagaccataaatttttctggaacccttttggttctgttgagaaaaaaaaaattatttaagtcttaatggtttttttaat

SEQ ID NO: 80090 - DNA, 363 bp, Glycine max
attagatatagctatgaaaaattactgcgccaggctaaagctccaagtatgtttttacaatccttcaaaaattttgtttctttgtgtgtgtatggtgatgataacttaattagtgttcatgaatatgtcaagccttactttagtggttctaaattgaaaagctttctagctggtcataatatcaccattactgatggtattgacaaaactagtgcaactttgcaatttagaaagttagcagattgtgattttctcaagagaaactttaagcagatgtctaatgttttatgggtggctcctgaggacaaggcgagtttatggtcacaacttcattatgtttcgtgcaataatctggaaatgcaa

SEQ ID NO: 80091 - DNA, 333 bp, Glycine max
tggggctggggatttggcaatacttggtttggttttaagcacccaactggtactggctggtttccattggtgcttaccaccaccaattaggtgggtattgcgacaaaatgtggaattaataaaaaagaaattttccaactttaccaaactaataaatattatggagtccaattttgggattcttctgatctttatggtggcatcaaatccatgctcaccaggcaccttttccatctccctctcccaccatttcccctaacaacaattgaccatgcccagtggccatgaattatgtgcaaacagccccttggaacagctcttcctgccaaaact

SEQ ID NO: 80092 - DNA, 294 bp, Glycine max
atcggcaaatgttaacagttagtcgttaattttttgttcctagggggatttgaacccacaacctttcccccctcccttttccctttaccaccaagccgaataatttcagatctcgtcgatctgagctcaaaacaatggcgaaaccaaggtactctcgttttccacctcgcaagtcatcgtcgtcttccacgctgattctgactctgttcctgggcttcaccttcctcgttctaattctcctggctctcggcatcctctccattcctagctcctcgcgtggaaatttgcccaaac

SEQ ID NO: 80093 - DNA, 268 bp, Glycine max
ctcgagccgctcgagccgaaaaaaaaaaaagaaaggaaaaaaaaaaaaaaaaaaaaaaaaaaaaaaaaaaaaaaaaaaaaaaaaaaaaaaaaaaaaaaaaaaaaaaaaaaaaaaaaaaaaaaaaaaaaaaaaaaaaaaaaaaaaaaaaaggggggggcccccccttagggagcttttcaccccggaaataaattcgggaccggtccctgagggggtcccagttttccttatagggggtggtttaaaagctgggggaaaaaatgggaaa

SEQ ID NO: 80094 - DNA, 368 bp, Glycine max
cttcttctcttgcggctagggttttagcgcagcttcttctagatttaaggaagatgggtaaggaaaaggttcacatcagtattgtggtcattggccatgtcgactctgggaaatccactaccactggtcacctgatttacaagcttggaggcattgacaagcgtgttattgagaggtttgagaaggaagctgctgagatgaacaagaggtctttcaagtatgcctgggtgctggacaaacttaaggctgagcgtgaaagaggaatcaccattgatattgctttgtggaagtttgaaacaacaaagtattattgcacagttattgatgcgcctggacatagggatttcattaagaatatgattactggg

SEQ ID NO: 80095 - DNA, 164 bp, Glycine max
gtcgacatatgggcaactccgcatcccactgggttggcgcgttgggattttgagccaacaaaccttattcagacgtgcgaagtcttgcggggggctcgcgtggacaaggcgagtgaatggtcacagccacaataggtttggggaaatatgctggagatgcacgg

SEQ ID NO: 80096 - DNA, 364 bp, Glycine max
aaggacacacctgctgttggcttgttgttcaaggatggcaatttgtaagaaagatgtttggagagttgaatgtggaatcccttctggatttccgctcacagttatttgcaatagcatttttaatgagatgctcattagatatagctatgaaaaattactgcgccaggctaaagctccaagtatgtttttacaatccttcaaaaattttgtttctttgtgtgtgtatggtgatgataacttaattagtgttcatgaatatgtcaagccttattttagtggttctaaattgaaaagctttctagctggtcataatatcaccattactgatggtattgataaaactagtgcaactttgcaatttaga

SEQ ID NO: 80097 - DNA, 363 bp, Glycine max
tttggatcctctcacatctctctttctttctccggtgtcatggaatccggtagtgcccgatgtttatattccctccggttctgaaatcatcaaatgcaactaccaaacctcgagaagcttccttcacacacttccttctgtgagtttccttctcttcttccttctcggtcgccggacaacttctccggcgtaaccacggttaccggagtatcttctaattattttttccctctctttgcttctattccgcgcagtttccttgttcttcgaacaagctctttctcattccatcaccacaacttccgatattgcatcttcaactgttttggttacattttacgcgtaataactgattgtttcttt

SEQ ID NO: 80098 - DNA, 297 bp, Glycine max
  unsure (1)..(297): unsure at all n locations
gggatgtgtatattatattctaatggagggtgtaaatatttagtggtgtacaagaatttgctaaatattggttgttgatggatgatagctttctaatgggaattatgggatgttttaatatatccctttattagtctaatctcggatccaagttctgtatatatattttttttactcacagattttttagagataatcttgttggtgagacagtaaaaatactaaaagttaatatctacatcatatctttgttaatcatgttgttttggtactagctactanctctgtgctagattc

SEQ ID NO: 80099 - DNA, 368 bp, Glycine max
gttacaattgattggtttatttcctctcaggaatgtggttcccaggacctattgtgttttaaatccacaaaatccttttgtgttaaataggtggatggggaaactgacttttccccagggcacttcccgaagtgttaaaagaatgcctctttctatagggggaggagctggtgcaaagaatgctattctcatgaatatgccaaatgctgttctttcaatgtggagatattttgttggagatctcgtctttgaagtttctaagatgacttctccctacattaaatgtacagtctctttcttcatagcatttggaaatttggctgatgacaccatcaattttgaggcttttccccacaagctggtgcaat

SEQ ID NO: 80100 - DNA, 170 bp, Glycine max
aggaagttgattttcttggaaatattattattttaaccttgtgtatgttgtcagcttctcactgaagcataaacagggaatattgattcttttcaggttcttgtgagaggaaaagattgtgtttttgtttttggacttttgattgttgtggatgaggggggggggggggg

SEQ ID NO: 80101 - DNA, 365 bp, Glycine max
caaacagcaacagtacagagcattttgatgcatgtaagtggacaaaatcagaaccacattcctgggaattaatcttcccaatagaggtatgtggtcctaataatggttttgaaatgtggagttctgagtgggcaaatcaaacttcatggcatttgagtttccttattgacaatcccaaacagtctacagtttttgatattctcttgggaatctctcaagattttgaaattgctggtaatactcttatgccagctttttctgttccacaggctactgccagatcttctgaaaatgcggaatcctctgcatgatctggaattcgtgttttctttcgcttgttcgtttgtttaattcaataaaggaaa

SEQ ID NO: 80102 - DNA, 248 bp, Glycine max
cacacctgaacttattacctctaggcattccttagtttcattgttactgatatgtcacctttggctttggttattttgttaagtcttatcttatttgcttgtaaatttatctcgtgtccagacttaaaacctatgaggtttagtttttcaattttgtaggctgttgtatctattggggttagtgtgttagtgaggtacttttttttaccaaaataaataaaagtacctcacttttatttattttggta

SEQ ID NO: 80103 - DNA, 276 bp, Glycine max
attcattaaaacatcacactgattaccgaacggagttaaatggaagacgcttgctcacctttatgggttgtattgggattgcgagcttggtgccagtggtttatagagcttatgtgcatgcgaacaatgatgtgctccactccagatatgattatactgatgcaaagacgttcaatgagtaacataaagggagtgtctgttcagaaaaaaggattaacaatgcatacaagtgtaatacaccagaatgcagaatgaagaatgagtgattgttactga

SEQ ID NO: 80104 - DNA, 373 bp, Glycine max
  unsure (1)..(373): unsure at all n locations
cggngcgattttcagcaacctaggctcgttgtaccttctccttctccttctcctcctcctcctcctcctcctcctcctcctgcgtcaggtatggtacacgtttactcaccgcccccaacttcacagttccatgtaccgattcaaggccatgtcgtcccggtccagaatcaccaccaccatcttgcccatcagcaccacgttccggctcactaccgctctcatcatcacccgcatcagtattatgttagctccgattctgccgtgcagcagcctcaagttgacccagatcatgctccttccaaaagcaagatgtctgacgaagccagtcagaaaattttgaatcaggtggagtattatttcagtgatttaaact

SEQ ID NO: 80105 - DNA, 249 bp, Glycine max
aataaaagcaccgatgatcctaaattcgaaccttgcgcttatttgagacactactccaatcaaaggagcgaaatcaaggcagcttgatgagggcacaaaccggtatgaaacgagcacaccatgtgaaggcgggtgcacactatgaccaccaatacagtgaaggtgaccaccaccaccaatggagattcatataccgccaccaccaagtgcgtattcatgaccaacaccaattgcagacaacaaaccacc

SEQ ID NO: 80106 - DNA, 361 bp, Glycine max
gcaatttgtaagaaagatgtttggagagttgaatgtggaatcccttctggatttccgctcacagttatttgcaatagcatttttaatgagatgctcattagatatagctatgaaaaattactgcgccaggctaaagctccaagtatgtttttacaatccttcaaaaattttgtttctttgtgtgtgtatggtgatgataacttaattagtgctcatgaatatgtcaagccttactttagtggttctaaattgaaaagctttctagctagtcataacatcaccattactgatggtattgacaaaactagtgcaactttgcaatttagaaagttagcaaattgcgattttctcaagagaaact

SEQ ID NO: 80107 - DNA, 308 bp, Glycine max
gcatgcgtaaataagcttggtgacaccatcggttttgatgcttaacacgacaagtgggcgcccaataaaaagaccaaccaaacacacgaatagaaattttcacaaaacgaatcccttacagccacgcctaacttatgtgatttctacagcagctactatgagatgatagcagcacatactggtacccatgaagtgcaagatcaggcaccgtctacatacccatctgaagatgtgataggcgttaatcagacaaccataatcaatatatctgcctatgaaacaaataaatggaagatacgttttcaact

SEQ ID NO: 80108 - DNA, 101 bp, Glycine max
aaaaaaaaaaaaaaaaaaaaaaaaaaaaaaaagaagggaaaaaaaaaaaaaaaaaaaaaaaaaaaaaaaaaaaaaaaaaaaaaaaaaaaaaaaaaaaaaaa

SEQ ID NO: 80109 - DNA, 358 bp, Glycine max
gtgctggttcacattcttcaggagattttcctgaaaaggaagatcaagaaaaacccaaaaagattgataccagattgagacaaagaatagatcctcaatacaatgaggttcaggctcagatggaaacaaatttgtttaaattgtctcttgatgatgttgaaactcctaaaggttctatgttggatcttaaaatttctcaatctaaaattgcacttcccaagaacacagttggaggaaccattctgcgtagtgatctattggcaaattttttgacagagggcaattttagagcaagtgttgatttgcagcgcactcatcgtattaaaggaatgattaaaatggtggccacagttggtat

SEQ ID NO: 80110 - DNA, 360 bp, Glycine max
tgagcattgatttgttgggtttacaaggagcaggtaaagcttttccaaacaagattgtttttgatgataagcttgtgttggctaacacacaagaattctttgatggaaattttccagtggattcttggttaccaatttttgtgaattgtctttatcctgtaagtcaattaccttcagaagctgtcgttgtaaatgttacatgtggtagtggacgtggtggtttacccaccactgcttggattagttctgcagttaataatcgctcctcagatatcaacaaaaagattcgcacagcacttgggaaaggtaagaaaattgtttttcttactagagttgatccttttccagtagctttactgg

SEQ ID NO: 80111 - DNA, 363 bp, Glycine max
ggtgatgaaaaattgatgcgtgaaaggacgcacctgctgttggcttgttgttcaaggatggcaatttgtaagaaagatgtttggagagttgaatgtggaatcccttctggatttccgctcacagttatttgcaatagcatttttaatgagatgctcattagatatagctatgaaaaattactgcgccaggctaaagctccaagtatgtttttacaatccttcaaaaattttgtttctttgtgtgtgtatggtgatgataacttaattagtgttcatgaatatgtcaagccttactttagtggttctaaattgaaaagctttctagctagtcataacatcaccattactgatggtattgacaaa

SEQ ID NO: 80112 - DNA, 346 bp, Glycine max
gttcccttacccatcccaattctcatgggctacctgtgttgcgatgcccactcctgaatcgccacctgccacccccaccacaaacccctcgccgcaacaccaatccgacactttccctacgccgacatcgactgcgccgtcaacggatttttctccgacaccttactgggccgaggcaggcacggtagagtctacagagccaccctggacgcctgaaagcttcttgccgtcgtcaaaacgaccaaacttgtcgccaccagcacctctaaaaaccacgctcccaaatgcaccggctgcggtaactgcaccagtcccgccgaaaacgagatcgagatcctcttccaaa

SEQ ID NO: 80113 - DNA, 365 bp, Glycine max
agctagtttatcgtgaggagaatatgaagttgtttgttttctttgttgctgcagtagttttggtagcatggccatgccatggcgcaggctaccaaaggttccctctccgaatgaaaactggctatggtgagcgttcttcggaggtaaaatgcgcaagttttaggcttgctgtggaagcacacaacatccgagcctttaaaaccattcctgaagagtgcgttgaaccaacaaaggactacattaatggcgaacaatttagatcagactctaaaacagttaaccaacaagctttcttttatgctagtgaacgcgaagtccatcacaacgacatatttatattcggcatagataacaccgtactctct

SEQ ID NO: 80114 - DNA, 354 bp, Glycine max
gttgggtttacaaggagcaggtaaagcttttccaaagcaagattgtttttgatgataagcttgtgttggctaacacacaagaattctttgatggaaattttccagtggattcttggttaccaatttttgtgaattgtctttatcctgtaagtcaattaccttcagaagctgtcgttgtaaatgttacatgtggtagtggacgtggtggtttacccaccactgcttggattagttctgcagttaacaatcgctcctcagatatcaacaaaaggattcgcacagcacttgggagaggtaagaaaattgtttttcttactagagttgatccttttccagtagctttactggctgttc

SEQ ID NO: 80115 - DNA, 364 bp, Glycine max
ctcgagccgctcgagccgattcggctcgagaaatggacaaaatcggaaccacattcctgggaattgatcttcccaatagaggtatgtggtcctaataatggttttgaaatgtggagttctgagtgggcaaatcaaacttcatggcatttgagtttccttattgacaatcccaaacagtctacagtttttgatattctcttgggaatttctcaggattttgaaattgctggtaatactcttatgccagctttttctgttccacaggctactgccagatcttctgaaaatgcggaatcctctgcatgatctggaatttgtgttttctttcgcttgttcgtttgtttaattcaataaaggaaattag

SEQ ID NO: 80116 - DNA, 370 bp, Glycine max
ggcggggctacccgctgagtttaagcatatcaagagggagaagaagaaaaaggaaaagaaggacaaagatgaagaaacagacacattaaagggaaagggaaaaaatggtgatggtgaagagaagaaggaaaagaaagagaaggagaagaaaaaggaaaagaaggacaaagatgaagaaacagacacattaaaggaaaagggaaaaaatgacgaaggcgaggatgatgaagaaaataagaaaaataagaaaaaggataagaaggagaaagagaaggatcacaaaaaagaaaagaaggaggatggaaaagaagagggtgagaaagagaaaagcaaggttgaagtttctgtaagggatattgatatagaagaa

SEQ ID NO: 80117 - DNA, 56 bp, Glycine max
aaaaaaaaaaaaaaaaaaaaaaaaaaaaaaaaaaaggaaaaaaaaaaaaaaaaaaa

SEQ ID NO: 80118 - DNA, 169 bp, Glycine max
gatggaaacaaatttgtttaaattgtctcttgatgatgttgaaactcctaaaggttccatgttggatcttaaaatttctcaatctaaaattgcacttcccaaaaacacagttggaggaaccatcctgcgtagtgatctattggcaaattttttgacaaaaggcaatttt

SEQ ID NO: 80119 - DNA, 364 bp, Glycine max
aaaagtcatagttacctcttcgccttcctttgcaattgtcatttgtcgccaaacaattattgcttagctctcacaagcaagctttaacaacaatgaaggtcagaactagatgcaacctattaatttctttataatttcctcaccttcatcgatatcctctaattaatcaatgtttctaattgatagtttaatttcctcagagctttacactattttgattccactagaagtaattaattgtgggggtcttaacttaattacctcatgttttagatgtagaagtaattaactgtggggtcttaacagctctttcatttgttgtgtaacagaaagtagtgttaaagttggacttacatggtgatag

SEQ ID NO: 80120 - DNA, 307 bp, Glycine max
ctctggctgacttgcaaccggaagaactgaaccgtgtccagcaccctttgggtagcatctcttacaactctataccttccttatgaccactctcttatgaccggtcgctttcttaactagagccctctccgatgagggcactgcacgcgggtagatcacagctctgatagctgcagaaacaaaaaagcttgaacgctttagctcttttgtgtgaaatatgctggaaagtggcgcgaaattcccaggactaatagatctcaacacccctaatgacggctactatgatccatgctaaggcttttaccat

SEQ ID NO: 80121 - DNA, 261 bp, Glycine max
aattgtatttgcacagtccagaggaagctcgccaactgagaaggaaagctctctctcgtattgaatggctgcaaaaagctgatgtgcctaccatagcacagattgaagagttccattcgatgcagaggatgatgaatgctcctgattcaaatgataatattgatctactggtgagcattgatttgttgggtttacaaggagcaggtaaagcttttccaaacaagaatgcttttgatgacacagctttgtgtggtcacacac

SEQ ID NO: 80122 - DNA, 366 bp, Glycine max
cattgaattttgattctagtaaacagagcttttgtcaattttctattgaccttctcggtggaggaattttagtggacaaaactggagattggatcacacttatacaaaattctccaattagtaacttgttgagagttgctgcttggaagaaaggctgtttaatggttaagattgtgatgtctgggaatgcagcagtcaaaaggagtgattgggcctcattggtacaagtgtttttaacaaacagcaacagtacagagcattttgatgcatgtaagtggacaaaatcggaaccacattcctgggaattgatcttcccaatagaggtatgtggtcctaataatggttttgaaatgtggagttctgagt

SEQ ID NO: 80123 - DNA, 340 bp, Glycine max
atgcagtggaggagattgcagtgtcaagttcaagagtcttatgaacgaaatatcaaaatcacaaactctctgggatgaatatcattcattgcggattgaataatatttatcccagagagttgggggttttgatattattcaatccgcaatgaatgattcacatccagttttaatttttttctcagctctggaaggagtgttaaaatattacctgccaagacatctccgctagtagatgcaaggggtctggaaaactaggtaatttcattgtaacatacgagatttcgattcaagcaatcggaatactagtggcgatttcttgtataggatgaaagatttt

SEQ ID NO: 80124 - DNA, 368 bp, Glycine max
gcagcgccagtgctgcagcggtgcctgtctgctgcgcgcagccgccgaatcggcacactttcgagtcgtccgtctctatctccatgttcgtgtcctgtccctccccctcctgcgcgtgcccttcgaggtgttggtgcaattcccgcggcgagctaaagttcggctgcccagctccacacccattccagcggcacttccaccgctcgtcgagcttgcgctcgccctcggaccgcacctcgggtggcggctttggccggatcccagcgacaatataacttctggtaccgtcggcgccctcgacgcacttgggcgaggccgaggggaacgcttcgctgatgtgcttgatgacgtctgatgcattcagcatg

SEQ ID NO: 80125 - DNA, 79 bp, Glycine max
aaaaaaaaaaaaaaaaaaaaaaaaaaaaaaaaaaaaggaagggaaaaaaaaaaaaaaagaaaaaaaaaaaaaaaaaaaa

SEQ ID NO: 80126 - DNA, 365 bp, Glycine max
agcagtcaaaaggagtgattgggcctcattggtacaagtgtttttaacaaacagcaacagtacagagcattttgatgcatctaagtggacaaaatcagaaccacattcctgggaattaatcttcccaatagaggtatgtggtcctaataatggttttgaaatgtggagttctgagtgggcaaatcaaacttcatggcatttgagtttccttattgacaatcccaaacagtctacagtttttgatattctcttgggaatctctcaagattttgaaattgctggtaatactcttatgccagctttttctgttccacaggctactgccagatcttctgaaaatgcggaatcctctgcatgatctggaa

SEQ ID NO: 80127 - DNA, 362 bp, Glycine max
  unsure (1)..(362): unsure at all n locations
acgtcccgcgcgcgcatcctttagcgccgacctgcactcgtgctcgcttccttttttcaccaacaaaaaaaaagctatgggcctcttacaggagcagggggggagagatacaagaaaaaattgtgtaagaaattntcacaaaaagaataaaaatacagcttgatcaaactcaagtncntnccgaaacaacaaataaaaaactaaaaaaaaacggggccccccccccttttgggccctgccccccccggatttaattctcccccgggcccttggggttccccttttttcctttttgggggcccttttaaaccttgggggaacccgggccctacctttttccttggggaaatttgttttcccct

SEQ ID NO: 80128 - DNA, 375 bp, Glycine max
cgcgagcctgttgtcaccatcaattatgaggactttgccccacaagctggtgcagtttggagagattcaggaaaaagttgtgttgaaattttcacaagaggaatttcttacagcttggtcaactcaggtgcgtcccgcaacgactctgttggctgatgggtgcccatatttgtatgctatggtgcatgatagttcagtgtctacaataccaggtgattttgtcattggtgttaagttgacaaccataaacaatatgtgtgcatatgggctcaatcctggtatttcaggttctcgtcttttgggcaccattcctcagtccatttcacagcaaactgtttggaatcaaatggcaacagtgagaacaccattgaattt

SEQ ID NO: 80129 - DNA, 354 bp, Glycine max
atgataacttaattagtgttcatgaatatgtcaagccttactttagtggttctaaattgaaaagctttctagctggtcataatatcaccattactgatggtattgacaaaactagtgcaactttgcaatttagaaagttagcagattgtgattttctcaagagaaactttaagcagatgtctaatgttttatgggtggctcctgaggacaaggcgagtttatggtcacaacttcattatgtttcgtgcaataatctggaaatgcaagaagcttatcttgtcaatctcgtaaatgtgttacgagaattgtatttgcacagtccagaggaagctcgccaattgagaaggaaagctc

SEQ ID NO: 80130 - DNA, 204 bp, Glycine max
cgttgcgtggatcaaactgactcacacacataaagtgtcttgctttgaataaatgaggcgacggctccggaggccggaatgaactcacatgcgttaatatagatcctgcccagcgtgaattgctaacgtaggctctcgtcaaggtcgatgagatcggggagctcgatattggtctttacgtgatggacaccatcactgagggaa

SEQ ID NO: 80131 - DNA, 326 bp, Glycine max
  unsure (1)..(326): unsure at all n locations
gatgaatgctcctgattcaaatgataatattgatctactgttgagcattgatttgttgggtttacaaggagcaggtaaagcttttccaaacaagattgtttttgatgataagcttgtgttggctaacacacaagaattctttgatggaaattttccagtggattcttggttaccaatttttgtgaattgtctttatcctgtaagtcaattacctccagaagctgtcgttgtaaatgttacatgtggtagtggacgtggtggnttacccaccactgcttggattagttcttgagttaacaatccctcctcagatatcaacaaaaaga

SEQ ID NO: 80132 - DNA, 316 bp, Glycine max
taacctacctctttttcttctctctcaacaacttcaccttcttcctcctcgatcatgtctcacttcaagggcaagtaccatgatgagcttatcgccaatgctgcgtacattggcactcctggaaagggtattcttgctgctgatgagtcaacagggacaattggcaagcgtttggccagcatcagtgtagagaacattgaatccaacaggcgagctcttagggagctgcttttcactgctcctggtgttcttcaatatctcagaggcgtcatcctctttgaggaaaccctctaccagagcacagctgcaggcaagc

SEQ ID NO: 80133 - DNA, 361 bp, Glycine max
gccggtttcgagcgtctcgaagacaagcgccttgtgcaacaacgatacaccctcacctctgagaagaccgacgacatgagcaaactggctctcggagcgaaactcgaccgtgctctatctcgccgtatgtctggccaggacgctaccttccgccctaagattatcaatgagaagaaagtggaagcataggcgacaggtttcgtcacagagtgcgacatgcagacattgttgttacagcaaaagcagatcacgacattttctcttttagaagtaagcaggatatccatacattatcgacagccgcagttacggcgaatataccacgtacgctgctgtcatgccgatagcgctacagcttttg

SEQ ID NO: 80134 - DNA, 357 bp, Glycine max
gaaagtagtacatgcgcaaagcaagtatttgcaaaacacaactttctcagctttggaatttcagaataatgtttgagatccatattctatgcattcttggagacattgataatttcctttttctatcagggtgttggcaatacactcaaaagacattatgaaacttatctcttagaatatgaattatctcatgatgacgtagatggagagtgctgcttgatgtgtcacaggtctctgtctctcttctctggtctttatatctattataatgcgggggtggtcaagttttgtcttattgactattatttacctttcatgttgggggcaacagtagcgcagcaggtgactgggtgaact

SEQ ID NO: 80135 - DNA, 363 bp, Glycine max
tccatggaatggactggtttggccaatagattactgagtaagggcaatgatattctgtgttgcgattatgctagttttgatggtttgattaccaagcaagttatgagcaagatggcagaaatgataaacagtctttgtggtggtgatgaaaaattgatgcgtgaaaggacgcacctgctgttggcttgttgttcaaggatggcaatttgtaagaaagatgtttggagagttgaatgtggaatcccttctggatttccgctcacagttatttgcaatagcatttttaatgagatgctcattagatatagctatgaaaaattactgcgccaggctaaagctccaagtatgtttttacaatccttc

SEQ ID NO: 80136 - DNA, 361 bp, Glycine max
gcttatatcaaggccacacatggaacctgacatatatgctatgtactgtaacaggaagaggtagtaatctctcatctcttgtttttttaaaaaaaaaataaaaattgcattgcatggcagcatcgttttctgctgtttctactctatcttcagcttcaattcaaacttatgataaacgaatttgcatttcaggttctgcacgtgagaagtcagctacagtttctcaagagatgtcaagagagtagggtagatgaggatcttggtgcgcctctctcttatcatgatctccctcatttttaaatcattgatctcaaggctaagtcagtgagccagggcttctttacagtgtaaatttatatta

SEQ ID NO: 80137 - DNA, 359 bp, Glycine max
caattttgaggcttttccccacaagctggtgcagtttggagagattcaggaaaaagttgtattgaaattttcacaagaggaatttcttacagcttggtcaactcaggtgcgtcctgcaacaactctgttggctgatgggtgtccatatttgtatgctatggtgcatgatagttcagtgtctacaataccaggtgattttgtcattggtgttaagttgacaaccataaacaatatgtgtgcatatgggcttaatcctggtatttcaggttctcgtcttttgggcaccattcctcagtccatttcacagcaaactgtttggaatcaaatggcaacagtgagaacaccattgaattttgatt

SEQ ID NO: 80138 - DNA, 251 bp, Glycine max
gtcaaagatatcttctctatgcatcaaacgggtgcgattttctaattttgttcaacattctctcatataaagaagatagtgaggttaagatttgaaaaagattggaagacccttgtgcagttttaggtggaaagcggaagccagtgttgattttattttctctcaacttaaagaatgggttgtaattcaaaaatatatatttattaaaaaagaataatcgttgattctaattcagctacatttcactctta

SEQ ID NO: 80139 - DNA, 302 bp, Glycine max
tttgcacagtccagaggaagctcgccaattgagaaggaaagctctctctcgtattgaatggctgcaaaaagctgatgtgcctaccatagcacagattgaagagttccattcgatgcagaggatgatgaatgctcctgattcaaatgataatattgatctactgttgagcattgatttgttgggtttacaaggagcaggcaaagcttttccaaacaagattgtttttgatgataagcttgtgttggctaacacacaagaattctttgatggaaattttccagtggattctgggtaccaatttt

SEQ ID NO: 80140 - DNA, 364 bp, Glycine max
gagaacaccattgaattttgattctagcaagcagagcttttgtcaattttctattgaccttctcggtggaggaattttagtggacaaaactggagattggatcacacttatacaaaattctccaattagtaacttgttgagagttgccgcttggaagaaaggctgtttaatggttaagattgtgatgtctgggaatgcagcagtcaaaaggagtgattgggcctcattggtacaggtgtttttaacaaacagcaacagtacagagcattttgatgcatgtaagtggacaaaatcggaaccacattcctgggaattgatcttcccaatagaggtatgtggtcctaataatggttttgaaatgtgg

SEQ ID NO: 80141 - DNA, 355 bp, Glycine max
ggagtttggaatttttgaagcgtactggatttaattgcgatatcatttgtgtcactggatggactgccaccccaatgcaggatgttcaggttacaattgattggtttatttcctctcaggaatgtgttcccaggacctattgtgttttaaatccacaaaatccttttgtgttaaataggtggatgggaaaattgacttttccccagggcacttcccgaagtgttaagagaatgcctctttctataaggggaggagctggtgcaaagaatgctattctcatgaatatgccaaatgctgttctttcaatgtggagatattttgttggagatctcgtctttgaagtatctaagatgac

SEQ ID NO: 80142 - DNA, 300 bp, Glycine max
ctattatactcgatctagtaaaagcagaatgcgttcgaattacatactagtggtgaaggacgcatagcatgtgacagagcacggcgaagactgccgcgaaggactaccatgaccctcctcctgcacccgttgatcgacccaaacgaactcacaacgtggactggtacacagatcaacatatatgagctcatagcagcacatgctgtctgtttacgtacaccccgttgatccataataaggatacgacagacagagcgacaccactgatcacggagacaccggatgtcactggggcatgct

SEQ ID NO: 80143 - DNA, 364 bp, Glycine max
gatctctgtgctaggccatggatctctttggagtagaatatcatcaaagctccacaagttagagctattgtagatattctactccaaagagatctctgtgctaggccatggatctgagaccgctagcaagcttcaagggacaacaccccatgatcagcttctgattgacacctctgattccttctctggattgttgttgttcacaatagggttccttctgttgatggttgcttttgttaaggacagagaatttcagagtttctttgccaaagggtgtgtgatgcttcacatctccatggcagtgtggagattcttctttgagaggaagcttggggatcttgcacatgagtggcctaggcatgct

SEQ ID NO: 80144 - DNA, 347 bp, Glycine max
attttcccagtttgaccttttactagaacctctcgtgaaatcctttcattctcaatgtccttatttgaaactttcacaccatcaagaagcaagagcttcaatcaaagatccaaaatccaaccctctttcaagcctccttggagatttttcatatttgacgatggatacaaaactgctccaacagcaactattccaggcacatacaaacagtgaaggcacactccgaacaaatgaatgcaggaaatcgaaaatcctagcgcactccctttgatcttcttcatcaaatcaatcggaaatatgacagcccacatgctaaaaatagctattctaaattttatcagcagaaa

SEQ ID NO: 80145 - DNA, 340 bp, Glycine max
ggaatcccttctggatttccgctcacagttatttgtaatagcatttttaatgagatgctcattagatatagctatgaaaaattactgcgccaggctaaagctccaagtatgtttttacaatccttcaaaaattttgtttctttgtgtgtgtatggtgatgataacttaattagtgttcatgaatatgtcaagccttactttagtggttctaaattgaaaagctttctagctggtcataatatcaccattactgatggtattgacaaaactagtgcaactttgcaatttagaaagttagcagattgtgattttctcaagagaaactttaagcagatgtcta

SEQ ID NO: 80146 - DNA, 366 bp, Glycine max
ctccgtcaaaccctccaacacacaccttctctcaacgcccccattctctttctctttccctaacgtccccgacgacgccgtaacgtcctccctttcatggcctcttgcgacgacgacgacgacttctctctcctccgcgacgacagccaccaccacctccaccaaccctacgcgccgcaccaccaccacttctctccctccgccgtcgccgcctccgtgccgcccaagcccgttgccgaagctgaggacttcgccaaccccttcgaagacgacgacggtagcgccagcgagaagcgcaaggagtgcgacgagatcggtgagggagccgcctcgtacggattcaacaacaagagatctaaggcgact

SEQ ID NO: 80147 - DNA, 356 bp, Glycine max
  unsure (1)..(356): unsure at all n locations
acttcattatgtttcgtgcaataatctggaaatgcaagaagcttatcttgtcaatctcgtaaatgtgttacgagaattgtatttgcacagtccagaggaagctcgccaattgagaaggaaagctctctctcgtattgaatggctgcaaaaagctgatgtgcctaccatagcacagattgaagagttccattcgatgcagaggatgatgaatgctcctgattcaaatgataatattgatctactgttgagcattgatttgttgggtttacaaggagcaggtaaagcttttccaaacangattgtttttgatgataagcttgtgttggctaacacacangaattctttgatggaaatt

SEQ ID NO: 80148 - DNA, 374 bp, Glycine max
tcggggaattccaattccacattttcaagaaataaggaggcaaaaatgttcatatatgaattggaattatttgttttcttattaggcctatcctgaagccaaaggaaatgagatcggaattcctcggggaattccaattccacattttcaagaaataaggaggcaaaaatgttcatatatgaattggaattatttgttttcttattaggcctatcctgaagccaaaggaaatgagatcggaattcctcggggaattccaattccacattttcaagaaataaggaggcaaaaatgttcatatatgaattggaattatttgttttcttattaggcctatcctgaagccaaaggaaatgagatcggaattcctcggg

SEQ ID NO: 80149 - DNA, 365 bp, Glycine max
aacaccattgaattttgattctagcaagcagagcttttgtcaattttctattgaccttctcggtggaggaattttagtggacaaaactggagattggatcacacttatacaaaattctccaattagtaacttgttgagagttgctgcttggaagaaaggctgtttaatggttaaaattgtgatgtctgggaatgcagcagtcaaaaggagtgattgggcctcattggtacaagtgtttttaacaaacagcaacagtacagagcatttcgatgcatgtaagtggacaaaatcggaaccacattcctgggaattgatcttcccaatagaggtatgtggtcctaataatggttttgaaatgtggagtt

SEQ ID NO: 80150 - DNA, 366 bp, Glycine max
aattgatgcgtgaaaggacacatttgctgttggcttgttgttcaaggatggcaatttgtaagaaagatgtttggagagttgaatgtggaatcccttctggatttccgctcacagttatttgcaatagcatttttaatgagatgctcattagatatagctatgaaaaattactgcgccaggctagagctccaagtatgtttttacaatccttcaaaaattttgtttctttgtgtgtgtatggtgatgataacttaattagtgttcatgaatatgtcaagccttactttagtggttctaaattgaaaagctttctagctggtcataatatcaccattactgatggtattgacaaaactagtgcaactt

SEQ ID NO: 80151 - DNA, 365 bp, Glycine max
attgctttctcgttagccttcaattcgttcaccaatttcctgaggggaaagaggaggggccttttgccttcgtgagaggaagaacggggcatgttcttttctgtcctctctctctctctctctctgatcagacagacagacacgcgcatattacacatagatgcagcagagaaactctctctctctctctctctctctctctctctcattattgctccaaacccattcagagtacagatggatcttcgattatagcggttttagcagctggaatctgcacttgcaccatgtgtgtttctactgttaatatatattttttcaacataaacattcaattccaccactgaaagaagaaattggagaaa

SEQ ID NO: 80152 - DNA, 60 bp, Glycine max
gcgtattatacgattattgagaaggctctttcatatgcgacggcgaagatggcagagacg

SEQ ID NO: 80153 - DNA, 364 bp, Glycine max
ctttttcttctctctcaacaacttcaccttcttcctgctcgatcatgtctcacttcaagggcaagtaccatgatgagcttatcgccaatgctgcgtacattggcactcctggaaagggtattcttgctgctgatgagtcaacagggacaattggcaagcgtttggccagcatcagtgtagagaacattgaatccaacaggcgagctcttagggagctgcttttcactgctcctggtgttcttcaatatctcagtggtgtcatcctctttgaggaaaccctctaccagagcacagctgcaggcaagccctttgtgaatgtcttgaaggaagctggtgtgctttctggcatcaaggttgacaaggg

SEQ ID NO: 80154 - DNA, 359 bp, Glycine max
ggactcgtcaatggctaaacactggctgcactattggcaggacacgggccataagggtcacactctatgcatgtatcgccgtagaccattggtggtgcacggaaccacaacagcaagacacgtggcagttcgtccttacgactatgcaccaccaccatcataatcaaaacctttgatgccaaccctaccacctataaacgacacagcaacgggtcacaaattctacagcaacataactggcaaggtgggggccccacactgggttcctgtgccagccaaagtggatgagcacatgttcattactattggattaaacctagacacgtgtgatcctaagaatgccaccaatgccacgtgtc

SEQ ID NO: 80155 - DNA, 362 bp, Glycine max
cttaattagtgttcatgaatatgtcaagccttactgtagtggttctaaattgaaaagctttctagctagtcataacatcaccattactgatggtattgacaaaactagtgcaactttgcaatttagaaagttagcagattgtgattttctcaagagaaactttaagcagatgtctaatgttttgtgggtggctcctgaggacaaggcgagtttatggtcacaacttcattatgtttcgtgtaataatctggaaatgcaagaagcttatcttgtcaacctcgtaaatgtgttacgagaattgtatttgcacagttcagaggaagctcgccaattgacaaggaaagctctctctcggattgaat

SEQ ID NO: 80156 - DNA, 361 bp, Glycine max
ctagtgcaactttgcaatttagaaagttagcagattgtgattttctcaagagaaactttaagcagatgtctaatgttttgtgggtggctcctgaggacaaggcgagtttatggtcacaacttcattatgtttcgtgtaataatctggaaatgcaagaagcttatcttgtcaatctcgtaaatgtgttacgagaattgtatttgcacagtccagaggaagctcgccaattgagaaggaaagctctctctcgtattgaatggctgcaaaaagctgatgtgcctaccatagcacagattgaagagttccattcgatgcaaaggatgatgaatgctcctgattcaaatgataatattgatctact

SEQ ID NO: 80157 - DNA, 211 bp, Glycine max
gatttgttgggtttacaaggagcaggtaaagcttttccaaacaagattgtttttgatgataagcttgtgttggctaacacacaagaattctttgatggaaattttccagtggattcttggttaccaatttttgtgaattgtctttatcctgtaagtcaattaccttcagaagctgtcgttgtaaatgttacatgtggtagtggacgtggtg

SEQ ID NO: 80158 - DNA, 191 bp, Glycine max
cttcttcattgctttttccgattgcttctccttcaggtgcgttctattttttctggagaagatccacctcgattttcccggaaaaaaaaaagaaagaagaaaatgctgaacgcaggcttgaactctctcctaaattttccttccatggtttctgcaagtcattgccatcgttcccttgttcctattgctgc

SEQ ID NO: 80159 - DNA, 146 bp, Glycine max
  unsure (1)..(146): unsure at all n locations
gtcgagaaccagatgangcgacccacattgcttgttgaacggcacgcgtctaaaacagatgggggagtacttggccttgctccgatccttgatgccttcttcttatgttcaaaggggtgaccaatcgtttattattggaggggcct

SEQ ID NO: 80160 - DNA, 358 bp, Glycine max
attcaggaaaaagttgtattgaaattttcacaagaggaatttcttacagcttggtcaactcaggtgcgtcctgcaacaactctgttagctgatgggtgtccatatttgtatgctatggtgcatgatagttcagtgtctacaataccaggtgattttgttattggtgttaagttgacaaccataaacaatatgtgtgcatatgggctcaatcctggtatttcaggttctcgtcttttgggcaccattcctcagtccatttcacagcaaactgtttggaatcaaatggcaacagtgagaacaccattgaattttgattctagcaagcagagcttttgtcaattttctattgaccttctcg

SEQ ID NO: 80161 - DNA, 362 bp, Glycine max
ggaattttagtggacaaaactggagattggatcacagttatacaaaattctccaattagtaacttgttgagagttgctgcttggaagaaaggctgtttaatggttaagattgtgatgtctggaaatgcagcagtcaaaaggagtgattgggcctcattggtacaagtctttttaacaaacagcaacagtacagagcattttgatgcttgtaagtggacaaaatcggaaccacattcctgggaattgatcttcccaatagaggtatgtggtcctaataatggttttgaaatgtggagtttttggtgggtcaaataaactttatggcatttgtgttttctctttgacaatcccaaacatttttc

SEQ ID NO: 80162 - DNA, 365 bp, Glycine max
aaattaatttaaaaaaaaaaaaaaaaaaaaaaaggaaggatttaataaaaaaaaaaaaaaaaaaaaaaaaaaaaaaaaaattaaaaaaataaaaaaaaaataaaaaaaaaaaaaaaaaaaaaaaataaaaaaaaatggggcgctccccctttattaattttttcaacccttaatttattttttacccgtatctttaatgtttccaatttttctttttaagaggtttttttaaaattttctttaataattttaatattttttttttttttaaaatttttttctctctaaaattccaaaaaaatttttaatttgtaatttaaaattttaaaaccttttttcctttaataagtttcttaccttaattt

SEQ ID NO: 80163 - DNA, 236 bp, Glycine max
  unsure (1)..(236): unsure at all n locations
tatagaagagacgnngcagtgcacagcctgccctaacctcggaattcggctctagcgatattatttttttcactggatggacttccaccccgatgcgttatttttcaattacgattgcactaattatttccttttaaaaattttctcctattacctatttttttttttaattcacacaatcactgtttaaatttaatgtaccatgtgcttctgttggcttgacatcaagttacact

SEQ ID NO: 80164 - DNA, 355 bp, Glycine max
gaggagctggtgcaaagaatgctattctcatgaatatgccaaatgctgttctttcaatgtggagatattttgttggagatctcgtctttgaagtttctaagatgacttctccctacattaaatgtacagtctctttcttcatagcatttggaaatttggctgatgacaccatcaattttgaggcttttccccacaagctggtgcagtttggagagattcaggaaaaagttgtgttgaaattttcacaagaggaatttcttacagcttggtcaactcaggtgcgtcccgcaacgactctgttggctgatgggtgcccatatttgtatgctatggtgcatgatagttcagtgtctac

SEQ ID NO: 80165 - DNA, 270 bp, Glycine max
gttgggtttacaaggagcaggtaaagcttttccaaacaagattgtttttgatgataagcttgtgttggctaacacacaagaattctttgatggaaattttccagtggattcttggttaccaatttttgtgaattgtctctatcctgtaagtcaattaccttcagaagctgtcgttgtaaatgttacatgtggtagtggacgttgttctttttttttttttttctttttccctctttttttttttcctaattttacaatatttttttattt

SEQ ID NO: 80166 - DNA, 365 bp, Glycine max
gaaaaattactgcgccaggctaaagctccaagtatgtttttacaatccttcaaaaattttgtttctttgtgtgtgtatggtgatgataacttaattagtgttcatgaatatgtcaagccttactttagtggttctaaattgaaaagctttctagctggtcataatatcaccattactgatggtattgacaaaactagtgcaactttgcaatttagaaagttagcagattgtgattttctcaagagaaactttaagcagatgtctaatgttttgtgggtggctcctgaagacaaggcgagtttatggtcacaacttcattatgtttcgtgtaataatctggaaatgcaagaagcttatcttgtcaa

SEQ ID NO: 80167 - DNA, 362 bp, Glycine max
ggcagaaatgataaacagtctttgtggtggtgatgaaaaattgatgcgtgaaaggacacacctgctgttggcttgttgttcaaggatggcaatttgtaagaaagatgtttggagagttgaatgtggaatcccttctggatttccgctcacagttatttgtaatagcatttttaatgagatgctcattagatatagctatgaaaaattactgcgccaggctaaagctccaagtatgtttttacaatccttcaaaaattttgtttctttgtgtgtgtatggtgatgataacttaattagtgttcatgaatatgtcaagccttactttagtggttctaaattgaaaagctttctagctggtcata

SEQ ID NO: 80168 - DNA, 87 bp, Glycine max
cgtctcttgtttacttagttcatataaaacccatctgtagaccatttgctgaggtcgctatctcccacactatcctatcttatcact

SEQ ID NO: 80169 - DNA, 359 bp, Glycine max
ctcgagccgaatcggctcgagggactggtttggccaataggttactgagtaagggcaacgatattctgtgttgcgattatgctagttttgatggtttgattaccaagcaagttatgagcaagatggcagaaatgataaacagtctttgtggtggtgatgaaaaattgatgcgtgaaaggacacacctgctgttggcttgttgttcaaggatggcaatttgtaagaaagatgtttggagagttgaatgtggaatcccttctggatttccgctcacagttatttgtaatagcatttttaatgagatgctcattagatatagctatgaaaaattactgcgccaggctaaagctccaagtatg

SEQ ID NO: 80170 - DNA, 116 bp, Glycine max
actaacatttactaaacaccacaccaattgtagtaggtgctgtgatatatgtctggtgtgggacagggattggtccctgagctaacaatcactgtagcaacagatatgctcccaca

SEQ ID NO: 80171 - DNA, 358 bp, Glycine max
attttgtttctttgtgtgtgtatggtgatgataacttaattagtgttcatgaatatgtcaagccttactttagtggttctaaattgaaaagctttctagctggtcataatatcaccattactgatggtattgacaaaactagtgcaactttgcaatttagaaagttagcagattgtgattttctcaagagaaactttaagcagatgtctaatgttttatgggtggctcctgaggacaaggcgagtttatggtcacaacttcattatgtttcgtgcaataatctggaaatgcaagaagcttatcttgtcaatctcgtaaatgtgttacgagaattgtatttgcacagtccagaagaagc

SEQ ID NO: 80172 - DNA, 357 bp, Glycine max
gagaaactttaagcagatgtctaatgttttatgggtggctcctgaggacaaggcgagtttatggtcacaacttcattatgtttcgtgcaataatctggaaatgcaagaagcttatcttgtcaatctcgtaaatgtgttacgagaattgtatttgcacagtccagaggaagctcgccaattgagaaggaaagctctctctcgtattgaatggctgcaaaaagctgatgtgcctaccatagcacagattgaagagttccattcgatgcagaggatgatgaatgcttctgattcaaatgataatattgatctacttgtgagcattgatttgttgggtttacaaggagcaggtaaagtttt

SEQ ID NO: 80173 - DNA, 200 bp, Glycine max
tctcacttttattgctcatttcatttatgtatttgacaaccacctcagacccattatcaccagctacagcctctttcaaaccgccccaacctgttcctaccataccagttgcggttcctaaacaaccattggttacctcatgggcacagccaccaagagattccactcctgaaagtactccattacttgactattgtggg

SEQ ID NO: 80174 - DNA, 245 bp, Glycine max
aagattttgaaattgctggtaatactcttatgccagctggttctgttccacaggctactgccagatcttctgaaaatgcggaatcctctgcatgatctggaattcgtgttttctttcgcttgttcgtttgtttaattcaataaaggaaattaggcatgaccctcttgttgagtatgctctgcctatctgaaaatttccacacctcttttaattgtcgtaatgatgtgtgaagtgtgtgttatttt

SEQ ID NO: 80175 - DNA, 231 bp, Glycine max
attaagaagctcaacttagtaacaacacacactcacagtggtgttgaattttcctcagagagaagagagagagaggatgtggaaactcgtgcgatacgccgacggcttcaacctagcccgatcgcggaggttttacgccgtgaatcccggtccgcgcattgagcacaagcgcggggccgacatactacacgatcccgggttcaacaagagaacatcgttttacttttgagt

SEQ ID NO: 80176 - DNA, 419 bp, Glycine max
atagaagagctatgacgtgcgcatgcaccctaacctcggattgcggttcgagttgagaagtctctaaaaggactgctccctacattaaatgtacagtctctttcttcatagcatttggaaatttggctgatgataccatcaattttgaggcttttccccacaagctggtgcagtttggagagattcaggaaaaagttgtattgaaattttcacaagaggaatttcttacagcttggtcaactcaggtgcgtcctgcaacaactctgttggctgatgggtgtccatatttgtatgcaatggtgcatgatagttcagtgtctacaataccaggtgattttgtcattggtgtcaagttgacaaccataaacaatatgtgtgcatatgggctcaatcctggtatttcaggttctcgtcttttg

SEQ ID NO: 80177 - DNA, 102 bp, Glycine max
cttttatttaagctacaagggctctgcaaggggattatagtgaccctgggtctacatatttttagggatgagcgcgagcttttgctatttcttggaataaca

SEQ ID NO: 80178 - DNA, 284 bp, Glycine max
ctcgagccgattcggctcgagaaaaaaaaaagaagaaaaaaaaaaaaaaaaaaaaaaaaaaaaaaaaaaaaaaaaaaaaaaaaaaaaaaaaaaaaaaaaaaaaaaaaaaaaaaaaaaaaaaaaaaaaaaaaaaaaaaaaaaaaaaaaaaaaaaaaaaaaaaaaaaaaaaaaaaatgaaaaaaaaaaagtggaaaaataataaaaattgtataaaaatttatataataataaatttttaaaaaaaaaaaaaaaatataaaattaaaagtgagatggagggggggg

SEQ ID NO: 80179 - DNA, 360 bp, Glycine max
gcacgcgtacgtaagctcggaattcggttcgagctccggttattggccggtgagacagggaaatcggtgtcggcgtagaaggaggaccggtactacacgacgcggtgttcggcggaagagaacggcacggtcaccggcggcgaaggcatcaacggcgaagaacgagccctagtttggcccaagctctacatcactatctcaagcaaggagaaagaggaagattttctggctatgaagggttgcaagcttccttattgacccaatatgagggcctgaatcattcaaagatactttcttttggggagttccgattcgtgtttaactgatatctgccaagagtgttttgacgtttgggctaaa

SEQ ID NO: 80180 - DNA, 253 bp, Glycine max
ctcaaaattgatggtgtcatcagccaaatttgaggcttttccccacaagctggtgcagtttggagagattcaggaaaaagttgtgttgaaattttcacaagaggaatttcttacagcttggtcaactcaggtgcgtcccgcaacgactctgttggctgatgggtgcccatatttgtatgctatggtgcatgatagttcagtgtctacaataccaggtgattttgtcattggtgttaagttgacaaccataaac

SEQ ID NO: 80181 - DNA, 130 bp, Glycine max
atcaaggtaacactctctcttagctctctgcagacttctgccttatcctcagagagaaacaaacattcgttgtctactacttttgttctgtctcctaaaaaggtcggaaatttagttgagttttgaggct

SEQ ID NO: 80182 - DNA, 176 bp, Glycine max
gattcatattgatagaacagacaaagaaaaagtaggtacttcaaccagagtgagacgctccaccagaaacggaggctccaccaggatggatccgtatcctgatccgtacctctgcgacataaacccaccgttccttcctcttattccattttcgaaaaactcacctttctaactga

SEQ ID NO: 80183 - DNA, 246 bp, Glycine max
gactgagtcttacttcaccactgcaatactgcaagcgtactattggctgcaaccttcccacaactacacaactttacaggactttaacatgctagagccaaatctaattggatagacatatattaaaaactaacgacaggcttgatttttttttaaagcgaatgcataaggcaattcatattgcataaacattttaacatgtaatgtctgcttacataattctaaataaagtggatgcgaaatgaa

SEQ ID NO: 80184 - DNA, 84 bp, Glycine max
gtttaattttatcctcaacaccatcacctgcgtaggttactaatgacggttaccgccccataactacttactttatattacatt

SEQ ID NO: 80185 - DNA, 366 bp, Glycine max
gattgggcctcattggtacaagtgtttttaacaaacagcaacagtacagagcattttgatgcatgtaagtggacaaaatcagaaccacattcctgggaattgatcttcccaatagaggtatgtggtcctaataatggttttgaaatgtggagttctgagtgggcaaatcaaacttcatggcatttgagtttccttattgacaatcccaaacagtctacagtttttgatattctcttgggaatctctcaagattttgaaattgctggtaatactcttatgccagctttttctgttccacaggctactgccagatcttctgaaaatgcggaatcctctgcatgatctggaatttgtgttttctttcgc

SEQ ID NO: 80186 - DNA, 222 bp, Glycine max
tgaattaatgatactatggcatgtttcagtggcagtctgcagttttctttcctttgaaagatgttagtggttggcatgtttgattgggtatgattatggaatttttatttactcaattgatgtatccgaaatatgttgtttttacaggataaaaagtcaatccagttggggcctgaagacaatttatatctcgagggatctgcttttgaacgtgttcgtaaa

SEQ ID NO: 80187 - DNA, 361 bp, Glycine max
ggctgatgacaccatcaattttgaggcttttccccacaagctggtgcagtttggagagattcaggaaaaagttgtgttgaaattttcacaagaggaatttcttacagcttggtcaactcaggtgcgtcccgcaacgactctgttggctgatgggtgcccatatttgtatgctatggtgcatgatagttcagtgtctacaataccaggtgattttgtcattggtgttaagttgacaaccataaacaatatgtgtgcatatgggctcaatcctggtatttcaagttctcgtcttttgggcaccattcctcagtccatttcacagcaaactgtttggaatcaaatggcaacagtgagaacacca

SEQ ID NO: 80188 - DNA, 377 bp, Glycine max
gtaagctcggaattcggttcgagggaaaggtttagcacctccagatgtaaattcatatgaagaagctggaactcctgttattaacgagaaggatgacgaaaattgtgccactattgtcaatgatgaacaacacgtgatgcatattccaagcccatgctctatgtcatcatcacctgatatgatcttcatggagttctacaaagcctaagtgtatctatgcagacctatccatgcacttgacgggatacaatactcgattgaaaatctgtcaaaaatgatgaagagcgtggaatactcttatgccagccacttctgtacacaggctactgccagaacttcagaatatgcaagatactctgcatgatctgacaatattg

SEQ ID NO: 80189 - DNA, 191 bp, Glycine max
actctttttaccaaaaaaacatttgacatgtgggggtgttattatacaggtgcaactcaatttacaaaatttctacctcattacattagttctccatctaataccttatttatctacatactctctatcttttcttacctcacaaattaaatataagccctatttcacttaaattcattctttccatctta

SEQ ID NO: 80190 - DNA, 148 bp, Glycine max
tattaacataaggattcgtacagcacttgggaagggtaagaaaattggtttgcttactacagtagaaccttttccagtcgctatactggctgatcttttggctgttaagaatgcacttttgtgttcataactcgcttactccatatgc

SEQ ID NO: 80191 - DNA, 368 bp, Glycine max
atctcatctcatagatgtctctctgacccatgatgcaaatcttaactgtcattaatcttctcttcgtgggttaagcctaaggaaaaccacaccccatcactgttcaaggtccttttcttctataacacaggtgtgaaaggtgaaagcagagtgtgaatatcaggtcttgtccttttttcgaaggtgattcactatgtcgattattcttgtgcataggctaataccaagcttctatatcagcacctaacagattacggcctattgcgttttggcattttaatctatgccatctgacatgatttctctgtttgtttgagctcagttgtaattaaaaaaaccccactcttgtcaaggtacgctctctcact

SEQ ID NO: 80192 - DNA, 368 bp, Glycine max
ggtgattttgtcattggtgttaagttgacaaccatagacaatatgtgtgcatatgggctcaatcctggtatttcaggttctcgtcttttgggcaccattcctcagtccatttcacagcaaactgtttggaatcaaatggcaacagcgagaacaccattgaattttgattctagcaagcagagcttttgtcaattttctattgaccttctcggtggaggaattttagtggacaaaactggagattggatcacacttatacaaaattcttcaattacgaacttggtgagagttgctgcttggaagaaaggttgtttaatggtcaagattgtgatgcctgggaatgcagcagtcaaaaggagtgattgggc

SEQ ID NO: 80193 - DNA, 275 bp, Glycine max
agctcggaattcggttcgagcacaaatcggtttactgtctgttcaagctaccatgtgtgtctctctttcttagtgcctccttgccagaagttaaaatggcccaagaaactttcctattcacatctgaatcagtgaacgaggggcaccctgacaagctctgtgaccagatctccgatgctgtgctcgatgcatgcttggagcaggaccctgacagcaaggttgcctgtgaaacctgcaccaagaccaacatggtgatggttttcggagagatcaca

SEQ ID NO: 80194 - DNA, 268 bp, Glycine max
gaaagacacagccattgtttgtttactttcgattgattgagcgaaagctttgttttttctgcgatcattttccattgggtggaagaaagtctcaacctttagtcgaaagagcaaggatctgagtgagtgagcgatcatttcttgtggttcgattcttttcttttatattccaactggttctatctacttttttgtctttccccccttttttttctttattctttatttggggtacctcttttttttatactctcttgggggggggggg

SEQ ID NO: 80195 - DNA, 294 bp, Glycine max
ctcgagccggctcgagcggctcgagaaaaaggagggaaaaaaaaaaaaaaaaaaaaaaaaaaaaaaaaaaaaaaaaaaaaaaaaaaaaaaaaaaaaaaaaaaaaaaaaaaaaaaaaaaaaaaaaaaaaaaaaaaaaaaaaaaaaaaaaaaaaaaaaaaaaaaaaaaaaaaaaaaaaaaaaaaaaaaaaaaaaaaaaaaaaaaaaaaaaaggggggggtgctaacaatggggtgtttaacccctaaaaaaaaaatcccatcccttcccgggggggggggggggtttcccataaag

SEQ ID NO: 80196 - DNA, 216 bp, Glycine max
tttatatagacagaacatatactaatcgatagtatgtgatgtctgactagaaggaaagagaccgaggttagtggatttgtcattgttttgcactgtcgaggatgctgctgagggaattgatggtgctgacgtgactgctattagcaacaggggcgtgtaggggcattgtagctgagactaccattgtatctagctatgcgtggtgttacatgtgca

SEQ ID NO: 80197 - DNA, 376 bp, Glycine max
  unsure (1)..(376): unsure at all n locations
agagntatgacgnnngatggcccgcgtacgtaagcttcggaattcggttcgagaatctgtaaatgcaagaagcttatcttgtcaatcggggtagatgtgttacgagaactgtatttgcacagtccagaggaagctcgccaattgagaaggaaagctctctctcgtattgaatggctgcaaaatgctgatgtgcctaccatagcacagattgaagagttccattcgatgcagaggatgatgaatgctcctgattcaaatgataatattgatctactgttgagcattgatttgttgggtttacaaggagcaggcagaggtttggcaaacaagaattgttttttattattagatcgtgttggcttactcacaataattt

SEQ ID NO: 80198 - DNA, 363 bp, Glycine max
tcaaggatggcaatttgtaagaaagatgtttggagagttgaatgtggaatcccttctggatttccgctcacagttatttgcaatagcatttttaatgagatgctcattagatatagctatgaaaaattactgcgccaggctaaagctccaagtatgtttttacaatccttcaaaaattttgtttctttgtgtgtgtatggtgatgataacttaattagtgttcatgaatatgtcaagccttattttagtggttctaaattgaaaagctttctagctggtcataatatcaccattactgatggtattgataaaactagtgcaactttgcaatttagaaagttagcagattgtgattttctcaag

SEQ ID NO: 80199 - DNA, 124 bp, Glycine max
cggatttcggttcgggcaataaaggaaattgggcatgaccctcttgttgagtgtgctctgcctatttgaaaatttccacacctcttttaattgtcgtaatgacgtgtgaagtgtgtgttatttt

SEQ ID NO: 80200 - DNA, 174 bp, Glycine max
cggcgcgggcacggtaacctcggaattcggttcgggctcaacttaacttatattccaaaacgcatagccagggcatggctgtccctttgaaccactcttacgccacccacacccaacatcgtaggcacgactaccacgacgaacgacccaccgcttacccttcgccgcgaaact

SEQ ID NO: 80201 - DNA, 371 bp, Glycine max
aattgctcccaagggtttaacctttctggctgtgttaatatgcgtttcagcactgtcactgagtccttctgttgcgggggaagggcaaaataatggccttgttatgaacttctacaaggaatcatgccctcaggctgaagacatcatcacagaacaagtcaagcttctctacaagcgccacaagaacactgctttctcctggctcaggaacatcttccatgactgtgctgttcagagttgtgatgcttcactgttgctggactccacaagaaggagcttgtctgagaaggaaacagatagaagctttgggttgagaaatttcaggtacattgagaccatcaaagaagctttggaaagagaatgccctggag

SEQ ID NO: 80202 - DNA, 367 bp, Glycine max
gattggtttatttcctctcaggagtgtgttcccaggacctattgtgttttaaatccacaaaatccttttgtgttaaataggtggatgggaaaactgactttccctcagggcacttcccgaagtgttaagagaatgcctctttctatagggggaggagctggtgcaaagaatgctattctcatgaatatgccaaatgctgttctttcaatgtggagatattttgttggagatctcgtctttgaagtttctaagatgacttctccctacattaaatgtacaggctctttcttcatagcatttggaaatttggctgatgacaccatcaattttgaggctttttcccacaagctggtgcagtttggagaga

SEQ ID NO: 80203 - DNA, 134 bp, Glycine max
  unsure (1)..(134): unsure at all n locations
atagaagagnnacgacgncgcatgcacgtactacaaattcgaatttcgcttcaaggccaataggttttcttaaggtcccttttagaacaccgggggaaggaacttggcaaggggttgatgtatggaatgccctt

SEQ ID NO: 80204 - DNA, 133 bp, Glycine max
attaaaaaaggtgtggaaattttcaaatacccccgccattctcaacacgcggggcatacccaattttctttattgaatgaaacaaaacacatattccagatcattttaatttccttattgactatcccaaaca

SEQ ID NO: 80205 - DNA, 346 bp, Glycine max
acgacgcacgcacgcgtacgtatgctagtaattctgctcgacgctcgggtgtcagtgaaaggacaacctttagttataccggacaattacaacatttagttttcgttactgcacagtcaacctcaagatttctgaaggaaaatttgtttagcatgctagtgatcagaatccagagttttctgactataatatacattttttttacccacacgccagacctcattgaacgagtttctcgttgtattagcaatgatcgatgcagaaatagcccacagaacaaaattgctataaatgatgtctctctactttacctgtgttgggataattgagtactttttggcattta

SEQ ID NO: 80206 - DNA, 251 bp, Glycine max
attcggttctagctctatttatacaatcacaaaattttacatatacccggcctaattaataaccccgccgcaccatacattctcattcaataaaacatttataaacacaacttatcctcaaatcttcaaaatctatgctcatcaaaccttattcttttttcaactataacaacacaaccaatttcattctaatctaattattttacataaattattcaattctatactatcctccattaaataacttaatt

SEQ ID NO: 80207 - DNA, 481 bp, Glycine max
agcttgacgtcgatgcacgcgtacgttagctcggaattccgcttgagggcatttggataggattaaggaaaaagtggtattgaaggtgttacaagaggaatttctaccagctgggtcaactaaggtgcgtcctacaccacctttgtgggttgatgggtgtccatattggtttgcttttgggccatggatagttcagtggtctaacaataccagggtggaattttgtcaattgggggttaaagtttgacaaaccaataaacaaattatgtggtgcattatggggctcaaaatcctgggtattttcagggttctttcgtctttttgggtaccccattcctcaggtcttatttcacaaagcaaactgggtttggaatcaaatggcaaccagtgaagaacccaccattgaattttggattcttaagcaaagcagagcttttgtcaaatttttctattggaccttctcggtggagggaattttagt

SEQ ID NO: 80208 - DNA, 297 bp, Glycine max
cagagatacgggccagttatatccaccattcctgagcagctatccagattgcagtgtaaaatgatcactaattgaacataaatttgaagcttacatgctgataattactactttcatttgtaattttcgtaactaggaattatcattgcatagactggctagaaaactgagttttgaagtgagttgctgagtagagtagttatgttgtgacatggtttgtctgtatttcattcattgtactgggggttgatgtcggttattaacaatcaacccaagagggaatcaagtaatcaacta

SEQ ID NO: 80209 - DNA, 379 bp, Glycine max
ctcgagccgttgcaatagcatttttaatgagatgctcattagatatagctatgaaaaattactgcgccaggctaaagctccaagtatgtttttacaatccttcaaaaattttgtttctttgtgtgtgtatggggatgataacttaattagtgttcatgaatatgtcaagccttactttagtggttctaaattgaaaagctttctagctagtcataacatcaccattactgatggtattgacaaaactagtgcaactttgcaattttagaaagttagcagattgtgattttctcaagagaaactttaagcagatgtctaatgttttgtgggtggctcctgaggacaaggcgagtttatggtcacaacttcattatgtttc

SEQ ID NO: 80210 - DNA, 382 bp, Glycine max
cgtgaaaggacacacctgctgttggcttgttgttcaaggatggcaatttgtaagaaagatgtttggagagttgaatgtggaatcccttctggatttccgctcacagttatttgcaatagcatttttaatgagatgctcattagatatagctatgaaaaattactgcgccaggctaaagctccaagtatgtttttacaatctttcaaaaattttgtttctttgtgtgtgtatggggatgataacttaattagtgttcatgaatatgtcaagccttactttagtggttctaaattgaaaagctttctagctggtcataatatcaccattactgatggtattgacaaaactagtgcaactttgcaatttagaaagttagcagatt

SEQ ID NO: 80211 - DNA, 69 bp, Glycine max
cttccgtctttcttaattcacatgtcactgcccttcttagtcggttgcagcaacatcaaacaactgtct

SEQ ID NO: 80212 - DNA, 237 bp, Glycine max
tttcaagaatttctcaatttcttcctacttctttgcttactatttcttaaattaaataaaattactttttattcttttcacagacttcctcaatcatcttcttttccatttctagtttatttcctcaacactctcctattttatatttctattttctcttatttttaaattattaatacaaccttcatccacacacaatttatctttcaatttttaccctttatattttttatcttt

SEQ ID NO: 80213 - DNA, 139 bp, Glycine max
ggtttttgttgccaaagggttttttggacagaaccaaaaaaaaggggttagtcgggaaaaactgggtccaacaagcgccgatgctaaaacatatatcagtggaacaatctgcacagatcaggaacaacctatagacaca

SEQ ID NO: 80214 - DNA, 244 bp, Glycine max
attttgaaattgctggtaatactcttatgccagcttgttctgttccacaggctactgccagatcttctgaaaatgcggaatcctctgcatgatctggaattcgtgttttctttcgcttgttcgtttgtttaattcaataaaggaaattaggcatgaccctcttgttgagtatgctctgcctatctgaaaatttccacacctcttttaattgtcgtaatgatgtgtgaagtgtgtgttattttaa

SEQ ID NO: 80215 - DNA, 126 bp, Glycine max
gctagaagcaggaagagaagcgaaacagagaaacaacaaaatagtcaattgagccacttaccatcagatttagatctcccaacagagagtttctcaaaattgccaagtacccttttcaggatcaag

SEQ ID NO: 80216 - DNA, 74 bp, Glycine max
ctcgagccgaaagcatgtccaaaagagcatgatgatgtatggtacagaggcaacaggaggccttgcatcatcgt

SEQ ID NO: 80217 - DNA, 389 bp, Glycine max
tatggtgcatgatagttcagtgtctacaataccaggtgattttgtcattggtgttaagttgacaaccataaacaatatgtgtgcatatgggctcaatcctggtatttcaggttctcgtcttttgggcaccattcctcagtccatttcacagcaaactgtttggaatcaaatggcaacagtgagaacaccattgaattttgattctagcaagcagagcttttgtcaattttctattgaccttctcggtggaggaattttagtggacaaaactggagattggatcacacttatacaaaattctccaattagtaacttgttgagagttgctgcttggaagaaaggttgtttaatggtcaagattgtgatgtctgggaatgcagcagtcaaat

SEQ ID NO: 80218 - DNA, 117 bp, Glycine max
  unsure (1)..(117): unsure at all n locations
gatttttataccatcaacaagataggattatcaaagcggtatatcgtggggagctggtgcttttctttangatgttcacatccttaacacaaaattcatacgtctttctacaatgtg

SEQ ID NO: 80219 - DNA, 386 bp, Glycine max
gcagtttggagagattcaggaaaaagttgtattgaaattttcacaagaggaatttcttacagcttggtcaactcaggtgcgtcctgcaacaactctgttggctgatgggtgtccatatttgtatgcaatggtgcatgatagttcagtgtctacaataccaggtgattttgtcattggtgtcaagttgacaaccataaacaatatgtgtgcatatgggctcaatcctggtatttcaggttctcgtcttttgggcaccattcctcagtccatttcacagcaaactgtttggaatcaaatggcaacagtgagaacaccattgaattttgattctagcaagcagagcttttgtcagttttctattgaccttctcggtggaggaatcttag

SEQ ID NO: 80220 - DNA, 383 bp, Glycine max
ctcgagccgaatcggctcgagcttttccccacaagctggtgcagtttggagagattcaggaaaaagttgtgttgaaattttcacaagaggaatttcttacagcttggtcaactcaggtgcgtcccgcaacgactctgttggctgatgggtgcccatatttgtatgctatggtgcatgatagttcagtgtctacaataccaggtgattttgtcattggtgttaagttgacaaccataaacaatatgtgtgcatatgggctcaatcctggtatttcaggttctcgtcttttgggcaccattcctcagtccatttcacagcaaactgtttggaatcaaatggcaacagtgagaacaccattgaattttgattctagcaagcaaagc

SEQ ID NO: 80221 - DNA, 84 bp, Glycine max
aaccgctaaccaaaccaaagctctctcaatggcttcggagcaacacgacaccgtgtttcgcgaaaaaaacatggacgacgacga

SEQ ID NO: 80222 - DNA, 113 bp, Glycine max
ctagaaaataaagacttttatattcacaaaaggcttgggcgttttatacgcggttgggaaaattgatttaccccgaaaggagttccagaaggggtgagagaaaacactctttt

SEQ ID NO: 80223 - DNA, 361 bp, Glycine max
ccaggacctattgtgttttaaatccacaaaatccttgggtgttaaataggtggatgggaaaattgactttcccccagggcacttcccgaagtgttaagagaatgcctctttctatagggggaggagctggtgcaaagaatgctattctcatgaatatgccaaatcctgttctttcaatgtggagatattttgttggagatctcgtctttgaagtttctaagatgacttctccctacattaaatgtacagtctctttcttcatagcatttggaaatttggctgatgataccatcaattttgaggcttttccccacaagctggtgcagtttggagagattcaggaaaaagttgtattgaaatt

SEQ ID NO: 80224 - DNA, 355 bp, Glycine max
gtagcgtgtacataatggaccatattcatctgtcggctacaattacaccattgtgaggtccgtactgcccagatagcctaatgatgtatgaaaggaaagaggtttagcatgctagatgtcacaagacaagaatgtttgactatagtacacatgcctggtacctactcaccgaagctcattggacgaggatgctagtgcttaagcactggtcgatgcataattggcccacgaaacaaataggctgtcaattatcaggaatcgtactctatcctatgatgtaataatagagcactttgtgtgattaattatcgtgggaatgagtatgcaaagcgtatatctacacatctattgacca

SEQ ID NO: 80225 - DNA, 360 bp, Glycine max
aaaaagtttcctctacaaaagcacaatttgttagtggaaaaaccttcaaatatgatataattggtgctggttcacattcttcagaagattttcctgaaaaggaagatcaagaaaaacccaaaaagattgatgccagattgagacaaagaatagatcctcaatacaatgaggttcaggctcagatggaaacaaatttgtttaaattgtctcttgatgatgttgaaactcctaaaggttccatgttggatctgaaaatttctcaatctaaaattgcacttcccaagaacacagttggaggaaccattctgcgtagtgatctattggcaaattttttgacagagggcaattttagagcaagtg

SEQ ID NO: 80226 - DNA, 357 bp, Glycine max
cgtctattcccaattccaaattcaagaaatggggggaacttgacatatctgctatcaccttttccgtttcttgcgattcgacaatggccgatcaaaagctttcagaaccggcgcttaaacgtgagcagcttgatgaattcgacagtagactatatcttgaacaacgaattcttgaactccgacttattcaagacctcgagaacaatgatgaatgtaggaaaaacggcagcctgaaacgggtaaatgaccagagtgatgcatgcggatatagcacttcctaagaacacaattataggaaccattctgcgtagtgatctatgggcaaattttttgacagagggcaattttagagcaagt

SEQ ID NO: 80227 - DNA, 204 bp, Glycine max
  unsure (1)..(204): unsure at all n locations
gtttgatcgttcggtgacatcaataaagtgaaattaggcgtgatcctctaggtgagtgtgctctggctatctgaaaatggacacacctcttttaattgtcgtaatgatgtgtgaagtgtgtgttattttaaaaaaaaaagaacaaatncaaaaaatgcattacctgaggggggcgattcataaggggatgtggctgccccgaaa

SEQ ID NO: 80228 - DNA, 359 bp, Glycine max
ctcgcaatggttaaagttaatgtagcatgtgctgctgttggcttgacatcaagttacactccaactccattgttggaatctggtttgcaaaaagacagagggttaattgtggagtattttggaaggatgtcttacgttgctcataacgttaatcagccccaagagaaagatttgttagagggaaatttttcctttgatattaaatctcgctctagattggaaaaagtttcctctacaaaagcacaatttgttagtggaaaaaccttcaaatatgatataattggtgctggttcacattcttcaggagattttcctgaaaaggaagatcaagaaaaacccaaaaagattgataccagatt

SEQ ID NO: 80229 - DNA, 245 bp, Glycine max
aacaattttctcttcttccattttccttctgaagccaccactctaaccgtgggacgcttcgttcaattacaaaaatggacagatcaactggccgtggtggtggtggaagtttttccttttattatcttttttcttctttaattttttcctttttattttactctttttttttttatttttttccccttttttttttcttttttttttatatctattttctctcttcttttttcattttttatttt

SEQ ID NO: 80230 - DNA, 175 bp, Glycine max
acgcgtgcacgcgtacgtgtggaattgctcgagagataactgtttatatgtatcaacaattaagagcgtgttggtataggatcatggctgtttgcaaataaatgttctaggatatttgtgaggtgagatggtgtatgtgtggcatatatgaattgatataatttgtttaatggct

SEQ ID NO: 80231 - DNA, 356 bp, Glycine max
tgggtgtccatatttgtatgctatggtgcatgatggttcagtgtctacaataccaggtgattttgtcattggtgttaagttgacaaccataaacaatatgtgtgcatatgggctcaatcctggtatttcaggttctcgtcttttgggcaccattcctcagtccatttcacagcaaactgtttggaatcaaatggcaacagtgagaacaccattgaattttgattctagcaagcagagcttttgtcaattttctattgaccttctcggtggaggaattttagtggacaaaactggagattggatcacacttatacaaaattctccaattagtaacttgttgagagttgctgcttgga

SEQ ID NO: 80232 - DNA, 359 bp, Glycine max
gtggagatattttgttggagatctcgtctttgaagtttctaagatgacttgtgcctacattaaatgtacagtctctttcttcatagcatttggaaatttggctgatgacaccatcaattttgaggcttttccccacaagctggtgcagtttggagagattcaggaaaaagttgtgttgaaattctcacaagaggaatttcttacagcttggtcaactcaggtgcgtcccgcaacgactctgttggctgatgggtgcccatatttgtatgctatggtgcatgatagttcagtgtctacaataccaggtgattttgtcattggtgttaagttgacaaccataaacaatatgtgtgcatatg

SEQ ID NO: 80233 - DNA, 195 bp, Glycine max
caaggagcaggcaaagcttttccaaacaagattgtttttgatgataagcttgtgttggctaacacacaagaattctttgatggaaattttccagtggattcttggttaccaatttttgtgaattgtctttatcctgtaagtcaattaccttcagaagctgtcgttgtaaatgtcacatgtggtagtggacgtgtg

SEQ ID NO: 80234 - DNA, 243 bp, Glycine max
ccttaactaaatcaacacacctaaattaaggttcgagcatttagatctgttgcatatccactataaaccttttcttttaaagactaattatttttcatattccattttttatttttttcattttctcattattttttcttttttatctttattatttaatttaaatatattttaaaatattttacttttaatctttataatatttttatacaatataatattttctttatcttatttttctta

SEQ ID NO: 80235 - DNA, 385 bp, Glycine max
gagaatgtagaaagagaagagaataataatttgtcgggaaaattcaagttccaatcggaatcggaatcggaatctgaaatgagtagtagggtttggttttttttatttttttctttttttctttttttttctttttttctttttttttttttctcactttttcttttttttttttttttttccttttattttatttttatattttttttttttttcatttttttttttttttatatttcttttttttttttttatttttaaatttattagaggtggggtggggtttctttatatttcttttttttttcttttttttttattttttattttttttattttttttttattctctttcttttttttactttttttctatttttttttt

SEQ ID NO: 80236 - DNA, 358 bp, Glycine max
attcctcagtccatttcacagcaaactgtttggaatcaaatggcaacagtgagaacaccattgaattttgattctagcaagcagagcttttgtcaattttctattgaccttctcggtggaggaattttagtggacaaaactggagattggatcacacttatacaaaattctccaattagtaacttgttgagagttgctgcttggaagaaaggttgtttaatggtcaagattgtgatgtctgggaatgcagcagtcaaaaggagtgattgggcctcattggtacaagtgtttttaacaaacagcaacagtacagagcattttgatgcatgtaagtggacaaaatcagaaccacattcct

SEQ ID NO: 80237 - DNA, 357 bp, Glycine max
caatttgtaagaaagatgtttggagagttgaatgtggaatcccttctggatttccgctcacagttatttgcaatagcatttttaatgagatgctcattagatatagctatgaaaaattactgcgccaggctagagctccaagcatgtttttacaatccttcaaaaattttgtttctttgtgtgtgtatggtgatgataacttaattagtgttcatgaatatgtcaagccttactttagtggttctaaattgaaaagctttctagctggtcataatatcaccattactgatggtattgacaaaactagtgcaactttgcaatttagaaagttagcagattgtgattttctcaagagaa

SEQ ID NO: 80238 - DNA, 362 bp, Glycine max
ctctacaaaagcacaatttgttagtggaaaaaccttcaaatatgatataattggtgctggttcacattcttcaggagattttcctgaaaaggaagatcaagaaaaacccaaaaagattgataccagattgagacaaagaatagatcctcaatacaatgaggttcaggctcagatggaaacaaatttgtttaaattgtctcttgatgatgttgaaactcctaaaggttctatgttggatcttaaaatttctcaatctaaaattgcacttcccaagaacacagttggaggaaccattctgcgtagtgatctattggcaaattttttgacagagggcaattttagagcaagtgttgatttgcagc

SEQ ID NO: 80239 - DNA, 359 bp, Glycine max
ctctacaatatcacagtgttggtaatgtaaaaaccgtggggtttatataattggtgctggttcacattcttcaggagattttcctgaaaaggaagatcaagaaaaacccaaaaagattgataccagattgagacaaagaatagatcctcaatacaatgaggttcaggctcagatggaaacaaatttgtttaaattgtctcttgatgatgttgaaactcctaaaggttctatgttggatcttaaaatttctcaatctaaaattgcgcttcccaagaacacagttggaggaaccattctgcgtagtgatctattggcaaattttttgacagagggcaattttagagcaagtgttgatttgc

SEQ ID NO: 80240 - DNA, 277 bp, Glycine max
gcgccgtcctcaccaaccaggacacctgcgcggagggggttactgacgccgtcggcacagtgaaggaccatatgtccagcaacctcagggacttatccgagctcgtgagcaattgtctcgcgatattctccggcgccggtgccggcgacgacttcgccggcgtccccattcagaataggaggcggttaatggaaatgcgagaggataatttcccgacatggttgagtcgacgagataggaaattgctgatcttgcctgtgtgggggatcaggcatat

SEQ ID NO: 80241 - DNA, 357 bp, Glycine max
cgatattctgtgttgcgattatgctagttttgatggtttgattaccaagcaagttatgagcaagatggcagaaatgataaacagtctttgtggtggtgatggaaaattgatgcgtgaaaggacacacctgctgttggcttgttgttcaaggatggcaatttgtaagaaagatatttggagagttgaatgtggaatcccttctggatttccgctcacagttatttgcaatagcatttttaatgagatgctcattagatatagctatgaaaaattactgcgccaggctaaagctccaagtatgtttttacaatccttcaaaaattttgtttctttgtgtgtgtatggtgatgataactt

SEQ ID NO: 80242 - DNA, 312 bp, Glycine max
cggcttcgaggtttgttgttgtaactcgttcttcttcttttggtggttctgtgtttgtgtttgttttttctctcacctgaaaatgtcttgctgcggtggtaactgtggttgcggaagctcctgcaagtgcggcaacggctgcggaggctgcaagatgtacccagacttgagctacactgagtcaaccaccaccgagaccttggtcatgggagtggcacctgttaaggctcaatttgagggtgctgaaatgggtgtgcccgctgagaacgatggctgcaaatgtggaccaaactgcttctgcaacccctgcac

SEQ ID NO: 80243 - DNA, 359 bp, Glycine max
gagaacaccattgaattttgattctagcaagcagagcttttgtcaattttctattgaccttctcggtggaggaattttagtggacaaaactggagattggatcacacttatacaaaattctccaattagtaacttgttgagagttgctgcttggaagaaaggttgtttaatggtcaagattgtgatgtctgggaatgcagcagtcaaaaggagtgattgggcctcattggtacaagtgtttttaacaaacagcaacagtacagagcattttgatgcatgtaagtggacaaaatcagaaccacattcctgggaattaatcttcccaatagaggtatgtggtcctaataatggttttgaaa

SEQ ID NO: 80244 - DNA, 283 bp, Glycine max
gtacccattccaaataactcaacaactcttacagctacataggaagactattttgcattgatgatggccaaattggggattgaaatttgattgttttggggacaactgcatatacatcaaagagtgatgtctccctactttttggtgtctttttgctaattcatttgctataagtcatatcttgttttaaattatgaatggagaaaaaattatgatcttttatgacaattttatcttctcaatgctgattgtccttgttaatgtaagttgtcttattatgtct

SEQ ID NO: 80245 - DNA, 360 bp, Glycine max
gttttaaatccacaaaatccttttgtgttaaataggtggatgggaaaactgactttcccccagggtacttcccgaagtgttaagagaatgcctctttctatagggggaggagctggtgcaaagaatgctattctcatgaatatgccaaatgctgttctttcaatgtggagatattttgttggagatctcgtctttgaagtttctaagatgacttctccctaccttaaatgtacagtctctttcttcatagcatttggaaatttggctgatgacaccatcaattttgaggcttttccccacaagctggtgcagtttggagagattcaggaaaaagttgtattgaaattttcacaagaggaa

SEQ ID NO: 80246 - DNA, 249 bp, Glycine max
gaaagaccgcacctgctgcatgcttggagagcgagggttataatttgtccgaaagctgcttgtagagcagcaaatttgatctaccatgaatcaacatcatcagtgcccccttttttcctgcggcataatcaccaacataacttacccatttcgattaaagggccaccctaaaaacttccccgacaataggtatcagctagcttgtgaaaacaatgttactgatgtacacttgtactctggaaaatatta

SEQ ID NO: 80247 - DNA, 362 bp, Glycine max
tagagaagcagtgatagcgagaggggcagtgcggggacgtcgagaacgaggcgcaggcacgtagatactggcagcagcagttcggcgaggccagtagagtgctcgccataacccgccagcaggctgaaagcacgccattggttcttgccttaatcgacggcgacggcgctatattcacggagggcctgctgagggcgggcgctgagggcgggcgctgagggcggctcagacgcggcacacaagcttcagagtgagataaggaaccatatattggacgtttatggggggggaggcgggtgactggtccgtcatggtgcatatctatgccaacctagagggtttaagcaggaagctagcttccg

SEQ ID NO: 80248 - DNA, 363 bp, Glycine max
cacaagctggtgcagtttggagagattcaggaaaaagttgtgttgaaattttcacaagaggaatttcttacagcttggtcaactcaggtgcgtcccgcaacgactctgttggctgatgggtgcccatatttgtatgctatggtgcatgatagttcagtgtctacaataccaggtgattttgtcattggtgttaagttgacaaccataaacaatatgtgtggcatatgggctcaatcctggtatttcaggttctcgacttttgggcaccattcctcagtccatttcacagcaaactgtttggaatcaaatggcaacagtgagaacaccattgaattttgattctagcaagcagagcttttgtca

SEQ ID NO: 80249 - DNA, 361 bp, Glycine max
aaaaatttgtatgtatataaaaaaataaacacggagacattttttatatgatgaataatttatttgagctgtgcttccatcagggaaaccagcacgcctcgtttgggcagaaagtttctgacttgctcaaagggcatcaacataatgaccacagctccaattatgccacccaaaccaaagtgctttcccagtcagggtcagggttaggccccttcaccaccaaaactcaaacacaatgcggttgcccccaaacacatcgcggggccgcggagggctccaacacaaaaggccatggccatggccaagggagaattaagagggagcacaagagagggatgctgctgaacatcaaggatcgctt

SEQ ID NO: 80250 - DNA, 303 bp, Glycine max
ctcgagcctaatcggctcgagttcggcaatatggcggaaaatggttcaattgagctgaacaagtttgtgttgttttgtttggtgctgctaatacaagaggcctgttttgaactcatccttgtagagcgacacgctgatgtataatgaaggacttgcaagctcgcattcagatacctaagacttggccgatgcgcctccttctaccactccgctcttaaatcgcgcatggtgccagatcccacaggtattgacacatcgctagttgacttagactctaacgtttttgcgaaggtgccagttttc

SEQ ID NO: 80251 - DNA, 215 bp, Glycine max
gtctttatagctcatgagcagcattgcatttgtggggaatttttatcttgtgcgcactactctttaatattatttcttactaattttaggaagaaaaaaataggctttagactttatgtgctgatggttgagtatcttgacattcatttattctggtttatactaatttctgttgcattttattaaaagtgttgatttttttttttaggcttttt

SEQ ID NO: 80252 - DNA, 121 bp, Glycine max
tggggggggatggggaagaaaacctaaataggggtcatgaatatgtcaagccttactttagtgggtctaaattgaaaagctttctagctgggcataatatcaccattactgatgggattga

SEQ ID NO: 80253 - DNA, 225 bp, Glycine max
cggttcttgcggctcgagacaaaatcagaaccgcattcctgggaattgatcttcccaatagaggtatgtggtcctaataatggttttgaaatgtggagttctgagtgggcaaatcaaacttcatggcatttgagtttccttattgacaatcccaaacagtacacagatttcgatactatctcgggaatttgtcaagattgtgaaattgctggtaatactgttatg

SEQ ID NO: 80254 - DNA, 324 bp, Glycine max
ctccagcctaattccgatggatcctattctcgactgggtttatgtgatgtgcgtaatctcattgacagggttgaccttttgatcagttgtatggtttagatcgatttagaaatgtaaaacgcatgagtggatgaaagcatctacaccggtgaaattcctatgccacggggagagcatgacggagcttctacatgtcatgagatactacgatatttatgctttcaatggataataattttgacagactctaagcatctttatagcgttaaaaatgtaaacagtgtggactctcttaggaggacagcattgctttggatgatgtat

SEQ ID NO: 80255 - DNA, 363 bp, Glycine max
gaggaattttagtggacaaaactggagattggatcacacttatacaaaattctccaattagtaacttgttgagagttgctgcttggaagaaaggttgtttaatggtcaagattgtgatgtctgggaatgcagcagtcaaaaggagtgattgggcctcattggtacaagtgtttttaacaaacagcaacagtacagagcattttgatgcatgtaagtggacaaaatcagaaccacattcctgggaattaatcttcccaatagaggtatgtggtcctaataatggttttgaaatgtggagttctgagtgggcaaatcaaacttcatggcatttgagtttccttattgacaatcccaaacagtcta

SEQ ID NO: 80256 - DNA, 391 bp, Glycine max
gcccccgtccgtaagctcggatttcgcttcggggtttaatttttttttccttccttaatttcaattaactgtggtggaggtatataactataattctttttttttttaaacataaaaattgtttaaatcttttgccatgggaacccagattttgcggcctcaggactgtttcgtagaacgaatcatgtctcctcccgctgacttttcccggcggaggagttccggtaactactgtaattattattaccacagcaaccatgttgccacttccaggtcgtgccggaagccggttgcccgacccgataaaaagaaacgggttgttccggcttctggcatgccgctggtggcggagacctcggcggcggtgtttaggagaccgagcagtgatgat

SEQ ID NO: 80257 - DNA, 272 bp, Glycine max
ccctcgtaagctcggaattcggtgagctgacctcgccgggatttctagaaacttaacaagtttgttgggtgctcctggacagcagtatggccaacttatttgttggataattgaaagcagaactatttgcattgtaatggtacagaattgatttgccgccaagagctgcattgaaagaagttttctatgaggtcaaagcgtggctccatccaatgagagtcttcgagcaagagagaatgctctgatcaagttatgatactgtggcatgatgt

SEQ ID NO: 80258 - DNA, 214 bp, Glycine max
ccagctttttctgttccacaggctactgccagatcttctgaaaatgcggaatcctctgcatgatctggaattcgtgttttctttcgcttgttcgtttgtttaattcaataaaggaaattaggcatgaccctcttgttgagtatgctctgcctatctgaaaatttccacacctcttttaattgtcgtaatgatgtgtgaagtgtgtgttatttta

SEQ ID NO: 80259 - DNA, 364 bp, Glycine max
gtccgtcaaaagtttttaaattttgtgaggttcattatgaagaaaagggacaagcttagttgtcaagttggaatcaacccatactccatggaatggactggtttggccaatagattactgagtaagggcaacgatattctgtgttgcgattatgctagttttgatggtttgattaccaagcaagttatgagcaagatggcagaaatgataaacagtctttgtggtggtgatgaaaaattgatgcgtgaaaggacacacctgctgttggcttgttgttcaagaatggcaatttgtaagaaagatgtttggagagttgaatgtggaatcccttctggatttccgctcacagttatttgtaatagca

SEQ ID NO: 80260 - DNA, 365 bp, Glycine max
caatccttcaaaaattttgtttctttgtgtgtgtatggtgatgataacttaattagtgttcatgaatatgtcaagccttactttagtggttctaaattgaaaagctttctagctggtcataatatcaccattactgatggtattgacaaaactagtgcaactttgcaatttagaaagttagcagattgtgattttctcaagagaaactttaagcagatgtctaatgttttatgggtggctcctgaggacaaggcgagtttatggtcacaacttcattatgtttcgtgcaataatctggaaatgcaagaagcttatcttgtcaatctcgtaaatgtgttacgagaattgtatttgcacagtccaga

SEQ ID NO: 80261 - DNA, 360 bp, Glycine max
ctagggttttagcgcagcttcttctagatttaaggaagatgggtaaggaaaaggttcacatcagtattgtggtcattggccatgtcgactctgggaaatccactaccactggtcacctgatttacaagcttggaggcattgacaagcgtgttattgagaggtttgagaaggaagctgctgagatgaacaagaggtctttcaagtatgcctgggtgctggacaaacttaaggctgagcgtgaaagaggaatcaccattgatattgctttgtggaagtttgaaacaacaaagtattattgcacagttattgatgcgcctggacataaggatttcattaagaatatgattactgggacatccc

SEQ ID NO: 80262 - DNA, 289 bp, Glycine max
agctgatcggtggcccatatgccacatatggtatggtgcgctttgggcccatctatcatttaacaaatgttgaataaatggacagtgagacaccatgatttgatttagcagcaagtttgcaatttctatgacctttggggagaattttagggacaaactgaatgatcacactatcaaaatctcaatagtactgtggagtgtgttgaagaaggtgttaaggcaagatggagttggaagcacatcaaagagtgatggcctatggtcagtgtttacaacgacagtcagactt

SEQ ID NO: 80263 - DNA, 288 bp, Glycine max
cttagatccactctatgaatggaacagtcaagatcttggactaagatatggccgtatatcgtaggcgagtgtctcttgaatttcgttattaactgtaagatcgggggacgagcgacagacactgaaaccgacacaattgatttacaaggtgactgcaagcacactgattgtccgattatcatccctgcagcgtatcacaagagagatctatcccatatgcactacgctgataggcattcatagcgattgaaccacacccagacgggtggcaccacagatatcatctta

SEQ ID NO: 80264 - DNA, 204 bp, Glycine max
ctggattattatcttgtgaaatgttagatattatgttgtgaaattgaaaattgtttgtactgaactctcaaacaacccaaccatcatttgtatagtgggtaataatccagtatacaaatgatggttgggttgattgagagttcagttcacacccttttcaatttcacatcttactatccatcatttcacatgacaataacccag

SEQ ID NO: 80265 - DNA, 337 bp, Glycine max
agattaaacttgtgtcatactcattcacattccttaatatgctcttacttccaacaaactatactaacaagatgtgtgttgctggaaaagccaatgaaattacaaaggtatacattatactatatatcaaaaacccaagtagctagaaacttgtctgaatttatcaaaaaagttacaccaccctctgcgaataataatcctaataatattctaaaatttagtagatgacacagccactatataagattctcttcaaaacatctaacctattaattttaactatacagatccagtgagtgcagtgtcaaagctacgaaagtggtgtcacactgaaata

SEQ ID NO: 80266 - DNA, 259 bp, Glycine max
gtaagaattattatttcggttacattacaacatagggtgggtttttgggtttcgtaggcagctaaacacgctctctgttgacgcatcggttgagactgacatcaaccctcatttggaatcgtcctaacgcaagggtaggcatgactgaagaactctatctctcctgatcttatccatcgaatagaaaagcaactccattaccaccctcagatatatacccgttactatataaatatgcctgtttgtaacaacatgttca

SEQ ID NO: 80267 - DNA, 369 bp, Glycine max
ctcctaaaaaactacccattaacttatgttagtcacacaacacactaaaagttcagtttcttataacccattaactagttagctcatagccgaatttaaatattttcttctgcagaaaacaatgcagctttttgttttcaatttctatggaaccacctttcttgttatttacggtacggtttttattatggggattgtattggaattaggagccgcccctgctcctgcacctgcaccattgctgcctccatcggaagcaaatgctatactcaacagtggatggtggaatctatcacagttagattcacacaatatctgttcatggaatgatatagattgcaacgtcgctggaagtataactggcatcag

SEQ ID NO: 80268 - DNA, 365 bp, Glycine max
  unsure (1)..(365): unsure at all n locations
gatgctgatcggcactaacgtcgtaagttttacgctattaaacaagccgcattttcatgtttttcatgggaataatataaaaaccctaaaccttcgctttggtgctacactcatcagatctacactacaaacttccaagttcaagcattatgtgtcactagcgatgtccaattccgatcccaaaacgagaccccgtccgggaccgtggccgccggcgccggcgccggtcgtcaaggcaatgccgnctgcttcatgggccaagaaaacgggcttcaagcccaagttctccggcgaggccaatgccagcgactcgggccagataagcctgcagaccaagcccagggagcccgacacaaacgtggatc

SEQ ID NO: 80269 - DNA, 367 bp, Glycine max
attttgttggagatctcgtctttgaagtttctaagatgacttctccctacattaaatgtacagtctctttcttcatagcatttggaaatttggctgatgacaccatcaattttgaggcttttccccacaagctggtgcagtttggagagattcaggaaaaagttgtgttgaaattttcacaagaggaatttcttacagcttggtcaactcaggtgcgtcccgcaacgactctgttggctgatgggtgcccatatttgtatgctatggtgcatgatagttcagtgtctacaataccaggtgattttgtcattggtgttaagttgacaaccataaacaatatgtgtgcatatgggctcaatcctggtat

SEQ ID NO: 80270 - DNA, 393 bp, Glycine max
gtaagttaggaattaggttcgaggatgcattttttttatcttgtattactatcgatgagaggggatttactggccgtgagtatgtaaagactggccacctgacggctaggattgtcgggcatatgtttgtcatagatcttgaggagctttaaacatgtaggccttatttgttcgataggaaattaggaaggagacagtgataaaatgccatgggcctcaatgttagaacaaacctgttgaagagcatgaagtccctagattagttttggtataataaattcgtagtgcgggccgtgcaaagatcatatagacagtcttattactggttgaggcaaaatgccaaagtgtctgatatagatttatctttttcatgcacatcggggtgggaagaag

SEQ ID NO: 80271 - DNA, 364 bp, Glycine max
ctggtgcagtttggagaaattcaggaaaaggttgtattgaaattttcacaagaggaatttcttacagcttggtcaactcaggtgcgtcctgcaacaactctgttggctgatgggtgtccatatttgtatgctatggtgcatgatagttcagtgtctacaataccaggtgattttgtcattggtgttaagttgacaaccataaacaatatgtgtgcatatgggctcaatcctggtatttcaggttctcgtcttctgggcaccattcctcagtccatttcacagcaaactgtttggaatcaaatggcaacagtgagaacaccattgaattttgattctagcaagcagagcttttgtcaattttcta

SEQ ID NO: 80272 - DNA, 346 bp, Glycine max
gggaacacctaggaaaccactgactaacgttgaggtaggaaccatccatgtgaggcttgttatgcctaacacaaaagattatggtcgaattgatccatactcatctgatttgaaagcctactttcaagcttatacccaataaacgtaacgctcaatatgtgaatttgggaaggtgttattggcttaaggtaccatacataatcctgtgtgtatcttaatcttgtaatataatgtgtcaaatatagaaaacgaaatactgtccatgtttggtaccctaatacgatcagatcatgattatataaatcttaaaagatgtacgtacgcttgacaaaatactgatggttca

SEQ ID NO: 80273 - DNA, 361 bp, Glycine max
agcttttccaaacaaaattgtttttgatgataagcttgtgttggctaacacacaagaattctttgatggaaattttccagtggattcttggttaccaatttttgtgaattgtctttatcctgtaagtcaattaccttcagaagctgtcgttgtaaatgttacatgtggtagtggacggtgtggtttacccaccactgcttggattagttctgcagttaacaatcgctcctcagatatcaacaaaaggattcgcacagcacttgggaaaggtaagaaaattgtttttcttactagagttgatccttttccagtagctttactggctgttctttttggcgttaagaatgaaattctgagttct

SEQ ID NO: 80274 - DNA, 266 bp, Glycine max
gtatagtgtattactatcgatgagagtgaaataacatgtcgttttagtttttggaattataaaagaaaaattgactctaaattagttaatgttggtaatttagcttgacattcgacaacattatttcccttatttgtttgataggaaattaggaaggagaaagtgataaaatgccatgggcctcaatgttagaacaaaactcttgaagagcatgaagtccctagtttagttttggtttgataattttgtaatggctaacatgtttt

SEQ ID NO: 80275 - DNA, 267 bp, Glycine max
cgggtcaaggatgtcggtgagccgaacacgactactgcctatatgtgtgcatgcgggctcatgtctgagacatcacagattatgcattttggcggcgggctacatacaccactcaatattacattgtgaaatcgaagggcatcggtgagaaccctactacataagctagccatgtagcactggttctgtcagctatatacggaccctgtctcagcatgtatccatgatatcaccgcgggtagagggagcccagtaatacaactgggc

SEQ ID NO: 80276 - DNA, 353 bp, Glycine max
agaaagttagcagattgtgattttctcaagagaaactttaagcagatgtctaatgttttgtgggtggctcctgaagacaaggcgagtttatggtcacaacttcattatgtttcgtgtaataatctggaaatgcaagaagcttatcttgtcaatctcgtaaatgtgttacgagaactgtatttgcacagtccagaggaagctcgccaattgagaaggaaagctctctctcgtattgaatggctgcaaaaagctgatgtgcctaccatagcacagattgaagagttccattcgatgcaaaagatgatgaatgctcctgattcaaatgataatattgatctactgttgagcattga

SEQ ID NO: 80277 - DNA, 371 bp, Glycine max
gtcaagccttactttagtggttctaaattgaaaagctttctagctggtcataatatcaccattactgatggtattgacaaaactagtgcaactttgcaatttagaaagttagcagattgtgattttctcaagagaaactttaagcagatgtctaatgttttgtgggtggctcctgaggacaaggcgagtttatggtcacaacttcattatgtttcgtgtaataatctggaaatgcaagaagcttatcttgtcaatctcgtaaatgtgttacgagaattgtatttgcacagtccagaggaagctcgccaattgagaaggaaagctctctctcgtattgaatggctgcaaaaagctgatgtgcctaccatagc

SEQ ID NO: 80278 - DNA, 371 bp, Glycine max
atctaagcaagaggcacgctaccaccgtcaaacccttctcctttttaccattctaatggcttggttttttcacatcacactttctttgtgttgtgtgtcgcgcgcgcgcgcgtgtgtgtgtgaatttgtgaagtgagttggagatagagacaacggtttaaggtaaggttaggtcttttttttttttttttgtctttgctttttgggtgaaagttttcttgggcaccctatttgcaaattttcaattttcaattgcagactgagaaattttcaatttttgttgggttttctgagtttcggataaagaatttctggtgtgtttgagagattttgatgattaatttctgggtttgatagtagtggggagtata

SEQ ID NO: 80279 - DNA, 372 bp, Glycine max
gcatttttaatgagatgctcattagatatagctatgaaaaattactgcgccaggctaaagctccaagtatgtttttacaatccttcaaaaattttgtttctttgtgtgtgtatggtgatgataacttaattagtgttcatgaatatgtcaagccttactttagtggttctaaattgaaaagctttctagctggtcataatatcaccattactgatggtattgacaaaactagtgcaactttgcaatttagaaagttagcagattgtgattttctcaagagaaactttaagcagatgtctaatgttttatgggtggctcctgaggacaaggcgagtttatggtcacaacttcattatgtttcgtgcaataatc

SEQ ID NO: 80280 - DNA, 376 bp, Glycine max
agcaagatggcagaaatgataaacagtctttgtggtggtgatggaaaattgatgcgtgaaaggacacacctgctgttggcttgttgttcaaggatggcaatttgtaagaaagatatttggagagttgaatgtggaatcccttctggatttccgctcacagttatttgcaatagcatttttaatgagatgctcattagatatagctatgaaaaattactgcgccaggctaaagctccaagtatgtttttacaatccttcaaaaattttgtttctttgtgtgtgtatggtgatgataacttaattagtgttcatgaatatgtcaagccttactttagtggttctaaattgaaaagctttctagctggtcataatatca

SEQ ID NO: 80281 - DNA, 373 bp, Glycine max
aaaattttgtttctttgtgtgtgtatggtgatgataacttaattagtgttcatgaatatgtcaagccttactttagtggttctaaattgaaaagctttctagctggtcataatatcaccattactgatggtattgacaaaactagtgcaactttgcaatttagaaagttagcagattgtgattttctcaagagaaactttaagcagatgtctaatgttttgtgggtggctcctgaagacaaggcgagtttatggtcacaacttcattatgtttcgtgtaataatctggaaatgcaagaagcttatcttgtcaatctcgtaaatgtgttacgagaactgtatttgcacagtccagaggaagctcgccaattgag

SEQ ID NO: 80282 - DNA, 379 bp, Glycine max
gaagtttctaagatgacttctccctacattaaatgtacagtctctttcttcatagcatttggaaatttggctgatgacaccatcaattttgaggcttttccccacaagctggtgcagtttggagagattcaggaaaaagttgtgttgaaattttcacaagaggaatttcttacagcttggtcaactcaggtgcgtcccgcaacgactctgttggctgatgggtgcccatatttgtatgctatggtgcatgatagttcagtgtctacaataccaggtgattttgtcattggtgttaagttgacaaccataaacaatatgtgtgcatatgggctcaatcctggtatttcaggttctcgtcttttgggcaccattcctcagt

SEQ ID NO: 80283 - DNA, 375 bp, Glycine max
ctaaattgaaaagctttctagctggtcataatatcaccattactgatggtattgacaaaactagtgcaactttgcaatttagaaagttagcagattgtgattttctcaagagaaactttaagcagatgtctaatgttttgtgggtggctcctgaggacaaggcgagtttatggtcacaacttcattatgtttcgtgtaataatctggaaatgcaagaagcttatcttgtcaatctcgtaaatgtgttacgagaattgtatttgcacagtccagaggaagctcgccaattgagaaggaaagctctctctcgtattgaatggctgcaaaaagctgatgtgcctaccatagcacagattgaagagttccattcgatgc

SEQ ID NO: 80284 - DNA, 374 bp, Glycine max
caaatatgatataattggtgctggttcacattcttcaggagattttcctgaaaaggaagatcaagaaaaacccaaaaagattgataccagattgagacaaagaatagatcctcaatacaatgaggttcaggctcagatggaaacaaatttgtttaaattgtctcttgatgatgttgaaactcctaaaggttctatgttggatcttaaaatttctcaatctaaaattgcacttcccaagaacacagttggaggaaccattctgcgtagtgatctattggcaaattttttgacagagggcaattttagagcaagtgttgatttgcagcgcactcatcgtattaaaggaatgattaaaatggtggccacagttggta

SEQ ID NO: 80285 - DNA, 376 bp, Glycine max
gatccttttcttggtggaattcaaaaatatgccactcccatgatgcccctagatgaagaaattctttctaaggttgcacaagatatggttgaggaatggtttgattgtgttgatgaggaggattcctttgaggaagtttctttaagtgcagcacttaatggtgttgagggtttggactatatggaaagaattcctcttgccacatctgagggttttcctcatgtgctttcacgcaaaaatggcgaaaaaggcaaaaggagatttgtctctggggatggtgaagagatgacattgattccaggaaccagtgttgaagaggcttacaacaagctaatagttgaacttgagaaaagtgttcctacattggttggcattg

SEQ ID NO: 80286 - DNA, 373 bp, Glycine max
taaatccacaaaatccttttgtgttaaataggtggatgggaaaactgactttccctcagggcacttcccgaagtgttaagagaatgcctctttctatagggggaggagctggtgcaaagaatgctattctcatgaatatgccaaatgctgttctttcaatgtggagatattttgttggagatctcgtctttgaagtttctaagatgacttctccctacattaaatgtacagtctctttcttcatagcatttggaaatttggctgatgacaccatcaattttgaggcttttccccacaagctggtgcagtttggagagattcaggaaaaagttgtgttgaaattttcacaagaggaatttcttacagcttggtc

SEQ ID NO: 80287 - DNA, 376 bp, Glycine max
ggtggcggttgcttctccaagggacacgaaattcatggactttcaaaaatggcgtgttagagaccacacggaatcaccttgcaggatagaagagggatccatcctggttaccgaatgcgaagcaagccagcactgctgcgaagcggctgaatcgaacaaaatcaggagttccggatatcttggcgacatgattacgctttttctcccgcgtgtgctgctggttctagcgcgtcaaagctctctccttccctttctttttcctctgtgcttttgtgtataacgcatgctgggaggggagatgatgacattcgcatgagcctcctttgctttggctgggggcgaggacccgtttgtagcatcgaggatacctacaaca

SEQ ID NO: 80288 - DNA, 320 bp, Glycine max
  unsure (1)..(320): unsure at all n locations
ggctcaccaaggatgcgaggaagagcctccttcctcttcatattcatttaaaggttttacttgatcaactggaagaggatgttggtatcccgcggatgacgtatccaattctttctttgacaaggtaattgtgatcattgaaacatggcgagtagtctccaaaggaagaaggctcaccaaggatgcgaggaagaggacgtggtcgtggaaggggcaggggtagaggattttacaatgggggtatggaatatggtgatgattgggatggtgggcgtggctatggtggaagagggcgtggncgtgcatggtggcgtgctttt

SEQ ID NO: 80289 - DNA, 374 bp, Glycine max
gtccagtgggtcccaatcttgaataaaatttcctatcttaagtatgtttattgaggtcagaaataagcaatttggtttgtaagggtacaacttactaaggaagagcatttgtcaatagcttgcaagttcatacaatttaattgacagggtaggaccagatgaaacttgcctgtttttctctatttttaggtttagctgattactttctttttgtctctgtgtgtgtgatgaactcttgatgttttacaattctgaaaatatcttgaaagttcaaaatgggaataactcattcagcaccttcgaagacacctggtcttgaagataagactgatccgttacctgaaattctgaagctaagttgttagtactgagaa

SEQ ID NO: 80290 - DNA, 377 bp, Glycine max
attttagtggacaaaactggagattggatcacacttatacaaaattctccaattagtaacttgttgagagttgctgcttggaagaaaggctgtttaatggttaaaattgtgatgtctgggaatgcagcagtcaaaaggagtgattgggcctcattggtacaagtgtttttaacaaacagcaacagtacagagcatttcgatgcatgtaagtggacaaaatcggaaccacattcctgggaattgatcttcccaatagaggtatgtggtcctaataatggttttgaaatgtggagttctgagtgggcaaatcaaacttcatggcacttgagtttccttattgacaatcccaaacagtctacagtttttgatattctctt

SEQ ID NO: 80291 - DNA, 370 bp, Glycine max
ctctgtttctgtctctgtgtttgcggctgaggattccgaacgagcgaccttcttcgtttctcgcaaagtttaagtcatcatgggtaaggaaaagactcacatcaacattgtcgtcattggacatgtcgactctgggaagtcaactaccactggtcatttgatctacaagcttggaggtattgacaagcgtgtgattgagaggttcgagaaggaggctgctgagatgaacaagaggtcattcaagtatgcctgggtgcttgacaagctcaaggctgagcgcgaaagaggaattaccattgatattgctttgtggaagtttgaaaccaccaagtactactgcacagtcatcgatgcccccggacatcgtgac

SEQ ID NO: 80292 - DNA, 337 bp, Glycine max
tgacaatcccaaactgtagactgtttgggattgtcaataaggaaactcaaacagtctacagtttttgatattctcttgggaatctctcaagattttgaaattgctggtaatactcttatgccagctttttctgttccacaggctactgccagatcttctgaaaatgcggaatcctctgcatgatctggaattcgtgttttctttcgcttgttcgtttgtttaattcaataaaggaaattaggcatgaccctcttgttgagtatgctctgcctatctgaaaatttccacacctcttttaattgtcgtaatgatgtgtgaagtgtgtgttattttaaaa

SEQ ID NO: 80293 - DNA, 376 bp, Glycine max
caggtgattttgtcattggtgttaagttgacaaccataaacaatatgtgtgcatatgggctcaatcctggtatttcaggttctcgtcttttgggcaccattcctcagtccatttcacagcaaactgtttggaatcaaatggcaacagtgagaacaccattgaattttgattctagcaagcagagcttttgtcaattttctattgaccttctcggtggaggaattttagtggacaaaactggagattggatcacacttatacaaaattctccaattagtaacttgttgagagttgctgcttggaagaaaggttgtttaatggtcaagattgtgatgtctgggaatgcagcagtcaaaaggagtgattgggcctcatt

SEQ ID NO: 80294 - DNA, 373 bp, Glycine max
gcaccatgctgttcctgttgacacacacgtgtggcggattgccaccaagtatctcttacctgagcttgcaggttcccagttgacacccaagctctgcgatcgtgttgcagaggcgtttgtaaccaaatatggtaaatatgctggctgggcgcagactctattgttcatagctgaattaccctcacaaaaagccctcctaccttcacatttgttgactgttaaacaacgcaatgctgcaaagatagaaggcagcgaagaagaagttgattgagatctacagttggtgtggttctcatgatataaatggacaagatgtaggtgtgacatgctgttgccaagaattcattaagtagaacatggtgatatcacgctg

SEQ ID NO: 80295 - DNA, 367 bp, Glycine max
tagccttcttgagctggttcccaatttcaatatcatccctaatcatgctttggctattagctgcagggtagcagactctatattccgcccaagttctctcttccaacacatgttcatcttattggaaattcttagaaagtgtcaatagaaaagaaagtagagtagatgcttacactcatttaaattgattccttcatttctaccggaaatgggacagtactggcagattgtaaaaactaaaaatgcatacatgatttttccatgcaaagaaattaggctaccaaagtgttatgctgatttcctgatcctgtgattgaaggttaaacttttatgtttaccgggaattgggttgctaacatatgttttt

SEQ ID NO: 80296 - DNA, 376 bp, Glycine max
ggcaagtttatggtcacaacttcattatgtttcgtgtaataatctggaaatgcaagaagcttatcttgtcaatctcgtaaatgtgttacgagaattgtatctgcacagtccagaggaagctcgccaactgagaaggaaagctctctctcgtattgaatggctgcaaaaagctgatgtgcctaccatagcacagattgaagagttccattcgatgcagaggatgatgaatgctcctgattcaaatgataatattgatctactgttgagcattgatttgttgggtttacaaggagcaggcaaagcttttccaaacaagatcatttttgatgataagcttgtgttggctaacacacaagaattctttgatggaaatttt

SEQ ID NO: 80297 - DNA, 340 bp, Glycine max
ctcgagccgctcgagccgggaagagtgcattctgtccatttagttgaagaaaatgacagtagctttttaattccaaggtaatgcatttctttgatatcttggatattaaggaatgatgattatatttgccagtctgagagatgatgtctataagccagtgtcactctgtaacatggtctgatgtttaacgtgtatacaaatggctattgcttcaaggaacctattcttttttttatgcaaaattaatagtttaactgtaatttattgattggcgagaattaactgatgttggagtttcttacatataaatctaactggaattaatgattatggacgaatg

SEQ ID NO: 80298 - DNA, 317 bp, Glycine max
cccagaagcacatgccgagcaaaccgggacaggcaaagccgactttgcctctgcgcaacttcctatacatgtaagatgaggactcattcaatagcttgagatccttctgaacagagaaggggatgcccaaacttgcataatgcaatccggtgaataaggagatactatgttatataccgcagtggtggcatctgtaatagcactcgctgctcaaatatagggccaggacagatgttgacctgatttcgaaacctggcttcagacagcataaactctgggggtcgctatcacaggctgcatcgctttagacagataga

SEQ ID NO: 80299 - DNA, 374 bp, Glycine max
caacaactctgttggctgatgggtgtccatatttgtatgcaatggtgcatgatagttcagtgtctacaataccaggtgattttgtcattggtgtcaagttgacaaccataaacaatatgtgtgcatatgggctcaatcctggtatttcaggttctcgtcttttgggcaccattcctcagtccatttcacagcaaactgtttggaatcaaatggcaacagtgagaacaccattgaattttgattctagcaagcagagcttttgtcagttttctattgaccttctcggtggaggaatcttagtggacaaaactggagattggatcacacttatacaaaattctccaattagtaacttgttgagagttgctgcttgg

SEQ ID NO: 80300 - DNA, 227 bp, Glycine max
aatataaaaaaaaaaaaaaaaaaaaaaaaaaaaaaaaaaaaaaaaaaaaaaaaaaaaaaaaaaaaaaaaaaaaaaaaaaaaaaaaaaaaaaaaaaaaaaaaaaaaaaaaaaaaaaaaaaaaaaaaaaaaaaaaaaaaaaaaaaaaaaaaaaaaaaaaaaaaaaaaaaagaaaaaaacaaagaaataaaaaaatttaagagataaaatggggggggggggggaatttt

SEQ ID NO: 80301 - DNA, 378 bp, Glycine max
attgaattatgattctagcaagcagagcttttgtcaattttctattgaccttctcggtggaggaattttagtggacaaaactggagattggatcacacttatacaaaattctccaattagtaacttgttgagagttgctgcttggaagaaaggttgtttaatggtcaagattgtgatgtctgggaatgcagcagtcaaaaggagtgattgggcctcattggtacaagtgtttttaacaaacagcaacagtacagagcattttgatgcatgtaagtggacaaaatcagaaccacattcctgggaattaatcttcccaatagaggtatgtggtcctaataatggttttgaaatgtggagttctgagtgggcaaatcaaac

SEQ ID NO: 80302 - DNA, 359 bp, Glycine max
ctttaagcagatgtctaatgttttgtgggtggctcctgaggacaaggcgagtttatggtcacaacttcattatgtttcgtgtaataatctggaaatgcaagaagcttatcttgtcaatctcgtaaatgtgttacgagaattgtatttgcacagtccagaggaagctcgccaattgagaaggaaagctctctctcgtattgaatggctgcaaaaagctgatgtgcctaccatagcacagattgaagagttccattcgatgcagaggatgatgaatgctcctgattcaaatgataatattgatctactgttgagcattgatttgttgggtttacaaggagcaggtaaagcttttccaaaca

SEQ ID NO: 80303 - DNA, 226 bp, Glycine max
ctcaatataatgacttgaaaagttatcttcttggggatgaggctgagaaagaaaatctgagaaagcaagttttccagctaaagggtgaactaaagaaaaaagacgacgcattaatcaacattgagaagaagttcaaggatagcaatggacgcacacagctttctgagggaactaaaacaaattcaaagaacaaaaagggtgcatcaattcctcagagctcaaaaga

SEQ ID NO: 80304 - DNA, 269 bp, Glycine max
gcatcttttgacgcccaccgccttattgagaaactacttgttcgtacagcacgctgaatcaaaattccccgatcaaaacaaatccgatgacttcactgcggataccggacttctccttagaccggtaagctaggcagctgtactgcccgccgtctcaactggacaataaatgagggatgaggtatacaaggggatctcgcgaggggaagaggaggatgcgtctgccgaacatctcatgcctttttcgcataccctaatgactcccgatc

SEQ ID NO: 80305 - DNA, 350 bp, Glycine max
  unsure (1)..(350): unsure at all n locations
gtttttactaataattgcaatataaaaaagaagaatctacttcaacttattgtaattggtgaaagtaagaaataagaacagctaatatattctctaacaaaaaaaaaaaaaaaaaaaaaaaaaaaaaaaaaaaaaaaaaaaaaaaaaaaaaaaaaaaaaaaaaaaaaaaaaaaaaaaaaaaaaaaaaaaaaaaaaaaaagggggggaaaaaaataagaggaaaaaaaaaccccggaattaaatanggacccggacccggaaggagggcgggttttcctaaaagggaaattttttaaccttggggttttactggccaaaagtttttcccgggtgaaaattttttccccttc

SEQ ID NO: 80306 - DNA, 355 bp, Glycine max
cgcgatcgcttatccaccgtctaatcttagggtactatatgggtggcctgatgtctcgtaccagcagtgctccgatgtcagtgctcttatttactcagaacatcgctcggcatccgattacgtgggatccgacgcaacaacggccgactcaagaggttatccatgctgttcattcagcgcttcatttcgctctcgatacctgcgtcgaccaccccgatgaacctttgagttttgatgtacaggattctgtgctggttattccgaatagaaaagaccttaagcaacgggagtcaccgaaatccgggtgggaggtgaacgccaagttattcatatatacagcaaggaaggagtcgag

SEQ ID NO: 80307 - DNA, 358 bp, Glycine max
  unsure (1)..(358): unsure at all n locations
ccagggtgcagctatacagaaaatctggttaaaaaataaacagctaattgtggtcagcattacttggtgtaactcttcaagatcatccaaatgaattgatgtgagcttctgtaataacttcatgtcccagaataaactggtataatctaccggaagaaacgtatcctgccaagcctcaaatacagatttttcacacaacattacaggtgtaaatgaacaacaagcagctgaattttcagcaaaagctgaaaggtctttggatcctgtattcaactgcaacttgtgcttttcatgttcaaaccttcttgatagtatctgtcgaacaaatttaagattaacaatcanatgacgaatgtgc

SEQ ID NO: 80308 - DNA, 341 bp, Glycine max
cccttccttaggttgggaattcggttcgggaaaccttcaaatatgatataattggggctggttcacattcttcaaaaaattttctggaaaggaagatcaagaaaaacccaaaaagattgatgccagattgagacaaagaatagatcctcaatacaatgaggttcaagctcagatggaaacaaatttgtttaaattgtctcttgatgatgttgaaactcctaaaggttccatgttggatcttaaaatttctcaatctaaaattgcacttcccaagaacacagttggaggaaccattctgcgtagtgatttattggcaaattttttgacagagggcaatttta

SEQ ID NO: 80309 - DNA, 147 bp, Glycine max
agagctttgacggcgatttgcacccttccttaagctcggaattcggttcgagctcaaaattttatttaattgttgctggctcaaattctaggggacatgttcctgaagaggacgatcccaacaaacgcgccacgtttgaaaccagtt

SEQ ID NO: 80310 - DNA, 358 bp, Glycine max
ggagattggatcacacttatacaaaattctccaattagtaacttgttgagagttgctgcttggaagaaaggctgtttaatggtcaagattgtgatgtctgggaatgcagcagtcaaaaggagtgattgggcctcattggtacaagtgtttttaacaaacagcaacagtacagagcattttgatgcatgtaagtggacaaaatcagaaccacattcctgggaattgatcttcccaatagaggtatgtggtcctaataatggttttgaaatgtggagttctgagtgggcaaatcaaacttcatggcatttgagtttccttattgacaatcccaaacagtctacagtttttgatattctct

SEQ ID NO: 80311 - DNA, 254 bp, Glycine max
gcttggaattacggctagcatcactaacgtattgtgttatattgtacacttgacatctgtaataaacgggcaatcgtcgtccaagtactaatgaaggacttcaacagacagaccactcagcaccagaaggcatgtcttgcaggaagtacactacaatgaacggtgagatgcgaccacgtcggatcaagctaagactcaagatcatcagcaccagcttagaaggcaggggatgcatcatgcaattgaactacaca

SEQ ID NO: 80312 - DNA, 356 bp, Glycine max
gaaagttagcagattgtgattttctcaagagaaactttaagcagatgtctaatgttttatgggtggctcctgaggacaaggcgagtttatggtcacaacttcattatgtttcgtgcaataatctggaaatgcaagaagcttatcttgtcaatctcgtaaatgtgttacgagaattgtatttgcacagtccagaggaagctcgccaattgagaaggaaagctctctctcgtattgaatggctgcaaaaagctgatgtgcctaccatagcacagattgaagagttccattcgatgcagaggatgatgaatgctcctgattcaaatgataatattgatctactgttgagcattgatttg

SEQ ID NO: 80313 - DNA, 351 bp, Glycine max
  unsure (1)..(351): unsure at all n locations
ctcgagccgtttaaattcctagccttggagcttatgcgcaccgcgataaaaaaaatgttgcgacttgatgattgcacatcaaacatgcattatcccaatgtttttacctaatttagcagccatagtggctattgaagacttgaagcatttttacccgacacaaaaactgttaactaatagccgttgttgctcggatctcttgtccatgcttggtgcaaacatatgagatgactatagattttccaactgtttaggattcatagcgacttanaaattttcttatgattgaacgtttcgcaattaatgatgttgatgctacattactggaacgaatgccccatttttccttgg

SEQ ID NO: 80314 - DNA, 368 bp, Glycine max
tcggggaattccaattccacattttcaagaaataaggaggcaaaaatgttcatatatgaattggaattatttgttttcttattaggcctatcctgaagccaaaggaaatgagatcggaattcctcggggaattccaattccacattttcaagaaataaggaggcaaaaatgttcatatatgaattggaattatttgttttcttattaggcctatcctgaagccaaaggaaatgagatcggaattcctcggggaattccaattccacattttcaagaaataaggaggcaaaaatgttcatatatgaattggaattatttgttttcttattaggcctatcctgaagccaaaggaaatgagatcggaattc

SEQ ID NO: 80315 - DNA, 250 bp, Glycine max
atttaataattaaaaaaataatagcattgatgcggcgactcgaacacattggggaaaagataatttattccattctctggcatgccattatttatttgatatcaacgatgtcgctcgaggaggtgcatcagttgctcttatatatattaattatcaatatcaaggtgttatttggacatagcatatggtctcagctggtgcggcggccgacctgtgagctaatgtacccggtaattcattgcgtatattt

SEQ ID NO: 80316 - DNA, 357 bp, Glycine max
gctggtaatactcttatgccagctttttctgttccacaggctactgccagatcttctgaaaatgcggaatcctctgcatgatctggaattcgtgttttctttcgcttgttcgtttgtttaattcaataaaggaaattaggcatgaccctcttgttgagtatgctctgcctatctgaaaatttccacacctcttttaattgtcgtaatgatgtgtgaagtgtgtgttattttaaaaaaaaaaaaaaaaaaaaaaaataggaaggggggggtttaaaaaaaaaaaataaaaaaaaaaaataaataaaaaaattaaaaataaaaaaaaaaaaaaaaaaaaaaaaataagggggcggcccc

SEQ ID NO: 80317 - DNA, 359 bp, Glycine max
gttgaggattacttattcttgaaagggctagaagatttggtttggaaattaaaagggtctaatttttggattttttgacctatccaagccctacaaatagcaaagatttatttaactgcaaccaagggtactatcaaatcaaacccaggattggttgcactgttgtatgtttttagcattgatgttctctgtatttgccattgctagagatctcaaggtttttgtttgcattacagccgatgagaaagaaaactaagaaagttttgcagggatactggtgtgtagctgggatcaaggaactatgacctgtataagagctccagggtcgctttgtatgatttttaaaatctgaggattga

SEQ ID NO: 80318 - DNA, 190 bp, Glycine max
aactcagaactggtacggacaaggggaatcctctgcatgatctggaattcgtgttttctttcgcttgttcgtttgtttaattcaataaaggaaattaggcatgaccctcttgttgagtatgctctgcctatctgaaaatttccacacctcttttaattgtcgtaatgatgtgtgaagtgtgtgttatttt

SEQ ID NO: 80319 - DNA, 358 bp, Glycine max
ctttaagcagatgtctaatgttttatgggtggctcctgaggacaaggcgagtttatggtcacaacttcattatgtttcgtgcaataatctggaaatgcaagaagcttatcttgtcaatctcgtaaatgtgttacgagaattgtatttgcacagtccagaggaagctcgccaattgagaaggaaagctctctctcgtattgaatggctgcaaaaagctgatgtgcctaccatagcacagattgaagagttccattcgatgcagaggatgatgaatgctcctgattcaaatgataatattgatctactgttgagcattgatttgttgggtttacaaggagcaggtaaagcttttccaaac

SEQ ID NO: 80320 - DNA, 297 bp, Glycine max
cggctcgagtgcttctcaaatccaacccagttcacaagaaggttccagtgtttattcacaatgagaagcccatagcagagtctcttgtgattgttgaatacattgatgagacatggaagaacaaccccatcttgccttctgatccttaccaaagagccttggctcgtttctggtccaaattcattgatgataaggtttttggtgctgcatggaaatccgttttcacagctgatgagaaagagcgtgagaagaatgttgaggaagcaattgaggctctgcagtttcttgagaatgaga

SEQ ID NO: 80321 - DNA, 363 bp, Glycine max
tcctgcttgcacaaaagcaatgactatgtcatttaatccaaacccgtgttctgatgcatggagtttggaatttctgaagcgtaccggatttcattgtgatatcatttgtgtcactggatggactgccaccccaatgcaggatgttcaggttacaattgattggtttatttcctctcaggaatgtgttcccaggacctattgtgttttaaatccacaaaatccttttgtgttaaataggtggatgggaaaactgactttccctcagggcacttcccgaagtgttaagagaatgcctctttctatagggggaggagctggtgcaaagaatgctattctcatgaatatgccaaatgctgttctttt

SEQ ID NO: 80322 - DNA, 365 bp, Glycine max
tagtcctaatagttatgcaaacgaccctatactaaaaaataaagagaaggtggtgtctgttctgaatgatatcacaatgcttgagaaccaaattccattcattgttctcaagaagttgtataggaaggtctttcccgattccagtgacatcaacaactaccaccgggttgctgatatcgttcgcaaggccttcggttacgacgaggtgaaaaaccctgtccacatacttcacttgatgcacttgtccactgtgcaacagagccagcaagagggtcaacgcgtgaagcaagagctattgcgctgtgccaagaggcttcaagctgcacgagttacaattgaagctgtaaacaccacttctggtcatg

SEQ ID NO: 80323 - DNA, 361 bp, Glycine max
caagcaagttatgagcaagatggcagaaatgataaacagtctttgtggtggtgatgaaaaattgatgcgtgaaaggacgcacctgctgttggcttgttgttcaaggatggcaatttgtaagaaagatgtttggagagttgaatgtggaatcccttctggatttccgctcacagttatttgcaatagcatttttaatgagatgctcattagatatagctatgaaaaattactgcgccaggctaaagctccaagtatgtttttacaatccttcaaaaattttgtttctttgtgtgtgtatggtgatgataacttaattagtgttcatgaatatgtcaagccttactttagtggttctaaattg

SEQ ID NO: 80324 - DNA, 351 bp, Glycine max
tcgccaattgagaaggaaagctctctctcgtattgaatggctgcaaaaagctgatgtgcctaccatagcacaaattgaagagttccattcgatgcagaggatgatgaatgctcctgattcaaatgataatattgatctactgttgagcattgatttgttgggtttacaaggagcaggcaaagcttttccaaacaagattgtttttgatgataagcttgtgttggctaacacacaagaattctttgatggaaattttccagtggattcttggttaccaatttttgtgaattgtctttatcctgtaagtcaattaccttcagaagctgtcgttgtaaatgtcacatgtggtag

SEQ ID NO: 80325 - DNA, 75 bp, Glycine max
atagaagagcttgacgtggatcgccttacttaagttgggaattcggttcgagttaggtacttgttgatacttttt

SEQ ID NO: 80326 - DNA, 358 bp, Glycine max
aagagttccattcgatgcagaggatgatgaatgctcctgattcaaatgataatattgatttactgttgagcattgatttgttgggtttacaaggagcaggtaaagcttttccaaacaaaattgtttttgatgataagcttgtgttggctaacacacaagaattctttgatggaaattttccagtggattcttggttaccaatttttgtgaattgtctttatcctgtaagtcaattaccttcagaagctgtcgttgtaaatgttacatgtggtagtgggaccgtggtttacccaccactgcttggattagttctgcagttaacaatcgctcctcagatatcaacaaaaggattcgcaca

SEQ ID NO: 80327 - DNA, 362 bp, Glycine max
ggtgattttgtcattggtgttaagttgacaaccataaacaatatgtgtgcatatgggctcaatcctggtatttcaggttctcgtcttttgggcaccattcctcagtccatttcacagcaaactgtttggaatcaaatggcaacagtgagaacaccattgaattttgattccagcaagcagagtttttgtcaattttctattgaccttctcggtggaggaattttagtggacaaaactggagattggatcacacttatacaaaattctccaattagtaacttgttgagagttgctgcttggaagaaaggctgtttaatggttaagattgtgatgtctgggaatgcagcagtcaaaaggagtga

SEQ ID NO: 80328 - DNA, 125 bp, Glycine max
cgattctagattgcaacaatgactaaaagagcccgagggggatccttctggtacaggtgcaacataacacttggcctgacggtagcttcaactgtcaactgggactccttcaacatctcgaagaa

SEQ ID NO: 80329 - DNA, 357 bp, Glycine max
gagaaactttaagcacatgtctaatgttttatgggtggctcctgaggacaaggcgagtttatggtcacaacttcattatgtttcgtgcaataatctggaaatgcaagaagcttatcttgtcaatctcgtaaatgtgttacgagaattgtatttgcacagtccagaggaagctcgccaattgagaaggaaagctctctctcgtattgaatggctgcaaaaagctgatgtgcctaccatagcacagattgaagagttccattcgatgcagaggatgatgaatgctcctgattcaaatgataatattgatctactgttgagcattgatttgttgggtttacaaggagcaggtaaagcttt

SEQ ID NO: 80330 - DNA, 336 bp, Glycine max
gaaacttgctgctatagaactgggcgctgtgtatacagggactatctttaacataccagctgttactataaaccaactaaaggtcattgagcaaagctaaaagcagaatcagatgaaaataccctccataaggaacacacatcatttgcatatatcaaggataatgatctctttctcaaaatgtacaccacaaatcttggcctatgagtacatgaagaatggagcgcataagaagaccatataacgtgacataacgacataccaaaacattattgtatgtggcatatcaaatcaacaatggcctggacactgctagacgcatcacatacctacatt

SEQ ID NO: 80331 - DNA, 365 bp, Glycine max
tggaaggatgtcttacgttgctcataacgttaatcagccccaagagaaagatttgttagagggaaatttttcctttgatattaaatctcgctctagattggaaaaagtttcctctacaaaagcacaatttgttagtggaaaaaccttcaaatatgatataattggtgctggttcacattcttcaggagattttcctgaaaaggaagatcaagaaaaacccaaaaagattgataccagattgagacaaagaatagatcctcaatacaatgaggttcaggctcagatggaaacaaatttgtttaaattgtctcttgatgatgttgaaactcctaaaggttctatgttggatcttaaaatttctcaat

SEQ ID NO: 80332 - DNA, 252 bp, Glycine max
cccggacagaacgcattagggttatcggcccgaaagcagatcatgcttggcggtcttagcttccttgatttcacgatctggatcgtgaccccaaagctcgaggtgggcaagcctattgcaccttcagggtggctaacttagaccatatctaccttttgtttcggccaaaccacatgtcagtcttcatacttctcgaggacccaggccagagcgattaccggaaataaggacggccatctcaaggatgacctg

SEQ ID NO: 80333 - DNA, 349 bp, Glycine max
attactgagtaagggcaatgatattctgtgttgcgagtatgctagttttgatggtttgattaccaagcaagttatgagcaagatggcagaaatgataaacagtctttgtggtggtgatgaaaaattgatgcgtgaaaggacgcacctgctgttggcttgttgttcaaggatggcaatttgtaagaaagatgtttggagagttgaatgtggaatcccttctggatttccgctcacagttatttgcaatagcatttttaatgagatgctcattagatatagctatgaaaaattactgcgccaggctaaagctccaagtatgtttttacaatccttcaaaaattttggttct

SEQ ID NO: 80334 - DNA, 56 bp, Glycine max
  unsure (1)..(56): unsure at all n locations
tttaaacctagatgaggtgcaagggttgcatactttggcaatataacctngggggg

SEQ ID NO: 80335 - DNA, 359 bp, Glycine max
ggcagaaatgataaacagtctttgtggtggtgatgaaaaattgatgcgtgaaaggacgcacctgctgttggcttgttgttcaaggatggcaatttgtaagaaagatgtttggagagttgaatgtggaatcccttctggatttccgctcacagttatttgcaatagcatttttaatgagatgctcattagatatagctatgaaaaattactgcgccaggctaaagctccaagtatgtttttacaatccttcaaaaattttgtttctttgtgtgtgtatggtgatgataacttaattagtgttcatgaatatgtcaagccttactttagtggttctaaattgaaaagctttctagctggtc

SEQ ID NO: 80336 - DNA, 359 bp, Glycine max
tacgggaattgtatttgcacagtccagaggaagctcgccaattgagaaggaaagctctctctcgtattgaatggttgcaaaaagctgatgtgcctaccatagcacagattgaagagttccattcgatgcagaggatgatgaatgctcctgattcaaatgataatattgatctactgttgagcattgatttgttgggtttacaaggagcaggtaaagcttttccaaacaagattgtttttgatgataagcttgtgttggctaacacacaagaattctttgatggaaattttccagtggattcttggttaccaatttttgtgaattgtctttatcctgtaagtcaattacctttagaagct

SEQ ID NO: 80337 - DNA, 353 bp, Glycine max
ctttcttcatagcattcggaaatttggctgatgatgccatcaattttttggctttttcccacatgctggtgcagttcggagagattcatgaaaacagcgtattgaaattcttcacaagaggaatttattacagcttggtcaactcaggttcgtgctgcaccaactctggtggctgatgggatggcatatttgtatgcaatggtgcatgatagttcaatgtctacaataccaggtgattttgtcattggtgtcaagttgacaaccataaacaatatgtgtgcatatgggctcaatcctggtatttcaggttctcgtcttttgggcaccattcctcagtccatttcacagcaaac

SEQ ID NO: 80338 - DNA, 369 bp, Glycine max
cgagataactagaaacagtgtgatgaaaatgaaggtccttgttttcttcgttgctacaattttggtagcatggcaatgccatgcgtacgatatgttccctctccgaatgaacactggctatggtgcccgtactccggaggtgaaatgcgcaagttggaggcttgctgtggaagcacacaacatctttggctttgagaccattcctgaagagtgcgttgaagcaacaaaggaatacatccatggcgaacaatatagatcagactccaaaacagttaaccaacaagcttacttttatgccagagacctcgaagtccatcccaaggacacatttgtgttcagtatagatggcaccgtactctctaatattcc

SEQ ID NO: 80339 - DNA, 362 bp, Glycine max
agatgctcattagatatagctatgaaaaattactgcgccaggctaaagctccaagtatgtttttacaatccttcaaaaattttgtttctttgtgtgtgtatggtgatgataacttaattagtgttcatgaatatgtcaagccttactttagtggttctaaattgaaaagctttctagctggtcataatatcaccattactgatggtattgacaaaactagtgcaactttgcaatttagaaagttagcagattgtgattttctcaagagaaactttaagcagatgtctaatgttttgtgggtggctcctgaagataaggcgagtttatggtcacaacttcattatgtttcgtgtaataatctg

SEQ ID NO: 80340 - DNA, 344 bp, Glycine max
gagaaggaaagctctctctcgtattgaatggctgcaaaaagctgatgtgcctaccatagcacagattgaagagttccattcgatgcagaggatgatgaatgctcctgattcaaatgataatattgatctactgttgagcattgatttgttgggtttacaaggagcaggtaaagcttttccaaacaagattgtttttgatgataagcttgtgttggctaacacacaagaattctttgatggaaattttccagtggattcttggttaccaatttttgtgaattgtctctatcctgtaagtcaattaccttcagaagctgtcgttgtaaatgttacatgtggtagtg

SEQ ID NO: 80341 - DNA, 353 bp, Glycine max
gcttggtcaactcaggtgcgtcctgcaacaactctgttggctgatgggtgtccatatttgtatgcaatggtgcatgatagttcagtgtctacaataccaggtgattttgtcattggtgtcaagttgacaaccataaacaatatgtgtgcatatgggctcaatcctggtatttcaggttctcgtcttttgggcaccattcctcagtccatttcacagcaaactgtttggaatcaaatggcaacagtgagaacaccattgaattttgattctagcaagcagagcttttgtcagttttctattgaccttctcggtggaggaatcttagtggacaaaactggagattggatcacact

SEQ ID NO: 80342 - DNA, 365 bp, Glycine max
cgcaacgactctgttggctgatgggtgcccatatttgtatgctatggtgcatgatagttcagtgtctacaataccaggtgattttgtcattggtgttaagttgacaaccataaacaatatgtgtgcatatgggctcaatcctggtatttcaggttctcgtcttttgggcaccattcctcagtccatttcacagcaaactgtttggaatcaaatggcaacagtgagaacaccattgaattttgattctagcaagcagagcttttgtcaattttctattgaccttctcggtggaggaattttagtggacaaaactggagattggatcacacttatacaaaattctccaattagtaacttggtgagag

SEQ ID NO: 80343 - DNA, 364 bp, Glycine max
ctcgagccgtttctatcgaccttctcggtggaggaattttagtggacaaaactggagattggatcacacttatacaaaattctccaattagtaacttgttgagagttgctgcttggaagaaaggctgtttaatggtcaagattgtgatgtctgggaatgcagcagtcaaaaggagtgattgggcctcattggtacaagtgtttttaacaaacagcaacagtacagagcattttgatgcatgtaagtggacaaaatcagaaccacattcctgggaattgatcttcccaatagaggtatgtggtcctaataatggttttgaaatgtggagttctgagtgggcaaatcaaacttcatggcatttgag

SEQ ID NO: 80344 - DNA, 361 bp, Glycine max
ctggaaatgcaagaagcttatcttgtcaatctcgtaaatgtgttacgagaattgtatttgcacagtccagaggaagctcgccaattgagaaggaaagctctctctcgtattgaatggctgcaaaaagctgatgtgcctaccatagcacagattgaagagtttcattcgatgcagaggatgatgaatgctcctgattcaaatgataatattgatctactgttgagcattgatttgttgggtttacaaggagcaggtaaagcttttccaaacaagattgtttttgatgataagcttgtgttggctaacacacaagaattctttgatggaaattttccagtggattcttggttaccaatttttg

SEQ ID NO: 80345 - DNA, 364 bp, Glycine max
ctgtactgttgctgtttgttaaaaacacttgtacagagcattttgatgcatgtaagtggacaaaatcagaaccacattcctgggaattaatcttcccaatagaggtatgtggtcctaataatggttttgaaatgtggagttctgagtgggcaaatcaaacttcatggcatttgagtttccttattgacaatcccaaacagtctacagtttttgatattctcttgggaatctctcaagattttgaaattgctggtaatactcttatgccagctttttctgttccacaggctactgccagatcttctgaaaatgcggaatcctctgcatgatctggaattcgtgttttctttcgcttgttcgtttg

SEQ ID NO: 80346 - DNA, 369 bp, Glycine max
cctacctctcccttcaagatgcagatcttcgtcaagaccctcaccggcaagaccatcacccttgaggtggaaagctctgacaccatcgacaacgtcaaggccaagatccaggacaaggaaggaatccccccggaccagcaacgtctcattttcgccggaaagcaacttgaggacggccgtacccttgctgactacaacattcagaaggagagtactcttcacctcgtcctccgtctccgtggtggcatgcagatcttcgttaagacactcaccggcaagaccataaccctagaggttgaaagctccgacaccatcgataacgtcaaggccaagatccaggacaaggagggtatccccccggaccagcaa

SEQ ID NO: 80347 - DNA, 364 bp, Glycine max
tgccaccccaatgcaggatgttcaggttacaattgattggtttatttcctctcaggaatgtgttcccaggacctattgtgttttaaatccacaaaatccttttgtgttaaataggtggatgggaaaattgactttcccccagggcacttcccgaagtgttaagagaatgcctctttctatagggggaggagctggtgcaaagaatgctattctcatgaatatgccaaatgctgttctttcaatgtggagatattttgttggagatctcgtctttgaagtttctaagatgacttctccctacattaaatgtacagtctctttcttcatagcatttggaaatttggctgatgataccatcaatttt

SEQ ID NO: 80348 - DNA, 360 bp, Glycine max
tggagggagaatgggaggaaggtcgttttcttcgtcttcttcttcgtctaggagttattcagtgccgaggacgtcaagctcagggttctctttttcggcgccgtattacgggccttctccgttcggtggggtttatgtgggtcccgccgtgggggtcggagtcggtgctggctcgagtttctttctcatcttagtgggattcctggcttttgttttggtttctggctttctttcggatcgctcagagggtagtgtgctcactgctgccgacaaaaccaccgtgctcaagcttcaggttggattgttggggatgggtcgcacacttcaaagggatctgaataggattgcagaagttgctga

SEQ ID NO: 80349 - DNA, 363 bp, Glycine max
gctttctagctggtcataatatcaccattactgatggtattgacaaaactagtgcaactttgcaatttagaaagttagcagattgtgattttctcaagagaaactttaagcagatgtctaatgttttatgggtggctcctgaggacaaggcgagtttatggtcacaacttcattatgtttcgtgcaataatctggaaatgcaagaagcttatcttgtcaatctcgtaaatgtgttacgagaattgtatttgcacagtccagaggaagctcgccaattgagaaggaaagctctctctcgtattgaatggctgcaaaaagctgatgtgcctaccatagcacagatttgagagttccattcgatgc

SEQ ID NO: 80350 - DNA, 364 bp, Glycine max
aaggacctaggttctgaattgaaacgggaggaaattgagcagctcatcttacaccttttactggcacggtttttgaaagaagaatttcagcatacaccttatgccacaaatgcttacattgctgtggggtcattggccaagcaaatattgcaagggaagaaatctgtgaaacttgagatttacactgaacagagaactaaagatggtgtaaggtcagcgaaacagtgtcttgggtcctctggtttggagctaaagcttgatgagctgagaaaagaactgtcctctgctcatggaggaatactcccacactctgtcttgtccactgaacaaatcatccaattagcttctcaaaaaccaaactcgc

SEQ ID NO: 80351 - DNA, 366 bp, Glycine max
gcttttgagtaccactaccaatggtgattttgttcaagggaaagatctcgcaatggttaaagttaatgtagcatgtgctgctgttggcttgacatcaagttacactccaactccattgttggaatctggtttgcaaaaagacagagggttaattgtggagtattttggaaggatgtcttacgttgctcataacgttaatcagccccaagagaaagatttgtcagagggaaatttttcctttgatattaaatctcgctctagattggaaaaagtttcctctacaaaagcacaatttgttagtggaaaaaccttcaaatatgatataattggtgctggttcacattcttcaggagattttcctgaaaa

SEQ ID NO: 80352 - DNA, 277 bp, Glycine max
cttctttgaaacaaaagtatttcagagtcagcatgggggctcaaaccatttaagggagaaagataatgttaatgctacatttaaagacagaactgcaatacttagaaaaatactttgcgagtaactaactttctaaatgcacggcatgaggcacgcaacatcaacttgactaccctatttcccattatatgtccattaaaatacattgttcaaggactcttcttggaccatcaaggatcaccatgaaatttaacatttttcaaagaaatgaaaggcc

SEQ ID NO: 80353 - DNA, 101 bp, Glycine max
caggaacacaaatattccacaacataaaccaatacaatagaagctttaaaagttccttcatttctcatttcggctgttgagtctccaattatttgctaact

SEQ ID NO: 80354 - DNA, 184 bp, Glycine max
attttcagtttatttcttgcatgacagatgcattgaactgagaagattaaagaattgcaacgtatgtacaggggtgtgcaaaaatcagtactgaactggttccaaattggtttaaacggttcagtttgtaaaccaaatttgagagttggtttgacgaatcggtttaaacatttcatttaagtta

SEQ ID NO: 80355 - DNA, 352 bp, Glycine max
attgtttgctgtcatgtcttattacactactctatcagtagcttattactgcaaactgattcattatgctctccaaaataggcgtctcaataataatagcttgacaggaggcatacccatatctttgacaaatgtttcttcactgcaagttctgtgagtgttactcctatacgtacattttccatgagttaatgccaaaatacattcctatttatactagtgtcatgtatttttataagtgtaacctgacacaactgtcattttggaatatagtgatctctcaaataaccatctaaaaggggaaatcccagtgaatggttcattttcattatttacccccatcaagttagta

SEQ ID NO: 80356 - DNA, 359 bp, Glycine max
ggggcgcgccagttctgatatttacaccatctgctctcaagactgtgaattatggaatcctgcttgcacaaaagcaatgactatgtcatttaatccaaacccgtgttctgatgcatggagtttggaatttctgaagcgtaccggatttcattgtgatatcatttgtgtcactggatggactgccaccccaatgcaggatgttcaggttacaattgattggtttatttcctctcaggaatgtgttcccaggacctattgtgttttaaatccacaaaatccttttgtgttaaataggtggatgggaaaactgactttccctcagggcacttcccgaagtgttaagagaatgcctctttcta

SEQ ID NO: 80357 - DNA, 92 bp, Glycine max
gtaatatcatatgatttggggttttgccaaatgatttctttcaaattctgagattgagattattggttgaatgaaaatttgagtccttatca

SEQ ID NO: 80358 - DNA, 358 bp, Glycine max
ccggatttcattgtgatatcatttgtgtcactggatggactgccactccaatgcaggatgttcaggttacaattgattggtttatttcctctcaggaatgtgttcccaggacttattgtgttttaaatccacaaaatccttttgtgttgaataggtggatggggaaactgactttcccccagggcacttcccgaagtgttaagagaatgcctctttctatagggggaggagctggtgcaaagaatgctattctcatgaatatgccaaatgctgttctttcaatgtggagatattttgttggagatctcgtctttgaagtttctaagatgacttctccctacattaaatgtacagtctc

SEQ ID NO: 80359 - DNA, 314 bp, Glycine max
atggctgcaaaaagctgatgtgcctaccatagcacagattgaagagttccattcgatgcagaggatgatgaatgctcctgattcaaatgataatattgatttactgttgagcattgatttgttgggtttacaaggagcaggtaaagcttttccaaacaaaattgtttttgatgataagcttgtgttggctaacacacaagaattctttgatggaaattttccagtggattcttggttaccaatttttgtgaattgtctttatcctgtaagtcaattaccttcagaagctgtcgttgtaaatgttacatgtggta

SEQ ID NO: 80360 - DNA, 265 bp, Glycine max
ctccgcattagtttcaccgcacgaatatcttgttgtttggagcgatccgagaaaaactctgtaaacatgttggtttaccaggacctccttacaggtgatgagcttctctctgactccttccgttacaaggaaattgagaatggaatgctgtgggaagttgaggggaagtgggttgttaaaggagcagttgatgtagacattggtgcaaacccttctgctgagggtggaggagaagatgagggagttgatgatgcatctgttaagg

SEQ ID NO: 80361 - DNA, 365 bp, Glycine max
aatttattttaaaaaaaataaaaacaataaaaaaggcggtgaattttaaaaatagaagataacaaaaaaaacaacaaacacatcaatcttacaaaaaaattgcaacatttaaagaaaagtttgaatacccttttgcctatagaaattgtattgtgcaatttgtttcttattataattactctttttcaatttcaaacatgatcatcgtatgcaggttttaccccttttacaagtttgtgagacctgtgttttttacattatttcttacttgtgaatggtttatctctccttttgtatagtgttactatagttttactttttttttcctattttttatcatttatccattttttcaattccttttc

SEQ ID NO: 80362 - DNA, 61 bp, Glycine max
ggacgaaccaaacgtcacttctaaacaaggatatatgtttgacgagctatacatcacgaaa

SEQ ID NO: 80363 - DNA, 361 bp, Glycine max
gcttcctctggactgtgcaaattgagaaggaaagctctctctcgtattgaatggctgcaaaaagctgatgtgcctaccatagcacagattgaagagttccattcgatgcagaggatgatgaatgctcctgattcaaatgataatattgatctactgttgagcattgatttgttgggtttacaaggagcaggtaaagcttttccaaacaagattgtttttgatgataagcttgtgttggctaacacacaagaattctttgatggaaattttccagtggattcttggttaccaatttttgtgaattgtctctatcctgtaagtcaattaccttcagaagctgtcgttgtaaatgttacatgtg

SEQ ID NO: 80364 - DNA, 129 bp, Glycine max
tgaaaatgttttaaatgatgtaaaaactactggagaaagcggcctaaggcactcacgtaaaaagaaccggagattcatgatttatgttcattcaaaaggaatgatagtggatgatgaatatgtgttact

SEQ ID NO: 80365 - DNA, 269 bp, Glycine max
gccaagtaaagtttagctcgaattggaaaccgcgtgttatcagcaatgtttcaattgatcttgcaaaaatgaagtatgaatatgtggctcgggatattgattacttcgattttatattggcttctatctgataattttacaggttggttagctggcttgatgtgctaatattttttctctgacacgcaacagatgggtagtagtacatcaattatgctagttggttggtcggcttacactaaattgcattatttttttttcttttctag

SEQ ID NO: 80366 - DNA, 357 bp, Glycine max
gtgatgataacttaattagtgttcatgaatatgtcaagccttactttagtggttctaaattgaaaagctttctagctggtcataatatcaccattactgatggtattgacaaaactagtgcaactttgcaatttagaaagttagcagattgtgattttctcaagagaaactttaagcagatgtctaatgttttgtgggtggctcctgaggacaaggcgagtttatggtcacaacttcattatgtttcgtgtaataatctggaaatgcaagaagcttatcttgtcaatctcgtaaatgtgttacgagaattgtatttgcacagtccagaggaagctcgccaattgagaaggaaagctc

SEQ ID NO: 80367 - DNA, 112 bp, Glycine max
acaccattgaattcctattctagcaagcacagctcaggtggattttatatagaccttctcgcagaaggcctttaaatggacaaaacttgcaattggatcacactcatacaaa

SEQ ID NO: 80368 - DNA, 168 bp, Glycine max
acaaaaataaattactattcataacaaaaaaaacacaggaggattttaataaagaactactataaaaaaaaaatttaaataaacataaactaaaaaattatatctcaatcatacaaaaaatctacaaataaaaccctctccccccctttctgattctcccaaccccta

SEQ ID NO: 80369 - DNA, 345 bp, Glycine max
ctggtgggggccttcccatatcatccgagacagcgtggtatacagcatattcatggagtgtatgaaggattgtagacgaacagatggcaatggtggtggttagctctgacttatactatttggaagcacagaaacaacatcattttctccaatgccactttcaacgctaataaactaatggacgatgtggtgtttcttctatggacatggctcaaatgcttagaaaagaatttcactcttcatttcaatcagtggtcttcaaatctgaaaattggtttttttaggacacgaatataggaatatagtctacattcctgttcatttaccttgctatgggatctttca

SEQ ID NO: 80370 - DNA, 321 bp, Glycine max
aaaaaaaaaaaaaaaaaaaaaaaaaaaaaaaaagcaggggataaaaaaaaaggaaaggaaaaaaaaaaaaaaaaaaaaaaaaaaaaaaaaaaaaaaaaaaaaaaaaaaaaaaaaaaaaaaaaaaaaaaaaaaaaaaaaaaaaaaaaaaaaaaaaaagggggccccccccccataagaatcaactaacccccgaattaaatctccccccggtccctaagggttaaccatttttccttaaatggacctatataaaaatttgccaaaaaaagaaaaaaaaggtttcctttgtataaaatttttaaccctaaaaaaatcccaaaa

SEQ ID NO: 80371 - DNA, 362 bp, Glycine max
ttcctctacaaaagcacaatttgttagtggaaaaacgttcaaatatgatataattggtgctggttcacattcttcaggagattttcctgaaaaggaagatcaagaaaaacccaaaaagattgataccagattgagacaaagaatagatcctcaatacaatgaggttcaggctcagatggaaacaaatttgtttaaattgtctcttgatgatgttgaaactcctaaaggttctatgttggatcttaaaatttctcaatctaaaattgcacttcccaagaacacagttggaggaaccattctgcgtagtgatctattggcaaattttttgacagagggcaattttagagcaagtgttgatttgc

SEQ ID NO: 80372 - DNA, 364 bp, Glycine max
tgtgttttaaatccacaaaatccttttgtgttaaataggtggatgggaaaactgactttcccccagggcacttcccgaagtgttaagagaatgcctctttctatagggggaggagctggtgcaaagaatgctattctcatgaatatgccaaatgctgttctttcaatgtggagatattttgttggagatctcgtctttgaagtttctaagatgacttctccctacattaaatgtacagtctctttcttcatagcatttggaaatttggctgatgacaccatcaattttgaggcttttccccacaagctggtgcagtttggagagattcaggaaaaagttgtattgaaattttcacaagaggaat

SEQ ID NO: 80373 - DNA, 184 bp, Glycine max
atcaccattactgatggtattgacaaaactagtccgactttgcaatttagaaagtgagcatattgtgattttctcaagagaaactttaagcagatgtctaatgttttgtgggtggctcctgaggacaaggcgagtttatgggcacaacttcattatgtttcgcgtaataatctggaaatgcatg

SEQ ID NO: 80374 - DNA, 358 bp, Glycine max
ggaagctcgccaattgagaaggaaagctctctctcgtattgaatggctgcaaaaagctgatgtgcctaccatagcacagattgaagagttccattcgatgcagaggatgatgaatgctcctgattcaaatgataatattgatctactgttgagcattgatttgttgggtttacaaggagcaggtaaagcttttccaaacaagattgtttttgatgataagcttgtgttggctaacacacaagaattctttgatggaaattttccagtggattcttggttaccaatttttgtgaattgtctttatcctgtaagtcaattaccttcagaagctgtcgttgtaaatgttacatgtggtagt

SEQ ID NO: 80375 - DNA, 313 bp, Glycine max
tagaaagtataaaagaaagactcagttcttatccttggcgttgattgcgagtcgaaatctgaatcttaatcatatcgctgcgtatagggtatgagattggctctgacagcatgccgtataatgggaggggctcttaccgacacctcgatgacaggagatgaacgaccgtcatcaccacagagaaccgacagctctatctgtggtgagcctgcaccatcaccaggtgcctgtgggccttcttcttaatcgctctcactgctttctatattagctaccatagctagatggattcctgtggacgttaattgaccga

SEQ ID NO: 80376 - DNA, 352 bp, Glycine max
attttggctggagatttggtcgaaattttggattcgggggttggaccacccgatttgaaagaagcagaggcactgaagatcctggcccatacagctatacgttgtgtggaagaggaaccgaggcaaagaccaaccatgaatgacattgtggtcgatttggatcgggcttttgctatttgtggtagtagcctatatgatgagaacttttcctattccattgcattaccatcacatgagtccaatcatatgactccggatcctcttgatacggactcatgtgatattccaatctacgaagagaatacgaactcatgatatttcaataaacgaagaggatgcggactcatgtgat

SEQ ID NO: 80377 - DNA, 296 bp, Glycine max
catgtgctgctgttggcttgacatcaagttacactcgaactccattgttggaatctggtttgcaaaaagacagagggttaattgtggagtattttggaaggatgtcttacgttgctcataacgttaatcagccccaagagaaagatttgttagagggaaatttttcctttgatattaaatctcgctctagattggaaaaagtttcctctacaaaagcacaatttgttagtggaaaaaccttcaaatatgatttaattggtgctggttcacatttcttatgagattttccttaatat

SEQ ID NO: 80378 - DNA, 208 bp, Glycine max
ctgttgagcattgatttgttgggtttacaaggagcaggtaaagcttttccaaacaagatcgtttttgatgataaacttgtgttggctaacacacaggaattctttgatggaaattttccagtggattcttggttaccaatttttgtgaattgtctttatcctgtaagtcaattacctccagaagctgttgttgtaaatgttacatgtg

SEQ ID NO: 80379 - DNA, 288 bp, Glycine max
cccaaacagtctacagtttttgatattctcttgggaatctctcaagattttgaaattgctggtaatactcttatgccagctttttctgttccacaggctactgccagatcttctgaaaatgcggaatcctctgcatgatctggaattcgtgttttctttcgcttgttcgtttgtttaattcaataaaggaaattaggcatgaccctcttgttgagtatgctctgcctatctgaaaatttccacacctcttttaattgtcgtaatgatgtgtgaagtgtgtgttatttt

SEQ ID NO: 80380 - DNA, 309 bp, Glycine max
cgcacacaaagccatttccttattcatatctctgatggcttcattcacctatccattgttctatgctccttcatcgataataagccatggccttcacttccactctctctctctactctcacccgcaggttcgcctccgctgccagcggctgcaatcgctggccttcaccgccgccggcgtcgctcaatttgcgccgcttccgcctctgaactgccggagaacgtgttctccgagaagcttcgtggttagggcttcttcgagcgtggaaggaagtcgcgcgcgtgcccggggttctcgcagagtctatc

SEQ ID NO: 80381 - DNA, 326 bp, Glycine max
gacggatattctagactcttccctattattatatatgtggatgtagtagcatgctggataaactcttccctaaatatatttttagtataaaatacagatatcttatccaataaaaaaaaacaaaagagaggatacaactagaacaaagaacaaaatgacaaagacacttacaccatgcttaaaaaatgaaggtgaagctgacttatataaaaaaaatataggggggaccactcactggaggcttcatacaccacggaataaatttggaacacgtacaatctggacacccaattttccttaaaggtaatgatattaaacccctgcca

SEQ ID NO: 80382 - DNA, 407 bp, Glycine max
aagagctacgaccgcccattccccccttccttaacctcgaaattcggctcgggaaaaaaatttaaaaaaaaaaaaaaaaaaaaaaaaaaagagggatttaaaaaaaaaatgagaacaaaaaaaaaaaaaaaaaaaactaacaaaaaaaaaaaaaaaaaaaaaaaaaacaaaaaaaaaaaaaaaaaaaaaaaaaagggcccccccccctttaaaaactttttcacccccaaaataaattccaacccggacccttaaggtttcccatttttccttaaaaaaaaccttttaaaactttgccaaaatattgccaataatttttccctttaaaaaatttttatcctttaaaaattccccacaaaaaacaacccgaaaattaaaaattaaaaccttgggtcccctaaaaaggg

SEQ ID NO: 80383 - DNA, 168 bp, Glycine max
atgcggcgtacgtaacgctcgaattcactcgatctctaacatcaataattttaacagatcaccatatcagaaagaaatcatacacagttggggagccaacactcatccaaatatcagcccatcttcaaacccacatcaacacccattataagccctactcgaacccaa

SEQ ID NO: 80384 - DNA, 335 bp, Glycine max
gttgtgttgaaattttcacaagaggaatttcttacgaggttggtcaactcaggtgcgtcccgcaacgactctgttggctgatgggtgcccatatttgtatgctatggtgcatgatagttcagtgtctacaataccaggtgattttgtcattggtgttaagttgacaaccataaacaatatgtgtgcatatgggctcaatcctggtatctcagggtctcgtcttttgggcaccattcctcagtccatttcacagcaaactgtttggaatcaaatggcaacagtgagaacaccattgaattttgattttagcaagcatagcttttgtcaattttcta

SEQ ID NO: 80385 - DNA, 225 bp, Glycine max
aaaaaaataaaaaaaaaaaaaaaaaaaaaaaaaaggggaaaaataaaaaaaaaaaagaaaaaaaaaaaaaaaaaaaaaaaaaaaaaaaaaaaaaaaaaaaaaaaaaaaaaaaaaaaggggcgcccccccattagtgacctcttcaccccggaaattaattccgacccggtcccttaaggcgtcccatttttccttttagggagtcgttttaaactttggcgaaaa

SEQ ID NO: 80386 - DNA, 373 bp, Glycine max
gcaccagtttcaccgcacgaatatcttgttgtttggagcgatccgagaaaaactctgtaaacatgttggtttaccaggacctccttacaggtgatgagcttctctctgactccttccgttacaaggaaattgagaatggaatgctgtgggaagttgaggggaagtgggttgttaaaggagcagttgatgtagacattggtgcaaacccttctgctgagggtggaggagaagatgagggagttgatgatgcagctgttaaggttgttgacattgttgacacattcagacttcaggagcaacccgcattcgataagaagcagtttgttaccttcatgaagaggtttatcaagaatttgactcccaagctcgatgc

SEQ ID NO: 80387 - DNA, 377 bp, Glycine max
aaaaaaaataaaaaaaaaaaaaaaaaaaaaaaaaaggggaaaaaaaaaaaaaaaaaaaaaaaaaaaaaaaaaaaaaaaaaaaaaaaaaaaaaaaaaaaaaaaaaaaaaaaaaaaaaaaaaaaaaaaaaaaaaaaaggggggcccccccctttgtgggctcttcaccccggaaataaattccggcccggtccctgaaggctacccagttttccttttagggggtctttttaaactttggcgaaaaaatggcaaaagctttttcctggggaaaatttttttccgttaaaaattccaaaaaaaatacgacccgaaagcataaagtgaaaaccctggggtccctaatggggggcctaccccacattaattgggtggccctc

SEQ ID NO: 80388 - DNA, 377 bp, Glycine max
caatctcgtaaatgtgttacgagaattgtatttgcacagtgcagaggaagctcgccaattgagaaggaaagctctctctcgtattgaatggctgcaaaaagctgatgtgcctaccatagcacagattgaagagttccattcgatgcagaggatgatgaatgctcctgattcaaatgataatattgatttactgttgagcattgatttgttgggtttacaaggagcaggtaaagcttttccaaacaaaattgtttttgatgataagcttgtgttggctaacacacaagaattctttgatggaaattttccagtggattcttggttaccaatttttgtgaattgtctttatcctgtaagtcaattaccttcagaagctg

SEQ ID NO: 80389 - DNA, 373 bp, Glycine max
gtccgaaactcctaccctttttttcatttccttgccatttcatcacttataaacctttctttggatcattgcaccctttttgcccctctctcataaataaatttctttcttgttttccaactatggatgttaaaatgaagggaataacagcattgcacacgcttttgcaatttcttctgttttctgccattttcccactctctttctcagctcaaccccgcaacgccaagaagctatcttctgataatcatcatcgcctttcctcctcagctgttttcaaagttcagggaaatgtttaccctcttgggcattacacagtgtctctcaacattggctatccccccaagctttatgaccttgacattgactcggg

SEQ ID NO: 80390 - DNA, 375 bp, Glycine max
cttcaaccttgctttcttttctgctcaacatggctgggagtatctccaagaagagaagaagcgagttcggaacccttttgtccccattggtgcacttgttactgctggtgtgctaacggctggcttaatcagctttagacaaggtaattctcagttaggccagaagttaacgagggctcgtgtggttgtacaaggttcaacattgtcactacatggtgccacttccttttattatagagaatatctttctcaatcaggttaacatatgtgctgctctgaagacgcatgattgagtgttttatccaattcaattaatgtcatgcttagatgaactgtcctgctttttaattactctaatatggtttgcaacttttg

SEQ ID NO: 80391 - DNA, 410 bp, Glycine max
  unsure (1)..(410): unsure at all n locations
gaagagctatgacgncgcatgcgggggtacctaagctcgaaattcggttcgaggtccttattttgattccagtatcagcactaacatggacagtatggtacaatcacaaggtattgcaccaaggagaatacgattgggagttgttaggcgtccgcttggttcccaggatgggagttgtgcttgtgccccataagaccataattcatataccatcattactgcagctagaagattgctcattcaacttggatatctaacttatacatgtcactgcatgtgttctgagactattgtgtttctattttagcaagagataaatgtttgagtgtaagagaaccatgcttgcggttgtagttacaccgttaatgacatgcttacaactagctcacatgatttcactaaccaaatta

SEQ ID NO: 80392 - DNA, 361 bp, Glycine max
gagtgagtgtactgatttgaaaggaactttcgatctgcaaaaaaggcactttttcagccccaacgaagcaaaatataaaaatggtaatcgcatgaacttcggcactcctctcaaagacgccctcgtcgctcacttgcgcactctcaacatccaagtcgaagatctcggaacctcttcctactactccgccggagccgaagtcgatcgacgagtatcccaatactgctcctgcgacatccgtggcctggacgactgcggcaccggcggcggcgaatccatctttgccaacaaatatcccggagtctacgccgacacgagcctataccgcttcgacgccggcaacgcccggtacatcaacaac

SEQ ID NO: 80393 - DNA, 374 bp, Glycine max
cccaggacctattgtgttttaaatccacaaaatcctgttgtgttaaataggtggatgggaaaactgactttccctcagggcacttcccgaagtgttaagagaatgcctctttctatagggggaggagctggtgcaaagaatgctattctcatgaatatgccaaatgctgttctttcaatgtggagatattttgttggagatctcgtctttgaagtttctaagatgacttctccctacattaaatgtacagtctctttcttcatagcatttggaaatttggctgatgacaccatcaattttgaggcttttccccacaagctggtgcagtttggagagattcaggaaaaagttgtgttgaaattttcacaagagga

SEQ ID NO: 80394 - DNA, 377 bp, Glycine max
atctggtttgcaaaaagacagagggttaattgtggagtattttggaaggatgtcttacgttgctcataacgttaatcagccccaagagaaagatttgttagagggaaatttttcctttgatattaaatctcgctctagattggaaaaagtttcctctacaaaagcacaatttgttagtggaaaaaccttcaaatatgatataattggtgctggttcacattcttcaggagattttcctgaaaaggaagatcaagaaaaacccaaaaagattgataccagattgagacaaagaatagatcctcaatacaatgaggttcaggctcagatggaaacaaatttgtttaaattgtctcttgatgatgttgaaactcctaaag

SEQ ID NO: 80395 - DNA, 374 bp, Glycine max
ggaaaaagttgtgttgaaattttcacaagaggaattgtgttacagcttggtcaactcaggtgcgtcccgcaacgactctgttggctgatgggtgcccatatttgtatgctatggtgcatgatagttcagtgtctacaataccaggtgattttgtcattggtgttaagttgacaaccataaacaatatgtgtgcatatgggctcaatcctggtatttcaggttctcgtcttttgggcaccattcctcagtccatttcacagcaaactgtttggaatcaaatggcaacagtgagaacaccattgaattttgattctagcaagcagagcttttgtcaattttctattgaccttctcggtggaggaattttagtggac

SEQ ID NO: 80396 - DNA, 264 bp, Glycine max
ctcttgggaatctctcaagattttgaaattgctggtgatactcttatgccagctttttctgttccacaggctactgccagatcttctgaaaatgcggaatcctctgcatgatctggaattcgtgttttctttcgcttgttcgtttgtttaattcaataaaggaaattaggcatgaccctcttgttgagtatgctctgcctatctgaaaatttccacacctcttttaattgtcgtaatgatgtgtgaagtgtgtgttattttaaa

SEQ ID NO: 80397 - DNA, 98 bp, Glycine max
ggcatgaccctcttgttgagtatgctctgcctatgtgaaaatttccacacctcttttaattgtcgtaatgatgtgtgaagtgtgtgttattttaaaaa

SEQ ID NO: 80398 - DNA, 170 bp, Glycine max
aaacaagattgtttttgatgataagcttgtgttggctagcacacaagaattctttgatggaaattttccagtggattcttggttaccaatttttgtgaattgtctctatcctgtaagtcaattaccttcagaagctgtcgttgtaaatgttacatgtggtagtggacgtg

SEQ ID NO: 80399 - DNA, 372 bp, Glycine max
gatgatttcatgtttctgcccttggtttcatagggttgctatgaacctatgaactgaggcgattattcttaacaggatgggcgttgtttttcatgcatacatttttgtcacaggttccatcttcctttatctgactaatgggtcaagcttctgctttgccagtgtaatgtgctttgcatgccaagggaatgcatttaggcaaaatcacttcttgacgtataatttttctgatactatacctgatgtacgatatacctgcctttttattacttttttaatctgcccttaataaaacatggacatcagtgtttcatcgagtctctgggtgggacactagcttccgcgacctgtgagctactaaggatagccctg

SEQ ID NO: 80400 - DNA, 349 bp, Glycine max
ggcacatacacacacccaactactacatccacattaggcacaactctagctacctgagcacaaatttgtagccatggcggggaagaggcacgaggcacaggattggaaaaatatgcggattattgatcttcggagacggcacaaccaagattatggaagccattggaagaagtcctagaagcccgttggacatgatgaactcggagaagcaatcaccgacgggtcctagaaagctatgacctcggaggagtaggtctaggaacagcggtggaactcgatataccaggaatatgcgcggaacacagccatgccggtgctccaatagacaccgagatcggcacgaaacatt

SEQ ID NO: 80401 - DNA, 82 bp, Glycine max
  unsure (1)..(82): unsure at all n locations
tattaaaatcttttcatatataagaaactntggtcgaaaccatggacatgttgtggttttaaaacatgtcattttaagattg

SEQ ID NO: 80402 - DNA, 376 bp, Glycine max
atgataacttaattagtgttcatgaatatgtcaagccttactttagtggttctaaattgaaaagctttctagctggtcataatatcaccattactgatggtattgacaaaactagtgcaactttgcaatttagaaagttagcagattgtgattttctcaagagaaactttaagcagatgtctaatgttttgtgggtggctcctgaagacaaggcgagtttatggtcacaacttcattatgtttcgtgtaataatctggaaatgcaagaagcttatcttgtcaatctcgtaaatgtgttacgagaactgtatttgcacagtccagaggaagctcgccaattgagaaggaaagctctctctcgtattgaatggctgca

SEQ ID NO: 80403 - DNA, 374 bp, Glycine max
tttgggtaaagatgttattgacaaagaagtggtggagaaggtcagccaagagtttttgtgaaatcaactctggttgtctccaaatgaattgctatatgatttgatttattgctttaacaattgtcaattgacaatgcatggtaccatgatacgtatcccagaattgctagttattcacccactgggcacaatttccatctagagctttgttcttctagttctaaactgttgtcggtggatactatatactgatcacaaaattttatatttctgatcaggtgtgggacagaatagctcctggtttagcttcccaatttgattcaccctattcaattccaactatcgcaccaccgtccattgcttattcttggtgg

SEQ ID NO: 80404 - DNA, 332 bp, Glycine max
ccccttccttaacttcgaatttcggttcgggaaaaaatttaaaaaaaaaaaaaaaaaaaaaaagggcgggataaaatataaaaaaggggaataaaaaataaaattaaaacatggatgcataaaaaattaaaaatataaccgtgtcctgtaaaatattcgctctttttcatccatttacgatgtctatggtttccaattcatatcgcgttcacactttcgcacgactttctgcacatataccttaaaagctacaacattcttttgctcttcaatatgatagccaaaattccctatttttgtctttagtgaccttttttcaattgccattacct

SEQ ID NO: 80405 - DNA, 372 bp, Glycine max
gtttgttttttctctcacctgaaaatgtcttgctgcggtggtaactgtggttgcggaagcgcctgcaagtgcggcaacggctgcggaggctgcaagatgtacccagacttgagctacaccgagtcaaccaccaccgagaccttggtcatgggagtggcaccagttaaggctcaattcgagagtgctgaaatgggtgttcccgctgagaacgatggctgcaaatgtggagctaactgcacctgcaacccctgcacttgcaagtgaggtgttggagagctaaagcttcaagcagaaatggcccttagaaataatgataaaaactatatgtagtttcaaaacttcaaaattatgtagtatgtattatgttgcact

SEQ ID NO: 80406 - DNA, 166 bp, Glycine max
ttggcagattttgtcaaatccaaatttggaaacttgaattctgataacaatgcaggattggggagtgaattgatgacctgattaatactacagcatatgatcggggcttccaagatatggacaaaggatactatacatacatactgaaaagtgcaataattactat

SEQ ID NO: 80407 - DNA, 369 bp, Glycine max
  unsure (1)..(369): unsure at all n locations
cgaaattcggttcgagctcgagccgaatcggttcgagcggctcgagctcaggacttgcctccggcggcggcgccgggacccgatgccggggccgccggagccgtttcgagctcggtcgccatgattggagcttccgtactgttgtcaatgctcgccatcttcaagcactgagtataaatctgatggatccatcttgtgtgaagattattgattcgttctgcacactcagatctattgttgctgcttttataatacgttacgagtgatgattattaatttattattattatgattattatgagtttatctatgtntaatagagagagagagagagagatcttacagcatttatataatgaaccatttatt

SEQ ID NO: 80408 - DNA, 425 bp, Glycine max
  unsure (1)..(425): unsure at all n locations
atagaagagnnangacgnngcatgcggtccgtaagttgggaattaggttcgaggtcggaggttgttatggggtctgggaacagtgggaggatgtgtaagaagaacttgatggggagagtgagggatatgggtggggccaagattgctaatagatgtacccagacttgagctacattcttgactaggaaggatcaacaatgtgtataggagtggcaccagtttatgctcaagtctagagggctgaaatactttctttcttattttattccaaaaaattgaagaatagttactttgacaaaaagggttggacttgctagagtggtgtagaagaacttaagctttcatcaacaatggtcctgagaaataatgataaaaactatatgtagtttcaaaacttcaaaattatgtagtatgtattatgttgc

SEQ ID NO: 80409 - DNA, 361 bp, Glycine max
ttcattgtgatatcatttgtgtcactggatggactgccacgccaatgcaggatgttcaggttacaattgattggtttatttcctctcaggaatgtgttcccaggacctattgtgttttaaatccacaaaatccttttgtgttaaataggtggatgggaaaactgactttccctcagggcacttcccgaagtgttaagagaatgcctctttctatagggggaggagctggtgcaaagaatgctattctcatgaatatgccaaatgctgttctttcaatgtggagatattttgttggagatctcgtctttgaagtttctaagatgacttctccctacattaaatgtacagtctctttcttcat

SEQ ID NO: 80410 - DNA, 363 bp, Glycine max
ctcgagccgaatcggctcgagcccagtcctcgcctgcaaacccttcctccactgcttcttcctccctctcctgcctaagctcccttcctgcaccggtgtcgacgctccctccaccgtcgacgaccaattcgagttcatctacctctcctggctgagtttgggatcagcctggaggcaggcggggccaccaacgttggggaggaagaagtagagagggtcaatgaagagggtgaggaggctcgtaacaaggaacacctggttccaataggccacgatgtcgctatcggggttcaggatctggtaatgccataggatctggaacgagtgctcctcctctctcgctgtcactgccttcgatcaaga

SEQ ID NO: 80411 - DNA, 286 bp, Glycine max
ctcggatgctgtaacattcgcccatgatgtgaagctgtggagaggaccatatgccgatgaaatacatattgcatcatcatcatcatcaacaaaccgcattacaaaaaaaagatcccgccccctgtatagccccatattggttcccaaaccccccaaccaaccaaaacaaaaacaaaccaacccttggaaaattaaagaaataagaaacccccccaatagggtctcacatctctctaacctctaaaacacaccaatactaccaaaatatatcaatgttccctgaaac

SEQ ID NO: 80412 - DNA, 337 bp, Glycine max
taccaatatttcttacataacataacataccatactgtaacattacttttactaaccttacataaccttgcttgtagctttgtgttaggaagctatgcaggatgtgtctattgatgttgctgcgccgttgctcgcttatgatgcctttatgggcctcgttagcgttttcaacagcactttttgcaatgtcggcagtgatttgcgcgttcctcctgttgagactttggaagagtgtcctggtgcgtgggttgacgcccttgctaggaggggattccgtctcgttgatgggggaaggaaatcagactgcggaggatgtgagcgatgtggttgtaccgtt

SEQ ID NO: 80413 - DNA, 355 bp, Glycine max
gaaactttaagcagatgtctaatgttttatgggtgggtcctgaggacaaggcgagtttatggtcacaacttcattatgtttcgtgcaataatctggaaatgcaagaagcttatcttgtcaatctcgtaaatgtgttacgagaattgtatttgcacagtccagaggaagctcgccaattgagaaggaaagctctctctcgtattgaatggctgcaaaaagctgatgtgcctaccatagcacagattgaagagttccattcgatgcagaggatgatgaatgctcctgattcaaatgataatattgatctactgttgagcattgatttgttgggtttacaaggagcaagtaaagcttt

SEQ ID NO: 80414 - DNA, 359 bp, Glycine max
ggcagaaatgataaacagtctttgtggtggtgatgcaaaattgatgcgtgaaaggacacacctgctgttggcttgttgttcaaggatggcaatttgtaagaaagatgtttggagagttgaatgtggaatcccttctggatttccgctcacagttatttgcaatagcatttttaatgagatgctcattagatatagctatgaaaaattactgcgccaggctagagctccaagcatgtttttacaatccttcaaaaattttgtttctttgtgtgtgtatggtgatgataacttaattagtgttcatgaatatgtcaagccttactttagtggttctaaattgaaaagctttctagctggtc

SEQ ID NO: 80415 - DNA, 362 bp, Glycine max
cttagaaacttcaaagacgagatctccaacaaaatagctccacattgaaagaacagtctctttcttcatagcatttggaaatttggctgatgacaccatcaattttgaggcttttccccacaagctggtgcagtttggagagattcaggaaaaagttgtgttgaaattttcacaagaggaatttcttacagcttggtcaactcaggtgcgtcccgcaacgactctgttggctgatgggtgcccatatttgtatgctatggtgcatgatagttcagtgtctacaataccaggtgattttgtcattggtgttaagttgacaaccataaacaatatgtgtgcatatgggctcaatcctggtattt

SEQ ID NO: 80416 - DNA, 361 bp, Glycine max
gtttgattaccaagcaagttatgagcaagatggcagaaatgataaacagtctttgtggtggtgatgaaaaattgatgcgtgaaaggacacacctgctgttggcttgttgttcaaggatggcaatttgtaagaaagatgtttggagagttgaatgtggaatcccttctggatttccgctcacagttatttgtaatagcatttttaatgagatgctcattagatatagctatgaaaaattactgcgccaggctaaagctccaagtatgtttttacaatccttcaaaaattttgtttctttgtgtgtgtatggtgatgataacttaattagtgttcatgaatatgtcaagccttactttagtgg

SEQ ID NO: 80417 - DNA, 359 bp, Glycine max
tgaaaaattgatgcgtgaaaggacgcacctgctgttggcttgttgttcaaggatggcaatttgtaagaaagatgtttggagagttgaatgtggaatcccttctggatttccgctcacagttatttgcaatagcatttttaatgagatgctcattagatatagctatgaaaaattactgcgccaggctaaagctccaagtatgtttttacaatccttcaaaaattttgtttctttgtgtgtgtatggtgatgataacttaattagtgttcatgaatatgtcaagccttactttagtggttctaaattgaaaagctttctagctggtcataatatcaccattactgatggtattgacaaaa

SEQ ID NO: 80418 - DNA, 147 bp, Glycine max
ctcgagccgctaacacacaagaattctttgatggaaattttccagtggattcttggttaccaatttttgtgaattgtctttatcctgtaagtcaattaccttcagaagctgtcgttgtaaatgtcacatgtggtagtggacgtggtg

SEQ ID NO: 80419 - DNA, 359 bp, Glycine max
cgatattctgtgttgcgattatgctagttttgatgggttgattaccaagcaagttatgagcaagatggcagaaatgataaacagtctttgtggtggtgatgaaaaattgatgcgtgaaaggacacacctgctgttggcttgttgttcaaggatggcaatttgtaagaaagatgtttggagagttgaatgtggaatcccttctggatttccgctcacagttatttgtaatagcatttttaatgagatgctcattagatatagctatgaaaaattactgcgccaggctaaagctccaagtatgtttttacaatccttcaaaaattttgtttctttgtgtgtgtatggtgatgataacttaa

SEQ ID NO: 80420 - DNA, 361 bp, Glycine max
gaaaaatcagagttgaacccacccacttcaccctcaacttgggagttgaaaaaatccaaaaataataataccaaaacattactattaatcaatcccatgatcacgataaatggatcaatcgatcacggatcgttgatttttagaacaagatcatcatcatagtataaaagctcaaaagctgtttgtgtgtatgttacggttgggccatcttgtccatctatccaaatttccccatcccgcaactaatttatttatttatttttcctttatttatcttctttctctggctcgagcatccaaaagggttgttttttttttttataagaagaagaggagagggaagatgatgatgatgacaatg

SEQ ID NO: 80421 - DNA, 232 bp, Glycine max
ggtaatactcttatgccagctttttctgttccacaggctactgccagatcttctgaaaatgcggaatcctctgcatgatctggaattcgtgttttctttcgcttgttcgtttgtttaattcaataaaggaaattaggcatgaccctcttgttgagtatgctctgcctatctgaaaatttccacacctcttttaattgtcgtaatgatgtgtgaagtgtgtgttattttaaaa

SEQ ID NO: 80422 - DNA, 364 bp, Glycine max
cttccaaggcgatgagcgtggcagcggagaagatagcgacggcggcgcgacgccaagccgtgtcgctaacggacgccgccgcctcgcgaatacggcagctgctacagcagcgtcagaggcccttcttgaagctgggagtcaaggctcgcggctgcaacggcttatcctacaccctcaattacgcagatcggaatttattttcgtcaatccaaattctaaaggtcagtgtggttgtggtgaatctttcatgacaacaggcagtagtggatcttctaagccatgaaatagttaaaattgctattcaacttgctgtggatcctcacgtaatgaagtcgtcctttcacgatttaattgatagatagac

SEQ ID NO: 80423 - DNA, 363 bp, Glycine max
gagaaatataaagagaggagatgtcgtctacaaggtcgtagaatgatgaggaagaataattataatatgcccaaatggatatctggaagtacatatttggatttgtataactgtttgtcataaatttttccattgagcttttccttgtttaaaacttttttaatctattatatttcctttatacttttttatatatttttaattttctgttttttattttatttttttatctttttatacttttttatttattcatttttttttttttgtttggctgctctttctttttatattttttttacttttttttatctattttttctttaattttttttatcttttttttctttttttctttttttc

SEQ ID NO: 80424 - DNA, 227 bp, Glycine max
ggctcgaggttggatttatgggcatgcctattgctggtccgttaaagaagattcctgtttgaaccacctcaatggataaaaagttgtagttgtttatcggtacttgatacatgatgaattcatccaagagacgactattacttttcattcgtctgccttataagcatctgctagagtcactaatttatacaatacactttatgaaacaatttaagttgatcaatcaa

SEQ ID NO: 80425 - DNA, 359 bp, Glycine max
cacctgctgttggcttgttgttcaaggatggcaatttgtaagaaagatgtttggagagttgaatgtggaatcccttctggatttccgctcacagttatttgcaatagcatttttaatgagatgctcattagatatagctatgaaaaattactgcgccaggctaaagctccaagtatgtttttacaatccttcaaaaattttgtttctttgtgtgtgtatggtgatgataacttaattagtgttcatgaatatgtcaagccttactttagtggttctaaattgaaaagctttctagctggtcataatatcaccattactgatggtattgacaaaactagtgcaactttgcaatttagaaa

SEQ ID NO: 80426 - DNA, 363 bp, Glycine max
gttctttcaatgtggagatattttgttggagatctcgtctgtgaagtttctaagatgacttctccctacattaaatgtacagtctctttcttcatagcatttggaaatttggctgatgacaccatcaattttgaggcttttccccacaagctggtgcaatttggagagattcaggaaaaagttgtattgaaattttcacaagaggaatttcttacagcttggtcaactcaggtgcgtcctacaacaactctgttggctgatgggtgtccatatttgtatgctatggtgcatgatagttcagtgtctacaataccaggtgattttgtcattggtgttaagttgacaaccataaacaatatgtgt

SEQ ID NO: 80427 - DNA, 357 bp, Glycine max
gtgctggttcacattcttcaggagattttcctgaaaaggaagatcaagaaaaacccaaaaagattgataccagattgagacaaagaatagatcctcaatacaatgaggttcaggctcagatggaaacaaatttgtttaaattgtctcttgatgatgttgaaactcctaaaggttctatgttggatcttaaaatttctcaatctaaaattgcacttcccaagaacacagttggaggaaccattctgcgtagtgatctattggcaaattttttgacagagggcaattttagagcaagtgttgatttgcagcgcactcatcgtattaaaggaatgattaaaatggtggccacagttggta

SEQ ID NO: 80428 - DNA, 328 bp, Glycine max
  unsure (1)..(328): unsure at all n locations
tgaaattatcgaatccttcaatcaatcccaattcggggggggcctttcacaacaagcaccttttggttcctcttttgtcgtagagcgcataatacacactatgcaccactggttccatctgtgacacatccaattacaaccacacacttatatgtgtnctgcaccatccaaaccaacaaggacaatcaaatctcaactgtaccagctgctcttaggctgaagctattacactggactgtaatcccaatggttcttactctcagattgtgggcggcagccggttcctgtgcgctttatgaccggcggcttattccatctacgtcatggg

SEQ ID NO: 80429 - DNA, 282 bp, Glycine max
tttttttttttttttttttttttttttttttttttttttttttttttttttttttttttttttgggtgtttagattttgtttttttttttttttccctctatttgttttttttttgacttcttttggatcttttttttttttaatttttctattttaatttttttctttttttttttcttttcttcttgtttttttatctttttttttttttgggtttttttttttttgtttccttttcctctttttaatttttttgtcttttattaccatttttctttttt

SEQ ID NO: 80430 - DNA, 205 bp, Glycine max
ctcgagcctaattcggttctactgtcaactgggaggggttattttgatgatggtattcacaaacactccaaaaatacaactactactaaaaaggtcaatcttattatcgattactatgactatgcaaaaaattcttatgaactattcattctaaccataccctattaatttaatttctatcacttcttctatctttttgttaacc

SEQ ID NO: 80431 - DNA, 115 bp, Glycine max
gccacggtgggctgttgcggatcgagccatggcggcgtgggaagacagggcacataatgttcattttcttggtcgtttgtcttctcacaatagaaagactgaattttctctcatg

SEQ ID NO: 80432 - DNA, 335 bp, Glycine max
gaaaaggaagatcaagaaaaacccaaaaagattgataccagattgagacaaagaatagatcctcaatacaatgaggttcaggctcagatggaaacaaatttgtttaaattgtctcttgatgatgttgaaactcctaaaggttctatgttggatcttaaaatttctcaatctaaaattgcacttcccaagaacacagttggaggaaccattctgcgtagtgatctattggcaaattttttgacagagggcaattttagagcaagtgttgatttgcagcgcactcatcgtattaaaggaatgattaaaatggtggccacagttggtattcctgagaa

SEQ ID NO: 80433 - DNA, 254 bp, Glycine max
aaagaatttaaccaaattggtaaaaaaaaaaaaaggaaaaaaaaaaaaaaaaaaaaaaaaaaaaaaaaaaaaaaaaaaaaaaaaaaaaaaaaaaaaaaaaaaaaaaaaaaaaaaaaaaaaaaaaaaaaaaaaaaaaggggcggcccccaactagggagctcgtcaccccggaaataaattccggaccggaccctgaaggcgtaccaattttccttaaaggggggcgaataaaagcttggcgaaaaaatggcaaa

SEQ ID NO: 80434 - DNA, 126 bp, Glycine max
  unsure (1)..(126): unsure at all n locations
taaagcacgcgaacacaagctaggaatccggctcgagcaaaaaaaaaaaaaaagaaaaaaaanaaaaaaaaaaaaaggagaaaaaaaaaaaagggaaagaaaaaggggcggccgccgacaagggag

SEQ ID NO: 80435 - DNA, 151 bp, Glycine max
cgcgacttcttgagaactgtaagagtctcaaatatctggttgatgagtgtgcttttgcatttgtgaactagtatgtaatattttattcacttaaataaagcgcattactatgtgcaatgagtgtgtttaaatattacaaaaaaaaaaacaa

SEQ ID NO: 80436 - DNA, 346 bp, Glycine max
atatgatactgggctaggggagcttgtataaatatatatgatgtgaaccatatctgtctgtacaaactcaaatacttttcatatatggtctggaaactattcatatcatgcaccctatgaagtatgctatcaggtactcttactgatgagactaagctctgctgactaccacaatgcccacattataggaatcctcatcacctgcttctttcctcataaattctagatcaaactccactgcctgatcctaccttttacttcttatgccgcatgtatgaactcaaatcatcacatgaatatgaccctttaatctatgaagaggaaaaaaacacacacatacacacac

SEQ ID NO: 80437 - DNA, 339 bp, Glycine max
ctcgagccgattcggctcgagtgttgtaactcgttcttcttcttttgttgttctgtgtttgtgtttgttttttctctcacctgaaaatgtcttgctgcggtggtaactgtggttgcggaagctcctgcaagtgcggcaacggctgcggaggctgcaagatgtacccagacttgagctacactgagtcaaccaccaccgagaccttggtcatgggagtggcacctgttaaggctcaatttgagggtgctgaaatgggtgtgcccgctgagaacgatggctgcaaatgtggaccaaactgctcctgcaacccctgcacttgcaagtgaggtgttgggagag

SEQ ID NO: 80438 - DNA, 156 bp, Glycine max
tgcacgcgtacgtaagctcgggattcggcttgggggggaatggtttttacttgtgaacaggtggctggggctggttttggtccctggaggtgaaagcggtcccccccaatctttcttttttaattggccccggtttctattccgcaatggcccaaa

SEQ ID NO: 80439 - DNA, 218 bp, Glycine max
gtacgtacgtacgtttacgcatcttcatgttagggtagaaagaactaagacctgcacataaagtagttattaacatcttttctgtacattctctagcgtgacatgtggctttaggtgttagattaggaattgaagattgaagaacgaagaagtagggttagtagaatttgtaggactcagttctgtagttatacatatgatgataattcttgctaaaa

SEQ ID NO: 80440 - DNA, 168 bp, Glycine max
gccacgtttataatatagacgagaagggagcacgtgtatatatgccggcgggagaggaggtcgtcgtacctattagggttaaggagatgtatactggcatacctgagaatcgactctctgtcacaattatagagtgtattatagcgaatggaaggacaataccccctg

SEQ ID NO: 80441 - DNA, 356 bp, Glycine max
ctcagggcacttcccgaagtgttaagagaatgcctctttctatagggggaggagctggtgcaaagaatgctattctcatgaatatgccaaatgctgttctttcaatgtggagatattttgttggagatctcgtctttgaagcttctaagatgacttctccctacattaaatggacagtctctttcttcatagcacttggaaatttggctgatgacaccatcaattttgaggcttttccccacaagctggtgcagtttggagagattcaggaaaaagttgtgttgcaattttcacaagaggaacctcttacagcttggtcaactcatgtgcgtcccgcaacgactctgttggctgat

SEQ ID NO: 80442 - DNA, 354 bp, Glycine max
gttgacaaccataaacaatatgtgtgcatatgggctcaatcctggtatttgaggttctcgtcttttgggcaccattcctcagtccatttcacagcaaactgtttggaatcaaatggcaacagtgagaacaccattgaattttgattctagcaagcagagcttttgtcaattttctattgaccttctcggtggaggaattttagtggacaaaactggagattggatcacacttatacaaaattctccaattagtaacttgttgagagttgcttcttggaagaaaggctgtttaatggtcaagattgtgatgtctgggaatgcagcagtcaaaaggagtgattgggcctcattggt

SEQ ID NO: 80443 - DNA, 358 bp, Glycine max
tcctcagtccatttcacagcaaactgtttggaatcaaatggcaacagtgagaacaccattgaattttgattttagcaagcagagcttttgtcaattttctattgaccttctcggtggaggaattttagtggacaaaactggagattggatcacacttatacaaaattctccaattagtaacttgttgagagttgctgcttggaagaaaggctgtttaatggtcaagattgtgatgtctgggaatgcagcagtcaaaaggagtgattgggcctcattggtacaagtgtttttaacaaacagcaacagtacagagcattttgatgcatgtaagtggacaaaatcagaaccacattcctgg

SEQ ID NO: 80444 - DNA, 355 bp, Glycine max
gcttggtcaactcaggtgcgtcctgcaacaactctgttagctgatgggtgtccatatttgtatgctatggtgcatgatagttcagtgtctacaataccaggtgattttgttattggtgttaagttgacaaccataaacaatatgtgtgcatatgggctcaatcctggtatttcaggttctcgtcttttgggcaccattcctcagtccatttcacagcaaactgtttggaatcaaatggcaacagtgagaacaccattgaattttgattctagcaagcagagcttttgtcaattttctattgaccttctcggtggaggaattttagtggacaaaactggagattggatcacactta

SEQ ID NO: 80445 - DNA, 363 bp, Glycine max
aaattgttcattgaaaaaaaaaaaaataaaggatcttaatgctaaaagaaaagcagttataaaaaaaattgaaaaaattaaaaaggggcttgtaatttcagagacaaatattcattcaaacaaaacaacttactgaatttatcgattgaattgaaatggttgtttcagtaaattgttcattgaaaaaaaaaaaaataaaggatcttaatgctaaaagaaaagcagttataaaaaaaattgaaaaaattaaaaaggggcttgtaatttcagagacaaatattcattcaaacaaaacaacttatgatagtaaaagggtagaattcgaaaaaaaaaaattgccgatattacaaagaagaagaaatg

SEQ ID NO: 80446 - DNA, 238 bp, Glycine max
  unsure (1)..(238): unsure at all n locations
cggctctagctcgagccgggggnngntngaaccggggggagattcaaaaaaaactaacatcaaactccaagaatccaaacaaactacataaaattttgacaagatgaaatataatactacaaagaatcattctcaaataaaaccaaaactaaaaattacctacaagacactatctatatcagagttctgatttttaaaaaaaaagccagatttaaaaaagccaaaaaaaaatgggaat

SEQ ID NO: 80447 - DNA, 256 bp, Glycine max
gtaaccgcacacttccactcaacctattatatatgttcttgaagatttaaaataatgggggcattttatataaggaggttttcaagaatgatgcatatatcatttcaagtattttattattatcacacattatctatttattttttttcattaccaaattactctttacctcatatattttacaattttttttatcaaattattaaaataaatttttttcttttctaatcattattatttattcatattatttata

SEQ ID NO: 80448 - DNA, 346 bp, Glycine max
aaatggcaacagtgagaacaccattgaattttgattccaaacagtttgctgtgaaatggactgaggaatggtgcccaaaagacgagaacctgaaataccaggattaagcccatatgcacacatattgtttggaatcaaatggcaacagtgagaacaccattgaattttgattctagcaagcagagcttttgtcaattttctatcgaccttctcggtggaggaattttagtggacaaaactggagattggatcacacttatacaaaattctccaattagtaacttgttgagagttgctgcttggaagaaaggctgtttaatggtcaagattgtgatgtctgggaatg

SEQ ID NO: 80449 - DNA, 347 bp, Glycine max
ggtggctcctgaagacaaggcgagtttatggtcacaacttcattatgtttcgtgtaataatctggaaatgcaagaagcttatcttgtcaatctcgtaaatgtgttacgagaactgtatttgcacagtccagaggaagctcgccaattgagaaggaaagctctctctcgtattgaatggctgcaaaaagctgatgtgcctaccatagcacagattgaagagttccattcgatgcagaggatgatgaatgctcctgattcaaatgataatattgatctactgttgagcattgatttgttgggtttacaaggagcaggcaaagcttttccaaacaagattgtttttgatg

SEQ ID NO: 80450 - DNA, 354 bp, Glycine max
tggagaaagattcagagtgcatcagctagtttttctaaaacaattattgttcacaaacagttgcatctttcttacagatgaatttgttttatgaaatgtctagctaaaaacaaaaaaagagggagaagatatttctgtagaagggtacccttgatgttcaaacatcaaaggattgtaaagttagcgttttttaagttgtattagtacttttcaacttaccatactttcatgtgtgtgattctataatgatgcttatgtccttagttcccattgaatatatcccttgtcaccttctaaattctaatcactaattccatctaccacaaaattaatttgcaaacccataatgattta

SEQ ID NO: 80451 - DNA, 346 bp, Glycine max
gcagcgccacgtcagcagcggaactactaatcccgtgctccgcttccccacggtgcgccccctccccttcgcgcgcctcgtcgccgcctcccgccgccgcctcttcctctccgactgcgccgaccgccgatccgacgacgacggagatggtgacggcgactccggcgagtgcgcgtactcgcgggcggtgctcgtgctcgacatggtctggaacctcgccttcgtcgtcgtcgccgccggcgtcctcctctccacgctccgcgagcggccgtcgacgccgctgaggctctggctctgcggctacgccttcgagtgcgtccttcacatggccttcgtctactttgag

SEQ ID NO: 80452 - DNA, 355 bp, Glycine max
taagttgacaaccataaacagtatgcgagcatatgggctcaatcctggtatatcaggttctcggcttttgggcaccattcctcagtccatttcacagcaaactgtttggaatcaaatggcaacagtgagaacaccattgaattttgattctagcaagcagagcttttgtcaattttctattgaccttctcggaggaggaattttagtggacaaaactggagattggatcacacttatacaaacttctgcaattagtaacttgttgagagttgctgcttggaagaaaggttgtttaatgggcaagattgtgatgactgggaatgcagcagtcaaaaggagcgatagggcctcattg

SEQ ID NO: 80453 - DNA, 349 bp, Glycine max
aaaaaaaaaaaaaaaaaaaaggaaaaaaaaaaaaaggaaaaaaaaaaaaaaaaaaaaaaaaaaaaaaaaaaaaaaaaaaaaaaaaaaaaaaaaaaaaaaaaaaaaaaaaaaaaaaaaaaaaaaaaaaggggggggccccctattaagaggctcttcaccccggaattaaatttgggaccggttcttgggggggaacaaattttccttatggggggggaatttaaggttgggggaaaaaagggtaataatttttccctgggggaaaatgatatccgttaaaaattccaaaaaaaataaaacccggaagattaaagtgtaaaccctggggggccaaaagggggggctacct

SEQ ID NO: 80454 - DNA, 346 bp, Glycine max
ctcaatcctggtatttcaggttctcgtcttttgggcaccattcctcagtccatttcacagcaaactgtttggaatcaaatggcaacagtgagaacaccattgaattttgattctagcaagcagagcttttgtcagttttctattgaccttctcggtggaggaatcttagtggacaaaactggagattggatcacacttatacaaaattctccaattagtaacttgttgagagttgctgcttggaagaaaggctgtttaatggtcaagattgtgatgtctgggaatgcagcagtcaaaaggagtgattgggcctcattggtacaagtgtttttaacaaacagcaaca

SEQ ID NO: 80455 - DNA, 359 bp, Glycine max
cgcgtcgaagccttcatacaaaagttcaaccaagagatgaggctgcaaagacaacaatccttagaacagtacatgcagatgattaaccgcggtgccgcttaatctcaacctcaacataatcaatattttcattttacagaacaaaaaaacatatatagtgtaagtatttctgcaggtgtagacagtaggggtatttattttattgccatatattagtttatggttgggttaggctcatcatcattatttctttaatttgtttgttttgtgcctttatatgctccacataccaaaaatgtggttcatgttcaatatcaattagctagctagctagaaaacaaacacaccaaaaaaacact

SEQ ID NO: 80456 - DNA, 366 bp, Glycine max
ccaagcgcagccacaacatgcactacggttatttactattacaccctatggcaggattcaccagcgcagacgctttagatggctctggacgctctccaatcacccagaactggcactgcatcgtttagtccctttgaagaaaccaacctaagtgacttggagacaccgcggaccaaagagaaagcgtgctaagcgtagccgcatggaccagcaactgcgacactcttcatgcaccgaggaagagtacctcgctctctgtgtcatcatgctcgctcacggcggcgccggcggtgtccccgccgccaagcctgctgtctccgacaacaattacgcgccgctacccgccgacaaactgagctacaaatg

SEQ ID NO: 80457 - DNA, 343 bp, Glycine max
aaaggacacacctgctgttggcttgttgttcaaggatggcaatttgtaagaaagatgtttggagagttgaatgtggaatcccttctggatttccgctcacagttatttgcaatagcatttttaatgagatgctcattagatatagctatgaaaaattactgcgccaggctagagctccaagcatgtttttacaatccttcaaaaattttgtttctttgtgtgtgtatggtgatgataacttaattagtgttcatgaatatgtcaagccttactttagtggttctaaattgaaaagctttctagctggtcataatatcaccattactgatggtattgacaaaac

SEQ ID NO: 80458 - DNA, 348 bp, Glycine max
ctcgccaattgagaaggaaagctctctctcgtattgaatggttgcaaaaagctgatgtgcctaccatagcacagattgaagagttccattcgatgcagaggatgatgaatgctcctgattcaaatgataatattgatctactgttgagcattgatttgttgggtttacaaggagcaggtaaagcttttccaaacaagattgtttttgatgataagcttgtgttggctaacacacaagaattctttgatggaaattttccagtggattcttggttaccaatttttgtgaattgtctttatcctgtaagtcaattacctttagaagctgtcgttgtaaatgttacatgtg

SEQ ID NO: 80459 - DNA, 346 bp, Glycine max
caattttgaggcttttccccacaagttggtgcagtttggagagattcaggaaaaagttgtattgaaattttcacaagaggaatttcttacagcttggtcaactcaggtgcgtcctacaacaactctgttggctgatgggtgtccatatttgtatgctatggtgcatgatagttcagtgtctacaataccaggtgattttgtaattggtgttaagttgacaaccataaacaatatgtgtgcatatgggctcaatcctggtatttcaggttctcgtcttttgggcaccattcctcagtctatttcacagcaaactgtttggaatcaaatggcaacagtgagaacacca

SEQ ID NO: 80460 - DNA, 289 bp, Glycine max
attagatatagctatgaaaaattactgcgccaggctaaagctccaagtatgtttttacaatccttcaaaaattttgtttctttgtgtgtgtatggtgatgataacttaattagtgttcatgaatatgtcaagccttactttagtggttctaaattgaaaagctttctagctggtcataatatcaccattactgatggtattgacaaaactagtgcaactttgcaatttagaaaggtagcagattgtgattttctcaagagaaactttaagcagatgtctaatggtttat

SEQ ID NO: 80461 - DNA, 346 bp, Glycine max
gaagaagaatggtagtacttcttgttcctctacccttgtaacgccaaaccaaccaaaaacataacataaccaatgttccatttccacatacaacaacattcattgacaatccaataacgccaataacccccccttttggcctttgttttgttcctcgcaatccctccattattttcccttaggattgggattgggtgttgttgagtcaaaatctgttaacctcacccagatgcagactctgggtttgttggttgctcctgttctcggtttctacctgaggttccttcgtttctctcttcgcttccttcttctcatgttcatggatttcccttccaccttcaagttc

SEQ ID NO: 80462 - DNA, 280 bp, Glycine max
gaaatagtataaactttgtcagttagtactcgtaggttttcatgaggaaaaatacttgtacttcggggcatgccactcggtttggaacttacttgagacttgtgttgatcaccatggggggtgtgggagcggcctgtgcataacagggtgacctggacactagttgcctctttacctaggtgcgagcgacatgtggatatgctgaggctatttactgcttgacggaaccatggtcattgctagagtctgtgcaaaatcgtgcttcgttgacagcatcaca

SEQ ID NO: 80463 - DNA, 352 bp, Glycine max
gaagaaacttaatcgatcatcacttcacttcactaatacatcatggcagacgagacccagaacaagtatgagagctctgaggttgaggtccaggatcgtggtgtttttgactttctcggtaagaaaaaggatgaagaagacaagcctcatcctcaggaggaggtcatcgccaccgagtttcaaaaagtcactgtctcagaccaaggagagaacaagcacagcctcttagaaaagcttcaccgatctgacagcagctctagctcttcaagtgaggaggaaggagaagatggagagaaaaggaagaagaagaagaaggaaaagaaagggctgaaagagaagatcgaggagaaaa

SEQ ID NO: 80464 - DNA, 360 bp, Glycine max
agcataatgagtcatgtccaacaatacaaggactatgaagtactgttacataacccggtgcaacatggcaacaacaggctcagaaccttggttcttttgtctcatgttcgtcttactgagactttttctttctttcaaacataaaaaaacaaacttttgagtcttgcttttttattgtttccttgggctttctttgtttcttggggccagaaaaaatgggtataggggagacgagttcgagccagagtttcaatctgcaccatcgtgaagtgaagaataagcaggaagcgttcataggggtatccaaaagtgggcatggcaatcaaggctgggcaaggtgaagagcaacataagttcgtg

SEQ ID NO: 80465 - DNA, 225 bp, Glycine max
gcgtacgtaagctttaatttcggtgagagtgtctactgcgtatgttgtaatagtcaggcgggattttaaatgggtcaactttggaccttgtttgaacttgcaagcatgtggataaccaaggagtcctacgcttgcatggataattgtgcaattgaaaatttattatgatgttatgaagatttatggattcatggacaagggtcattttactgtgttgtagggggg

SEQ ID NO: 80466 - DNA, 197 bp, Glycine max
  unsure (1)..(197): unsure at all n locations
agaggnatgacgacgcacgcacgcgtacgtacgctctgaattcggctcgcgttgtctcctttaaataaatggatagatataggacgcgcgtgttatttacgagggcggctccctatatcccctctattatctcaagggcttgctcaattttgccgattcacaatacatgtctgtactttcttattacccccccaaaa

SEQ ID NO: 80467 - DNA, 357 bp, Glycine max
cactccaaggagcacccaagacggcgagagacgggattctcaggctccagactatttggagctggggaagacggcggaagagctgtcgacgacgcggcacccgcgtttatcagccattacgccaggccgaattttgagtttgctacacgcgggggaggcctcgttcccggacgactaccagtatacgtggagggagagggagagcatcctgcggtacgcggcgggcagacaggtcgcgcagggcgtggatgaaccgctggcgctcgtccctgcgccgtcgattgttggagacgagatctggctcctgagaggatgcccggcaccggttgtgctgcgtcgggacactagaacggtaga

SEQ ID NO: 80468 - DNA, 358 bp, Glycine max
  unsure (1)..(358): unsure at all n locations
gattgaagagtttcattcgatgcagaggatgatgaatgctcctgattcaaatgataatattgatctactgttgagcattgatttgttgggtttacaaggagcaggtaaagcttttccaaacaagattgtttttgatgataagcttgtgttggctaacacacaagaattctttgatggaaattttccagtggattcttggttaccaatttttgtgaattgtctttatcctgtaagtcaattacctccagaagctgtcgttgtaaatgttacatgtggtagntggacgntgggtttacccaccactgcttggattagttctgcagttaacaatcgctcctcagatattaacaaaaagatt

SEQ ID NO: 80469 - DNA, 323 bp, Glycine max
aagagctatgacggcgcatggacgccttccgtaggttcggaattcggttcgagtttccccacaagctggtgcagtttggagagattcacgaaaaagttgtattgaaattttcacaagaggaatttcttacagcttggtcaactcaggtgcgtcctgcaacaactctgttggctgatgggtgtccatatttgtatgcaatggtgcatgatagttcagtgtctacaataccaggtgattttgtcattggtgtcaagttgacaaccataaacaatatgtgtgcatatgggctcaatcctggtatttcaggttctcgtcttttggca

SEQ ID NO: 80470 - DNA, 223 bp, Glycine max
gacgaggcgagttacagaagacaatggaaatgctccggggtgctaggattagcgaattcactgaaattaggaacactttttaagaggctttcaaatatggtcaacatagatattctctctattcatgggtactttgggccagcagatttcctcaggatggccgacacttaagggccggggggatttattcttggaccaagaaggggcttatagggagagcttc

SEQ ID NO: 80471 - DNA, 332 bp, Glycine max
ctcgtttttctcgagccgattgccgttcttctgccgctacactctcttcccgcgctccccagattttaaaaacccatttccgttttcgccttccgatcaaacccttttggtctcaccgcgagtttttgcgcaatgccgttaccctgaatctaacacccaattagatttcacacactatctatctactaccacatcgcccgaaaaaaaaaaacccttacttcttcgaatggggtccggcgcccttaacccctctcatgcgccgcgcattctcgcccgacgaccttcatcatctcatccgaacttttgtccggcacaccccctttcccctctca

SEQ ID NO: 80472 - DNA, 360 bp, Glycine max
ctcgagccgcatcaataaagaaaaattcagaacaggcgaagacccaagcacagaaagaaaaatacagaacgaaaagatccttccagaattactcacagaactaacccaaagggcaccaatacgaacgcatccacgagtaagaatccagacaccagacatcgaactaccagacgcaccaatcaaggaagaaagccccacaccatctcacaccaaacaccaagaactgccaagagacttatacatcatgacggcagtgatcctattcgacggaaagaacccaagaggtcttagcgaactttttcaagtagccgaagcagaatttaaactcagcccagttttccaatcaaacaatgaagaaag

SEQ ID NO: 80473 - DNA, 355 bp, Glycine max
gataatattgatctactgttgagcattgatttgttgggtttacaaggagcaggtaaagcttttccaaacaagattgtttttgatgataagcttgtgttggctaacacacaagaattctttgatggaaattttccagtggattcttggttaccaatttttgtgaattgtctctatcctgtaagtcaattaccttcagaagctgtcgttgtaaatgttacatgtggtacttggacggtgggtttacccaccactgcttggattagttctgcagttaacaatcgctcctcagacatcaacaaaaggattcgcacagcacttgggaaaggtaagaaaattgtttttcttactagagttg

SEQ ID NO: 80474 - DNA, 352 bp, Glycine max
gattgaaccagacatgaattcaaggtttcagcttttgagtaccactaccaatggtgattttgttcaagggaaagatctcgcaatggttaaagttaatgtagcatgtgctgctgttggcttgacatcaagttacactccaactccattgttggaatctggtttgcaaaaagacagagggttaattgtggagtattttggaaggatgtcttacgttgctcataacgttaatcagccccaagagaaagatttgttagagggaaatttttcctttgatattaaatctcgctctagattggaaaaagtttcctctacaaaagcacaatttgttagtggaaaaaccttcaaatatgat

SEQ ID NO: 80475 - DNA, 357 bp, Glycine max
ttacaactcaagttctctctctttccttccttccttcccatcttcttccccaaacttccttgaaacttcaaaccctaaactaaataaaacttttaattcccccatcaacccctcatctaattactattattttattcaaataataattattaaaaaaagcattactcaaactcactcatttttttctgaaattttctttctttctttctctggttcttaaaaatgggcacaccaaacccaacccaacccgacaatgggccctgattcattccgccggcaatgggaaagcccggagaacaccaccttctgccttccggtgtcgccgccgaggatccgcggcggaatgcggcgtctccg

SEQ ID NO: 80476 - DNA, 347 bp, Glycine max
cggaattcggttcgagcctcttttttccattttctctctctagataggtaaaaggggttactccgccgggggtaaggtttccgatcttaacggcggtaagggcggtcggcgttgccgttactgttcttctgctgacgtgggccgtccatttcagaggaggcctcgatctcatctgtgataacaaagatctcatctttgatgctcattcagagttcttggagacataccagtttgagaacctcttcgcgaagcgcaattcgccggtggcacatgcagtcggattctgggactaccgttctttcatcactgctgcagcactgtatcagcctcttggctttggcaccact

SEQ ID NO: 80477 - DNA, 70 bp, Glycine max
acggccagcacgcgtacgtaagctcggaattcggcttgagctcattgtgctatatcacagcaaccataca

SEQ ID NO: 80478 - DNA, 352 bp, Glycine max
ctcgagccgctctattgtaaatttgtaataccgttatcttggttccatataaagcagaaaatggctgtatctctgagatgcagaaacagctcctcccacctcctcctaactcgcttcctccactcagtgagtctccctcgtcgaaggtggttgcaaaccgtagcctacgaagaattgcgagctcaccctgacaaaccctacacctcaacggccgttttcatccatggctttttgggatcctccagaaactggagatctttctctcgcaacctcttggcctctctctccaactcctctccctcttccaattggaggacggtgatgttggatctgaggaaccacggacaatcga

SEQ ID NO: 80479 - DNA, 379 bp, Glycine max
cttaggctcggaattcggttcgagtagaaagttagcagattgtgattttctcaagagaaactttaagcagatgtctaatgttttgtgggtggctcctgaggacaaggcgagtttatggtcacaacttcattatgtttcgtgtaataatctggaaatgcaagaagcttatcttgtcaatctcgtaaatgtgttacgggaattgtatttgcacagtccagaggaagctcgccaattgagaaggaaagctctctctcgtattgaatggttgcaaaaagctgatgtgcctaccatagcacagattgaagagttccattcgatgcagaggatgatgaatgctcctgattcaaatgataatattgatctactgttgagcattgat

SEQ ID NO: 80480 - DNA, 58 bp, Glycine max
aaaattaagaagtgttcgtaacattaatcattatgtaagttattaatgtcttccatta

SEQ ID NO: 80481 - DNA, 89 bp, Glycine max
gagctatgacggcgcatgcacccctacctaaacttcgaaattcgcttcaagaacaaaaagttccaattttgtccattgcatataaggcg

SEQ ID NO: 80482 - DNA, 267 bp, Glycine max
ctcgagccgaatcggctcgagaaatgataatattgatcggactgttgagcattgatgggttgggtttacaaggagcaggtaaagcttttccaaacaagattgtttttgatgataagcttgtgttggctaacacacaagaattctttgatggaaattttccagtggattcttggttaccaatttttgtgaattgtctttatcctgtaagtcaattacctttagaagctgttgttgtaaatgttacatgtgatagtctacggggggggg

SEQ ID NO: 80483 - DNA, 350 bp, Glycine max
  unsure (1)..(350): unsure at all n locations
gaaaatgccaaacaatctagcatagcatgaaaacattcattgctcagtcgtcatacttctacaactaacatatatatgtcgaaacaaaaaagtctaacatgtgttgaatctcaatatccaatagtattatttaccagaagctgcagcgaactcaaaactaaccacgatcacctgcctccaaacctgtcgattctccggcggcgcaactcatccaaaggaagcccatcagaacgggagctcctctgaaaagaggacactccattgacaaccctaatcgtnccacacatctcacacactctcagggaaccaatgntgttgtcataggtacacgtctggcatctncacgccct

SEQ ID NO: 80484 - DNA, 360 bp, Glycine max
atcatcaaacccctcgaaataggaacactacagaattagaagcacagcagagacagactcactcacacacacacaacgttgttactttgtgagagagagagagaaagagattggttgtgttctgctactatggcgagcaacagagagagagaagaatcgctgacattcacaatcccttcttcctcttcccattcttcccccatcaccgtctccgaccaactcgacagttacctcgccgaccccagaagcgcctccggaagcttccagaacgacggccttctctcctccggagacgcctccgccgccgatcccgacttcggtttctcccgccccgatttccggcagagccccctcgtcggc

SEQ ID NO: 80485 - DNA, 353 bp, Glycine max
cattggttccctgactgaaacgtagccattctcctaggggatcgatattacaaaaatatacactacctaaaaaaaaaaaaaaaaaaaaaaaaaaaaaaaaaaaaaaaaaaaaaaaaaaaaaaaaaaaaaaaaaaaaaaaaaaaaaaaaaagggggggcccccctttttttttttttttttttttttaaaaaaaaaaaaaagggcccattaaaaaaaaaaaatttaaaaaaacccaaaaaacataaaaagggttaaaaagggaaaaaaagggtttaaaaaaaaaaaaaatttttgtaaaatttaaaccataaggaaaaaggctcccctatattaagggaatcaaatgcctgcac

SEQ ID NO: 80486 - DNA, 352 bp, Glycine max
ccttcgacttcaacactcctactcctactccactcactctctttctctttcccttgctagcttccttcctttaattttttccaaatttatctttccttaccatcaatgcctatggcaccgccaatattgctgccattctttctgtcctttctttctctctgcctcctcatcaatgcaaacggagtgatgcgttcttttcaagagaagaagatattcaacgtgcaaacgttgcagaacaaacaccaacttggtaaccaggcttgcctcctcccggaatcaagaaaggagaaaggtgctattgtactggaaatgaaggacagaggacattgctcagagaagaaaattgattgga

SEQ ID NO: 80487 - DNA, 147 bp, Glycine max
gaagagctatgacggcgcatgcacgcctaccgaaagttggaaattcggttcgagggcatgacctttttgttgagtatgctctgcctatctgaaaatttccacacctcttttaattgtcgaaatgatgtgtgaagtgtgtgttatttt

SEQ ID NO: 80488 - DNA, 360 bp, Glycine max
cctgctgttggcttgttgttcaaggatggcaatttgtaagaaagatgtttggagagttgaatgtggaatcccttctggatttccgctcacagttatttgcaatagcatttttaatgagatgctcattagatatagctatgaaaaattactgcgccaggctaaagctccaagtatgtttttacaatccttcaaaaattttgtttctttgtgtgtgtatggtgatgataacttaattagtgttcatgaatatgtcaagccttattttagtggttctaaattgaaaagctttctagctggtcataatatcaccattactgatggtattgataaaactagtgcaactttgcaatttagaaagtt

SEQ ID NO: 80489 - DNA, 362 bp, Glycine max
gtgattgttgtgactcgttcttcttcgtcgttatcttctgtcttttgttgtttgcgtgtttgttttttctctcacctgaaaatgtcttgctgcggtggtaactgcggttgcggaagcgcctgcaagtgcggcaacggctgcggaggctgcaagatgtacccagacttgagctacaccgagtcaaccaccaccgagaccttggtcatgggagtggcaccagttaaggctcaattcgagagtcgctgaaatgggtcatcccgctgtgaacgatggctgcaaatgtggagctaactgcacctgcaacccctgcacttgcaagtgaggtgttggagagctaaagcttcaagcagaaatggccctta

SEQ ID NO: 80490 - DNA, 346 bp, Glycine max
ctagagattgtaacgcgcttctcaattctgtaggcggctactattaaaggagacatggtgactgctcaatttgttttcgggcttaccagcaaccacacaattacttggtgtggcccccacgcccacatctacatcggtaaccttaacttggattcgaggatggagtatgtgaactttggtgccaccgttgtaatgagttcaaggttggataatgctgaagaccagagagaagccatgaaccaaaccatgtaccatcattaccactctgatgactactagtaactagtgttactggacttaaactcttcacatacatgactgatctatatatatatatatatatata

SEQ ID NO: 80491 - DNA, 354 bp, Glycine max
agctggtgcagtttggagagattcaggaaaaagttgtattgaaattttcacaagaggaatttcttacagcttggtcaactcaggtgcgtcctgcaacaactctgttggctgatgggtgtccatatttgtatgctatggtgcatgatagttcagtgtctacaataccaggtgattttgtcattggtgttaagttgacaaccataaacaatatgtgtgcatatgggcttaatcctggtatttcaggttctcgtcttttgggcaccattcctcagtccatttcacagcaaactgtttggaatcaaatggcaacagtgagaacaccattgaattttgattctagcaagcagagctttt

SEQ ID NO: 80492 - DNA, 204 bp, Glycine max
gtctcacttcaagggcaagtaccatgatgagcttagcgccaatgctacgtacattggcgctcctgcaaagggtattcttgctgctgatgagtcaacagggacaattggcaagcgtttggccagcatcagggtatagaacattgaatccaacatgcgtgctcttatggagctgcttttcactgctcctggtgttctcaatatctc

SEQ ID NO: 80493 - DNA, 345 bp, Glycine max
ctcgagccgattcggctcgaggatgataacttaattagtgttcatgaatatgttaagccttactttagtggttctaaattgaaaagctttctagctggtcataatatcaccattactgatggtattgacaaaactagtgcaactttgcaatttagaaagttagcagattgtgattttctcaaggaaactttaagcagatgtctaatgttttggggtggctcctgaggacaaggcgagtttatggtcacaacttcattatgtttcgtgtaataatctggaaatgcaggaagcttatcttgtcaatctcgtaaatgtgttacgagaattgtatttgcatagtccaga

SEQ ID NO: 80494 - DNA, 390 bp, Glycine max
gcacgcgtccgtaagctcggaattcggttcgagctcgagccggtaagaaagatgtttggagagttgaatgtggaatcccttctggatttccggtcacagttatttgcaatagcatttttaatgagatgctcattagatatagctatgaaaaattactgcgccaggctaaagctccaagtatgtttttacaatccttcaaaaattttgtttctttgtgtggtatggtgatgataacttaattagtgttatgaatatgtcaagccttactttagtggttctaaattgaaaagctttctagctagtcataacatcaccattactgatggtattgacaaaactagtgcaactttgcaatttagaaagttagcagattgtgattttctcaagaga

SEQ ID NO: 80495 - DNA, 296 bp, Glycine max
  unsure (1)..(296): unsure at all n locations
gaatgctcctgattcaaatgataatattgatctactgttgagcattgatttgttgggtttacaaggagcaggtaaagcttttccaaacaagattgtttttgatgataagcttgtgttggctaacacacaagaattctttgatggaaattttccagtggattcttggttaccaatttttgtgaattgctctatcctgtaagtcaattaccttcagagctgtcgttgtaaatgttacatgtggtagtggacgtggtggnttttcagctagtcattacattaccattactgttggtatt

SEQ ID NO: 80496 - DNA, 273 bp, Glycine max
atttgtttctggggatggtgaagagatgacattgattccgggaaccagtgttgaagaggcttacaacaagctaatagttgaacttgagaaaagtgttcccacattttgttggcattgaatgtcccaaggatgaaaaacttcctcgtcgcaaaatttttgacaaacctaagacgcgctgcttcactatttccctatggagtttaatcttgtggtccgtagaagtttttaaattttgtgaggttcattatgaagaaaagggacaagcttagttgt

SEQ ID NO: 80497 - DNA, 308 bp, Glycine max
aatgaagtcatggaaatagctttagataggaaattggagcagcaaatttataatgccataaatcctcgcttccttctgcaactgacaaatatactatttaaagagatttcatctgtcaatggttcagattatggacccaacgatagagatgttacagctgttgatggggtttgtgggtttttgaatgttacttcaacaaactgccacttgaacggattatacagtgctagcttacagaactgaacttgttccaacactttggaattttatgaagcggtgtcatgagaaccaaaaatggtcattacact

SEQ ID NO: 80498 - DNA, 355 bp, Glycine max
ctcgagccgaatcggctcgagttttgttggagatctcgtgtttgaagtttctaagatgagttctccctacattaaatgtacagtctctttcttcatagcatttggaaatttggctgatgacaccatcaattttgaggcttttccccacaagctggtgcagtttggagagattcaggaaaaagttgattgaaattttcacaagaggaatttcttaagcttggtcaactcaggtgcgtcctgcaacaactctgttagctgatgggtgtccatatttgtatgctatggtgcatgatagttcagtgtctacaataccaggtgattttgttattggtgttaagttgacaaccataaacaa

SEQ ID NO: 80499 - DNA, 329 bp, Glycine max
ctgaacctttacacacgagcactagaacagatttatgcgatggcgcttgctaagaaggtggctgccttcgatcctcatgacctgttaaggtttttgagttagagctacaccttacctaatttccgcagaatcaactctgggaaccaatctgtttaagaaaaaacatatggcttcgaacagaatggcagcgatgtcaacggtaacgggaccgtagcaacggactggctaagattcagacgcacactatgcatagcggaatatgtcacgactacagcagaccaaccgcaaaggctcaaaccatagatgagctaaactcgctgcagaagaag

SEQ ID NO: 80500 - DNA, 356 bp, Glycine max
atttggcacagtggcaaattaaggaataagttaaacaattaaaaactcaaccaaagaataaatagtagattttgtagcctttgtagacaaccacacctaatgtgtacaatggaccgatggagaaaccgaatttaattgtttaacttattccttaatttggcacagtggcaaatttgtgccttggtgacagttggtcatagattcgaatctagaaaagtctctttgcatatgcaagggtaaggttgtgaataatgacccttttccataacttcgcatagcgaggagccttcagacattggggtatactaattttatcccttaatttgggacctcattgtcactttttaaccttgcac

SEQ ID NO: 80501 - DNA, 351 bp, Glycine max
ctcggtggaggaatcttagtggacaaaactggagattggatcacacttatacaaaattctccaattagtaacttgttgagagttgctgcttggaagaaaggctgtttaatggtcaagattgtgatgtctgggaatgcagcagtcaaaaggagtgattgggcctcattggtacaagtgttttaacaaacagcaacagtacagagcattttatgcatgtaagtggacaaaatcagaaccacattcctgggaattgatcttcccaatagaggtatgtggtcctaataatggttttgaaatgtggagttctgagtgggcaaatcaaacttcatggcatttgagtttccttattga

SEQ ID NO: 80502 - DNA, 301 bp, Glycine max
ccttttgttatatgcagttcttccctgcgccctataatgatgaaggatggggtccatatgcatatttccgggcaatggaggaatcacgagcgaatgcaaatattaatcgggaattaccagttgggcaggccatggaggatcgggtaacgaatcaagaaccaaggagaaatggtgataccacctttacccttactcttaccgtagcccaaccttggagccatggaaatgggacagaagtaatagtcttctatagcactaatcttctccctagctacctagttccttacttttgtgtatactt

SEQ ID NO: 80503 - DNA, 302 bp, Glycine max
aaaaaatttaaatttaaaaaaaaaaaaaaaaaaaaagaaaaaaaaaaatttttttttgggctataatatttattataaacctaaaaatataaaaataatataaaatatattaatttaatatttaataaatatttaaaaaaaaaaaaggggccgccccccccctttttgtcctctccccccttaatttattttggtcccgtccttttggtgttcccattttttcttttagtggtttcttttaaactttgccgaatcctatgtaaaactttttttccttgggaataatttttttacccccttcc

SEQ ID NO: 80504 - DNA, 316 bp, Glycine max
ggatgattaatgctcctgattcaaatgataatattgatctactgttgagcattgatttgttgggtttacaaggagcaggtaaagcttttccaaacaagattgtttttgatgataagcttgtgttggctaacacacaagaattctttgatggaaattttccagtggattcttggttaccaatttttggaattgtctctatcctgtaagtcaattacttcaaaaagctgtcgttgtaaatgttacatgttgtaatgggacgtgggggtttccccccccattttttggttttttttgtagttaaaaaatttttttttta

SEQ ID NO: 80505 - DNA, 347 bp, Glycine max
ccttcaatacccaaaacatcttgttttgtgtctttcgttctttttctctcaacaatggatttccacaccctctcaaggaagcaactccagaccctctgcaagaagaacaagatccccgccaacatcgccaacgttgccatggctgacgctctcgctgctctcaacaaagttgaaggattggtgattttttgaatccaatcgagggggatctggaaccccaagtgttaatcatcgtacggctgttagaacctcaactcaaaggaaaacagtcagagaagaagcagaaggttcgaaggtggaggcctcgacccggcgggttagagttgcagaagaagtggttgagctag

SEQ ID NO: 80506 - DNA, 114 bp, Glycine max
aagctgcaagcacaaaaggcactaagcgagaatacccgagcttgtcacacctgccagaaggaatcagacacactcctaaaatgcacacgatgcggcattagttggactgcaata

SEQ ID NO: 80507 - DNA, 348 bp, Glycine max
caacagttcatagcattttgatgcatgtaagtggacaaaatcagaaccacattcctgggaattaatcttcccaatagaggtatgtggtcctaataatggttttgaaatgtggagttctgagtgggcaaatcaaacttcatggcatttgagtttccttattgacaatcccaaacagtctacaggtttgatattctcttgggaatctctcaagatttgaaattgctggtaatactcttatgccagctttttctgttccacaggctactgccagatcttctgaaaatgcggaatcctctgcatgatctggaattcgtgttttctttcacttgttcgggatgttaattcaat

SEQ ID NO: 80508 - DNA, 179 bp, Glycine max
ctgaaaatgcggaatcctctgcatgatctggaattcgtgtttcctttattgggtgaaacaaacgaacacacgaaaggaaacacggcatgaccctcttgtagagtatgctatgcctatctgaaaatctccacacctcatctaattgtcgtaatgatgagtgaagtgtgtgatattttaaa

SEQ ID NO: 80509 - DNA, 351 bp, Glycine max
ccaatatattccattctctctgtgtatttccctacctctcccttcaagatgcagatcttcgtcaagaccctcaccggcaagaccatcacccttgaggtggaaagctctgacaccatcgacaacgtcaaggccaagatccaggacaaggaaggaatccccccggaccagcaacgtctcatttcgccggaaagcaacttgaggacggccgacccttgctgactacaacattcagaaggagagtactcttcacctcgtcctccgtctccgtggtggcatgcagatcttcgttaagacactcaccggcaagaccataaccctagaggttgaaagctccgacaccatcgataacgt

SEQ ID NO: 80510 - DNA, 356 bp, Glycine max
tgttaaccaggtcctcaccagcttttaaatacttaaatttcaatcaatcccaattttctcacattccctttttgccctttctatctctctcgtctttctcccacaatgaacgatcttctaacggcatgcctatcccctaatgtttcacgccaaagctaagggaagtcctattttaatatttacaaacttatgagatttttacagaagctgtattagaaattctttatttgcaatatgtattgaatgcagttagacccttaactttgatttgtacaacgaattgggctgtaaattcaatccttcaattgactgttactgggtcacaaaaactgaatacctgtgcactaatgaaaatt

SEQ ID NO: 80511 - DNA, 354 bp, Glycine max
ggcagaaagcaggctcatcctagagttttaaaaatggcagcagcctcctccatgggtctctcttccccatccttggctggcaaggccgtgaagctgggcccatcagcccccgaagtcgggagggtcagcatgaggaagaccgtcaccaagcaggcctcctccggaagcccatggtacggcccagccgcgtcaagtacttgggcccattctctgcgagcccccgtcctacctcactggcgagttcccaggtgactacggctgggacactgctgggctttcggccgacccagaaaccttcgccagaaaccgtgagctcgaagtgatccactccaggtgggccatgctcggggcctt

SEQ ID NO: 80512 - DNA, 216 bp, Glycine max
caaatagcaatcaaacacacaaacatggaagaaacatgtagtcgtgctggttttgggaagaaatttactaaagcaaagccttatttgttaaccgggggacttcaatttggtttcgccggaggatacatcttcttcgtcgctagtctcaaccatggaatgagagcgtatgtgttcggtggctatacaatgccattgctgcattggcccttgctcttt

SEQ ID NO: 80513 - DNA, 259 bp, Glycine max
aaataagtagagagagagagagggaggatgaggggaggggaggcgagatccacgaccggtatttgcttgatgggaagcgtatttcggcattttcttactcttttctgcacaatatattcaggggtggagaatgcctctatgcactccctcctgactcgtacaatcattttctctcgcgatctagtattatttgctctacactgtcctacccatctaccactttgtgctagatttaaacttcttttttatctttcttaac

SEQ ID NO: 80514 - DNA, 150 bp, Glycine max
cgcattagttaattatatgttttatatgtcaatcacaagacattcgattgtgctgaagatccctaacgctccctcccccaatgctctcggctagattggtattcataattatctagctttattatgaaatttaataaacatatttttggt

SEQ ID NO: 80515 - DNA, 354 bp, Glycine max
atcaaatggcaacagtgagaacaccattgaattttgattctagcaagcagagcttttgtcaattttctattgaccttctcggtggaggaattttagtggacaaaactggagattggatcacacttatacaaaattctccaattagtaacttgttgagagttgctgcttggaagaaaggttgttaatggtcaagattgtgatgtctgggaatgagcagtcaaaaggagtgattgggcctcattggtacaagtgtttttaacaaacagcaacagtacagagcattttgatgcatgtaagtggacaaaatcagaaccacattcctgggaattaatcttcccaatagaggtatgtggt

SEQ ID NO: 80516 - DNA, 344 bp, Glycine max
tgcaatttcaaatctctctgctttctcagccaagcattgccccctttttcgtttcgaatctccccttagacaacaccgatttcgccttcttctttctctttaaactttaggctcgctagggttagggttagggttagggttaggttttcggtgaggcgagagactatgaggttgatgtaggactagctggtttaaacactgacattgtgagaagtggttgtcaaaatcgataactatgtaacctaatccaaaacccatgttctggatgcgtggagattggaacttctgttgctgactgagtgtcattgcgatatgatacgtttcactcgatggactgccacccc

SEQ ID NO: 80517 - DNA, 352 bp, Glycine max
caatccttcaaaaattttgtttctttgtgtgtgtatggtgatgataacttaattagtgttcatgaatatgtcaagccttactttagtggttctaaattgaaaagctttctagctagtcataacatcaccattactgatggtattgacaaaactagtgcaactttgcaatttagaaagttagcaattgtgattttctcaagagaaactttaacagatgtctaatgttttgtgggtggctcctgaggacaaggcgagtttatggtcacaacttcattatgtttcgtgtaataatctggaaatgcaagaagcttatcttgtcaatctcgtaaatgtgttacgagaattgtatttg

SEQ ID NO: 80518 - DNA, 376 bp, Glycine max
gaggttcattatgaagaaaagggacaagcttagttgtcaagttggaatcaacccatactccatggaatggactggtttggccaataggttactgagtaagggcaacgatattctgtgttgcgattatgctagttttgatggtttgattaccaagcaagttatgagcaagatggcagaaatgataaacagtctttgtggtggtgatgaaaaattgatgcgtgaaaggacacacctgctgttggcttgttgttcaaggatggcaatttgtaagaaagatgtttggagagttgaatgtggaatcccttctggatttccgctcacagttatttgtaatagcatttttaatgagatgctcattagatatagctatgaaaaa

SEQ ID NO: 80519 - DNA, 344 bp, Glycine max
aagctcgaaattcggttcgggaaaaaattttaaaaaaaaaaaaaaaaaaaaaaaaaaagaaaaaaaaaaaaaaaaaaggaggaaaaaaaaaaaaaaaaaaaaaaaaaaaaaaaaaaaaaaaaaaaaaaaaaaaaaaaaaaaaaaaaaaaaaaaaaaaaaaaaaaaaaaaaaaaaaaaaaaaaaaaaaaatggggccccccccccttttaggatctttcccccccgaaataaattttggccccttgcttcttggagtaacaaatttttttttaaaggggttttttaaaaattgggaaaaaaaagagaaatatttttaccctgggaaaaaattttttcccttaaaa

SEQ ID NO: 80520 - DNA, 65 bp, Glycine max
cacaaaaattcttaaagggttcaacctcaaccggtccttccaaaaaaaaaaaaaggccgaaccga

SEQ ID NO: 80521 - DNA, 366 bp, Glycine max
ggaatttcttacagcttggtcaactcaggtgcgtcctgcaacaactctgttagctgatgggtgtccatatttgtatgctatggtgcatgatagttcagtgtctacaataccaggtgattttgttattggtgttaagttgacaaccataaacaatatgtgtgcatatgggctcaatcctggtatttcaggttctcgtcttttgggcaccattcctcagtccatttcacagcaaactgtttggaatcaaatggcaacagtgagaacaccattgaattttgattctagcaagcagagcttttgtcaattttctattgaccttctcggtggaggaattttagtggacaaaactggagattggatcacact

SEQ ID NO: 80522 - DNA, 65 bp, Glycine max
ctgcaatgcgagtgtcggtagcttcgcagtactttgttgttcatagatcgctgctgggtttgtct

SEQ ID NO: 80523 - DNA, 364 bp, Glycine max
gcaatgatgaccctatatttggccatgtaagtcttgagaattctgatgagctgtggtcttccaaagacgtgagtaacagtgcagtacccatactcttggaagctccaaacccaacaagtgctttaagcaacagatctgagcctttggaaattaaagcagaatatgttcaacagaatgatcaatcattttcccctagatttaagaagattggcaattcttcatctcatgatattgcgaatgctcctgcaaacacattcaatgtaggatatgatagagatagaattgccccagctgataaggagcaacaagtatgtcaagccatattggagaatgaccagtgatgtaaaatggaaacaaagagcca

SEQ ID NO: 80524 - DNA, 405 bp, Glycine max
  unsure (1)..(405): unsure at all n locations
gcatggacccctaccgtaggctcggaattcggttcgagaagccgtttatcggttcggttcggctcaagctgggggacattctcgacgacgttggaatcggcgagcgcgtgagccgcacgctctcgctgaagcgtccctcggggaggccgcacgggaaggttgaggttagcgtgacaatcagggagcccagctaccgtgcgcagggtgggtacaacgcgccttcttacggcgtgagggattattcccctgcgccgcatgggtatggtgggtatgctacatatggtgccccaccacaacaggcgtgttattccgctccaccaagtgcgtatccttataatgcgccaccgcagtcttataatgcgccgnctcagagcggctacggttataatgcgctgccgcaaacgg

SEQ ID NO: 80525 - DNA, 370 bp, Glycine max
aaaattttaaaaaaaaaaaaaaaaaaaaaaaaaaagaaaaaaaaaaaaaaaaaaggggaaaaaaaaaaaaaaaaaaaaaaaaaaaaaaaaaaaaaaaaaaaaaaaaaaaaaaaaaaaaaaaaaaaaaaaaaaaaaaaaaaaaaaaaaaaaggggggccccccattttggggccttccccccccggaattaaattcgggccagcacccttggcggcttaagatttcacatactgggggttatttgaaaagagggccaaaaaaggggaaaagcttttcccggggaaaaatttttttcctttcaaaattccaaaaaaaaaaaagcccggaaaaaaaaagggaaaacccgggggcccctaagggggggccaacc

SEQ ID NO: 80526 - DNA, 338 bp, Glycine max
atttctcttaagagaaagcgcagtgtgtttaatgaccaatcttgttatgatgagcatgccagttcttctggattacattgtaataataatgtataccttgatgttgacgaggaaaatatgaccaaagagaatgctagaggcaccgcatattctggtcccaccaatggtgaatatgttaaggagaatcaatcttccttttctgttaagggtgatagtcaagtagatgggatttgttttaataatggggcaaaaaattctttcaaggattctgatgagaaagttgagtgggagacttttaaatcttctttgtttgaatccacagaggaaatgcaatcatt

SEQ ID NO: 80527 - DNA, 367 bp, Glycine max
gtttgattttctcgttgataaaacaatattttaaatttcaacaattttcttttcacggtaacaagaatcaaatctaataatatcttagtagatattactcaaatctcctcctcacttggaccacactagtgggtacaattttgtgacataggataaaaaaactagtactgggttcaattccgaaccaactaattccttgtgaaaaatgtttttgatctttcaacgagtattattttaatactcgggatagcatagaatataatataggcggcactagacgttgtcaagtctgtctctctctcacagtcaccttaatggtatctgtacactttcagaccaacacaacacaacatctcaaaactctgtc

SEQ ID NO: 80528 - DNA, 174 bp, Glycine max
cttagcagaagctcactcttcggttagaaatttgttagttagttaaaaaagatgttagaattagtttcaaatataactaaccaaagcagtagcgtttctctttcctctgcaactctgcagtagatataaatacgtaataaatgcatcaataaagcatcatgcagttttaatcaa

SEQ ID NO: 80529 - DNA, 417 bp, Glycine max
aagagcttgacgtccatgcaccccgtccgtaggttcggaattcggttcgggggaaaaagttgtattgaaattttcacaagaggaattgcttacagcttggtcaactcaggtgcgtcctgcaacaactctgttggctgatgggtgtccatatttgtatgctatggtgcatgatagttcagtgtctacaataccaggtgattttgtcattggtgttaagttgacaaccataaacaatatgtgtgcatatgggcttaatcctggtatttcaggttctcgtcttttgggcaccattcctcagtccatttcacagcaaactgtttggaatcaaatggcaacagtgagaacaccattgaattttgattctagcaagcagagcttttgtcaattttctatcgaccttctcggtggaggaatttt

SEQ ID NO: 80530 - DNA, 363 bp, Glycine max
gtttctcatcatagccactggggaactcccaaattctttatctgtattatttgcaaaggtcagaatcttaacctggttcttggtattggaattgattcatgattaccctaccatgaataggatttttagacattttagatcttgtctttttatatactcaatcaaataaattcaattgtttcacaaggaactgccaaaagcctcagtgatactatagttaatcccaaaccgcaaatatgttagttaagtactcattcatttccttataattgctttcctgtgttgttggacatttcaagaagaattttatcatcacttttattcccttcctctaactgataatgtccgccgagtagttttgtg

SEQ ID NO: 80531 - DNA, 375 bp, Glycine max
gcttccttaagctccttagtgctgctccttgcagctctaattctatcccctcaagttcttgcaaactatgagaatcccccagtgtacaagcctcccactgagaaaccaccagtttataagcccccagttgagaagcctcctgtttacaaacctccagttgaaaaccccccaatttataagcctccagtagagaagccaccagtgtacaagcccccagttgagaaacccccagtgtacaagcccccagttgaaaaaccaccagtgtacaagcccccagttgagaaaccaccagtgtacaagcccccagttgaaaaacccccagtttacaagcccccagttgaaaaacccccagtgtacaagcccccagttgaaaaa

SEQ ID NO: 80532 - DNA, 375 bp, Glycine max
tacagacctaagaagttgtacctacccttaagccgaattatcaccaccatcatcatgtcactgtccaatggagctgattcaactgccacttccaagcagcaaaaacctcagctcccgaacccctttgatctcactgactctgagatccttgagaaagtttatctgacccacctccatgatgaagacaagtgcgatgtagaagtccttttggacattgtgtccagtattgtacttaagacaaggttagctgaaggcaaagcttctcagaccattttccagccagaatttcgtacaatgaagctgatttcttgtcagatgataaccacacctcatggtgaacgctacgtgcaccaaacaacaatgtgcattcttcag

SEQ ID NO: 80533 - DNA, 213 bp, Glycine max
tgatgcacttgttaatgagcaagccaatattcaggaacggtagggtattccgccatgcgcagtacatgttaatctttagacgtgaagcagattgaagatcgaagaacacttgctgattataacatgcacgagggatatactgtccagttgcggttgcgactttgcggtgctatgcacatctcttggatgacttagaccgcaaacaccatagct

SEQ ID NO: 80534 - DNA, 376 bp, Glycine max
tggaggttagttaactattgatcacaccaaggacacttttacctatgagctcacattgcacgtgttttgcactcttcggcactagcaggtgttggcagcattcacatgccaggaatgggtaatcctgctttcaacacgaacacgtttggttatccatctgcacaaaggtcatctgcactacttaatcacagttttattatgtggaagttgattgcttctaactccgataaagcacattttccaaacttatagcgttattttgagcttctgttgcggaactcttccgattagaagaaaaactaatgtgtttgaagtaccgttattttttcttttgggagcagcctttgtatttcttgatatctcatctgattattta

SEQ ID NO: 80535 - DNA, 198 bp, Glycine max
accacatagggtgtgggttggggttagcttcgcgagtctgatttctctctcactctttcgtcttcgcggttgaagagagagagagagcggtggttggtggttttggtttggtgaagttcgattcgatgtgatgtcctgcgaaagcttttggggatattgttcctttttgccttactgcgcagtttctaattcttttgg

SEQ ID NO: 80536 - DNA, 363 bp, Glycine max
caatttgtaagaaagatgtttggagagttgaatgtggaatcccttctggatttccgctcacagttatttgcaatagcatttttaatgagatgctcattagatatagctatgaaaaattactgcgccaggctaaagctccaagtatgtttttacaatccttcaaaaattttgtttctttgtgtgtgtatggtgatgataacttaattagtgttcatgaatatgtcaagccttactttagtggttctaaattgaaaagctttctagctagtcataacatcaccattactgatggtattgacaaaactagtgcaactttgcaatttagaaagttagcagattgtgattttctcaagagaaacttta

SEQ ID NO: 80537 - DNA, 374 bp, Glycine max
gactcgactcgactcgacttcaacccaatccatctcaactcggctcgaccaagtcaccgactcggctttgaatactcacctcggcctcgcttgaccaccatgcgattcgccctcgccctcctcggcctcatcgccgtgccgttcgcgtctgccgcggcggtcccgcgtgagcaacacgacatcgccaaacgctcgcccgacgagcttgacgcccggctgctgggcgacctcctcggcgacctcaaggacaagtgggacaacaggcactgcggctggaaaatcgacgactgttccaagaaggggcagaagtgcaacaacaagtgcgaatgcgagcacgagccagcgccgacgtgcaacaagtgggagaaggacga

SEQ ID NO: 80538 - DNA, 79 bp, Glycine max
gtgttattttaaaaaaaaacacacactttacacgttattacgacaattaaaagaggtgtggagtgtgtgttattttaaa

SEQ ID NO: 80539 - DNA, 373 bp, Glycine max
ctcgagccgctcgagccgcattcgatgcagaggatgatgaatgctcctgattcaaatgaaactcttcaatctgtgctatggtaggcacagattgaagagttccattcgatgcagaggatgatgaatgctcctgattcaaatgataatattgatctactgttgagcattgatttgttgggtttacaaggagcaggcaaagcttttccaaacaagattgtttttgatgataagcttgtgttggctaacacacaagaattctttgatggaaattttccagtggattcttggttaccaatttttgtgaattgtctttatcctgtaagtcaattaccttcagaagctgtcgttgtaaatgtcacatgtggtagtggac

SEQ ID NO: 80540 - DNA, 72 bp, Glycine max
agagaagctatgaaagaggagaacctggacactttgatgggcaggggagattgagcgtcggatcacatgggc

SEQ ID NO: 80541 - DNA, 190 bp, Glycine max
gtagatttttttttatatgggctcaatcctggtatttcagggtctcgtattttgggcaccgggcctcagtctatttcacagcaaactgtttggaatcaaatggcaacagtgagaacaccattgaactttgtttatagcctgcattgttcttgttatctccctatttcctcttttttgtgtaggttattat

SEQ ID NO: 80542 - DNA, 301 bp, Glycine max
gtgggccagttaaactaaacggaacttggggttgcttattctcaatgccgaacagtctacagttattgatattgtatagggaatctgtgaagaggatgtaatcgctgccaatactaatatgccagctatatgtggtccacaggctactggccgatcttatcaacatgcggtgtgccatgcatgatcaggaatcatggagttctatcgcttgcaccagagacaaatgccaataaggagactgggcacgaccctataggtgagtggctctggctatgtgaaagtgagcacacctattttaatt

SEQ ID NO: 80543 - DNA, 382 bp, Glycine max
taagttttcacctgatcctgacttagtgggaatcaagccacttataatttcacctctaaacaaaggacaagatgaagttgggaacctagataataaggctgacagtgttgaatctgaatctgatacaggataacaagaggaaggcattgtttcatgtaaaataaattaatttacttcttctctcaatggaagcttttgaaagacaaagaggtcaacaaatttggacggaggtccaggcaaaataggtttagggggcttgtttttaattttattaattctagtatcgcatgtgtttaattttcacaggtgacttttcttaaatctgcatccaatcaaaattgtttatggtttgaaggatcaaatgctatgtgcctatgtgtga

SEQ ID NO: 80544 - DNA, 379 bp, Glycine max
caaatattattattcaatagaaaagaaagatgagtccaacatgggtttttgtgttaggtgttgcagcaatgttggtggttgtgagtggacaatcatcagtgaagcctttggtgaagacagtgaaggggaagaaggtgtgtgacaaagggtgggagtgcaaaggttggtctgcatattgctgcaatgagactattttcgactacttccagacataccagtttgagaaccttttcgtgaagcgcaattcgccggttgcacatgctgttggttgctgggactaccgttctttcattaacgtttctgctctttaccatccttatcgtttttctcatctctgttggttatgaccattgtttcttaatgtatttagttttttttt

SEQ ID NO: 80545 - DNA, 378 bp, Glycine max
gaggcttttccccacaagctggtgcagtttggagagattcaggaaaaagttgtgttgaaattttcacaagaggaatttcttacagcttggtcaactcaggtgcgtcccgcaacgactctgttggctgatgggtgcccatatttgtatgctatggtgcatgatagttcagtgtctacaataccaggtgattttgtcattggtgttaagttgacaaccataaacaatatgtgtgcatatgggctcaatcctggtatttcaggttctcgtcttttgggcaccattcctcagtccatttcacagcaaactgtttggaatcaaatggcaacagtgagaacaccattgaattttgattctagcaagcagagcttttgtcaattt

SEQ ID NO: 80546 - DNA, 371 bp, Glycine max
gaaaaattgatgcgtgaaaggacgcacctgctgttggcttgttgttcaaggatggcaatttgtaagaaagatgtttggagagttgaatgtggaatcccttctggatttccgctcacagttatttgcaatagcatttttaatgagatgctcattagatatagctatgaaaaattactgcgccaggctaaagctccaagtatgtttttacaatccttcaaaaattttgtttctttgtgtgtgtatggtgatgataacttaattagtgttcatgaatatgtcaagccttactttagtggttctaaattgaaaagctttctagctggtcataatatcaccattactgatggtattgacaaaactagtgcaacttt

SEQ ID NO: 80547 - DNA, 370 bp, Glycine max
gggcaacgatattctgtgttgcgattatgctagttttgatggtttgattaccaagcaagttatgagcaagatggcagaaatgataaacagtctttgtggtggtgatgaaaaattgatgcgtgaaaggacacacctgctgttggcttgttgttcaaggatggcaatttgtaagaaagatgtttggagagttgaatgtggaatcccttctggatttccgctcacagttatttgtaatagcatttttaatgagatgctcattagatatagctatgaaaaattactgcgccaggctaaagctccaagtatgtttttacaatccttcaaaaattttgtttctttgtgtgtgtatggtgatgataacttaattagt

SEQ ID NO: 80548 - DNA, 378 bp, Glycine max
attctcatgaatatgccaaatgctgttctttcaatgtggagatattttgttggagatctcgtctttgaagtttctaagatgacttctccctacattaaatgtacagtctctttcttcatagcatttggaaatttggctgatgacaccatcaattttgaggcttttccccacaagctggtgcagtttggagagattcaggaaaaagttgtattgaaattttcacaagaggaatttcttacagcttggtcaactcaggtgcgtcctgcaacaactctgttggctgatgggtgtccatatttgtatgctatggtgcatgatagttcagtgtctacaataccaggtgattttgtcattggtgttaagttgacaaccataaac

SEQ ID NO: 80549 - DNA, 259 bp, Glycine max
gatgaatgctcctgattcaaatgataatattgatctactgttgagcattgatttgttgggtttacaaggagcaggtaaagcttttccaaacaagattgtttttgatgataagcttgtgttggctaacacacaagaattctttgatggaaattttccagtggattcttggttaccaatttttgtgaattgtctttaccctgtaagtcaattaccttcagaagctgtcgtcgtaaatgttacatgtggtagtggacgtgtg

SEQ ID NO: 80550 - DNA, 147 bp, Glycine max
ggaattcgtgttttctttcgcttgttcgtttgtttaattcaataaaggaaattaggcatgaccctcttgttgagtatgctctgcctatctgaaaatttccacacctcttttaattgtcgtaatgatgtgtgaagtgtgtgttatttt

SEQ ID NO: 80551 - DNA, 210 bp, Glycine max
atttgttgggtttacaaggagcaggcaaagcttttccaaacaagattgtttttgatgataagcttgtgttggctaacacacaagaattctttgatggaaattttccagtggattcttggttaccaatttttgtgaattgtctttatcctgtaagtcaattaccttcagaagctgtcgttgtaaatgtcacatgtggtagtggacgtggtg

SEQ ID NO: 80552 - DNA, 320 bp, Glycine max
  unsure (1)..(320): unsure at all n locations
ctttccccttacccttcttctgtgtgtgatgatgtagatagagaataaaaagagaccagtgtgcagtgagaaagaggttggtcacttcttgtgtggctttgttttgttctttgtgttggaatttgttgatgggtgaagagggagaagaggtgtcaagagataaggaacagcaacacatgggagtttatggaaatgagtggttgtttagtatgttttgtgtaaattgtgtnngttttttgatatataatttttgttttatttgtttgttttgggtgaaatttttataatttttgtaaaataattaacttgtttattttttt

SEQ ID NO: 80553 - DNA, 171 bp, Glycine max
cgtttccttccgtaataagtgaaagaatcagaaaagcaataatggtaataaagcagtgaagctttggacaagaggcagtgttgaggcttaaatgtgttcatggtggatgtacagattaacaagcagcttctcaagtgctagctgatttgtttgtttgctaacatcaatgag

SEQ ID NO: 80554 - DNA, 318 bp, Glycine max
cggatccgaatctggttgttgctccttgaattggatcagagcatacccttttgctcaaatttgatttttttttggcacacttttaccctttcaatcaaggttgtttcatttcctgttttcgtgaattttgcagatggttctgtctctgtagctcggaatcagacgacaggagaatttgctgggggagagtttcaatttttcaaatcctgtcgttgattcatttggtattgcactcgcgtttctctctttctattttcgtcagagattatggtttttcgtttctagagggaggggtgggttgtttttattaagtttaga

SEQ ID NO: 80555 - DNA, 373 bp, Glycine max
attagtgttcatgaatatgtcaagccttactttagtggttctaaattgaaaagctttctagctggtcataatatcaccattactgatggtattgacaaaactagtgcaactttgcaatttagaaagttagcagattgtgattttctcaagagaaactttaagcagatgtctaatgttttgtgggtggctcctgaagacaaggcgagtttatggtcacaacttcattatgtttcgtgtaataatctggaaatgcaagaagcttatcttgtcaatctcgtaaatgtgttacgagaactgtatttgcacagtccagaggaagctcgccaattgagaaggaaagctctctctcgtattgaatggctgcaaaaagctg

SEQ ID NO: 80556 - DNA, 377 bp, Glycine max
aaatgctgttctttcaatgtggagatattttgttggagatctcgtctttgaagtttctaagatgacttctccctacattaaatgtacagtctctttcttcatagcatttggaaatttggctgatgataccatcaattttgaggcttttccccacaagctggtgcagtttggagagattcaagaaaaagttgtattgaaattttcacaagaggaatttcttacagcttggtcaactcaggtgcgtcctgcaacaactctgttggctgatgggtgtccatatttgtatgcaatggtgcatgatagttcagtgtctacaataccaagtgattttgtcattggtgtcaagttgacaaccataaacaatatgtgtgcatatg

SEQ ID NO: 80557 - DNA, 338 bp, Glycine max
tatacaagagctatgacgtgactgcactcgtcccatacctaggcttggaattcgggtggaggttctgagattgagctcatgtagggtgtaggtgagaaagaactcacaatagagaacaacaacacaattccatggctgattttgactcaacttatagtcctccttctcctctttgcgctcctctttttcttcaccctcctcccattgggtgccgacgaccaccaccacaacaaccttgttaccgtcgacacgcccccttcttcgacaacctttttcagtgtcttctttttcgacgatattcaaattcagcagattgactccccgtttactaatcacga

SEQ ID NO: 80558 - DNA, 361 bp, Glycine max
gttccatctgaattgtggagttctgagtgggcaaatcaaacgtcatggcatttgagtttccgtattgacaatcccaaacagtctacagtttttgatattctcttgggaatctctcaagattttgaaattgctggtaatactcttatgccagctttttctgttccacaggctactgccagatcttctgaaaatgcggaatcctctgcatgatctggaattcgtgttttctttcgcttgttcgtttgtttaattcaataaaggaaattaggcatgaccctcttgttgagtatgctctgcctatctgaaaattttcacacctctttttaattgtcgtaatgatgtgtgaagtgtgtgttatttt

SEQ ID NO: 80559 - DNA, 356 bp, Glycine max
gttttgaaatgtggagttctgagtgggcaaatcaaacttcatggcatttgagtttccttattgacaatcccaaacagtctacagtttttgatattctcttgggaatctctcaagattttgaaattgctggtaatactcttatgccagctttttctgttccacaggctactgccagatcttctgaaaatgcggaatcctctgcatgatctggaattcgtgttttctttcgcttgttcgtttgtttaattcaataaaggaaattaggcatgaccctcttgttgagtatgctctgcctatctgaaaatttccacacctcttttaattgtcgtaatgatgtgtgaagtgtgtgttatttt

SEQ ID NO: 80560 - DNA, 169 bp, Glycine max
gcaagacgccggatcgccgcagtgcaccgcccggaactcggatcgaggatagaggtttagcaatgagcattcctctgccctttaaggaggcggatatgtcaaagacgcgatgtcttaaaagactcaggattattggaaggatgaagatgccaactcacttgcttcctaa

SEQ ID NO: 80561 - DNA, 341 bp, Glycine max
tcggggaattccaattccacattttcaagaaataaggaggcaaaaatgttcatatatgaattggaaggatttgttttcttattaggcctatcctgaagccaaaggaaatgagatcggaattcctcggggaattccaattccacattttcaagaaataaggaggcaaaaatgttcatatatgaattggaattatttggtttcttattaggcctatcctgaagccaaaggaaatgagatcggaattcctcgggggattccaactccacattttcaagaaataggggggcaaaaatgttcatatatgaattggaattatttggtttcttattaggcctatcctg

SEQ ID NO: 80562 - DNA, 368 bp, Glycine max
tgtggttctgttgaagtttttgagggctagggaatgtaaagttaatgatgcattggagatgctgaagaagacccttaagtggaggaaggaatcaaagattgattctgctgtggatgaggattttggctctgacttggcctctgctgcttacatgaatggtgttgaccacgaggggcaccctgtgtgctacaacatctttggtgcatttgaaagtgaagagctttaccagaagacttttgggaccgaggagaagcgcaatgagttcttgaggtggaggtgccaagtgatggagaagggtattcaaaagctcaatttgaagccaggggggggggcttcaattgctcaaatcaatgaccttaaaaactccc

SEQ ID NO: 80563 - DNA, 166 bp, Glycine max
cgcgaagagatcttgactgattcttaaaggtaggaacttgagacttgtttctctcagagatcgcttttcctaatgctgatttcgaggtcgcttctgacggaggtgctgttgtcactaggggcggcgcagccgtatttgctctgtgcattcccattatcatggggct

SEQ ID NO: 80564 - DNA, 253 bp, Glycine max
cctttgttcactcttcttctcttgcggctagggttttagcgcagcttcttgtagatttaaggaagatggctaaggaaaaggttcacatcaatattgtggtcattggccatgtcaactctgggaaatccactaccactggtcacctgatttacaagcttggaggcattgacaagcgtgtctattgagaggtttgagaaggatgctgctgacgacgatcaagaagtctctcaagtctgcctgggtgctatgcaac

SEQ ID NO: 80565 - DNA, 322 bp, Glycine max
agaagagctatgaccacgcatgacacacagccgtaaccttttttttttgtgtctcgagcctttgttcactcttcttctcttgcaactagggttttagcacaacttatggggagggaaaccccctctccaaagaaaaatttcccattagggcaccaggccttcacccatttaacagttgacagttcccaaccaaatgtccacatccaaaacaccataaaatttttattctttcaaccctagctaatgacaagttcctatcaaccttttctgaaaaagaaatttaccagcctaaactggagatgggatcacacttcttcacaat

SEQ ID NO: 80566 - DNA, 368 bp, Glycine max
aggtgattttgtcattggtgttaagttgacaaccataaacaatatgtgtgcatatgggctcaatcctggtatttcaggttctcgtcttttgggcaccattcctcagtccatttcacagcaaactgtttggaatcaaatggcaacagtgagaacaccattgaattttgattctagcaagcagagcttttgtcaattttctattgaccttctcggtggaggaattttagtggacaaaactggagattggatcacacttatacaaaattctccaattagtaacttgttgagagttgctgcttggaagaaagtttgtttaatggtcaagattgtgatgtctgggaatgcaccagtcaaaaagagtgattggg

SEQ ID NO: 80567 - DNA, 247 bp, Glycine max
ctttgttttttctgcgatcattttccattgggtggaagaaagtctcaacctttagtggaaagagcaaggatctgagtgagtgagcgatcatgtgtggtggtgcgattatcttcgacttcattccatcggttcccgccgtctgagcgcaacgcgtgaccgtcgacatactgtggccgaatttgatgcatcgtttctagaagtctttggtagacaggcttttaaaggctattttcatagacatggatga

SEQ ID NO: 80568 - DNA, 382 bp, Glycine max
tccttaagctccttagtgctgctccttgcagctctaagtctatcccctcaagttcttgcaaactatgagaatcccccagtgtacaagcctcccactgagaaaccaccagtttataagcccccagttgagaagcctcctgtttacaaacctccagttgaaaaccccccaatttataagcctccagtagagaagccaccagtgtacaagcccccagttgagaaacccccagtgtacaagcccccagttgaaaaaccaccagtgttcaagcccccagttgagaaaccaccagtgtacaagcccccagttgaaaaacccccagtttacaagcccccagttgaaaaacccccagtgtacaagcccccagttgaaaaaccaccagtgt

SEQ ID NO: 80569 - DNA, 373 bp, Glycine max
cagatgtcattgtgtcaccaacaacaggtgtgactgcatactcgatacaagatgatgcattgaagactggtgaacttgactacgtaaatggagctacagttgttcggtattccatatcaggaaacttcctaggacttcctgttgtgactgtaccagtgaacctgcaagaactgttggctagcgtgaccctagttttatacacacaagtttcctaaaagaactttggccaaatttgaggtacacttacaagttagagcatatgctgtctaacggttagcgtgtggagtaagaagttctcgtttaagacatccccatatcctggacagaactctttgcaacgtgttatcatatttggtgacatgggaaagaccaa

SEQ ID NO: 80570 - DNA, 369 bp, Glycine max
acgcaagacgaaaaaatctctaatataatgaaagttgagtacaaggtataaacacaagcaaaagccgtccgagcaaattttagcacaaaaaattcttatatcctccttattaggataaaattctcacagttgaaatcttcatcaccaattcctatctagtcttcttcctcttctcataaccctataaaccactagatgagatgctccaacaggaagaactatgaaagaacttgggttgctgcagctgttaaagaaaattaaaccttatgtttattgtaaaggagtacactcagacaacttgcagatgttcaaatacataaaacattctgagaattattccttctagagatgcttggcaaatatggcctc

SEQ ID NO: 80571 - DNA, 372 bp, Glycine max
atttcatttatggatggagtgacgctgtcagagatggagcaagggtgcacaaaatggttgaacctcttctgcctctgtttcaacgccagaaatcatcatgtccctctgctttgttctctatcgccatcattgtgcccacatcatcctcctcctcctcttttctctttcaaccacccccacacaccccacatacctaaacccaccaccatcattactactcctcacacctcactacaccaaaaagaaaaaaaaggtaaagaaaattatttagaagatgaacaagatctcaatattccttccactctcatgtgttgttgttgattgaagaaagaaaaaaaaaaagctagccaacatcatcgatatcactttctt

SEQ ID NO: 80572 - DNA, 372 bp, Glycine max
gtcaattttctatcgaccttctcggtggaggaattttagtggacaaaactggagattggatcacacttatacaaaattctccaattagtaacttgttgagagttgctgcttggaagaaaggctgtttaatggtcaagattgtgatgtctgggaatgcagcagtcaaaaggagtgattgggcctcattggtacaagtgtttttaacaaacagcaacagtacagagcattttgatgcatgtaagtggacaaaatcagaaccacattcctgggaattgatcttcccaatagaggtatgtggtcctaataatggttttgaaatgtggagttctgagtgggcaaatcaaacttcatggcatttgagtttccttattg

SEQ ID NO: 80573 - DNA, 369 bp, Glycine max
gtttatttttgatgaaattcggctcgcgtagcttggagttagggtttttggtcagttgttatatttacccttgggatcggtgtgccttcataacattgttggattcatcgagctttagttgttgacatttagtttttcgcgaacttcgtagcttagctacttataaatattgaatatccgtcactttagtctagctgatttgttacagtaaattttaggaaccaatttgaagggtttttaatattttggggactacatagtacttagcatgatttctcatagttttaggactattcaagtaatttttatgctgtaaggactacttaatagagtgagtaataattcaagaataaaattggtggtttacta

SEQ ID NO: 80574 - DNA, 368 bp, Glycine max
gcttgaagctcctaccacctgagaagcttgagcaactggatatccctgtggaagaagaatcttctagtgttcctgttggtgaagttttatacatgtcagagagtgataggtcttttgtaggagggagtgttacgttgtctcaattgcgtacagaggacacgaggtttaatttgtttactggaaatcaaacatttgaccagagagatcaaagttttgaggtgaaagaaacattggcggttcattgtgggttctacagtgtgaatggagggtgtaagatatctgttgaaaataaaagtttcatgcaaggttgcaaagttggtgtatctacttttgcatttggtgggggagattaccgttttctttggatt

SEQ ID NO: 80575 - DNA, 60 bp, Glycine max
tgcaaatattatgaaggaacgaatcaaagctggtgggaaaaaaaaaaaaaaaaagaggga

SEQ ID NO: 80576 - DNA, 375 bp, Glycine max
ggtaaatgaagtggattactgtggatatgtggaacttagacgtcctattttcaagaaagatcacacatttatcactggagagttcgatttactcactcctagtggtcaaactggcgtaagctattccctcccacgttctttggaaaatgacaccaaccaaacaacgccatgatcaagcatatatactcgtgattctcaattcaagtttgtgagctttatacttgagtggtgtctctttcaaggtttttgattaggtgaattgaaaaacatgtggttgggatttaacatgtataggaacttttcaaatggaagaaggagaaaatgaaagtgaaaatctatgttcctgattgggatgtcataacttaagaatatttc

SEQ ID NO: 80577 - DNA, 373 bp, Glycine max
gtgttaagttgacaaccataaacaatatgtgtgcatatgggctcaatcctggtattggaggttctcgtcttttgggcaccattcctcagtccatttcacagcaaactgtttggaatcaaatggcaacagtgagaacaccattgaattttgattctagcaagcagagcttttgtcaattttctattgaccttctcggtggaggaattttagtggacaaaactggagattggatcacacttatacaaaattctccaattagtaacttgttgagagttgctgcttggaagaaaggttgtttaatggtcaagattgtgatgtctgggaatgcagcagtcaaaaggagtgattgggcctcattggtacaagtgttttt

SEQ ID NO: 80578 - DNA, 372 bp, Glycine max
ctttagtggttctaaattgaaaagctttctagctggtcataatatcaccattactgatggtattgacaaaactagtgcaactttgcaatttagaaagttagcagattgtgattttctcaagagaaactttaagcagatgtctaatgttttgtgggtggctcctgaagacaaggcgagtttatggtcacaacttcattatgtttcgtgtaataatctggaaatgcaagaagcttatcttgtcaatctcgtaaatgtgttacgagaactgtatttgcacaagccagaggaagctcgccaattgagaaagaaagctctctctcgtatagaatggctgcaaaaagctgatgtgcctaccatagcacagattgaaga

SEQ ID NO: 80579 - DNA, 333 bp, Glycine max
ctggtctgttccctgactgatctccccatatgatcggccgtgcttaacgccccagggggcgccgatcgttcccatgccgaggttctcatatgacagagctaatctccctgggcatttaggtgcacgtgtcgtagcttgatccaattgagctagtctcactcctcgggatcttttgcgctctgaccaaatcttgatgaatgactgttatcactaacacacctgctgcaaatatgacgaggaagcttgcgcatgtcatcttatcaatgcaccatgcatgccatagtgcaacttgtgatcatggtgctatacatggtcacaccattcaggctccct

SEQ ID NO: 80580 - DNA, 351 bp, Glycine max
aaagagtttggcgcattgctttctgtacatttaaatttaatttgtttgggttgctgagtaaaaactaaaatgaaagtagatacaaattgttttttttttctttaaaaaaaaataaatataaatcatagggaggtaatttatttttaagaagaaaaaaaccacaatcttattttacaaaaatatagaatttaataattaaaatagaatataaatatgggggggcgtgcaatttttgaggtcttcaaccagggattttatttctaaccggtacatggagggggacgagttttcctttaagagaagggttttaaaatttggggtatttattgaattagcattttccttggtaaa

SEQ ID NO: 80581 - DNA, 367 bp, Glycine max
tagattatgtgagccaaggatatgtgtttaactacatatgggcccccaaaatattgagtagtgtgagggcttacaataaccttataatttcaaaatcttcaatcagctatctctacaaatagcacattttttaccataattggaaaaggatagaaacaatatatatatctggcacatctcttgcctaatatttatgttaaatgttaaatccaattctattaagattttgtcataaaaccaagaagaatgtggaatgcttgtgcaagtatatgaagcagtatattaatttcggttggctcaaggttccttccattcctttctttcggatcacaggggaaataaaaaacaatggagttggacttgacac

SEQ ID NO: 80582 - DNA, 268 bp, Glycine max
caaaatagctctgtactagttagctgtttgtccacttacatgcatcaaaatgctgtggactgttgctgtctgtcaaaaacacttgtacagagcattttgatgcatgttagtggtcaaaatgggacagtcctgagcatgaatggagatccgtattaacagcatatgtacgcgggactgcgtttgcatagcgtagatgtggaagggcaaatcaaactttatggggattgagttttacaaccgacaagctcgaacaatgctcaggcttgga

SEQ ID NO: 80583 - DNA, 205 bp, Glycine max
ctcggaccgcgagttgtatggatgttctgggaactgattattcatggatgcatccctgagaagctgttacacatgcacagtgattgctaatatgaaaatatacatagcagacagagctgttgaaatttactgcgccatagctattgttcaacatgctttgacaattacataaaactaacgactcttcgactaggttgagacatga

SEQ ID NO: 80584 - DNA, 245 bp, Glycine max
cacggatggcaatttgtaagaaagatgtttggagaggtgaatgtggaatcccttctggatttccgctcacagttatttgtaatagcatttttaatgagatgctcattagatatagctatgaaaaattactgcgccaggctaaagctccaagtatgtttttacaatccttcaaaaattttgtttctttgtgtgtgtatggtgatgataacttaattagggttcatgaatatgtcaagccttacttt

SEQ ID NO: 80585 - DNA, 372 bp, Glycine max
cttcactattctccctatggagtttaatcttgtggtccgtcaaaagtttttaaattttgtgaggttcattatgaagaaaagggacaaacttagttgtcaagttggaatcaacccatactccatggaatggactggtttggccaatagattactgagtaagggcaatgatattctgtgttgcgattatgctagttttgatggtttgattaccaagcaagttatgagcaagatggcagaaatgataaacagtctttgtggtggtgatgaaaaattgatgcgtgaaaggacgcacctgctgttggcttgttgttcaaggatggcaatttgtaagaaagatgtttggagagttgaatgtggaatcccttctggatt

SEQ ID NO: 80586 - DNA, 365 bp, Glycine max
ctaaacccatacaattcaaagactaatgcccagaccggaaaactgggatattgtggtgattttaatggcacaaaaacattaaatagatgctaatagctcttataacaaggattttgacatgcatgcaaaatcacaggcaagataacaataacaagacagcaaataccatcagtgctaatgaagctagtgactcatttgatgcataagaatgatttcactgactcaggcaatacacaacattcgtacttggtttatccaactcagatataactagccaggctgctaaatgtcaatttacccatgaccataccgatatggaaacaactgaaagtgctactggttctgcgagtaattttgactggatg

SEQ ID NO: 80587 - DNA, 63 bp, Glycine max
cactttttgcctttttcggttgcgtaatgatgttctatgagattgcttattagtatttgtttc

SEQ ID NO: 80588 - DNA, 259 bp, Glycine max
cttgggaatctctcaagagaatatcaaaaactgtaggccggttatgccagctttttcggagacacaaactactgccagatcttctgaaaatgcggaatcctctgcatgatctggaattcgtgttttctttcgcttgttcgtttgtttaattcaataaaggaaattaggcatgaccctcttgttgagtatgctctgcctatctgaaaatttccacacctcttttaattgtcgtaatgatgtgtgaagtgtgtgttatttt

SEQ ID NO: 80589 - DNA, 367 bp, Glycine max
ctcgagccgagtggttctaaattgaaaagctttctagctggtcataatatcaccattactgatggtattgacaaaactagtgcaactttgcaatttagaaagttagcagattgtgattttctcaagagaaactttaagcagatgtttaatgttttgtgggtggctcctgaggacaaggcgagtttatggtcacaacttcattatgtttcgtgtaataatctggaaatgcaagaagcttatcttgtcaatctcgtaaatgtgttacgagaattgtatttgcacagtccagaggaagctcgccaattgagaaggaaagctctctctcgtattgaatggctgcaaaaagctgatgtgcctaccatagcac

SEQ ID NO: 80590 - DNA, 201 bp, Glycine max
ctcgagccgcttcaaattcattcaactttctctcatgcagtccaatcaacaacgcacgcgtgcatcttttccttttaactcattctttgtccccctttttcttaacgccaactctctcttctgggtttctttcattttcagaatctaataataacctaactgggatattctcttaattccaaatggtggttgggtggcgtg

SEQ ID NO: 80591 - DNA, 339 bp, Glycine max
aatatgccaaatgctgttctttcaatgtggagatattttgttggagatctcgtctttgaagtttctaagatgacttctccctacattaaatgtacagtctctttcttcatagcatttggaaatttggctgatgacaccatcaattttgaggcttttccccacaagctggtgcagtttggagagattcaggaaaaagttgtattgaaattttcacaagaggaatttcttacagcttggtcaactcaggtgcgtcctgcaacaactctgttagctgatgggtgtccatatttgtatgctatggtgcatgatagttcagtgtctacaataccaggtgatttt

SEQ ID NO: 80592 - DNA, 367 bp, Glycine max
tttgttttccctctcacttttctcattggaggaaaaaaatccaaaaaaatttcggacagtgaagaatatatcttcttcttcttcttcttcttccaccagtgaacaaatctagggttttagtctcttccttcagcttatttactaaattaatcagcttgtcaaacattcttcttgaagtggacatgcaaactaagaaaaaaacctccaggcgaaatgccagtcaagagcgtggcagtcctaaagtttcaagagcacagaggaaggtctctcaaaatggtcaagctgctgaaaagaaagtcacagacttaattacatcatctgctagaaagaataaatctcttagcacccttgagaataaaactagaga

SEQ ID NO: 80593 - DNA, 372 bp, Glycine max
gagagacgtagaagtgttggaatttagaaccccacaacacccatctttgggaacaaataattggggtggttcatctcctttgctagcaaggaacgtacccaaggaatcacttgaacaaaagtattcaagactcaactcagttcggaccaaagatgagatctttccagctgattatgagtactatgttgtgaacccttcgaatgagaccggtgcaagtgcaagtagtgccaagagatggaacaaagttagaggagttctgttgaagctaatatttgtgaggaaagagaacaaaacaacagttacattaggttcacgtttaaggaagagaagatggataccgagaatggatcctacaactaggtggccacaagc

SEQ ID NO: 80594 - DNA, 235 bp, Glycine max
ctcgatcctaatcggctcgagctgcgtttgaaaaaaaaaaaaaaaaaaaaaaaggggggaaaaaaaaaaaaaaaaaaaaaaaaaaaaaaaaaaaaaaaaaaaaaaaaaaaaaaaaaaaaaaaaaaaaaaaaaaaaaaaaaaaaaaaaaaaaaaaaaaaaaaaaaaaaaaaaaaaaaaaaaaaataaaaaaaaaaaaaaaaaatggggggccccccctttattaaaatcttccccc

SEQ ID NO: 80595 - DNA, 128 bp, Glycine max
ctcgagccgccctggccatgctttttttttctctgggaatgggacaacaatgtaaagataatatgcacatccacttccacattgcaaaaatatctttacattgtggaagtggatgtgcatattatcta

SEQ ID NO: 80596 - DNA, 92 bp, Glycine max
cgcataatttattaaagccacgaaagagaaaacaacatagtgaagtctcttacatggcgttgaataaattatgcgcccttgttccatacttt

SEQ ID NO: 80597 - DNA, 371 bp, Glycine max
caaaactagtgcaactttgcaatttagaaagttagcagattgtgattttctcaagagaaactttaagcagatgtctaatgttttgtgggtggctcctgaagacaaggcgagtttatggtcacaacttcattatgtttcgtgtaataatctggaaatgcaagaagcttatcttgtcaatctcgtaaatgtgttacgagaactgtatttgcacagtccagaggaagctcgccaattgagaaggaaagctctctctcgtattgaatggctgcaaaaagctgatgtgcctaccatagcacagattgaagagttccattcgatgcagaggatgatgaatgctcctgattcaaatgataatattgatctactgttga

SEQ ID NO: 80598 - DNA, 100 bp, Glycine max
caaatatctggttgatgagtgtccttttgcatttgtgaactagtatgtaatattgtattcacttaaataaagcgcattactatgtgcaatgagtgtgttt

SEQ ID NO: 80599 - DNA, 286 bp, Glycine max
acgcgtacgtaagctcttaattcggctcgatttataaatttttattaaaccccaaaaaaaaaaaatacagagaaaaattttaaaaaaaaaagaaacccacaaaacaccccttcttcaaaaataaaccaccttcaaccacataacaaatatttcccccccccccctctaacttcccctccatcccctttaaatcataacaatattacataccccccccccccccttatacctttctcccccccttttttaattctccccccccttcccctcccttctccccctcttt

SEQ ID NO: 80600 - DNA, 237 bp, Glycine max
cttttcttggtggaattcaaaaatatgccactcccatgatgcccctagatgaagaaattctttctaaggttgcacaagatatggttgaggaatggtttgattgtgttgatgaggaggattcctttgaggaagtttctttaagtgcagcacttaatggtgttgagggtttggactatatggaaagaattaacattgccacattttgatggtttttatttatgtgcttttacgcaaaaa

SEQ ID NO: 80601 - DNA, 309 bp, Glycine max
caaaacaagaggggtcttgttgaagagtttggttgagttcagtgcacgtacggctcgtacaactgcagaggtttgaacttcgaagagtcctggagtggttttgaatgttgaactatataagttacccgagggaaacagcttgttgaccaaggttcaaagaaactatagtccaagtatttctgacgtacttttatgatcgttagcaacagtgtaatctaatgttgaactatatatgttacaatataaagattagcttagcttctttaatcggattttgctcttaattgatctaggtggcaccattggcaa

SEQ ID NO: 80602 - DNA, 368 bp, Glycine max
gtggacaaaatcagaaccacattcctgggaattgatcttcccaatagaggtatgtggggctaataatggttttgaaatgtggagttctgagtgggcaaatcaaacttcatggcatttgagtctccttattgacaatcccaaacagtctacagtttttgatattctcttgggaatctctcaagattttgaaattgctggtaatactcttatgccagctttttctgttccacaggctactgccagatcttctgaaaatgcggaatcctctgcatgatctggaatttatgttttctttcgcttgttcgtttgtttaattcaataaaggaaattaggcatgaccctcttgttgagtatgctctgcctatttg

SEQ ID NO: 80603 - DNA, 365 bp, Glycine max
tgactcttcacaatatatagtagtcttcaattcaatgtctgcacatgtaatggctgttacaggacttagagtttcatcgtttacaagctcacttgcttcatgcccatccatttatcaaccatggaacctatcgttacagacatctaaacgagggacgattcataataacttgtccatcaagtgcgttgctttcaatgacaacaaggtgcccagtcaaattgatcttcggacaaacaattttgagcaagttaaaagaaacagccaaatggcgttgctaaactcaagtgatccaatcaaaatattgaagatgattgacaccatccaaaggttaggaattgagcatcatttcaaagaagagatcaacg

SEQ ID NO: 80604 - DNA, 366 bp, Glycine max
cggagcctgacctctccttgaacataagccctccctctatctcagattctgaagccgccaaagatgttggaagctttggaaaagtgctttacagtgatatttgttcaacttctgattctggtagtagtggaggaagtgatttgagccacgagttccacaaccttggtcatcatcatcatcgtgagcccacattgaagttaggattcggaactgtggatttgaatccgcaccatcatcaagtacaaggtgttccaagaagcttcattcaccaccaccttcaacctcacatctatggccgcgatttcaaacgaagcgcaagagtcgttcatggtgtcaaaagaagtgtcagggctcctaggatgagat

SEQ ID NO: 80605 - DNA, 109 bp, Glycine max
taagagtctcaaatatctggttgacgagtgtccttttgcatttgtgaactagtatgtaatattttattcacttaaataaagcgcattactatgtgcaatgagtgtgttt

SEQ ID NO: 80606 - DNA, 207 bp, Glycine max
gggagaagagaagttttgtgcaaaatccttgggaacagtaattggttttgccatttcaaagctgggaaagaacattcaagtactttcaagttcctttgtcaataagcaagagcaatacactgtggaaggagtgcagaatcttggagacaaagcagtgatgtgtcatgggctaaatttcagaactgcagtattttactgccataaagt

SEQ ID NO: 80607 - DNA, 125 bp, Glycine max
gaattaaacaaacgaacaagcgaaagaaattaggcatgaccctcttgttgagtatgctctgcctatctgaaaatttccacacctcttttaattgtcgtaatgatgtgtgaagtgtgtgttatttt

SEQ ID NO: 80608 - DNA, 364 bp, Glycine max
gcagtatggatatattggcatgtaagcttccttttttgctatacttccctcttacggtgtttttatatgataagtattttttgaaactgctgtggtgctgtcagactatgataagttttctttggcaagcaatttaagaggcttgaacttgaaataactgaaatttgaagtgtgattggaactgaaatttactgagaccagctccctgcaatcagaggtaggcttccatactgaacacaaatggggacaatagggactaaaatgttgaccatgtcatcattgggacttgtaccatgtcatgcatgaacttcccaaaagcttaagctagtacttgaaggtttatgatttttctttttataaatct

SEQ ID NO: 80609 - DNA, 130 bp, Glycine max
acgacgcacgcacgcgtacgtaagctcttaatctccctctagacaatttttatatatacacatgtaatctaccaagggggctatccatgcctcttacggggattttatataacaattattccctgaaact

SEQ ID NO: 80610 - DNA, 332 bp, Glycine max
cacagattgaagagttccattcgatgcagaggatgatgaatgctcctgattcaaatgataatattgatctactgttgagcattgatttgttgggtttacaaggagcaggtaaagcttttccaaacaagattgtttttgatgataagcttgtgttggctaacacacaagaattctttgatggaaattttccagtggattcttggttaccaatttttgtgaattgtctctatcctgtaagtcaattaccttcagaagctgtcgttgtaaatgttacatgtggtagtggacgtggtggtttcccaccactgtttggttttttttgcatttaaaat

SEQ ID NO: 80611 - DNA, 332 bp, Glycine max
ctcgagcctattcggctcgagtgcagagtttgccgggtccattctctctatacccactcacctctcattcgttctggtcaatcaatcattcattcattcctattccttcttctttctcttccaattccaaatcacgatccttctttttccctctctagaaccttccattttcctctttccttttctgtctttctttactttttttcccttctaggctttctatctctattcaatctctatttattatttatctttaattcttttttttttaatttcttcttattttctattttttttttccatcactattctttttttttatcttttttttt

SEQ ID NO: 80612 - DNA, 359 bp, Glycine max
  unsure (1)..(359): unsure at all n locations
aattatattataaaatgttgcgtttttttttatttatttttatattaaaataatttttaaatatatttaaatttttataatataattttataaaaaaagggcgtgccccccctttttttgagtttttttacacccggaatatttatttttgngaccgtgttcttttgaggcgtttcacaattttttttttttttgaggttttatttataagctttggcgtatttatttgtcttaactttttttttttttaagaattttttttctttttacatattttacacaaaatttagatccggaagcttttaattttaaagacctttgtttcctatttatgtgagcttatttacattttttttttt

SEQ ID NO: 80613 - DNA, 199 bp, Glycine max
taagagcgatgacggacgatgcacgcgcacgtacgctagcaattcggttcgagggagaaataaatatttctatgcatttaagagccttacagagagaaagggcgatgaatgttgttacactgctattagtggaggcttcagaataatactgagtgattttttacaacaagatccagaacccacccacggccgggatcca

SEQ ID NO: 80614 - DNA, 356 bp, Glycine max
agaaactttaagcagatgtctaatgttttgtgggtggctcctgaggacaaggcgagtttatggtcacaacttcattatgtttcgtgtaataatctggaaatgcaagaagcttatcttgtcaatctcgtaaatgtgttacgagaattgtatttgcacagtccagaggaagctcgccaattgagaaggaaagctctctctcgtattgaatggctgcaaaaagctgatgtgcctaccatagcacagattgaagagtttcattcgatgcagaggatgatgaatgctcctgattcaaatgataatattgatctactgttgagcattgatttgttgggtttacaaggagcaggtaaagcttt

SEQ ID NO: 80615 - DNA, 361 bp, Glycine max
gagttgaatgtggaatcccttctggatttccgctcacagggatttgcaatagcatttttaatgagatgctcattagatatagctatgaaaaattactgcgccaggctaaagctccaagtatgtttttacaatccttcaaaaattttgtttctttgtgtgtgtatggtgatgataacttaattagtgttcatgaatatgtcaagccttactttagtggttctaaattgaaaagctttctagctggtcataatatcaccattactgatggtattgacaaaactagtgcaactttgcaatttagaaagttagcagattgtgattttctcaagagaaactttaagcagatgtctaatgttttatg

SEQ ID NO: 80616 - DNA, 343 bp, Glycine max
gattcaggaaaaagttgtattgaaattttcacaagaggaatttcttacagcttggtcaactcaggtgcgtcctgcaacaactctgttggctgatgggtgtccatatttgtatgctatggtgcatgatagttcagtgtctacaataccaggtgattttgtcattggtgttaagttgacaaccataaacaatatgtgtgcatatgggcttaatcctggtatttcaggttctcgtcttttgggcaccattcctcagtccatttcacagcaaactgtttggaatcaaatggcaacagtgagaacaccattgaattttgattctagcaagcagagcttttgtcaattt

SEQ ID NO: 80617 - DNA, 300 bp, Glycine max
ctgctagagcttgaacagagtggggtatagatctcgagctgaaaccataaagttgttgataattgacatgtagcatctgaagaaagaacatgattgaatgcaattgtggatgctatttcatcgaagagtttatctcgtataattaattttgacaatgagaagaaaccccattacaatcttttaccataatttcaggatactgtttaatcaccctattaaatatcgccaactagttcatcaaatattttatatgcaaaagggactacttagattgctgcacatgcagcacaatcaatacta

SEQ ID NO: 80618 - DNA, 312 bp, Glycine max
tgatgattgcacactcacgcacgttgaatagcgttagaaattgaccttaaaacaacattacttatatgaatagatcttggttcttcccggtgggggaccctctaatccaaattacacggttgctgtcgcttcatgaaagcctcacctatgccattcatattcataatcatattaacaacctcactactaccagttgccactgtcttaatttagtccacagccaccctcatgataatgcgcaactggaacgagaagtgggaaaataaaccaacctggtacagcgatccacgcaactgcgccaaagtgtatccc

SEQ ID NO: 80619 - DNA, 353 bp, Glycine max
ggaaatttggctgatgacaccatcaattttgaggcttttccccacaagctggtgcagtttggagagattcaggaaaaagttgtattgaaattttcacaagaggaatttcttacagcttggtcaactcaggtgcgtcctgcaacaactctgttagctgatgggtgtccatatttgtatgctatggtgcatgatagttcagtgtctacaataccaggtgattttgttattggtgttaagttgacaaccataaacaatatgtgtgcatatgggctcaatcctggtatttcaggttctcgtcttttgggcaccattcctcagtccatttcacagcaaactgtttggaatcaaatggc

SEQ ID NO: 80620 - DNA, 336 bp, Glycine max
agtgggcaaatcaaacttcatggcatttgagtttcctgatgtgacaatcccaaacagtctacagtttttgatattctcttgggaatctctcaagattttgaaattgctggtaatactcttatgccagctttttctgttccacaggctactgccagatcttctgaaaatgcggaatcctctgcatgatctggaattcgtgttttctttcgcttgttcgtttgtttaattcaataaaggaaattaggcatgaccctcttgttgagtatgctctgcctatctgaaaattgccacacctcttttaattgtcgtaatgatgtgtgaagtgtgtgttatttt

SEQ ID NO: 80621 - DNA, 259 bp, Glycine max
gcacgcgtacgtaagctcggaattggtggctttaatgcccaaggacagaggaataaatccgttttagtttaaactcaacttttgagggctttttgattaaaaacacagattagtcttagctaacaggtatatgagaatgcttaaagtattaatggtctgtgggagggctgtggaacctgtgctcattgtcaccacaacagtcccatgttcatccacagattgtatttaggcatgtgtgggtggaagatgtaattgggtt

SEQ ID NO: 80622 - DNA, 359 bp, Glycine max
gcttaatcctggtatttcaggttctcgtcttttgggcaccattcctcagtccatttcacagcaaactgtttggaatcaaatggcaacagtgagaacaccattgaattttgattctagcaagcagagcttttgtcaattttctatcgaccttctcggtggaggaattttagtggacaaaactggagattggatcacacttatacaaaattctccaattagtaacttgttgagagttgctgcttggaagaaaggctgtttaatggtcaagattgtgatgtctgggaatgcagcagtcaaaaggagtgattgggcctcattggtacaagtgtttttaacaaacagcaacagtacagagcatt

SEQ ID NO: 80623 - DNA, 364 bp, Glycine max
cacaagaggaatttcttacagcttggtcaactcaggtgcgtcctgcaacaactctgttggctgatgggtgtccatatttgtatgcaatggtgcatgatagttcagtgtctacaataccaggtgattttgtcattggtgtcaagttgacaaccataaacaatatgtgtgcatatgggctcaatcctggtatttcaggttctcgtcttttgggcaccattcctcagtccatttcacagcaaactgtttggaatcaaatggcaacagtgagaacaccattgaattttgattctagcaagcagagcttttgtcagttttctattgaccttctcggtggaggaatcttagtggacaaaactggagattg

SEQ ID NO: 80624 - DNA, 361 bp, Glycine max
ggttttgaaatgtggagttctgagtgggcaaatcaaactgcgtggcatttgagtttccttattgacaatcccaaacagtctacagtttttgatattctcttgggaatctctcaagattttgaaattgctggtaatactcttatgccagctttttctgttccacaggctactgccagatcttctgaaaatgcggaatcctctgcatgatctggaattcgtgttttctttcgcttgttcgtttgtttaattcaataaaggaaattaggcatgaccctcttgttgagtatgctctgcctatctgaaaatttccacacctcttttaattgtcgtaatgatgtgtgaagtgtgtgttattttaaaa

SEQ ID NO: 80625 - DNA, 342 bp, Glycine max
ctggagattggatcacacttatacaaaattctccaattagtaacttgttgagagttgctgcttggaagaaaggctgtttaatggttaagattgtgatgtctgggaatgcagcagtcaaaaggagtgattgggcctcattggtacaagtgtttttaacaaacagcaacagtacagagcattttgttgcatgtaagtggacaaaatcggaaccacattcctgggaattgatcttcccaatagaggtatgtggtcctaataatggttttgaaatgtggaggtctgagtgggcaaatcaaactttatggcttttgtgttttccttattgccaatccaaacagtctt

SEQ ID NO: 80626 - DNA, 357 bp, Glycine max
ttcctattttgtgcttagttttttttttctctctctgttttttgctgctcagcatcaagcaaaaggggaatttttattttttttaaaagaaagttttgttttgtgttgttttctaaacaagctttttttttccttcttctactactattacttccctctcttccctcataaattcagagtctttctgctctttcctaattgggtttgtacattcattgtctttggttgcagcccttttgcttctcattagcttctaatcactttcccaattgggttaagttcaaattgaagctggagaaagacttgtcagttttttctctctgaaagttgtcaatttttcgtgtgtttttttttttt

SEQ ID NO: 80627 - DNA, 362 bp, Glycine max
ttctagctagtcataacatcaccattactgatggtattgacaaaactagtgcaactttgcaacttagaaagttagcagattgtgattttctcaagagaaactttaagcagatgtctaatgttttgtgggtggctcctgaggacaaggcgagtttatggtcacaacttcattatgtttcgtgtaataatctggaaatgcaagaagcttatcttgtcaatctcgtaaatgtgttacgagaattgtatttgcacagtccagaggaagctcgccaattgagaaggaaagctctctctcgtattgaatggctgcaaaaagctgatgtgcctaccatagcacagattgaagagttccattcgatgcag

SEQ ID NO: 80628 - DNA, 356 bp, Glycine max
ctcgagccgaatcggctcgagcggctcgagcctacaacaactctgttggctgatgggtgtccatatttgtatgctatggtgcatgatagttcagtgtctacaataccaggtgattttgtcattggtattaagttgacaaccataaacaatatgtgtgcatatgggctcaatcctggtatttcaggttctcgtcttttgggtaccattcctcagtctatttcacagcaaactgtttggaatcaaatggcaacagtgagaacaccattgaattttgattctagcaagcagagcttttgtcaattttctattgaccttctcggtggaggaattttagtggacaaaactggagattggat

SEQ ID NO: 80629 - DNA, 335 bp, Glycine max
gcacgcgtcgtaagctcggaattcggtcggggaattataataatgcttatttcatattagctgcctgtgacttcttatgcataatttactgttatagaaatggaagctatactgtgaattgtcatgtaaattgtcccttttcattacttgattggtaactcggtactgtatcaaataagaggccatttgattgcggggctttgtataattgacaatatctacttgtagaagtcagattcgcgacacattgtatgagaattaggtcattacattgaaatttctgcgatgattggaatatcaatggaagaccttatactttgctatgacatatattg

SEQ ID NO: 80630 - DNA, 170 bp, Glycine max
ctggaattcgtgttttctttcgcttgttcgtttgttgaattcaataaaggaaattaggcatgaccctcttgttgagtatgctctgcctatctgaaaataacacacacttcacacatcattacgacaattaaaagaggtgtggaaatgatgtgtgaagtgtgtgttatttt

SEQ ID NO: 80631 - DNA, 205 bp, Glycine max
ctagagcgaaatgcgccaaatgagatcacgacttcactgtttaagataccaagggaaacgatattgaccttggaggctacaaaggaatggtcacttatcattgtcaatgttgcctcacaatgaaggcttgactaattgaaagatacactgtgctcagactgatgtttgaaaaacacaaacagaaaggtatgggaattcatggcat

SEQ ID NO: 80632 - DNA, 360 bp, Glycine max
aaaggagtgattgggcctcattggtacaagtgtttttaacaaacagcaacagtacagagcattttgatgcatgtaagtggacaaaatcggaaccacattcctgggaattgatcttcccaatagaggtatgtggtcctaataatggttttgaaatgtggagttctgagtgggcaaatcaaacttcatggcatttgagtttccttattgacaatcccaaacagtctacagtttttgatattctcttgggaatttctcaagattttgagattgctggtaatactcttatgccagctttttctgttccacaggctactgccagatcttctgaaaatgcggaatcctctgcatgatctggaattt

SEQ ID NO: 80633 - DNA, 355 bp, Glycine max
ctcaggtgcgtcccgcaacgactctgttggctgatgggtgcccatatttgtatgctatggtgcatgatagttcagtgtctacaataccaggtgattttgtcattggtgttaagttgacaaccataaacaatatgtgtgcatatgggctcaatcctggtatttcaggttctcgtcttttgggcaccattcctcagtccatttcacagcaaactgtttggaatcaaatggcaacagtgagaacaccattgaattttgattctagcaagcagagcttttgtcaattttctattgaccttctcggtggaggaattttagtggacaaaactggagattggatcacacttatacaaaattc

SEQ ID NO: 80634 - DNA, 357 bp, Glycine max
gcaaactgttcgcaatgcttttgttgatttgataacatggtaattggctgaaactttgcttgaactactattatgtatatgatatgatatggttttgtttccaaatttgagttgtgaccagtaaattttgatggtgaatcaatgaatgtatttgatgccatgactgatgttatcctgtcccattaagatacagatgggattcaaaatacgtgtgttgtttggagatgcatgtgcttaattgtgcaatctgcatgcaaatttcagtgtttatggctatgcaatgcttgttatcgatctcataaaccaaatggcaatggaaacgtagtcttttcgtatgtctattacttgatttcaagt

SEQ ID NO: 80635 - DNA, 372 bp, Glycine max
cggctcgaggctcaagcactgcctttcattgtgcttaattaaaaggcaaacctttgtacatgtgcgttgttttgaaacatctcatcaccacactaattatctcacactcaaagctatagaccaaattaaaatgaaaggaaacaacccctatttggttgtgattctcatacaaaccatatatgctgctatgattcttctctcaaaagtggcattcgatcatggcatggacagttttatcttcgtcttctatagacaggcagcagcaaccctctttttgacccctttcactttcttcttcgaatggaaaactgcaccacctatgcctttttggaccttctgcaagatttttttcatttctttatttgggattac

SEQ ID NO: 80636 - DNA, 366 bp, Glycine max
ggtttatttcctctcacgaatgtgatcccaggacctagtgtttttcaaatgcataacagcccatcctgtgaaatagttgcttatataatcaaattattcctaccaatacttgtattttccctatacctttcttcagttgattatggtgcaaattcttaattgatataatctattttagtctttaactcttattatgattcaatacatacctttttattcattctgttacctatgcagatttataatttcttgcaactttgtatttatgatttatctatttttttttttttatatttttattttttattatttttcttttttttattaagttttctttttttacaattagattaatttagttttaat

SEQ ID NO: 80637 - DNA, 307 bp, Glycine max
cgaataacatagattagcgttatgggtctcttcctttctaggaatttggcttgcaaattcatatacccttttcttttttccaataaggtttcaaaggatttgttccccaagcagttggagaacatgatgtctctggtctctcctcgtactggcaggcatttgcagcgctatgacaaaggctgtcgccaagttgtggggtgtgtttctcttccttctttccttcttctttctgggctttcttaaagttctgatttttatgggtttcattttctaaaattaatgtttttttttataaataatattacac

SEQ ID NO: 80638 - DNA, 164 bp, Glycine max
  unsure (1)..(164): unsure at all n locations
gcacgcgtacgtaagctcnnaattttgctttagatataatttatccccccacgnaagaacagcggggtagctgcattccgtaccagatctggccaaaacacnaccacatttaataagaccatgacagttcatgtaactggtctctaaacaaacacactgacctt

SEQ ID NO: 80639 - DNA, 366 bp, Glycine max
cctcagtccatttcacagcaaactgtttggaatcaaatggcaacagtgagaacaccattgaattttgattctagcaagcagagcttttgtcaattttctatcgaccttctcggtggaggaattttagtggacaaaactggagattggatcacacttatacaaaattctccaattagtaacttgttgagagttgctgcttggaagaaaggctgtttaatggtcaagattgtgatgtctgggaatgcagcagtcaaaaggagtgattgggcctcattggtacaagtgtttttaacaaacagcaacagtacagagcattttgatgcatgtaagtggacaaaatcagaaccacattcctgggaattgatc

SEQ ID NO: 80640 - DNA, 318 bp, Glycine max
tattataattatatgattaaaatggtggccacaggtggtattcctgagaatacaggtatagcattggcctgtgctatgaatagttcttttagggggcgcgccagttctgatatttacaccatctgctctcaagactgtgaattatggaatcctgcttgcacaaaagcaatgactatgtcatttaatccaaacctgtgttctgatgcatggagtttggaatttctgaagctttccgtgtttattctgttttttatttgctgttttggttggtcttgtttatttttttttttatatcttattattatttaattgtttttt

SEQ ID NO: 80641 - DNA, 353 bp, Glycine max
gcgaggggttgactttcttgcccaccggtggacggccagccgtgggatctggtcactgttagaagctcataaccctaggctctgtaaaggggcgagccattgacctccgcctttctttttcatagcctaatgccttcaatgtcgatgtagaactcagcatccaatggctgccggactcattaacttcagcgttcatgcctgctctagctgatgacagaacagctgaatagactgactcagaaggtgatgttggcccaaaagcagacgaggaaagggcccttgtacactactactgtgtataacaccgatgtggactacccatgcactgagagaccacgctctatttttgaagc

SEQ ID NO: 80642 - DNA, 343 bp, Glycine max
gggtgttcccagatagagcaaaccggagaagtcgcacaccaagtgttcgacgaaacgcgtctcttatggtggatgcattccggcgattttagaagcattggacgcagttctcggtgtggacgaggctcttgggccgtgggaggagaggcttagcaacaaggagaggagcatcattttgaaggagcagctgaggtgggacagagctttggagattttcgagtggttcaacaaaaagggtcatgaattgaacacgattcattacaacatcatgctgaggagccttggcagggcccgtcagtggaggcgcgtggagagtttgtggaatgagatgaatgctagaggc

SEQ ID NO: 80643 - DNA, 237 bp, Glycine max
cggtgcttttctttcctgcagcctctcacacaacaggacagactatttgtgtagaggggggcttaacagtgactggtctctatataaatcagagaagctctaccaacacactatgtaacacactagtcttgacacatattctaccataagtgacaaataataaacaatgaccaaatcattagaatacgagctcggacccatatatatctgtgacatcttaaaaatttcaacgcaatc

SEQ ID NO: 80644 - DNA, 323 bp, Glycine max
  unsure (1)..(323): unsure at all n locations
cctttgttcactcttcttnnnttgcggctagggttttagcgcagcttcttctagatttaaggaagatgggtaaggaaaaggttcacatcagtattgtggtcattggccatgtcgactctgggaaatccactaccactggtcacctgatttacaagcttggaggcattgacaagcgtgttattgagaggtttgtgttgcaagctgctgagatgaacaagaggtctttcaagtatgcctgggtgctggacaaacttaaggctgagcgtgaaagaagaatcaccattgatattgctttgtggaagtttgaaacaacaaagtattat

SEQ ID NO: 80645 - DNA, 364 bp, Glycine max
  unsure (1)..(364): unsure at all n locations
tgattagtgtcggattggattggattagggaatattgggaaataactttccaaatatataatctgtggaaaaaacccactggttgagttttgattataaaattttatggcccaaactntatnatcaaaactcatcctgagagaccatccacagatatcacactaaggatagaaattttccgaagttcacaaaatgaccaacttccgccaagatcaaccaggccgaggtccgtgcggtcctacgcacacatgcgagcgtcttactggtgttcttggggccgctaatatattgtacgaatccaaaggaaacggtgaagacttcattaatgacgttgcctgtaccattagaacttgtcatgttaatg

SEQ ID NO: 80646 - DNA, 367 bp, Glycine max
aaaagctttctagctggtcataatatcaccattactgatggtattgacaaaactagtgcaactttgcaatttagaaagttagcagattgtgattttctcaagagaaactttaagcagatgtctaatgttttgtgggtggctcctgaagacaaggcgagtttatggtcacaacttcattatgtttcgtgtaataatctggaaatgcaagaagcttatcttgtcaatctcgtaaatgtgttacgagaactgtatttgcacagtccagaggaagctcgccaattgagaaggaaagctctctctcgtattgaatggctgcaaaaagctgatgtgcctaccatagcacagattgaagagttccattcgatgc

SEQ ID NO: 80647 - DNA, 363 bp, Glycine max
aattgaactagttggtatctcactacaccacaggacactgcactcttttcaaaaccctaaccatggcttcagctccatcatcgccagaaactcctcccaacacaaacttcactgccacctctactcctccactcaagatttctcccgcaactcttcccaatcccaataacaaacgcttgctgatcggattatctatagggtttgcccttttatcttttgttttgatccttgtgattgcctttctcgtctacttccttcatcgggtaaggaaaaataaacgacataagagcttcgggagaataccacttcaagatggattctacgacgttcttggtgaaggtggttttggccatgtctacaaag

SEQ ID NO: 80648 - DNA, 238 bp, Glycine max
  unsure (1)..(238): unsure at all n locations
cgcgnacgtaagctcggaattctgctttagaattgaattttccggcaccncacnacaccacgggaggctttttttttttgaaaaccctaaccacaaaatcactttcatcaaatacagaaactttctatcaacacaaactttacttccacctctactactacactcaatatttattccgtaactcttaccaatcccaataacaaactctagtttaacttattatctatatcgtctgccc

SEQ ID NO: 80649 - DNA, 274 bp, Glycine max
  unsure (1)..(274): unsure at all n locations
gttttgtttacattctttaataaaggaaataatggcgactgggctgtgtttcataacattaaatagtgaagtatgaagcatgaacgttgcacaagcctaatttgcaataatttgtaacattaatattgtgttattctaatatttttatagataagnnngtgatgtaaaagacagaaaagtgtgatttctgaccattaaattttcttttgtcattaaccaataatgtaaaatattgtgtgagtaacaatgactcaatgatgaggatattatgtat

SEQ ID NO: 80650 - DNA, 368 bp, Glycine max
ctattttcgggtggagattacttcaagacagattaccaacaaaatgtaatctgcgaagaaggcaagttcagatctcggatgctttatgtcctttttgtggtgttagggatgaggaggtgtcccacctattttttcactgcacaaagatttggcctatttggtgggagactatataatggctgagtatcactacaggcttcccttccaatccagctcagcatttccttcagcactcctttgctcaagtggaagggttaagaagaagtaggtggcaaagttggtggatggctgtggtctggtctatatggaagatgaggaacagaattattttttccaatgattcttttaatggtagtaagcttgtagac

SEQ ID NO: 80651 - DNA, 353 bp, Glycine max
ggcggtttttgatgacatcaagcttgacgttcatctccaatgtcttggtggtcatggtggataggttctgggtaaagtagtatacagcctcttcaaagaggtccatcatggtttggtggctggaaagagcgaacatggttgatgacaggggtagaggtagaagttccggcagaggtagttgctgatggatggtaatatggaggggatgtcatggtaagagatggtttgcgctggcatggcagccatggaaggcagtcattgtctctcaatgaaagcaccaaatttgttagactctctggtttagaggaccagaaaccttccaagaagaagaagagaaataggaaaactcaaca

SEQ ID NO: 80652 - DNA, 328 bp, Glycine max
attcggtgtagttcgcgcctcctccttctttggctccttcgcatagtgaagagaaagagagcaaaagcaaatcgtcttgccataatgggttgtgtaagcaaaacatgggagcggttgctggtgttgttactgctggggcatttgttttggctctttttgctggtgccttgatttggttttactctaagaagtttaagcgtgttaaaaagtttgattcacttggttcggagatcattagaatgccgaagcagtttagctacaaggagctgaattctgctaccaagtgcttcaatgcgaataggatcattggtcatggcgcgtttgggac

SEQ ID NO: 80653 - DNA, 164 bp, Glycine max
  unsure (1)..(164): unsure at all n locations
gttttaatataaaaaacantcatcaatcattatcaacggtattttttagtgtaccctgccacaacaattatttctcctgcttttttattattctttcttttttcctagctctttcttttcacttacctatttctatattttatccttctaataccctatataat

SEQ ID NO: 80654 - DNA, 368 bp, Glycine max
cgttaatcagccccaagagaaagatttgttggaaggaaatttttcctttgatattaaatctcgctctagattggaaaaagtttcctctacaaaagcacaatttgttagtggaaaaaccttcaaatatgatatagttggtgctggttcacattcttcagaagatttttctgaaaaggaagatcaagaaaaacccaaaaagattgatgccagattgagacaaagaatagatcctcaatacaatgaggttcaggctcagatggaaacaaatttgtttaaattgtctcttgatgatgttgaaactcctaaaggttccatgttggatcttaaaatttctcaatctaaaattgcacttcccaaaaacacagttg

SEQ ID NO: 80655 - DNA, 215 bp, Glycine max
ttacaaaaaaatttgttatgcaaagacacctgttagatcgtgaaatttttctacgcccaaaggtctctctaaaaaaaactaaacatttaccctctttaaaaaattcaatcttttgtgtgacttttttggttgactggttgtataattatcttaatcttcattcgtctggtttttaatgaatttttcatgtctttaattattcttatttttttctt

SEQ ID NO: 80656 - DNA, 327 bp, Glycine max
tgttgttgtaactcgttcttcttcttttgttgttctgtgtttgtgtttgttttttctctcacctgaaaatgtcttgctgcggtggtaactgtggttgcggaagctcctgcaagtgcggcaacggctgcggaggctgcaagatgtacccagacttgagctacactgagtcaaccaccaccgagaccttggtcatgggagtggcacctgttaaggctcaatttgagggtgctgaaatgggtgtgcccgctgagaacgatggctgcaaatgtggaccaaactgctcctgcaacccctgcacttgcaagtgaggtgttgggagagcaagct

SEQ ID NO: 80657 - DNA, 348 bp, Glycine max
attcaaacgaaaccttccattaacaactgttcagatcattacatctacaaactaatttttaagaaaagaaatccacagaaaaccctagatctgcaacacaaccgtttttacagacacaggatatagacatccaatctcaagatttggatgaagtggagataatgcaacagccttcgcctaagtcgtgtgctcagattgactccctcatgcagaatgcatcataagttgatgaatactaacgtgaactttctgtttgtaacatgaatcatccagttgggggaatgtgtccgtctttatttggacatgccccttgcctgtaaatcaatcctgtattgaattcttaattta

SEQ ID NO: 80658 - DNA, 124 bp, Glycine max
gattttgttcctaaacacaaacaaaacccaccattgggaaatttttagatcattacagtatcaaactaaaattaaataaaagaaataaacaatactcccttattctactacacaaactatttta

SEQ ID NO: 80659 - DNA, 267 bp, Glycine max
  unsure (1)..(267): unsure at all n locations
ggaattttagtgttcaaaactggagattggatcacacttatgcaaaattctccaattagtaacttgttgagagttgctgcttggaagaaaggttgtttaatggtcaagattgtgatgtctgggaatgcagcagtcaaaaggagtgattgggcctcattgggacaagtgtttttaacaaacagcaacagtacagagcattttgatgcatgtaagtggacaaaatcaggaccacattcctgggaattaatcttcccantagaggtatgt

SEQ ID NO: 80660 - DNA, 313 bp, Glycine max
tgggaatgcagcagtcaaaaggagtgattgggcctcattggtacaagtgtttttaacaaacagcaacagtacagagcatttcgatgcatgtaagtggacaaaatcggaaccacattcctgggaattgatcttcccaatagaggtatgtggtcctaataatggttttgaaatgtggagttctgagtgggcaaatcaaacttcatggcacttgagtttccttattgacaatcccaaacagtctacagtttttgatattctcttgggaatttctcaagattttgaaattgctggtaatactcttatgccagctttt

SEQ ID NO: 80661 - DNA, 179 bp, Glycine max
gttctttttatgtggagatattttgttggagatctcgtctttgaagtttctaagatgacttctccctacattaaatgtacagtctctttcttcatagcatttggaaatttggctgatgataccatcaattttgaggcttttccccacaagctggtgcagtttggagagattcaggaaaa

SEQ ID NO: 80662 - DNA, 359 bp, Glycine max
caggtttctccgcctgagccattaagagtggacgtagagactacacctggatgggagacgtctgtagctcacggccaaatatcagagaacgttacagcaagggatccaaacgagcacacgcctccgtccgaaacacctgttgagcggcacagtcctcagcttccggattcaagcacagcacaaggtacgacatttacgtctcccgttgagtcccttacaactacaagagcgcgatcgtcccagttgttccagtcctcaccatcggcagggtctgtcctcgatactccactgaagcaggccgatacgcctaccggacctcagagcctcgcatcatcgcccccaacagccccgcgatcagt

SEQ ID NO: 80663 - DNA, 244 bp, Glycine max
tcactatgttttttatttctcacaaccaaatgatgaaagcagaagaataaagcgttgatgtgggtgagatatttcttgggataatgaaagtctcaaacctgcatgatctgatggcgtaaacttgttataaaaacgccgcttttaaataaacttggcatccttacagtaggaaacactacatcgttgactctattcaaaatatactaagggtgttaatgttgagaaagcaatatgtcttaaggat

SEQ ID NO: 80664 - DNA, 396 bp, Glycine max
ggctcgagttcacttgatctcatcataatcgtcagcgtcaattgaagaagatgccgatcagaaacatcgccgtcggaaggcctgaagaggcgactcaccccgacacgttgaaggcggctttggctgagttcatctcaaccttcatcttcgtgttcgccggctcaggctccggcatcgcctacaacaagctcaccgacaacggcgctgccacccctgccggcctcatctccgcctccatcgcccatgcattcgccctcttcgtcgccgtctccgtcggcgccaacatctccggcggccacgtcaaccccgccgtcaccttcggcgccttcgtcggcggcaacatcaccttcctccgcggcatcgtctacgtcatcgcccagctcctcggctccatcg

SEQ ID NO: 80665 - DNA, 357 bp, Glycine max
tagaagagctgtgacatgcactggtccgtaagctcagatttcggctcgagcgggtcgagtttttattttttttaaccaagttgaagggcaataattaaatgtccaacattttttgggtggtgatgtttgaaattaagggttcccatttttagggaaatttttttttccgggggtttgagcaattccactggtaggggcaggacccattaaggtcaatccttttcaggtgccttcctctatatggtggctcaacgtcataggatctaaccctccctctgcttaaaaaacacctatctaaaaaataacataatctcttactcgctcaggttatttttatattaacacaaaaaactatat

SEQ ID NO: 80666 - DNA, 411 bp, Glycine max
ctgtttcagaagttgaatgtagtttggtgatacggagagaggttgccctgtcctgtcggtggctctgatctatgtatgacatttccacgatgctatatgcttgcttcgccatttcatcactagtgtcttcttgtcttggaagttgctatggaatctaggggttcaacaagctaaataaaagaatagtttgtttctgaaagtaaggtgataaagcatggagtttttgaaaatcaagaagttcagaaaatctcagaaagcagatggagaaaaggatttggcagacaaggcagtgcctgagcctgaggaaccaaagctgaacaccgactgtcctgatcagtgtaaatcagaaaacgcagattctgcaggtgaagctgaggatgatgatgattttattactaatgaggttaagag

SEQ ID NO: 80667 - DNA, 414 bp, Glycine max
  unsure (1)..(414): unsure at all n locations
tggtcacaacttcattatgtttcgtgcaataatctggaaatgcaagaagcttatcttgtcaatctcgtaaatgtgttacgagaattgtatttgcacagtccagaggaagctcgccaattgagaaggaaagctctctctcgtattgaatggctgcaaaaagctgatgtgcctaccatagcacagattgaagagttccattcgatgcagaggatgatgaatgctcctgattcaaatgataatattgatctactgttgagcattgatttgttgggtttacaaggagcaggtaaagcttttccaaacaagattgtttttgatgataagctngtgttggctaacacacaagaattctttgatggaaattttccagtggattcttggttaccaatttttgtgaattgtctctatcctgta

SEQ ID NO: 80668 - DNA, 404 bp, Glycine max
attccaatatattccattctctctgggtatttccctacctctcccttcaagatgcagatctttgtcaagaccctcaccggcaagaccatcacccttgaggtggaaagctctgacaccatcgacaacgtcaaggccaagatccaggacaaggaaggaatccccccggaccagcaacgtctcattttcgccggaaagcaacttgaggacggccgtacccttgctgactacaacattcagaaggagagtactcttcaccttgtcctccgtctccgaggtggcatgcaaatctacagtaagacactcaccggcaagaccataaccctagaggttgaaagctccgacaccatcgataacgtcaaggccaagatccaggacaaggagggtatccccccggaccagcaacg

SEQ ID NO: 80669 - DNA, 98 bp, Glycine max
gaacatatatattttatatgatgaaacaaaaaaaaatgttctctcaagattattacatatttctagcataaatcttgagagaaatatgtaataatctc

SEQ ID NO: 80670 - DNA, 409 bp, Glycine max
cttggcgagcgtttatgatacagtgggattaagcttgctcttcctgcagaaagcactactggaacatgttttgtacaacaatacattgaatctatattggctcttcaagaagccagctcacaaggtgaatcccagacacagattcctcttgttattatgacatctgatgacacccatggacgtactttagagttattagaatcaaattcttattttggtttgcaacccacgcaagtaacacttttaaagcaggaaaaagttgcatgcttagaagataacgatgccaggcttgcattggaaccacaaaacaagtacaaaattcaggtatgaagctgggttgaaatgggttttattttttcaagatacaaatgggcttttattcaaggcaattccatcagcactgggcgtc

SEQ ID NO: 80671 - DNA, 392 bp, Glycine max
ctcgagccgaatcggctcgagcggctcgaggaaaggacacacctgctgttggcttgttgttcaaggatggcaatttgtaagaaagatgtttggagagttgaatgtggaatcccttctggatttccgctcacagttatttgtaatagcatttttaatgagatgctcattagatatagctatgaaaaattactgcgccaggctaaagctccaagtatgtttttacaatccttcaaaaattttgtttctttgtgtgtgtatggtgatgataacttaattagtgttcatgaatatgtcaagccttactttagtggttctaaattgaaaagctttctagctggtcataatatcaccattactgatggtattgacaaaactagtgcaactttgcaatt

SEQ ID NO: 80672 - DNA, 425 bp, Glycine max
gaagctcggatttcgtctcgagcacttccaatccaaatttttttcccccccggagtcccaagaccgggccggcttcttatcatcgtgggaggcccaattcaccaaaaaggccgccaagaaggaggccgtcaagctggagaagctccgccgacgccaggaaatcgccgccgctttctccgtcactgccaacctcttcgtcgactaggaggaccccttcggcgggaactacggcgacgttccttttttggagctgcagtccaagacgccgtctgaccgttggctagtggacgctcgttgaggcgctcggcgtcactctggagaacaattcgttgttgatcctatgtagggctgcatgctattctccccgttagaaagaatattgctttttttttcatcagagagaatggttttaccgttcaatgctt

SEQ ID NO: 80673 - DNA, 371 bp, Glycine max
gagatgcgtaagcgcatgggtatcaaggctgaggtgcccggtgttgagaactactacgacaagctgtaagcgaacttaccttgaatggatgatatcagatcctgtgtccttgtggatgcagaacctcaacaggctgctagcgaagacctgggacgcctgcctgagccccatagagaagccccttgcgaagacatcacggtggccttttgtcaaatgacaagccgccgagacaaggaaccaaaaaaatatggtaaataaattttgagggctagattgaggccataatcacggggaagctctccgcttggcttttatgtagtgatgtgccgatagtggaaacatgacaaaagaaatgatgactttttatgttc

SEQ ID NO: 80674 - DNA, 407 bp, Glycine max
accattgaattttgattctagcaagcagagcttttgtcaattttctattgaccttctcggtggaggaattttagtggacaaaactggagattggatcacacttatacaaaattctccaattagtaacttgttgagagttgctgcttggaagaaaggttgtttaatggtcaagattgtgatgtctgggaatgcagcagtcaaaaggagtgattgggcctcattggtacaagtgtttttaacaaacagcaacagtacagagcattttgatgcatgtaagtggacaaaatcagaaccacattcctgggaattaatcttcccaatagaggtatgtggtcctaataatggttttgaaatgtggagttctgagtgggcaaatcaaacttcatggcatttgagtttccttattg

SEQ ID NO: 80675 - DNA, 235 bp, Glycine max
ctctctctctctctctctctctctgaacaagagcctgcagccagagttagagggaaatcaagcacggctcaatcatcgaatcatagagaacacatacagaagaaggaaaagtggaaccctggaagctgatattgtaggaaggtttgcaagaaaacggattttgttttgagatatatgcatgtgcaagtgcatagggaaattaacaaaaaataagatgacatggtgcaatgactct

SEQ ID NO: 80676 - DNA, 395 bp, Glycine max
  unsure (1)..(395): unsure at all n locations
ctttttctttttttttgatcgtttgaaancattttcatcataagagaactatctacaagtgtttttacaagcttttccttttttctcccaccaaaaaagtactccaataaactagaggattttttaaaagaaaaaaattttgaaaagggtcccaccctttccctccagacaccagttcctttacaagccaacaccagaccaacatcgagcacatgactgagcggcaaacccttgataactgccatttgaatattttaatagagtcacggctatatgtgaaaggcaagagggaaaaaacactaacgactttttgaactaaacatatttgcacccaacatacaacgctcttttttccctaatatggcctctgttcatgagagagctaaattcctaaa

SEQ ID NO: 80677 - DNA, 405 bp, Glycine max
aaatggcaacagtgagaacaccattgaattttgattctagcaagcagagcttttgtcaattttctattgaccttctcggtggaggaattttagtggacaaaactggagattggatcacacttatacaaaattctccaattagtaacttgttgagagttgctgcttggaagaaaggctgtttaatggtcaagattgtgatgtctgggaatgcagcagtcaaaaggagtgattgggcctcattggtacaagtgtttttaacaaacagcaacagtacagagcattttgatgcatgtaagtggacaaaatcagaaccacattcctgggaattgatcttcccaatagaagtatgtggtcctaataatggttttgaaatgtggagttctgagtgggcaaatcaaacttcat

SEQ ID NO: 80678 - DNA, 402 bp, Glycine max
ctcgagccgttctctatctctcccttcaagatgcagatcttcgtcaagaccctcaccggcaagaccatcacccttgaggtggaaagctctgacaccatcgacaacgtcaaggccaagatccaggacaaggaaggaatccccccggaccagcaacgtctcattttcgccggaaagcaacttgaggacggccgtacccttgctgactacaacattcagaaggagagtactcttcacctcgtcctccgtctccgtggtggcatgcagatcttcgttaagacactcaccggcaagaccataaccctagaggttgaaagctccgacaccatcgataacgtcaaggccaagatccaggacaaggagggtatccccccggaccagcaacgtctcatcttcgccggaaag

SEQ ID NO: 80679 - DNA, 385 bp, Glycine max
ctcgagccgtttcctatctctcccttcaagatgcagatcttcgtcaagaccctcaccggcaagaccatcacccttgaggtggaaagctctgacaccatcgacaacgtcaaggccaagatccaggacaaggaaggaatccccccggaccagcaacgtctcattttcgccggaaagcaacttgaggacggccgtacccttgctgactacaacattcagaaggagagtactcttcacctcgtcctccgtctccgtggtggcatgcagatcttcgttaagacactcaccggcaagaccataaccctagaggttgaaagctccgacaccatcgataacgtcaaggccaagatccaggacaaggagggtatccccccggaccagcaacgtc

SEQ ID NO: 80680 - DNA, 146 bp, Glycine max
ggtcctttcagtcagatactcctttacgctcttgttcattctcctgctgttatcaccttcacacattgctttaacaacaccaacactagcttacacactaacacaattagccaccaaaaataggcatacaaaccgcaacattcata

SEQ ID NO: 80681 - DNA, 374 bp, Glycine max
gagaaagatttgttagagggaaatttttcctttgatattaaatctcgctctagattggaaaaagtttcctctacaaaagcacaatttgttagtggaaaaaccttcaaatatgatataattggtgctggttcacattcttcaggagattttcctgaaaaggaagatcaagaaaaacccaaaaagattgataccagattgagacaaagaatagatcctcaatacaatgaggttcaggctcagatggaaacaaatttgtttaaattgtctcttgatgatgttgaaactcctaaaggttctatgttggatcttaaaatttctcaatctaaaattgcacttcccaagaacacagttggaggaaccattctgcgtagtga

SEQ ID NO: 80682 - DNA, 373 bp, Glycine max
gttgcactattatttgaaggctacaccatgaaggtatgatgattttcctataaaaatatgctcatatagccaggatcaacaatttaaacaagaaatgtgcacaagtgaataaatagtacaaattttttagattcatattattctttgatgatacatacggtcttgatgcttgtctaatttctagtgctgcctcattttctcataacctttttcagtttacttttcagcagaatagcttttttgtggcagccccctaagtactcacaagcatctcgataaagtgaaatttgatcaacaaattagctaaatttactgccatctttgtcctacctgaaccttatctgattgttttgtgtgccagattcgccaagtc

SEQ ID NO: 80683 - DNA, 514 bp, Glycine max
  unsure (1)..(514): unsure at all n locations
gaagtatctantagacgttcgcatgcaccgcgtaccgnntaagctcgnngaattcggcttcgagggattctcttgtgnntagaagccanntgtcaaaggggtcncnntggtctcttancctctgaccattnnggcaagaaagggcctcgagatncctcctcttcaaggggactactcatncagtgacccnnagaagnnttcaccaaatcactactctnatctcacccnnactggagttgcttatttaacatctnctcagggacccannagaaaggtgantcnnnttttgtggctttgatgttaacccacccanngttgaagaaccaagaaccatcnnaccactganntatcaaattagaccacttaattctncaatcttctcacnaactatnncactgtcaatganngcctgctcctggtctcaagaaactatttttagcttcnnagagttcctgatcaaaaggtctggaaaggtggaagttcagtacttgcatgactatgctggaataagcac

SEQ ID NO: 80684 - DNA, 59 bp, Glycine max
tagcaagtggacctcaaagtatttgccattgattaagcagcacaattcttttttatata

SEQ ID NO: 80685 - DNA, 210 bp, Glycine max
gctttttttgttccacaggctactgccagatcttctgaaaatgcggaatcctctgcatgatctggaattcgtgttttctttcgcttgttcgtttgtttaattcaataaaggaaattaggcatgaccctcttgttgagtatgctctgcctatctgaaaatttccacacctcttttaattgtcgtaatgatgtgtgaagtgtgtgttatttt

SEQ ID NO: 80686 - DNA, 392 bp, Glycine max
gcacgcgtccgtaagctcggaattcggttggggaaaaattttaattttattaaatttggccaaatattattaaaaaaaaaaggccaattaaaattaaaaaaattttaaaaaaaaatttttatttaaaaaaaaaattggattttttaaaattaaataaaatggtaaaaataaaaattaaattaaataattcttttaccaaaaaaaaaaaaaaaaaaaaaaaagaagaaataaaaaaatagaaaaagaataaaagagaaaaaaatagggcattatgctttcagcgacttaggtgaaaaaaactaaaaagggggggccgccatttggtgggctcttccccccggaaataatttcgggacgggtccttgggggggtaccagttttccttttggggg

SEQ ID NO: 80687 - DNA, 403 bp, Glycine max
gtccgtaagctcggaattcggcttgaggtggtttttaattgaaaagctttctagctggtcataatatcaccattactgatggtattgacaaaactagtgcaactttgcaatttagaaagttagcagattgtgattttctcaagagaaactttaagcagatgtctaatgttttatgggtggctcctgaggacaaggcgagtttatggtcacaacttcattatgtttcgtgcaataatctggaaatgcaagaagcttatcttgtcaatctcgtaaatgtgttacgagaattgtatttgcacagtccagaggaagctcgccaattgagaaggaaagctctctctcgtattgaatggctgcaaaaagctgatgtgcctaccatagcacagattgaagagttccattc

SEQ ID NO: 80688 - DNA, 371 bp, Glycine max
ccaccacttccaccacctcatgtaagtactaatttcccaccaccttaaaaaaaattgggttccactaaacaactacaaagtttcccttaacaatgcttctccttgtcctatatacccacatgggaatattatcatcttattttttcccctctaaaaattagtccacttttccatcaacatgtgccccctttcaatctctctcatgactcatcacaaccccagatcttaatcatctcatttaatctgaccctcttattttgtgtcatcgagttcactaaaaagatcagatttttcagtgaagcgagaagaaagaaacctaccccctccatgttgatactagtgcttggactagcttcagctacttttttagt

SEQ ID NO: 80689 - DNA, 373 bp, Glycine max
aaataggtggatgggaaaactgactttccctcagggcacttcccgaagtgttaagagaatgcctctttctatagggggaggagctggtgcaaagaatgctattctcatgaatatgccaaatgctgttctttcaatgtggagatattttgttggagatctcgtctttgaagtttctaagatgacttctccctacattaaatgtacagtctctttcttcatagcatttggaaatttggctgatgacaccatcaattttgaggcttttccccacaagctggtgcagtttggagagattcaggaaaaagttgtgttgaaattttcacaagaggaatttcttacagcttggtcaactcaggtgcgtcccgcaacgact

SEQ ID NO: 80690 - DNA, 343 bp, Glycine max
ctgagacggtgatgagaggagagaaggagggcgtcgtggcttgggatattcggaagcgcttattcccggcacgaagaagcaagtgcgcgttggctcccaaacataagaaagggaaacaacataaacctgtataagctgtgctctggcctcaaacgtcttggatacttgatgaacccatgggacgggctattgaagccctaacttactacgcccactgtctcatcacatgacgccctatgctatgattgagctacaatatgcgaattctgtaactcttcatgctactgatgttgcacacactcctactactgttaacttgggcctacctaatggtgcttctgaa

SEQ ID NO: 80691 - DNA, 78 bp, Glycine max
gaattttgattctagcaagcagagcttttgtcaattttctatcgaccttctcgggggaggaattttagtggacaaaac

SEQ ID NO: 80692 - DNA, 160 bp, Glycine max
aagagctatgacgtgcccctgcacgctgaagcgtcggatttgggttcgggccgcttttgaagtttttaagatgactcctccctccattaaaggtccagttttttttttaatagcattgggaaattgggttgataacaccatcaatttgggggtttttccc

SEQ ID NO: 80693 - DNA, 65 bp, Glycine max
  unsure (1)..(65): unsure at all n locations
cgcatccacccgtacgtaagctcggaattcggctcgngcaaataaaatanaaaatttttattttt

SEQ ID NO: 80694 - DNA, 411 bp, Glycine max
atttggaaatttggctgatgacaccatcaattttgaggcttttccccacaagctggtgcagtttggagagattcaggaaaaagttgtattgaaattttcacaagaggaatttcttacagcttggtcaactcaggtgcgtcctgcaacaactctgttggctgatgggtgtccatatttgtatgctatggtgcatgatagttcagtgtctacaataccaggtgattttgtcattggtgttaagttgacaaccataaacaatatgtgtgcatatgggcttaatcctggtatttcaggttctcgtcttttgggcaccattcctcagtccatttcacagcaaactgtttggaatcaaatggcaacagtgagaacaccattgaattttgattctagcaagcagagcttttgtcaatt

SEQ ID NO: 80695 - DNA, 417 bp, Glycine max
ctcaagagaaactttaggcagatgtctaatgttttgtgggtggctcctgaggacaaggcgagtttatggtcacaacttcattatgtttcatgtaataatctggaaatgcaagaagcttatcttgtcaatctcgtaaatgtgttacgagaattgtatttgcacagtccagaggaagctcgccaattgagaaggaaagctctctctcgtattgaatggctgcaaaaagctgatgtgcctaccatagcacagattgaagagttccattcgatgcagaggatgatgaatgctcctgattcaaatgataatatcgatctactgttgagcattgatttgttgggtttacaaggagcaggtaaagcttttccaaacaagattgtttttgatgataagcttgtgttggctaacacacaagaattc

SEQ ID NO: 80696 - DNA, 411 bp, Glycine max
gatggtttgattaccaagcaagttatgagcaagatggcagaaatgataaacagtctttgtggtggtgatgaaaaattgatgcgtgaaaggacgcacctgctgttggcttgttgttcaaggatggcaatttgtaagaaagatgtttggagagttgaatgtggaatcccttctggatttccgctcacagttatttgcaatagcatttttaatgagatgctcattagatatagctatgaaaaattactgcgccaggctaaagctccaagtatgtttttacaatccttcaaaaattttgtttctttgtgtgtgtatggtgatgataacttaattagtgttcatgaatatgtcaagccttactttagtggttctaaattgaaaagctttctagctagtcataacatcaccattact

SEQ ID NO: 80697 - DNA, 213 bp, Glycine max
agggatgcagggtctaattattctgctccaagcttattgaatacagaatgtacctcaaatccattcaggtccaaaggtgcagaaaaatcttcttgggaaactaaaagtaattctaataagacctcctcatggggggctgcagtggataaaactggaattgcttcttatgcagatcaatcttgtggcttgggaaaaggtggagggagcttgggt

SEQ ID NO: 80698 - DNA, 401 bp, Glycine max
ctgcttaaagttttatgggtggctcctgaggacaaggcgagtttatggtcacaacttcattatgtttcgtgcaataatctggaaatgcaagaagcttatcttgtcaatctcgtaaatgtgttacgagaattgtatttgcacagtccagaggaagctcgccaattgagaaggaaagctctctctcgtattgaatggctgcaaaaagctgatgtgcctaccatagcacagattgaagagttccattcgatgcagaggatgatgaatgctcctgattcaaatgataatattgatctactgttgagcattgatttgttgggtttacaaggagcaggtaaagcttttccaaacaagattgtttttgatgataagcttgtgttggctaacacacaagaattctttga

SEQ ID NO: 80699 - DNA, 319 bp, Glycine max
attgaatggctgcaaaaagctgatgtgcctaccatagcacagattgaagagttccattcgatgcagaggatgatgaatgctcctgattcaaatgataatattgatttactgttgagcattgatttgttgggtttacaaggagcaggtaaagcttttccaaacaaaattgtttttgatgataagcttgtgttggctaacacacaagaattctttgatggaaattttccagtggattcttggttaccaatttttgtgaattgtctttatcctgtaagtcaattaccttcagaagctgtcgttgtaaatgttacatgtggta

SEQ ID NO: 80700 - DNA, 138 bp, Glycine max
aaaaaaaattaaaaattatttttaaaaaaaaaaaaaaaaaaaaaggaaggggaaaaaaaaaaaaagggaaggaaaaaaaaaaaaaaggggcgggccgcccactagtgagctcttcaacccggaaattaattccggacc

SEQ ID NO: 80701 - DNA, 405 bp, Glycine max
  unsure (1)..(405): unsure at all n locations
cttcacttannttctccncnntatgganngtttannatcttgggtggtcccnngtcagaaggtnnttttaaannttttggtgagggggttcattnnatgaagnnaaaagggaccaagctnnntagttgtcaaggttgnnngaatcaaccttcataccctccatgnnngaatggaccttggtttggcccaatagggttacctggagtaagggcaaccgatanttctgtggttgcgattanttgttagttttgatgggtttgattacccaagcaagggttatgagccaagatgtgcagaannatgataaaccaagtcttttgtgggtgggtgatgaaaaattgatgccgtgaaaaggacacccacctgctgttggctgggtgttcaaggatggcaatttgtaagaaa

SEQ ID NO: 80702 - DNA, 406 bp, Glycine max
gagaaatcttcttccctttcacagactccttcagcagcaagaccacttgtaccccctggttttgcaagtacaaagttggaacgcaatttggcaaccaaaacatcccttaacactcattcaacagaggttggacgacctgcgcctggtgatactggagtcttggaagcatcagatgacaatggatttattcaacttaatgctgaagtaaaaggaaaggaggccatgggagctttcaatccagacaattcaaattctatcctatacaagctttttggtaacgcttcaacgctagacaatgacaaatcaactagtattgttgagcagcctgatcaaaaagcagatgagacatggagtccacatgccttccaatcttccaagtttgctcattggtttgttgaagaagaaa

SEQ ID NO: 80703 - DNA, 300 bp, Glycine max
cggctcgagtcccaaacagtctacagcttttgatattctcttgggaatctctcaagattttgaaattgctggtaatactcttatgccagctttttctgttccacaggctactgccagatcttctgaaaatgcggaatcctctgcatgatctggaattcgtgttttctttcgcttgttcgtttgtttaattcaataaaggaaattaggcatgaccctcttgttgagtatgctctgcctatctgaaaatttccacacctcttttaattgtcgtaatgatgtgtgaagtgtgtgttattttaa

SEQ ID NO: 80704 - DNA, 412 bp, Glycine max
gtcaagccttactttagtggttctaaattgaaaagctttctagctggtcataatatcaccattactgatggtattgacaaaactagtgcaactttgcaatttagaaagttagcagattgtgattttctcaagagaaactttaagcagatgtctaatgttttgtgggtggctcctgaggataaggcgagtttatggtcacaacttcattatgtttcgtgtaataatctggaaatgcaagaagcttatcttgtcaatctcgtaaatgtgttacgagaattgtatttgcacagtccagaggaagctcgccaattgagaaggaaagctctctctcgtattgaatggctgcaaaaagctgatgtgcctaccatagcacagattgaagagttccattcgatgcaaaggatgatgaatg

SEQ ID NO: 80705 - DNA, 108 bp, Glycine max
ttggaatcaaaccaatcttcattggaatggcctggtttggccaataaattactgagtaagggcaccgattttttgggttgcaatattcctagtttggagggttggata

SEQ ID NO: 80706 - DNA, 402 bp, Glycine max
gttatttgcaatagcatttttaatgagatgctcattagatatagctatgaaaaattactgcgccaggctaaagctccaagtatgtttttacaatccttcaaaaattttgtttctttgtgtgtgtatggtgatgataacttaattagtgttcatgaatatgtcaagccttactttagtggttctaaattgaaaagctttctagctggtcataatatcaccattactgatggtattgacaaaactagtgcaactttgcaatttagaaagttagcagattgtgattttctcaagagaaactttaagcagatgtctaatgttttatgggtggctcctgaggacaaggcgagtttatggtcacaacttcattatgtttcgtgcaataatctggaaatgcaagaagct

SEQ ID NO: 80707 - DNA, 264 bp, Glycine max
agaaactcctcagagatgtttgttggatcccttgcttggtcttggactgatccctcccttttggtgggaactttgggtcccacaattactttgtggggttattagctcaagccacttaacaaaaagaagaatcgcattttgggcttcatcaaaggggacagggcctaccaagtgggcggggggtattccggattggggccgaaatcaaaatggaaggtgcatttaaacatgtttttttaacgcgaaggccttctttaaaggggg

SEQ ID NO: 80708 - DNA, 129 bp, Glycine max
aaaataccacacacttcacacataattacgacaattaaaagaggtgtggaaattttcagataggcagagcatactcaacaagagggtcatgcctaatttcctttattgaattaaacaaacgaacaagcg

SEQ ID NO: 80709 - DNA, 416 bp, Glycine max
cacttatacaaaattctccaattagtaacttgttgagagttgctgcttggaagaaaggttgtttaatggtcaagattgtgatgtctgggaatgcagcagtcaaaaggagtgattggacctcattggtacaagtgtttttaacaaacagcaacagtacagagcattttgatgcatgtaagtggacaaaatcagaaccacattcctgggaattaatcttcccaatagaggtatgtggtcctaataatggttttgaaatgtggagttctgagtgggcaaatcaaacttcatggcatttgagtttccttattgacaatcccaaacagtctacagtttttgatattctcttgggaatctctcaagattttgaaattgctggtaatactcttatgccagctttttctgttccacaggctact

SEQ ID NO: 80710 - DNA, 414 bp, Glycine max
gtaagaaagatgtttggagagttgaatgtggaatcccttctggagttccgctcacagttatttgtaatagcatttttaatgagatgctcattagatatagctatgaaaaattactgcgccaggctaaagctccaagtatgtttttacaatccttcaaaaattttgtttctttgtgtgtgtatggtgatgataacttaattagtgttcatgaatatgtcaagccttactttagtggttctaaattgaaaagctttctagctggtcataatatcaccattactgatggtattgacaaaactagtgcaactttgcaatttagaaagttagcagattgtgattttctcaagagaaactttaagcagatgtctaatgttttgtgggtggctcctgaggataaggcgagtttatggtcac

SEQ ID NO: 80711 - DNA, 232 bp, Glycine max
tgataaggctgctattgtgcgtgttaaggtgaagctcaagacacgtaaattactggactcccaacccacctcatctgatgctcccactcccacacaaagcgatactgagagaatggaagatagtgcaaatttgttggctgatatgaaactcagtactctgtctaagagagctgctagcatcaaaattaagtcttcatcaaaccaccagacattctcagcttccactcaacat

SEQ ID NO: 80712 - DNA, 373 bp, Glycine max
ctttcaagtgttgagctcattacagaaccccagttaaatgcagatgttgcaggtaatactgtctctgggccagggcttctgaaattacctaaacgtgggagggagaacaatggttcttttagaggtaatcttcatgctgagttttcaacaagcaatgaaaatgaaatggtgtccaaatctgtaaaagatttatcacctgtagaatatggctctgctgactgcaatcttctgaataactccgaaattgttaaatttgatgcattggtggattttgaacctaatacctacttctctctgactgaactgctccacacagacgataatagtcaatttgaggaagctaatgcatctggggacttaaggtatttgaaaa

SEQ ID NO: 80713 - DNA, 414 bp, Glycine max
gggacaaggatgccatggactcctacaggtccttgttggaccgccagtttcggatgacccctgccacctgcaatgtcctgttggaggccttgcttaaccattccaagacctctgaggcttggtctctttttgataacatgttggacaatcacacccctcccaatttccaggctgttaactctgactcctttaatattatggtcaatcactgcttcaagcttggaaactttgagcttgccctttctacttttaagaaggttggatccaagcctaactctaagccctttgccatggatgttgccggctacaacaatatcattgctaggttttgtgagaatgcgatgctgtcccaagccgagaccttgttcgaagaactctgctctaaatctttgagccccgatgtgcccactcata

SEQ ID NO: 80714 - DNA, 101 bp, Glycine max
  unsure (1)..(101): unsure at all n locations
gttagtctaaggtaacccactttgagaattctcataaaagttgcatgccttttggattggaaggttgttgcaaatggggaaaggtnntgtgttgttgtttt

SEQ ID NO: 80715 - DNA, 363 bp, Glycine max
  unsure (1)..(363): unsure at all n locations
ggaggctgtcaccatattggttgcagtattgaactttcatgataaattcacttggttgaaaggatgtggcctattaactattatggttggtgtcagtttgtttaattggtacaaataccttaagcttcagaagggacatgctggtggcagtgatgtggaagagcattcaagagattctgcagctaaatatgtaattctcgaggagatggatgaacaagaagatggcatctgaaaccattatgcaccaaatagttcaaagccaaacaatgatctctaaagacctctgggaacaaaataatcttncagcaacatgcagttggccttcgccatctcatctttttgagaaacacctgtttatgtacc

SEQ ID NO: 80716 - DNA, 408 bp, Glycine max
aaaaaaaaaaaaaaaattaaaaaaaaaaaaaaaaaaaaaaaaaaagaaaaaaaaaaaaaaaaaaaaaaagaaaaaaaaaaaaaaaaaaaaaaaaaaaaaaaaaaaaaaaaaaaaaaaaaaaaaaaaaaaaaaaaaaaaaaggggggggcccccaataaggggctctgccacccgggaaaaaaattcgggccgggcccctggggggtcccaatttttccttaaggggggggttataaaagtgggggaaaaaaagggaaaagggggttcccggggaaaaaaggatttccgtgaaaaattccaaaaaaaaaaaagccgggaggaataaagggaaagcccggggggccttaagggggggccaaacccaaataaatggggtgggccaaatggcccttttccaaaggggaaaac

SEQ ID NO: 80717 - DNA, 322 bp, Glycine max
cgataaccctcagtattttatcatccagagcgagcgctacttagactcatctatactactgacgcataagtgttgttcctactaccaccatatgaaggaaaaccagaagaagaacctggagcacgtatcgacagatttacagccgcattgacgcccaaagccatccagacactctctgaggatttcagcgcgagagctataaagaagaatgtacgcattcatggacaccacaagaatgctaagcacatgtgtgctagagtgactggtgacaacttgggtatacgtgaacgatccgcagatctcatactacaaaatcgactac

SEQ ID NO: 80718 - DNA, 374 bp, Glycine max
ctcgagccgaatcggctcgagatgataacttaattagtgttcatgaatatgtcaagccttactttagtggttctaaattgaaaagctttctagctggtcataatatcaccattactgatggtattgacaaaaactagtgcaactttgcaatttagaaagttagcagattgtgattttctcaagagaaactttaagcagatgtctaatgttttgtgggtggctcctgaagacaaggcgagtttatggtcacaacttcattatgtttcgtgtaataatctggaaatgcaagaagcttatcttgtcaatctcgtaaatgtgttacgagaactgtatttgcacagtccagaggaagctcgccaattgagaaggaaagc

SEQ ID NO: 80719 - DNA, 367 bp, Glycine max
gttggagatctcgtctttgaagtttctaagatgactgctccctacattaaatgtacagtctctttcttcatagcatttggaaatttggctgatgacaccatcaattttgaggcttttccccacaagctggtgcagtttggagagattcaggaaaaagttgtgttgaaattttcacaagaggaatttcttacagcttggtcaactcaggtgcgtcccgcaacgactctgttggctgatgggtgcccatatttgtatgctatggtgcatgatagttcagtgtctacaataccaggtgattttgtcattggtgttaagttgacaaccataaacaatatgtgtgcatatgggctcaatcctggtatttcag

SEQ ID NO: 80720 - DNA, 374 bp, Glycine max
ctatcctttctctttttcttctctctcaacaacttcaccttcttcctcctcgatcatgtctcacttcaagggcaagtaccatgatgagcttatcgccaatgctgcgtacattggcactcctggaaagggtattcttgctgctgatgagtcaacagggacaattggcaagcgtttggccagcatcagtgtagagaacattgaatccaacaggcgagctcttagggagctgcttttcactgctcctggtgttcttcaatatctcagtggtgtcatcctctttgaggaaaccctctaccagagcacagctgcaggcaagccctttgtgaatgtcttgaaggaagctggtgtgcttcctggcatcaaggttgacaagg

SEQ ID NO: 80721 - DNA, 382 bp, Glycine max
gaagagctatgacgtgcaacgcacccttacgctaagcaattcaattcgaggtccagaggaagtctcgccaattgagaaggaaagctctctctcgtattgaatggctgcaaaaagctgatgtgcctaccatagcacagattgaagagttctattcgatgcagaggatgatgaatgctcctgattcaaatgataatattgatctactgttgagcattgatttgttgggtttacaaggagcaggtaaagcttttccaaacaagattgtttttgatgataagcttgtgttggctaacacacaagaattctttgatggaaattttccagtggattcttggttaccaatttttgtgaattgtctctatcctgtaagtcaattaccttc

SEQ ID NO: 80722 - DNA, 372 bp, Glycine max
ctccctatggtgtttaatcttgtggtccgtcagaagtttttaaattttgtgaggttcattatgaagaaaagggacaagcttagttgtcaagttggaatcaacccatactccatggaatggactggtttggccaatagattactgagtaagggcaacgatattctgtgttgcgattatgctagttttgatggtttgattaccaagcaagttatgagcaagatggcagaaatgataaacagtctttgtggtggtgatggaaaattgatgcgtgaaaggacacacctgctgttggcttgttgttcaaggatggcaatttgtaagaaagatatttggagagttgaatgtggaatcccttctggatttccgctcaca

SEQ ID NO: 80723 - DNA, 327 bp, Glycine max
acagtttatatttctcgcgaacacactttctcagtagcgcggtgggttgttcggtcacggcgctaacaatgaaacaccacgcaataacgctagtaacgatatactgacacgacaattcgagaactgtcaagagctcaaatatctggtagctgagcgtacataagaaaaggagaacgggtgtcggatactctataaactgaaaactagcgcagtgcgctgtgcaacgagcgaacattcgtgttcgcgtgtgtgcgtttctttttttgttcctttgttcttttcggagcttctgggatgtctccggctagaagaggatgacccccggaa

SEQ ID NO: 80724 - DNA, 378 bp, Glycine max
tgataacttaattagtgttcatgaatatgtcaagccttattttagtggttctaaattgaaaagctttctagctggtcataatatcaccattactgatggtattgataaaactagtgcaactttgcaatttagaaagttagcagattgtgattttctcaagagaaactttaagcagatgtctaatgttttgtgggtggctcctgaggacaaggcgagtttatggtcacaacttcattatgtttcgtgtaataatctggaaatgcaagaagcttatcttgttaatctcgtaaatgtgttacgagaattgtatttgcacagtccagaggaagctcgccaattgagaaggaaagctctctctcgtattgaatggctgcaaaa

SEQ ID NO: 80725 - DNA, 375 bp, Glycine max
taacttgtatacagtgtgatgaaaatgaaggtccttggtttcttcgttgctacaattgtggtagcatggcaatgccatgcgtacgatatgttccctctccgaatgaacactggctatggtgcccgtactccggaggtgaaatgcgcaagttggaggcttgctgtggaagcacacaacatctttggctttgagaccattcctgaagagtgcgttgaagcaacaaaggaatacatccatggcgaacaatatagatcagactccaaaacagttaaccaacaagcttacttttatgccagagacctcgaagtccatcccaaggacacatttgtgttcagtatagatggcaccgtactctctaatattccatactacaaa

SEQ ID NO: 80726 - DNA, 321 bp, Glycine max
gggcttaatcctggtatttcaggttctcgtcttttgggcaccattcctcagtccatttcacagcaaactgtttggaatcaaatggcaacagtgagaacaccattgaattttgattctagcaagcagagcttttgtcaattttctatcgaccttctcggtggaggaattttagtggacaaaactggagattggatcacacttatacaaaattctccaattagtaacttgttgagagttgctgcttggaagaaaggctgtttaatggtcaagattgtgatgtctgggaatgcagcagtcaaaaggagtgattgggcctcattg

SEQ ID NO: 80727 - DNA, 372 bp, Glycine max
ctcgagcctaatcggctcgagggttatctctattctggattctgaatcttggatttgatttctacttttcaatgattactgagagctttattttatctccgtgattttgggttaatctacctgtgttatttcgtccttggaaattatctccctcaattctatctttctttgtttcattatgggcatttcacaatttagtgcttcatgattgctgcttgggtctcaaaggaagataagaaattttgtttatatttatcttctcaacaggagcaataagggacgggtttggttggctttcactttggtttcgagaatctgcatttgggtttgaagaactatgcaaatcttctttcatcattttcttgataatta

SEQ ID NO: 80728 - DNA, 57 bp, Glycine max
gttttagtctcaaaatctgttcttgtcattctatatgtataaaaaaaagttaatatg

SEQ ID NO: 80729 - DNA, 376 bp, Glycine max
gggaaaactgtctttccctcagggcacttcccgaagtgtgaagagaatgcctctttctatagggggaggagctggtgcaaagaatgctattctcatgaatatgccaaatgctgttctttcaatgtggagatattttgttggagatctcgtctttgaagtttctaagatgacttctccctacattaaatgtacagtctctttcttcatagcatttggaaatttggctgatgacaccatcaattttgaggcttttccccacaagctggtgcagtttggagagattcaggaaaaagttgtgttgaaattttcacacgaggaatttcttacagcttggtcaactcaagtgcgtcccgcaacgactctgttggctgatggg

SEQ ID NO: 80730 - DNA, 358 bp, Glycine max
  unsure (1)..(358): unsure at all n locations
ggatgctctccaattgagaaggaaagctctctgtcgtattgaatggctgcaaaaagctgatgtgcctaccatagcacagattgaagagttccattcgatgcagaggatgatgaatgctcctgattcaaatgataatattgatttactgttgagcattgatttgttgggtttacaaggagcaggtaaagcttttccaaacaaaattgtttttgatgataagcttgtgttggctaacacacaagaattctttgatggaaattttccagtggattcttggctaccaattnttgtgaattgtctttatcctgtaagtcaattaccttcagaagctgtcgttgtaaatgttacatgtggtagt

SEQ ID NO: 80731 - DNA, 376 bp, Glycine max
ctcgagctggtgtttttaacaaacagcaacagtacagagcattttgatgcatgtaagtggacaaaatcagaaccacattcctgggaattaatcttcccaatagaggtatgtggtcctaataatggttttgaaatgtggagttctgagtgggcaaatcaaacttcatggcatttgagtttccttattgacaatcccaaacagtctacagtttttgatattctcttgggaatctctcaagattttgaaattgctggtaatactcttatgccagctttttctgttccacaggctactgccagatcttctgaaaatgcggaatcctctgcatgatctggaattcgtgttttctttcgcttgttcgtttgtttaattcaat

SEQ ID NO: 80732 - DNA, 91 bp, Glycine max
tatctgccaattcacattttatacaggcagaaagaacaattcaatgatggagttggctatagttggaatgatggccttaggcccagctgca

SEQ ID NO: 80733 - DNA, 375 bp, Glycine max
ctttaatttataaggaatttccaagcatctaccccagctgagacaagcagtactattccacaagttgatcatccatgcctccaatacaaaacaaagccatcattgaatagcaccaaggtatcaaattcaagttccaaagtattctcaaatcatccatgtgatttatccttgtcaagtctccacccaaatgagaaacattcctcccagagcttatctcacacaagaattgctgaaccaagcaacttgaccttaacaaagcaaccaaatcatatgaaggcagacataggtgcttcaagagataataatatggttgatggtgcttccctagtgtttgataaacttgtttgtgggaaacccttgcctcaaattggtaga

SEQ ID NO: 80734 - DNA, 287 bp, Glycine max
tgtgcttttacaaccggaaccgatgcctgtgcatgaacctgcggcggcgcgcccttctccattgaatagccttaagcaccgtggtaccgcagcgaagttcagccgcgaagggtgcgtaattgccgtccgtgcagggaagctggcacaaaactggcgctcgccggtgttccggcgggagtatttcccctatcgggtcggttggacctttgcggacttggacccgaaggtcacctcccttgattggagccccgactcgaaatacctcgttgccgggtccaaggatttga

SEQ ID NO: 80735 - DNA, 377 bp, Glycine max
ctcgagccgaatcggctcgaggctagaagcaataagatgaaaatgaaagtgcttgttttgtttgttgctacagttttggtagcatatgaatgccatggctcagactaccagaagttccctctccaaatgaaaactgggtttggtgggcaatacagcaatgaggtggcatgtgccagttggaggcttggcgtggaagcaaacaacgtagtcaagtggcaaactgttcctgcagcttgcggagagtacatagctgactacgttctaggagaccaatatagatcagattccaaaacagttaaccaacaagcttatttctatgctaaatccctcaaactcaccaacaaagatgtctttgtcttggacgttgacgacactac

SEQ ID NO: 80736 - DNA, 193 bp, Glycine max
ggctactttcagatcttctgaaaatgcggaatcctctgcatgatctggaattcgtgttttctttcgcttgttcgtttgtttaattcaataaaggaaattaggcatgaccctcttgttgagtatgctctgcctatctgaaaatttccacacctcttttaattgtcgtaatgatgtgtgaagtgtgtgttatttt

SEQ ID NO: 80737 - DNA, 378 bp, Glycine max
caatttgttagtggaaaaaccttcaaatatgatataattggtgctggttcacattcttcaggagattttcctgaaaaggaagatcaagaaaaacccaaaaagattgataccagattgagacaaagaatagatcctcaatacaatgaggttcaggctcagatggaaacaaatttgtttaaattgtctcttgatgatgttgaaactcctaaaggttctatgttggatcttaaaatttctcaatctaaaattgcacttcccaagaacacagttggaggaaccattctgcgtagtgatctattggcaaattttttgacagaaggcaattttagagcaagtgttgatttgcagcgcactcatcgtattaaaggaatgattaaa

SEQ ID NO: 80738 - DNA, 379 bp, Glycine max
aaattttgtgaggttcattatgaagaaaagggacaaacttagttgtcaagttggaatcaacccatactccatggaatggactggtttggccaatagattactgagtaagggcaatgatattctgtgttgcgattatgctagttttgatggtttgattaccaagcaagttatgagcaagatggcagaaatgataaacagtctttgtggtggtgatgaaaaattgatgcgtgaaaggacgcacctgctgttggcttgttgttcaaggatggcaatttgtaagaaagatgtttggagagttgaatgtggaatcccttctggatttccgctcacagttatttgcaatagcatttttaatgagatgctcattagatatagctat

SEQ ID NO: 80739 - DNA, 362 bp, Glycine max
ctcatatcaaaaacatcgccaatattcacgtcgcgattcgcgaaaaccgaaaagcttaatcgcttctcattcaattcccggatccaaacagaacccattattttcctttccgtttcttaatttcttaatcttctttcaaatttaaggattggaccgctgccggccgtccgtgcggatgaccaccaatttctttgggtttccatcgtatactcggatcccgaagtgttcacgtatttagaacccttcgtgtttcgcagatcttttctgagctcgcattttctgcattcgctggcgacaaattcccgaagcttcgcgctcgaggaggcgttcggacatgtgtcgcggttctccggcgcgttgct

SEQ ID NO: 80740 - DNA, 349 bp, Glycine max
agatacaattattattaacctaatcttttccctgttatttttataaaatgtacgtttttcagtcattttttttattgctccgcacaaaaaagtattattcaactttttagatattaaatacgtctttatataagacatattgatagtaatataatgtaataaaattaaaaatatttttttttaggttttttgtgttcttataatggtttatgagttataaacctttttaaataatacattattgtgaaaataaaggaaaattagactagatatttatataatgttatatatacctactgttatatccgttcttgaagtgttaattgttacagtgcctgttttattaaca

SEQ ID NO: 80741 - DNA, 363 bp, Glycine max
ctcgagcctcatgcatgaaacaacacgtgtttcttcaattggttaattttctctggaatacccttttggaaaacatagactccaagagcaagatacttgacatcataagtgaaccttctcatctattatttgatgctgcagaagttggtaattttggtttttgtctgagcttattagtgcttatcccagcttgatatgggaagtggatagcagaaacagaagtataattcacacagctgttttgaatcgacatgctagcatctacaacctcatacacgaaatagggtctataaaagatattatagtgacatttgccggagaagaagacgagaacactttattgcatttggctgcaaaattagc

SEQ ID NO: 80742 - DNA, 341 bp, Glycine max
gaagtgacgtgacgtgcacggctcccttagcgtaagctcggaattcgggtcgaggtttacttataataatttgaaataacacttgtactgcgttcattttgagttgttaggcattcagctgcgacagaaacactgcgacagaccgacagactgtgtcactttctctcataatattcttgtatttattcatttttcgtgggcccacaccttttcgcacttctcgcgcacaaacgaccgaactttgacttcgaatgcgacttcaatcacttgccagtggactagtgaacaagatggacacgattaaacttggacactccggacaccatgccaatctgaatgat

SEQ ID NO: 80743 - DNA, 298 bp, Glycine max
  unsure (1)..(298): unsure at all n locations
cgcggacgaagccggaatacactacagatcttgacaaaatngttgaaagacaaaaacagaaaaaaacgggcgatttttaaaaggggcggcgccccaaaaaacactgcaaaccgagaaccagcaatctgaaaaacatcaaacacatccaaaccgaaaggatcaaatcccagcagcatacaagtaaggaaccaccaaaatgaaccaagttgccaaaaatacgaaccttaaacaaaggaggctggggcaacttaaacgcttttcttatttttacttacatcaccataagcagattcctgta

SEQ ID NO: 80744 - DNA, 423 bp, Glycine max
cgtaagctcggaattcggttcgagtttcaatgtggagatattttgttggagatctcgtctttgaagttgctaagatgacttctccctacattaaatgtacagtctctttcttcatagcatttggaaatttggctgatgacaccatcaattttgaggcttttccccacaagctggtgcagtttggagagattcaggaaaaagttgtgttgaaattttcacaagaggaatttcttacagcttggtcaacttcaggtgcgtcccgcaacgactctgttggctgatgggtgcccatatttgtatgctatggtgcatgatagttcagtgtctacaataccaggtgattttgtcattggtgttaagttgacaaccataaacaatatgtgtgcatatgggctcaatcctggtatttcaggttctcgtctt

SEQ ID NO: 80745 - DNA, 352 bp, Glycine max
gttttatcttatgtcttttttctattgaccttctcggtggaggaattttagtggacaaaactggagattggatcacacttatacaaaattctccaattagtaacttgttgagagttgctgcttggaagaaaggttgtttaatggtcaagattgtgatgtctgggaatgcagcagtcaaaaggagtgattgggcctcattggtacaagtgtttttaacaaacagcaacagtacagagcattttgatgcatgtaagtggacaaaatcagaaccacattcctgggaattaatcttcccaatagaggtatgtggtcctaataatggttttgaaatgtggagttctgagtgggcaaa

SEQ ID NO: 80746 - DNA, 418 bp, Glycine max
gtaagctcggaattcggttcgagattggtaagaaagatgtttggagagttgaatgtggaatcccttctggatttccgctcacagttatttgcaatagcattttcaatgagatgctcattagatatagctatgaaaaattactgcgccaggcaaaagctccaagtatgtttctacaatccttcaaaaattttgtttctttgtgtgtgtatggtgatgataacttaattagtgttcatgaatatgttaagccttactttagtggttctaaattgaaaagctttctagctggtcataatatcaccattactgatggtattgacaaaactagtgcaactttgcaatttagaaagttagcagattgtgattttctcaagagaaactttaagcagatgtctaatgttttgtgggtggctcctga

SEQ ID NO: 80747 - DNA, 363 bp, Glycine max
  unsure (1)..(363): unsure at all n locations
cgtcaatggcagttattgttttctgatgatcccccaaagctcgggtcccttgccataattgctggctcctctcccactctactcgtcctccaaaccctaatttgaacctcacccccaaaattcagtgtctcagctttctttttttctttttggcttttgaaattttgagttgctccctgccatgggcgcgccggagaaatcgcagaccaacaccaatccgatgcagcgtgtcaaggtctaccgtatgaatgatgacgggaaatgggatgacaagggcactgggcatgtcactgntgattatttggagcgattggaagagctgggtttatttgtttttgatgaagaagacaatgaaaacatact

SEQ ID NO: 80748 - DNA, 269 bp, Glycine max
tttctgttccacaggtttctgccagatcttctgaaaaagctggcgtaagagtattaccagctttgtctgttccacaggctactgccagatcttctgaaaatgcggaatcctctgcatgatctggaattcgtgttttctttcgcttgttcgtttgtttaattcaataaaggaaattaggcatgaccctcttgttgagtatgctctgcctatctgaaaatttccacacctcttttaattgtcgtaatgatgtgtgaagtgtgtgttatttt

SEQ ID NO: 80749 - DNA, 390 bp, Glycine max
gacaattgttgtttactttattcttttggagctgagaatctcaagttaaatgtagcctgtcacagaaaagttctgtgttgtcatcaagttaaaaatctcaagttcagatgctaggcaataattttgatagactatatttggaaatttacacgaagtggttgttttttctccttctgtattttggagcatatttatcatgtattcatttgctgatgatggtagtgtcataactctaattcacgagaaagcactacctcttatctatttaacacacctattacatgttatttcttgtacgtttctggacatggttttttgtatttccaatactggtaaagcttatcatagagaaatgccatgtggtgctgtgatttttcagagatttggtgc

SEQ ID NO: 80750 - DNA, 76 bp, Glycine max
gttaagaattcctccccgggggaacggacgaaagggagcgctattttgcaaaaagaaggctttcacaaagaagatg

SEQ ID NO: 80751 - DNA, 389 bp, Glycine max
  unsure (1)..(389): unsure at all n locations
aatttctgaagcgttctgtatttcattgcgatatcatttgtgtcactggatggactgccaccccaatgcaggatgttcaggttacaattgattggtttatttcctctcaggaatgtgttcccaggacctattgtgttttaaatccacaaaatccttttgtgttaaataggtggatgggaaaattgactttcccccagggcacttcccgaagtgttaagagaatgcctctttctatagggggaggagctggtgcaaagaatgctattctcatgaatatgccaaatgctgntctttcaatgtggagatattttgttggagatctcgtctttgaagtttctaagatgacttctccctacattaaatgtacagtctctttcttcatagcattt

SEQ ID NO: 80752 - DNA, 390 bp, Glycine max
ggtaacagtgagatctccattgaattttgattctagcaagcagagcttttgtcaattttctattgaccttctcggtggaggaattttagtggacaaaactggagattggatcacacttatacaaaattctccaattagtaacttgttgagagttgctgcttggaagaaaggttgtttaatggtcaagattgtgatgtctgggaatgcagcagtcaaaaggagtgattgggcctcattggtacaagtgtttttaacaaacagcaacagtacagagcattttgatgcatgtaagtggacaaaatcagaaccacattcctgggaattaatcttcccaatagaggtatgtggtcctaataatggttttgaaatgtggagttctgagtgggcaaa

SEQ ID NO: 80753 - DNA, 410 bp, Glycine max
  unsure (1)..(410): unsure at all n locations
gaaagctcgaatttcggttcgagatttttctgatgacaccttcttattttgaggcttttccccacaagctggtgcagtttggagagattcaggaaaaagttgtattgaaattttcacaagaggaatttcttacagcttggtcaactcaggtgcgtcctgcaacaactctgttggctgatgggtgtccatatttgtatgctatggngcatgaaagttcagtgtctacaataccaggtgattttgtcattggtgttaagttgacaaccataaacaatatgtgtgcatatgggcttaatcctggtatttcaggttctcgtcttttgggcaccattcctcagtccatttcacagcaaactgtttggaatcaaatggcaacagtgagaacaccattgaattttgattctagcaag

SEQ ID NO: 80754 - DNA, 370 bp, Glycine max
cacaaagcgggttactgtctgttcaagctaccatctctctctgtctttcttagtgcctccttgccagaagttaaaatggcccaagaaactttcctattcacatctgaatcagtgaacgaggggcaccctgacaagctctgtgaccagatctccgatgctgtgctcgatgcatgcttggagcaggaccctgacagcaaggttgcctgtgaaacctgcaccaagaccaacatggtgatggttttcggagagatcacaaccaaggccaacgtggactatgagaagattgtgcgtgacacatgcaggaacattggttttgtctctgatgatgttggtcttgatgctgacaactgcaaggtcctcgtcaacattg

SEQ ID NO: 80755 - DNA, 53 bp, Glycine max
  unsure (1)..(53): unsure at all n locations
tccacgcgtacgtacgctccgaattaattcccagcacttgacaaacatntttt

SEQ ID NO: 80756 - DNA, 376 bp, Glycine max
ttatccaggctacctatgacaggctcctttccgaggcacccaaatacaaactcattactccttccattctctctgaccgtttgagggtatcttctatcatcacttttttttattattattcttatgttaaaggattattcttattgatgggagcgtttgtgttggtgatgttttgattcatttcatttattttgttgttcttaaaattaaattgtgaattataagagctttaatgtgggtgaggtctcagttatagctattccttaattggtagtcgtctataagatctgcattcctagactgattgattgtatggagcatatgtttggtattggtatgttcttaattgggattatctagactgattggttgggta

SEQ ID NO: 80757 - DNA, 447 bp, Glycine max
aagagcatgacggcgatgccccccgaccgtagcctcggaattcggttcgagaaagaatgctattctctttattatgccaaatgctgttctttcaatgtggagatattttgttggagatctcgtctttgaagtttctaagatgacttctccctacattaaatgtacagtctctttcttcatagcatttggaaatttggctgatgacaccatcaattttgaggcttttccccacaagctggtgcaatttggagagattcaggaaaaagttgtattgaaattttcacaagaggaatttcttacagcttggtcaactcaggtgcgtcctacaacaactctgttggctgatgggtgtccatatttgtatgctatggtgcatgatagttcagtgtctacaataccaggtgattttgtcattggtgttaagttgacaaccataaacaatatgtg

SEQ ID NO: 80758 - DNA, 410 bp, Glycine max
agaaggcttgacgacgctcgcccgtcgtaagctcggaattcggctcgggagaactttgcttttttcaaaaatccatctggtcaagttattgcacaggatctgttttcttctggggccataaaatctgcaactgatttcaagtgtacaaagaggtgctggcctttctgggcttgacttcatatttggataacacggctgtctatcataccaagaatgacaaattagagcttttgaagactggatctttaacatctgggggaaaatatgcttgctttcctgcttcatattgggcatcttctcatattcagaggcaattcaactgaatcagggaagatataagcaagaacaatccattactttgcattttgggaatgtatatggtgataccgtcaaagttgctaaatgctgac

SEQ ID NO: 80759 - DNA, 358 bp, Glycine max
ggcgcgtgttctgagcccagatcctaccgtcaaggttgttacaacccagcttttcgaacgacccagtggctacaagatgtcagaaccaaacttcttctacgtcgtcaactctgcgcatctcaaccagtccgactttggaatcttgttcccatggttgacgcagaagatcttcaaggctgaacagcccgagcgagcgcttcgtcttaacctccgcgcccagctccagatgcttcgcgagaacaacgtccccgtcagtcgtacattcgctggagacctcgttgacggtacttcgttcgataagctcgacaagttcaacgaagccaacggcgatccctgcaaagacggcatcaacaatgat

SEQ ID NO: 80760 - DNA, 326 bp, Glycine max
ctctagctttgaaagaccagattcataatttagttgtaaccaatagcttatcttgtttcattccgcaggggactggtgtcaaggttcagtcattgaatggagaatcaaagttgttaaattctagtaaatatgtgaagtgcttggctcatgttcatgggaaattatactgtggatgccatgacagtagtgttcaggagatacatttggccactggaacagtcaacactattcaaagtggttataaaagattacttgggaaagcaaatcctattcatgcactgcaaattcatggtgaacttatatatgcagctggctcttccttggat

SEQ ID NO: 80761 - DNA, 349 bp, Glycine max
gcagacgacagcacgcacgtaagctcggaattcgctcgggggaagcttattgagagagagagagagagagagagaggggagtattgcgcttataatatgggttttctgggattccatgcacaaagcggccactgggcagaaaaagttgggaagaaagaagttgacttggcgataggcaaaaacaccaagtttcataccagacaatcaggaggatccttgttcacggggccatgttaaactgggcattgggctggatactgctattctcacggggcgtgaacacactctccaagactggatcttatatgttcgttcaatgctctcaacacgagccgttgaacatataccc

SEQ ID NO: 80762 - DNA, 352 bp, Glycine max
cagtaatggtgttattatgaccagctagaaagctagcagagtgtgattttctcaagagaaactttaagcagatgtctaatgttttatgggtggctcctgaggacaaggcgagtttatggtcacaacttcattatgtttcgtgcaataatctggaaatgcaagaagcttatcttgtcaatctcgtaaatgtgttacgagaattgtatttgcacagtccagaggaagctcgccaattgagaaggaaagctctctctcgtattgaatggctgcaaaaagctgatgtgcctaccatagcacagattgaagagttccattcgatgcaaaggatgatgaatgctcctgattcaaatga

SEQ ID NO: 80763 - DNA, 346 bp, Glycine max
cgccgcttattcacaacatgttgatatctcgctctcggggcttcagcccacagatacgcgcttatgcagccgtgtcctcgcggccgtccaggccaagcggccggagaaagctgccctcaattggactcgatcatttcatccaaagacaacgcgtagtgtcgttatggagagacatagtgagagctctcaataaaattcctccatcgcctacccgagacgagctgcgtcgctatgctcgcactgagtttgagaggaatcggaatgtcactgatattacacatataagatacctcatttcgactgggaagaccgaattcgactcgatgaaacgttacatagaggagca

SEQ ID NO: 80764 - DNA, 354 bp, Glycine max
atttgtttgagggaaatttttcctttgatattaaatgtcgctctagattggaaaaagtttcctctacaaaagcacaatttgttagtggaaaaaccttcaaatatgatataattggtgctggttcacattcttcaggagattttcctgaaaaggaagatcaagaaaaacccaaaaagattgataccagattgagacaaagaatagatcctcaatacaatgaggttcaggctcagatggaaacaaatttgtttaaattgtctcttgatgatgttgaaactcctaaaggttctatgttggatcttaaaatttctcaatctaaaattgcacttcccaagaacacagttggaggaacca

SEQ ID NO: 80765 - DNA, 338 bp, Glycine max
gcacgcgaacgtaagctcggaattcttctttagcgagggtagttctcaccgcagccataaactatgcggtgggcctttaactggtgttggcgctcccactctctctttcacaaccttcactttactctctctgacagctaaaattcaaagaggatttcaatcattattgtcacacgggaatgtcattataaatgctgttctacaacaggtgcgcatggtgaaccccctgttacatccaattgtctcttctctgtttgaatttgttacacctgctcgcatttaagagcatggttttgagagcaccacaatttcagacatcttgaatgataaatgcaaat

SEQ ID NO: 80766 - DNA, 353 bp, Glycine max
atgctatggtgtatgatagttcagtgtctacaataccatacaaatatggacacccatcagccaacagagttgttgcaggacgcacctgagttgactgatgggtgtccatatttgtatgctatggtgcatgatagttcagtgtctacaataccaggtgattttgtcattggtgttaagttgacaaccataaacaatatgtgtgcatatgggcttaatcctggtatttcaggttctcgtcttttgggcaccattcctcagtccatttcacagtaaactgtttggaatcaaatggcaacagtgagaacaccattgaattttgattctagcaagcagagcttttgtcaattttttat

SEQ ID NO: 80767 - DNA, 338 bp, Glycine max
cagcgacagcggctccaccagatcggtgtgacgcatgaagatctcgcgcacctgccgcgacaccgccttgtaacgcgtgacatataaaaatttgcattaatctctaaaactccgaacctataaaaaaaaaaaaaaaaaaaaaaaaaaaaaaaaaaaaaaaaaaaaaaaaaaaaaaaaaaaaaaaaaaaaaaaaaaaaaaaaaaaaaataaaaaaaaaaaaaaaaaataaaaaaaaaggggggggccccccctttgggagttcttctccccgggaataaatttgggcccggtccctgggggggtcccactttttcttattggggggtgtattaaagctt

SEQ ID NO: 80768 - DNA, 341 bp, Glycine max
tttgattaccaagcaagttatgagcaagatggcagaaatgataaacagtctttgtggtggtgatgaaaaattgatgcgtgaaaggacacacctgctgttggcttgttgttcaaggatggcaatttgtaagaaagatgtttggagagttgaatgtggaatcccttctggatttccgctcacagttatttgtaatagcatttttaatgagatgctcattagatatagctatgaaaaattactgcgccaggctaaagctccaagtatgtttttacaatccttcaaaaattttgtttctttgtgtgtgtatggtgatgataacttaattagtgttcatgaatatg

SEQ ID NO: 80769 - DNA, 342 bp, Glycine max
gtacagtttctttcttcatagcatttggaaatttgggtgatgacaccatcaattttgaggcttttccccacaagctggtgcagtttggagagattcaggaaaaagttgtattgaaattttcacaagaggaatttcttacagcttggtcaactcaggtgcgtcctgcaacaactctgttggctgatgggtgtccatatttgtatgctatggtgcatgatagttcagtgtctacaataccaggtgattttgtcattggtgttaagttgacaaccataaacaatatgtgtgcatatgggcttaatcctggtatttcaggttctcgtcttttgggcaccattcctc

SEQ ID NO: 80770 - DNA, 346 bp, Glycine max
ctgacttttccccagggcacttcccgaagtgttaagagaatgcctctttctatagggggaggagctggtgcaaagaatgctattctcatgaatatgccaaatgctgttctttcaatgtggagatattttgttggagatctcgtctttgaagtttctaagatgacttctccctacattaaatgtacagtctctttcttcatagcatttggaaatttggctgatgacaccatcaattttgaggcttttccccacaagctggtgcagtttggagagattcaggaaaaagttgtattgaaattttcacaagaggaatttcttacagcttggtcaactcaggtgcgtcctg

SEQ ID NO: 80771 - DNA, 288 bp, Glycine max
gttaagttgacaaccataaacaatatgtgtgcatatgggctcaatcctggtatttcaggtgtctcgtcttttgggcaccattcctcagtctatttcacagcaaactgtttggaatcaaatggcaacagtgagaacaccattgaattttgattctagcaagcagagcttttgtcaattttctattgaccttctcggtggaggaattttagtggacaaaactggagattggatcacacttatacaaaattctccaatttgtaacttgttgagaggtgctgcttggaagaa

SEQ ID NO: 80772 - DNA, 343 bp, Glycine max
gactacatctgatgagagattggtaggcacagaacatgagggatatgatccttttcttggtggaattcaaaaatatgccactcccatgatgcccctagatgaagaaattctttctaaggttgcacaagatatggttgaggaatggtttgattgtgttgatgaggaggattcctttgaggaagtttctttaagtgcagcacttaatggtgttgagggtttggactatatggaaagaattcctcttgccacatctgagggttttcctcatgtgctttcacgcaaaaatggcgaaaaaggcaaaaggagatttgtctctggggatggtgaagagatgacattgatt

SEQ ID NO: 80773 - DNA, 344 bp, Glycine max
caaaactggagattggatcacacttatacaaaattctccaattagtaacttgttgagagttgctgcttggaagaaaggctgtttaatggtcaagattgtgatgtctgggaatgcagcagtcaaaaggagtgattgggcctcattggtacaagtgtttttaacaaacagcaacagtacagagcattttgatgcatgtaagtggacaaaatcagaaccacattcctgggaattgatcttcccaatagaggtatgtggtcctaataatggttttgaaatgtggagttctgagtgggcaaatcaaacttcatggcatttgagtttccttattgacaatcccaaacagt

SEQ ID NO: 80774 - DNA, 101 bp, Glycine max
gcaaagcgagctcagaattagaggcatttctatgaaagccgtcagacaaatccgctgttgcaagttgattctacaagttataagttgcaaaaatatgaacc

SEQ ID NO: 80775 - DNA, 326 bp, Glycine max
ggcacgcgtacgtaagctcggaattctgctttagcggtttatgtttaccctccgaaccccttatccgggggggttcttaaacccgccggggagtcataaatccacaacacctgcttcctcaaagtcctcgaccaccgtaccttctcctccgacgcagccgtctcccccgttccctccttcttcgtcttcaccctcttatacctccttttgaccttactctccctcttttaccctcaacgcctacgacaagctcgccgcctatgacttctccatcgacacccccttctggacctcattctacatcatcttctccgaaacctactcct

SEQ ID NO: 80776 - DNA, 344 bp, Glycine max
ctcttcttctcttccggctagggttttagcgcagcttcttctagatttaaggaagatgggtaaggaaaaggttcacatcagtattgtggttattggccatgttgactctgggaagtccactaccactggccacctgatctacaagcttggaggcattgacaagcgtgttattgagagatttgagaaggaagctgctgagatgaacaagaggtctttcaagtatgcctgggtgcttgataagcttaaggctgagcgtgaaagaggaatcacaattgatattgccttgtggaagtttgaaaccaccaagtactattgcacagtcattgatgcccctggacacaggg

SEQ ID NO: 80777 - DNA, 246 bp, Glycine max
gaaaatggcattgttccgtgtgaatgtcaggcgttggattttaacctatgctatcctttacgtttgtgtattcgggaaaaactttggaaatgctgatgaggatgagtcagaggcacagacaggtggtggtggattcggggttgtggggggtggttttggcggtgctggggccggtgttggcagtggtggtgggttcggtgccggtggtggttctggtggttttggagccggtggtggtgggtttgg

SEQ ID NO: 80778 - DNA, 348 bp, Glycine max
cttctccctacattaaatgtacagtctctttcttcatagcatttggaaatttggctgatgataccatcaattttgaggcttttccccacaagctggtgcagtttggagagattcaggaaaaagttgtattgaaattttcacaagaggaatttcttacagcttggtcaactcaggtgcgtcctgcaacaactctgttggctgatgggtgtccatatttgtatgcaatggtgcatgatagttcagtgtctacaataccaggtgattttgtcattggtgtcaagttgacaaccataaacaatatgtgtgcatatgggctcaatcctggtatttcaggttctcgtcttttgg

SEQ ID NO: 80779 - DNA, 346 bp, Glycine max
  unsure (1)..(346): unsure at all n locations
gtgattcactttaattgntcttcttggagaaatcctcatgtgatctcaaagggtgtcaagatggagttagtcatctccatccaatagagcatcttttttagcattccaattgagcatttggtttgttagcatctaccacttcaactcttaacacacaaaatttttaaaaacgactgcaatttcagccacaacgttaaggtttttagactctccccgaccacattgacttcaatatcaaccatcacggaaaaatcacgaccacaactacaatttaaaaccttgaacaaaacaatacaagatagagtcaccatgccatttggtttggtctcagcttggaacaagcgtc

SEQ ID NO: 80780 - DNA, 342 bp, Glycine max
attcatcatttttttttcaatccgtttggatccatggaaagtaaaaaagaacgctccaacatttttttccaatttttttgtttactctctgattgaatgaacatctcgctttgtcatacatattattttttatcagtaggaatgaaagacttatcatacatatatacataaacataactgcttcggttcgctgcttttcttgctctttgcattctcttacgatggatttgatcttacaaatgttaaagaaactcgcaacatttattacaataattttcctacattttctcatcggagagaaatctaatggcatgtgtatgtgatgtttatgcgctcctctat

SEQ ID NO: 80781 - DNA, 367 bp, Glycine max
attttctcaagagaaactttaagcagatgtctaatgttttgtgggtggctcctgaggacaaggcgagtttatggtcacaacttcattatgtttcgtgtaataatctggaaatgcaagaagcttatcttgtcaatctcgtaaatgtgttacgagaattgtatttgcacagtccagaggaagctcgccaattgagaaggaaagctctctctcgtattgaatggctgcaaaaagctgatgtgcctaccatagcacagattgaagagttccattcgatgcagaggatgatgaatgctcctgattcaaatgataatattgatctactgttgagcattgatttgttgggtttacaaggagcaggtaaagcttt

SEQ ID NO: 80782 - DNA, 364 bp, Glycine max
aaatgctgttctttcaatgtggagatattttgttggagatctcgtctttgaagtttctaagatgacttctccctacattaaatgtacagtctctttcttcatagcatttggaaatttggctgatgacaccatcaattttgaggcttttccccacaagctggtgcagtttggagagattcaggaaaaagttgtgttgaaattttcacaagaggaatttcttacagcttggtcaactcaggtgcgtcccgcaacgactctgttggctgatgggtgcccatatttgtatgctatggtgcatgatagttcagtgtctacaataccaggtgattttgtcattggtgttaagttgacaaccataaacaat

SEQ ID NO: 80783 - DNA, 344 bp, Glycine max
aattaaacatattctttaaggtccaaatcactcgcttattgttttctttacatacacatgcagacaataaggtctaacaagttcaagactggcatgggcttgtttcaacgggctaaggccgtgctgctccagaggcacacatacaagtcactgctagacgaggacaacagggatctcgggactaccagaacaaaaggctcacttgaaagctcgccagggacgagggaatacagggaggtatgctgaaacataacatcgtctgcagagcgtgtacggtaagttcatctaactctgcaaccaccggtacatattggacatgaacgagcagcaggtcctgcagacgc

SEQ ID NO: 80784 - DNA, 159 bp, Glycine max
ctcgagcctaactacgacgagaactgaagaaaaataggaatcgaaataaatccgataggaacatgatgtaggaatgggaacccaactgaacggatatggtgggtgggctgcgatccacaccgatgcggggcttcgatgctgtgcattactggcaccgat

SEQ ID NO: 80785 - DNA, 103 bp, Glycine max
aaaaggggggggctcaaactccaggattataagctgatggcatgaaacaattaagactcgtttggattgctcatgcgtggttgaaatttgattgtctagtgaa

SEQ ID NO: 80786 - DNA, 368 bp, Glycine max
ctcgtaaatgtgttacgagaactgtatttgcacagtccagtttatggtcacaacttcattatgtttcgtgtaataatctggaaatgcaagaagcttatcttgtcaatctcgtaaatgtgttacgagaactgtatttgcacagtccagaggaagctcgccaattgagaaggaaagctctctctcgtattgaatggctgcaaaaagctgatgtgcctaccatagcacagattgaagagttccattcgatgcagaggatgatgaatgctcctgattcaaatgataatattgatctactgttgagcattgatttgttgggtttacaaggagcaggcaaagcttttccaaacaagattgtttttgatgataag

SEQ ID NO: 80787 - DNA, 367 bp, Glycine max
aacttgtttagagttgctgcttggaagaaaggttgtttaatggtcaagattgtgatgtctgggaatgcagcagtcaaaaggagtgattgggcctcattggtacaagtgtttttaacaaacagcaacagtacagagcattttgatgcatgtaagtggacaaaatcagaaccacattcctgggaattaatcttcccaatagaggtatgtggtcctaataatggttttgaaatgtggagttctgagtgggcaaatcaaacttcatggcatttgagtttccttattgacaatcccaaacagtctacagtttttgatattctcttgggaatctctcaagattttgaaattgctggtaatactcttatgccag

SEQ ID NO: 80788 - DNA, 312 bp, Glycine max
cacgcttgtgctgctgatgattggccattgcgtgtggccaagaccaacaaggatttggtatctcatgcacaggagttgatgcatgacgttggcctatacatacacaggggaaggggagcccatatcgcttcagaagtgttatttgcataattgagggctattgcggaatcactgaaagaccgattagtgttaagagttagtgtacgtgattcaagtattgaataaaagtgagcatgtcatgtgtatatcagaatgatctaaactgaataagagaatatgtgtggactacatgagacacgagtacagaaattg

SEQ ID NO: 80789 - DNA, 363 bp, Glycine max
taagttgtcatttataaacaatatgtgtgcatatgggctcaatcctggtatttcaggttctcgtcttttgggcaccattcctcagtccatttcacagcaaactgtttggaatcaaatggcaacagtgagaacaccattgaattttgattctagcaagcagagcttttgtcaattttctattgaccttctcggtggaggaattttagtggacaaaactggagattggatcacacttatacaaaattctccaattagtaacttgttgagagttgctgcttggaagaaaggttgtttaatggtcaagattgtgatgtctgggaatgcagcagtcaaaaggagtgattgggcctcattggtacaagt

SEQ ID NO: 80790 - DNA, 352 bp, Glycine max
gttttgattccattttgtcaatcttgcatttttctcccatatatatatttttttggggtggaggggtttgaatttgtcggggttgttatttgcaaccttagtttttgttgatatatcagatgttagtatttattgtcttaagaaatatagtgtatctgttttttgaattaattaattttaacccaagtaaattttgcaacattttaatcaaaaaaaaaaaaaaaaaaataaaattaaaaaaaaaaaaaaatataaaaaaaaatataaattaaaaataataattttaaatatttatttaattctcttattatatttctattatttatcatttcatattttatataactttttt

SEQ ID NO: 80791 - DNA, 361 bp, Glycine max
gcagtttgtagaaattcaggaaaaggttgtattgaaattttcacaagaggaatttctgacagcttggtcaactcaggtgcgtcctgcaacaactctgttggctgatgggtgtccatatttgtatgctatggtgcatgatagttcagtgtctacaataccaggtgattttgtcattggtgttaagttgacaaccataaacaatatgtgtgcatatgggctcaatcctggtatttcaggttctcgtcttctgggcaccattcctcagtccatttcacagcaaactgtttggaatcaaatggcaacagtgagaacaccattgaattttgattctagcaagcagagcttttgtcaattttctatt

SEQ ID NO: 80792 - DNA, 361 bp, Glycine max
aatgatattctgtgttgcgattatgctagttttgatggtttgattaccaagcaagttatgagcaagatggcagaaatgataaacagtctttgtggtggtgatgaaaaattgatgcgtgaaaggacgcacctgctgttggcttgttgttcaaggatggcaatttgtaagaaagatgtttggagagttgaatgtggaatcccttctggatttccgctcacagttatttgcaatagcatttttaatgagatgctcattagatatagctatgaaaaattactgcgccaggctaaagctccaagtatgtttttacaatccttcaaaaattttgtttctttgtgtgtgtatggtgatgataacttaa

SEQ ID NO: 80793 - DNA, 325 bp, Glycine max
ctccgacttctctgcctcgcggcgcgtggtgactgcggacctgacatcggaggagcagaagcgcggtggcccggtggtggtggagatgttctcgccgcatgggtgcgcgactttaccggctgcggagctggtgctgtagcggctgtagagaggggatgtcgcgcttgatgcaccactggtggagcttgaatattacggttgctgcgggtactttttggtttgggaggtagcatttaatgctcttactcagttcaattatgcgcattgctatttgcgaggagtttgtttttgtctcaattttttactcttcatgtattaggttcaa

SEQ ID NO: 80794 - DNA, 211 bp, Glycine max
ggagacattagtaagctgcaaaagactttaaagctggcgatcacacaaagacccacgttcactcctaactgtgcatctacacacgtatacacccgtgaagctgacaactgtaggtggaacggctcccatgctgagggcaactacaccacaaagaccatgggggttcatattttcgacaaacgagttcctaacactgccattgaatacgact

SEQ ID NO: 80795 - DNA, 326 bp, Glycine max
  unsure (1)..(326): unsure at all n locations
ctcgagcctctcgagccgnnttnngnntatngggntggnatttaaaaaaagtaaagtgggcaaaaaaaaaaaataatatttaatatatattttttttaaaatatttaattaaaaaaattattnttatatttaaaataatttatttttattatatatttttataattatttaaaattattaaaattttattattattttattaattattttttataatatatttatttttattatttataataaatattatttaatattttttttaaaattttttttaataattatttataaaatattatttttattttatataataatataattat

SEQ ID NO: 80796 - DNA, 341 bp, Glycine max
ctcgagcttatttgagctagagagcgctagcggctcgaggagaaagaaaaagatttgaaaggtaaaggtgacgatggtgaatagaaaaaggagaaggatacgaaggtgaagaagaaaaaagaaaacaaagacaagggtgacaaaactgatgtagagaatgtcacggggaaagagaatgatgggggggattaagatatgtggatggtagaggggcattaggcatttgaggactaggatggcatatctgattcacttaaatcaagcgcattgctatgtgcgatgagggtgtttaattgtaaaatgtaacgtagtataagtttgataaattttgttgtaagtaa

SEQ ID NO: 80797 - DNA, 164 bp, Glycine max
  unsure (1)..(164): unsure at all n locations
aaaaaaannaaaaaaaaagnnaaggggnaaataaaaaaaaaaaaaaaagaggaggagaaaaaaaaaaataaataaaaaaaaaaaaaataatataattaataaaaaaaaaaaaaaaaaaaaaaaaaaaaaaaaaaaaaataaaaaatataaataaaattaataat

SEQ ID NO: 80798 - DNA, 366 bp, Glycine max
ctcgagcttgttgcagaaaaccctcatccatggtggggggttttattaggataggcgttggcaaacatacatccagaagaagatatagtattcaattgtgattcatgtgatggtattaagagaagtgcattatctgatttttatcattttttttttcaaccttttcgaaacaatacttttttaatatgaatttttattaattgcttttcttgatactccattaccttattgacattttcttaatttataaaaaattttatttaattttttttttatgtttttattttttttaatctttcttatctttttttatttattttttttctatttattcttttatattattagtcttttatcatttttttt

SEQ ID NO: 80799 - DNA, 251 bp, Glycine max
ctcgagccttcacagcttattgcaggaggaatagtggtgggtgtgatcctgcacgggggaacgcaccttgcgtgcgatttcccaagaattagtgagtcggataaatcaatatttcggcaaactattggcgcaggattcgggtaccaccggccaacgtacactcaaatttttgcgaccactgatgtggccagtatgataggcatcgtggttactatgggcattgcatttgcactggcagacaaatggtcacg

SEQ ID NO: 80800 - DNA, 354 bp, Glycine max
cgtcttctcatatcaacaaaaggcaaggcacagcacgtggcaaatgttagcaacgcgggtctattactagaaatgagcctttcgcaggacctctactgcctggcctacctggcttcaagaatggaattctgtgttctaacgccactcattctatgctgacacgaatcctagacaactgtaagagagatcaaagctttgatacgcgagggcccttcttcattcgataactagtatgtaatctggtattcactcatataaagctcattactatgtgcaatgagggcgttttactttgcacccactctcatgcgtgcaatcgtagactgactgtaagaagtatgctcaagaggagga

SEQ ID NO: 80801 - DNA, 368 bp, Glycine max
caattagtatacttgttgagagttgctgcttggaagaaaggttgtttaatggtcaagattgtgatgtctgggaatgcagcagtcaaaaggagtgattgggcctcattggtacaagtgtttttaacaaacagcaacagtacagagcattttgatgcatgtaagtggacaaaatcagaaccacattcctgggaattaatcttcccaatagaggtatgtggtcctaataatggttttgaaatgtggagttctgagtgggcaaatcaaacttcatggcatttgagtttccttattgacaatcccaaacagtctacagtttttgatattctcttgggaatctctcaagattttgaaattgctggtaatactct

SEQ ID NO: 80802 - DNA, 203 bp, Glycine max
cttgcgtcgatgacgcgtcgtagctcggaattcggtcggcattgttcattacactccgtggaggccgtgctgtcacgttgggggaaaagcccaacatgtgaatcatgaagaaaaacttgagcctaagtttacccgatccgcggttgcttctgaagaccaagcccttttctcgtgccacctgccagaggttttgggctttcaat

SEQ ID NO: 80803 - DNA, 359 bp, Glycine max
attcaaggtttcagcttttgagtaccactaccaatggtgattttgttcaagggaaagatctcgcaatggttaaagttaatgtagcatgtgctgctgttggcttgacatcaagttacactccaactccattgttggaatctggtttgcaaaaagacagagggttaattgtggagtattttggaaggatgtcttacgttgctcataacgttaatcagccccaagagaaagatttgttggagggaaatttttcctttgatattaaatctcgctctagattggaaaaagtttcctctacaaaagcacaatttgttagtggaaaaaccttcaaatatgatataattggtgctggttcacattct

SEQ ID NO: 80804 - DNA, 362 bp, Glycine max
ggtttggctaatagattactgagtaagggcaacgatattctgtgttgcgattatgctagttttgatggtttgattaccaagcaagttatgagcaagatggcagaaatgataaacagtctttgtggtggtgatggaaaattgatgcgtgaaaggacacacctgctgttggcttgttgttcaaggatggcaatttgtaagaaagatatttggagagttgaatgtggaatcccttctggatttccgctcacagttatttgcaatagcatttttaatgagatgctcattagatatagctatgaaaaattactgcgccaggctaaagctccaagtatgtttttacaatccttcaaaaattttgtttc

SEQ ID NO: 80805 - DNA, 361 bp, Glycine max
gcaagcagtgcttttgtcaattttctattgaccttctcggtggaggaattttagtggacaaaactggagattggatcacacttatacaaaattctccaattagtaacttgttgagagttgctgcttggaagaaaggttgtttaatggtcaagattgtgatgtctgggaatgcagcagtcaaaaggagtgattgggcctcattggtacaagtgtttttaacaaacagcaacagtacagagcattttgatgcatgtaagtggacaaaatcagaaccacattcctgggaattaatcttcccaatagaggtatgtggtcctaataatggttttgaaatgtggagttctgagtgggcaaatcaaac

SEQ ID NO: 80806 - DNA, 366 bp, Glycine max
ttctcattatatatgccaaatgctgttctttcaatgtggagatattttgttggagatctcgtctttgaagtttctaagatgacttctccctacattaaatgtacagtctctttcttcatagcatttggaaatttggctgattacaccatcaattttgaggcttttccccacaagctggtgcaatttggagagattcaggaaaaagttgtattgaaattttcacaagaggaatttcttacagcttggtcaactcaggtgcgtcctacaacaactctgttggctgatgggtgtccatatttgtatgctatggtgcatgatagttcagtgtctacaataccaggtgattttgtcattggtgttaagttg

SEQ ID NO: 80807 - DNA, 361 bp, Glycine max
attagccattacttcgaatcaatacatttaaagaacaagaagcactggaactcatttaacacagctttctttcgtgactcggtagatgtaatagacgagatctctagtgatgggaaggcaaaattgaaagatgatgacaaactactgtctatggagttgaggtgccacagatgtagaagtgcacatccaaacataccgcgtttaaaatcacatattagcaactgccaatccccctttcctgctcacctgcttcaacacggacgtttgttgcgtgcaccaggagaacctcatagcaatgtccagtagtactagttttctgtctactttttttttgtgctcggcattttttgtctactctact

SEQ ID NO: 80808 - DNA, 363 bp, Glycine max
taaagctctaagtatgtttttacaatccttcaaaaattttggttctttgtgtgtgtatggtgatgataacttaattagtgttcatgaatatgtcaagccttactttagtggttctaaattgaaaagctttctagctggtcataatatcaccattactgatggtatcgacaaaactagtgcaactttgcaatttagaaagttagcagattgtgattttctcaagagaaactttaagcagatgtctaatgttttatgggtggctcctgaggacacggcgagtttatggacacaacttcattatgtttcgtgcaataatctggaaatgcaagaagcttatcttgtcaatctcgtaaatgtgttacg

SEQ ID NO: 80809 - DNA, 130 bp, Glycine max
caaaccaacccttcttgcagataacaagtcatcatataaccgacacctccatcatgttctgttcacttgccaccactgcaaaggaacactcaagcttagcaactataactcttttgagggggttctttac

SEQ ID NO: 80810 - DNA, 363 bp, Glycine max
cttcaggagattttcctgaaaaggaagatcaagaaaaacccaaaaagattgatgccagattgagacaaagaatagatcctcaatacaatgaggttcaggctcagatggaaacaaatttgtttaaattgtctcttgatgatgttgaaactcctaaaggttctatgttggatcttaaaatttctcaatctaaaattgcacttcccaagaacacagttggaggaaccattctgcgtagtgatctattggcaaattttttgacagagggcaattttagagcaagtgttgatttgcagcgcactcatcgtattaaaggaatgattaaaatggtggccacagttggtattcctgagaatacaggtatag

SEQ ID NO: 80811 - DNA, 349 bp, Glycine max
gggtggctcctgaggacaaggcgagtttatggtcacaacttcattatgtttcgtgtaataatctggaaatgcaagaagcttatcttgtcaacctcgtaaatgtgttacgagaattgtatttgcacagtccagaggaagctcgccaattgagaaggaaagctctctctcgtattgaatggctgcaaaaagctgatgtgcctaccatagcacagattgaagagttccattcgatgcagaggatgatgaatgctcctgattcaaatgataatattgatttactgttgagcattgatttgttgggtttacaaggagcaagtaaagcttttccaaacaaaattgtttttgatga

SEQ ID NO: 80812 - DNA, 353 bp, Glycine max
atgctatgttgcatgatagttcagtgtctacaataccaggtgattttgtcattggttaagttgacaaccataaacaatatgtgtgcatatgggctcaatcctggtatttcaggttctcgtcttttgggcaccattcctcagtccatttcacagcaaactgtttggaatcaaatggcaacagtgagaacaccattgaattttgattctagcaagcagagcttttgtcaattttctattgaccttctcggtggaggaattttagtggacaaaactggagattggatcacacttatacaaaattctccaattagtaacttgttgagagttgctgcttggaagaaaggttgtttaat

SEQ ID NO: 80813 - DNA, 362 bp, Glycine max
gtacagtctctttcttcatagcatttggaaatttggctgatgataccatcaattttgaggcttttccccacaagctggtgcagtttggagagattcaggaaaaagttgtattgaaattttcacaagaggaatttcttacagcttggtcaactcaggtgcgtcctgcaacaactctgttggctgatgggtgtccatatttgtatgcaatggtgcatgatagttcagtgtctacaataccaggtgattttgtcattggtgtcaagttgacaaccataaacaatatgtgtgcatatgggctcaatcctggtatttcaggttctcgtcttttgggcaccattcctcagtccatttcacagcaaact

SEQ ID NO: 80814 - DNA, 346 bp, Glycine max
atcttgtgttccgtcagaagtttttaaattttgtgaggttcattatgaagaaaagggacaagcttagttgtcaagttggaatcaacccatactccatggaatggactggtttggccaataggttactgagtaagggcaacgatattctgtgttgcgattatgctagttttgatggtttgattaccaagcaagttatgagcaagatggcagaaatgataaacagtctttgtggtggtgatgaaaaattgatgcgtgaaaggacacacctgctgttggcttgttgttcaaggatggcaatttgtaagaaagatgtttggagagttgaatgtggaatcccttctggatt

SEQ ID NO: 80815 - DNA, 348 bp, Glycine max
gaaaatctttctagctggtcataatatcaccattactgatggtattgacaaaactagtgcaactttgcaatttagaaagttagcagattgtgattttctcaagagaaactttaagcagatgtctaatgttttatgggtggctcctgaggacaaggcgagtttatggtcacaacttcattatgtttcgtgcaataatctggaaatgcaagaagcttatcttgtcaatctcgtaaatgtgttacgagaattgtatttgcacagtccagaggaagctcgccaattgagaaggaaagctctctctcgtattgaatggctgcaaaaagctgatgtgcctaccatagcacagat

SEQ ID NO: 80816 - DNA, 268 bp, Glycine max
cgccaagctatgtatcaacgatagcactctaacgttgcggacactaagctacggcagcatgatcacaacgggataggggatgggacgtgtataggctgtgctatctatgaactaaaataatgcgctctgagactctatgttggacacaggaagatgcaacgaaaatgcattctgttgcttatgttgcgccacaagagcggctaaagcgagctgacaagagagaaacactgtctgggcagacacatgtggtgaactaagaccaatattc

SEQ ID NO: 80817 - DNA, 359 bp, Glycine max
atcctaagtctttgggaatagtgctgcaatggcttcaagtcaggaggaggtgacccttttgggagctactggaagcccatttgtgtgcagggttcatattgccctcaagttgaagggagttcaatacaaatatgtcgaagaaaatttgaggaacaagagtgaactgcttctcaaatccaacccagttcacaagaaggttccagtgtttattcacaatgagaagcccatagcagagtctcttgtgattgttgaatacattgatgagacatggaagaacaaccccatcttgccttctgatccttaccaaagagccttggctcgtttctggtccaaattcattgatgataaggtttttggtg

SEQ ID NO: 80818 - DNA, 348 bp, Glycine max
atcaattttgaggcctttccccacaagctggtgcaggttggagagattcaggaaaaagttgtattgaaattttcacaagaggaatttcttacagcttggtcaactcaggtgcgtcctgcaacaactctgttggctgatgggtgtccatatttgtatgctatggtgcatgatagttcagtgtctacaataccaggtgattttgtcattggtgttaagttgacaaccataaacaatatgtgtgcatatgggctcaatcctggtatttcaggttctcgtcttttgggcaccattcctcagtccatttcacagcaaactgtttggaatcaaatggcaacagtgagaacacca

SEQ ID NO: 80819 - DNA, 401 bp, Glycine max
  unsure (1)..(401): unsure at all n locations
aagagcangacggngcaagcacgccgaccgaaagctcggaattcggcttgtgtgaagatttttcatcagttcacaaagatgaaccccacactgcaatttgcaaaacggagaataaacagtttttgccattcatctcccctccatctgtatcatctggatcattttctgcaagacatagtgactcacctccctccttctcaagcacaaaatctgaaggcaatgtggacttacaggatgtgttggctgctgcccatgctgctgctgaaactgctgaacgtgcagcagcggcagctcgcagcgcggccagccttgctcaactccgaattaatgagctgacaaagaagaaaagtagtgaacatgtgcctgacagcagtagctctgagaacccgttttatgctggt

SEQ ID NO: 80820 - DNA, 127 bp, Glycine max
tgagaactgtaagagtctcaaatatctggttgatgagtgtccttttgcatttgtgaactagtatgtaatattttattcacttaaataaagcgcattactatgtgcaatgagtgtgtttaaatataaa

SEQ ID NO: 80821 - DNA, 123 bp, Glycine max
ggcacgcgacagaagctcaaaatacaactttagccttttttttaaaaacaacaaaaacaaaacagaggcgcttttttaaactggtgcgccgccccaaaaaaaaaagaaagcaaattgatattc

SEQ ID NO: 80822 - DNA, 357 bp, Glycine max
cccatttgtcttaccaatggggaggatatggtcttcggttgaggacatcagacttgtggcgagtgtaaaaaggacctccaattctgtaccatttgccggagcacaatccatactagaataaggctttactagttagctttgatgcaaaagtcctgtcaatgaaaatatcgtcatttccagaataaggtgctgcaaaaggatgtgcagagttggtctggctcttttcacagatggttacttgttcataaaaactgcatttgcaattaacaggcgaaacttgtattctcagttacacttaagaagagctctttacagaaagaataggacttccccgttgtatatatgtagctcatgtgt

SEQ ID NO: 80823 - DNA, 261 bp, Glycine max
gcattctcttaacacttcgggaagtgccctgagggaatgcctctttctatagggggaggagctggtgcaaagaatgctattctcatgaatatgccaaatgctgttctttcaatgtggagatattttgttggagatctcgtctttgaagtttctaagatgacttctccctacattaaatgtacagtctctttcttcatagcatttggaaatttggctgatgacaccatcaattttgaggcttttccaaactgcaccagcttg

SEQ ID NO: 80824 - DNA, 321 bp, Glycine max
ctcaagcttattctgcttaagatctttggagatactattggtctatctaacaacagttggtggatgcatggctattatcgcgtgaagcgattgatgaatcataaaatgtacttggagaaagggggggagcacactcagtggatctcacatgagtgtgcaccaggcactatgtaccctgactgatgcgggtgtgggccatatataacatgcgtctataagctagttgtcgaagataatgaaatgctacctatgttttaaaggaagcacatatattatttactcattgaagtagctctaagtcatatcatctcctagttacag

SEQ ID NO: 80825 - DNA, 353 bp, Glycine max
tctttcttgccagtagattaataagatctagttagctgtacggatctctaccactccacgaaatcccttttttcagtaacttgctttttgttacccacaacaattaccaaaccctcaacaaatgtctgaacgaggtgaagacactgtccactctccttctgaacgtaaaaggtcacttccgtctgacgacgaggaagacgaccttagttctgacgaaagaggaggacgtttcaaacgtcccgctttaaatacttctggaggtgaggacgataactcttcagaattagactataccgatgaaccacctgctgaagaacgtccggtaactccgtcagaaactggtgacgttatgg

SEQ ID NO: 80826 - DNA, 148 bp, Glycine max
  unsure (1)..(148): unsure at all n locations
attacanatatggaatgtaacaaataaacaaaggggggggattaatgaaggaggggggcgcgccaaaaccacnaacaaataaagaatcatgagccaccactacaaagaaagtagaatcatcctttgaaacacacgttttttttttctt

SEQ ID NO: 80827 - DNA, 136 bp, Glycine max
  unsure (1)..(136): unsure at all n locations
tatattcntccaccccanaaaaagaaaatgtgggaaattgtatgggcacgggcgccacaaaatcacctcctcagtagcttccgctactctttacaatgcactagttacagatgctttttaacatcattccattttc

SEQ ID NO: 80828 - DNA, 350 bp, Glycine max
cttggactttcaacaagttcctcggacagcaaggagagttcagctactgcttgcactgctttgtcttcagccaaagagattgatgaggaatcgtccatgcctatggatattgaactggactttacacttcatcttggctgcgagaaggtaaagagcccaaaaaaacttgctagttcaaatttgaagatatttgagttgcagcctaaggttgatttggagttgagcctttccacacggccctctgaatcagatattactagtgtttgtctaagtccttctcacgccccatctttccgattgaacatggagacaccattagtattcagcaggacaccaaatgcagatgaggg

SEQ ID NO: 80829 - DNA, 271 bp, Glycine max
ttggagcttttttaactccacactccacaacaaagagcgggtgcaaaccgtttccattactttaacacccccctgaatatcatcacttaatttgaaggaaagattggaggcggcacctcattcgtctgtgactaaataatactactacttcttcactcaaaaacgagatagctggagacggaacaaaatggctataatagcacgacgatggtctctacttcaagcagatgacccacaggcacatcacaccacaggctcaaagaccaaatat

SEQ ID NO: 80830 - DNA, 247 bp, Glycine max
aatacactgggtatgacagcattaatgatcatgcacaaattgctttcgatgatggaagataattaattatggctaagcagcatacgctccagtttgcttcaaagttctgttacaaccttctgtattcatgatgaaaaatccattgagttgttttcatgagtgtgtatttgtgtgtatttatgtattgaactatgttatgtagtaaagttaaagacttaaaattatatatatgcaatgcgcttacttc

SEQ ID NO: 80831 - DNA, 353 bp, Glycine max
aaaattgttggtgtcatcagccaaatttgaggcctttccccacaagctggtgcagtttggagagattcaggaaaaagttgtattgaaattttcacaagaggaatttcttacagcttggtcaactcaggtgcgtcctgcaacaactctgttggctgatgggtgtccatatttgtatgctatggtgcatgatagttcagtgtctacaataccaggtgattttgtcattggtgttaagttgacaaccataaacaatatgtgtgcatatgggctcaatcctggtatttcaggttctcgtcttttgggcaccattcctcagtccatttcacagcaaactgtttggaatcaaatggcaa

SEQ ID NO: 80832 - DNA, 325 bp, Glycine max
  unsure (1)..(325): unsure at all n locations
aagagcnangaaggaggaaggcacgcgtacgtaagctcggaattcggctcgtgaaaaaaattgttttttgagaaaaaaaaaaaataaacgggtggttttacgacgggagatgcgggattatggactaaacacaaaaaaaaatgggggttcgacagataatgaaatgatggacccggaaattaattagaggcatttctcttgaggttttccaaatttgcgtttatgaattcgaataacatgttggtgataaaatggtcaaagatcaaatttgtggtaaatgcaagttggattatacttacgctaataattctgcccgaattcttaa

SEQ ID NO: 80833 - DNA, 188 bp, Glycine max
cccaaaaaaaaaccttacaaccaacttttgtttagttaaaaaactactccaaatgtcgtgcttaagctcatcaaagtttaaagattaactatatatcatgttaaaagccatttgcagaaatacatgacagctagatatatactctaatcatcttaactagttattgaaaaaaaaacaatttcctttta

SEQ ID NO: 80834 - DNA, 375 bp, Glycine max
atagattactgagtaagggcaacgatattctgtgttgcgattatgctagttttgatggtttgattaccaagcaagttatgagcaagatggcagaaatgataaacagtctttgtggtggtgatgaaaaattgatgcgtgaaaggacacatttgctgttggcttgttgttcaaggatggcaatttgtaagaaagatgtttggagagttgaatgtggaatcccttctggatttccgctcacagttatttgcaatagcatttttaatgagatgctcattagatatagctatgaaaaattactgcgccaggctagagctccaagtatgtttttacaatccttcaaaaattttgtttctttgtgtgtgtatggtgatgata

SEQ ID NO: 80835 - DNA, 133 bp, Glycine max
cattagaacctaaaagaagtgcacttgaagaagattttgaggaggaagaagagaaagaggataatgaccagcctgttgatgagattgaagatagggcctatgagaaggaccaatatcgtgggagaagccctac

SEQ ID NO: 80836 - DNA, 368 bp, Glycine max
ggtaaccgaaaaccttaaaagatataaaaggatgatctcagatttttattcgatgttgtaatcgataagacgatctcaattataatcgtgcttcatcctgcacacacctgctgctagcttgcagcaaaatttggccacaactggcactattgcaaacctgcatcgcaccaaagtattgcgtcatgtaagtggaattttataacaagaaggtttttgtgcaacatgtggagacaataagcagctctgaggtcacctttgatatcgtgcaatcctttgtggatcttggttccagtggtgcatctgattccaagtcaaaaattaaggaaagaaagaaattcttcaacagggacaataagcaagatcagcta

SEQ ID NO: 80837 - DNA, 94 bp, Glycine max
tggggatttttttagatagcattaccaatacaagaggctatgtatccaaaaagaatgtggagcaccgatgaagtctatttttttttagttcatt

SEQ ID NO: 80838 - DNA, 359 bp, Glycine max
aggttggcaattggtgggaaagatatttggggagtggattgtggaatcccttctggatttccgttcacagttatttgcaatagcatttttaatgagatgctcattagatatagctatgaaaaattactgcgccaggctaaagctccaagtatgtttttacaatccttcaaaaattttgtttctttgtgtgtgtatggtgatgataacttaattagtgttcatgaatatgtcaagccttactttagtggttctaaattgaaaagctttctagctggtcataatatcaccattactgatggtattgacaaaactagtgcaactttgcaatttaaaaagttagcagattgtgattttctcaa

SEQ ID NO: 80839 - DNA, 112 bp, Glycine max
gcaatattataacaggaaaaagatgaaaaggaaaaggaaaagaaaaagagagtgccatatgtaatggtccttgcatggaaaacatgattgagttctatttttttttttaaaa

SEQ ID NO: 80840 - DNA, 299 bp, Glycine max
atcacatttggcactcaaaaacacgatcaactcggcgcgcatctgctgaagttgcaggccttatctttctttcaaactgtagagacataagaaaaccaaaatgaataacgcgcgcgaccgatgagtttgtcaaaaatctctaatattttgtatgcatcattcatgcgacacacatatttattataacatacaaccgtacgcgattgtagagtgtcatgttaaatgccaacagatagcaaacatggtcttactacacgcgatgccaagcttcagaaagtcacaaaacatgaatctacaac

SEQ ID NO: 80841 - DNA, 97 bp, Glycine max
tcggttcgaggggtaattttataaaaaaacacacacttacacgtaattcggcaattaaaagaggtgtggaaataacatgtgaagtgtgtgttttttt

SEQ ID NO: 80842 - DNA, 401 bp, Glycine max
ctaaacttcgaaattcggttcgagggattatgtttttgataactaaattagggttcatgagtatgtcaagccttactttagggggtctaaattgaaaagctttctagctggtcataatatcaccattactgatggtattgacaaaactagtgcaactttgcaatttagaaagttagcagattgtgattttctcaagagaaactttaagcagatgtctaatgttttatgggtggctcctgaggacaaggcgagtttatggtcacaacttcattatgtttcgtgcaataatctggaaatgcaagaagcttatcttgtcaatctcgtaaatgtgttacgagaattgtatttgcacagtccagaggaagctcgccaattgagaaggaaagctctctctcgtattg

SEQ ID NO: 80843 - DNA, 382 bp, Glycine max
cttagtatttttcacctttatatttgttgggattcaggagcatttgaagacttcatgtatgcattagatccccagatcgaagtcagatcaaaggcaaattttgttactgaaactgctttcataagagatgaacttcttcatggcaaccaagtttatctgaattttaatctttcaagaacctttctttacatccacatacaaccacttcaatgagaacatccaaatttccatgtaggggattggattatcgtctattccttctgatttttgctgtatgtttggtgttgtatggaacagtttcaagattgaatgctccaaatgtttcttatgccacaatatctaagttacggcacttcaatcctaagcatgttatatcaaaagg

SEQ ID NO: 80844 - DNA, 398 bp, Glycine max
ggaatttcggcttcggggggatttttttaagaaaaactttaaccaaatttttaatgtgttgtgggtggctcctgaggccaaggcaagtttatggtcacaacttcattatgtttcgggtaataatctggaaatgcaagaagcttatcttgtcaatctcgtaaatgtgttacgagaattgtttttgcacagtccagaggaagctcgccaattgagaaggaaagctctctctcgtattgaatggctgcaaaaagctgatatgcctaccatagcacagattgaagagttccattcgatgcagaggatgatgaatgctcctgattcaaatgataatattgatttactgttgagcattgatttgttgggtttacaaggagcaggtaaagcttttccaaacaaaa

SEQ ID NO: 80845 - DNA, 379 bp, Glycine max
cggtggaggaattttagtggacaaaactggagattggatcacacttatacaaaattgtccaattagtaacttgttgagagttgctgcttggaagaaaggttgtttaatggtcaagattgtgatgtctgggaatgcagcagtcaaaaggagtgattgggcctcattggtacaagtgtttttaacaaacagcaacagtacagagcattttgatgcatgtaagtggacaaaatcagaaccacattcctgggaattaatcttcccaatagaggtatgtggtcctaataatggttttgaaatgtggagttctgagtgggcaaatcaaacttcatggcatttgagtttccttattgacaatcccaaacagtctaacagttttgat

SEQ ID NO: 80846 - DNA, 383 bp, Glycine max
atttaccttctatacttgttccttttgaaggttagaagtgctacaatacaaacaatggcagctactcaggaagatgtgaagcttttgggtattgtgggaagcccatttgtgtgcagggtccagattgcccttaagttgaagggagttgaatacaaatttttggaagaaaatttgggcaacaagagtgatttgcttctcaaatacaaccctgttcacaagaaggttccagtgtttgttcacaatgagaagcccatagcagagtctcttgtgattgttgaatacattgatgagacatggaagaacaaccccatcttaccttctgatccttaccaaagagccttggctcgtttctggtccaaattcattgatgataagattgtggg

SEQ ID NO: 80847 - DNA, 379 bp, Glycine max
ggaaaaagttgtgttgaaattttcacaagaggaattgcttacagcttggtcaactcaggtgcgtcccgcaacgactctgttggctgatgggtgcccatatttgtatgctatggtgcatgatagttcagtgtctacaataccaggtgattttgtcattggtgttaagttgacaaccataaacaatatgtgtgcatatgggctcaatcctggtatttcaggttctcgtcttttgggcaccattcctcagtccatttcacagcaaactgtttggaatcaaatggcaacagtgagaacaccattgaattttgattctagcaagcagagcttttgtcaattttctattgaccttctcggtggaggaattttagtggacaaaact

SEQ ID NO: 80848 - DNA, 353 bp, Glycine max
atcaattcatatttgtagtataatgatatgattattatggttcgttgcatagtagctaatagcaccacttttgtgtgctatagtggtgctgtggagcagctgactgccgctcctaagaggtgcattgcgctgcacctcactgttgtggccgtcacgccgctcttcatggccaaaatcgcggagttttgtgacagatgcagttgcaacagccaggtttaagtcatggggaagaagacgacactaaacatcgttatttgttgttttttcttaaaaaataattaggagcaaaatgttgcatttcatttaagggttcttttaaaaaaataaaataaaataaattaaaaacatgtctt

SEQ ID NO: 80849 - DNA, 350 bp, Glycine max
attgaaaagctttctagctggtcataatatcaccattactgatggtattgacaaaactagtgcaactttgcaatttagaaagttagcagattgtgattttctcaagagaaactttaagcagatgtctaatgttttatgggtggctcctgaggacaaggcgagtttatggtcacaacttcattatgtttcgtgcaataatctggaaatgcaagaagcttatcttgtcaatctcgtaaatgtgttacgagaattgtatttgcacagtccagaggaagctcgccaattgagaaggaaagctctctctcgtattgaatggctgcaaaaagctgatgtgcctaccatagcacaga

SEQ ID NO: 80850 - DNA, 107 bp, Glycine max
caaatatttggttgatgagtgtccttttgcatttgtgaactagtatgtagtattttattcacttaaataaagcgcattactatgtgcaatgagtgtgtttaaatata

SEQ ID NO: 80851 - DNA, 348 bp, Glycine max
  unsure (1)..(348): unsure at all n locations
caggaatgtgttcccagaacctattgtgttttaaatccacaaaatccttttgtgttaaataggtggatgggaaaactgactttcccccagggcacttcccgaagtgttaagagaatgcctctttctatagggggaggagctggtgcaaagaatgctattctcatgaatatgccaaatgctgttctttcaatgtggagatattttgttggagatctcgtctttgaagtttctaagatgacttctccctacattaaatgtacagtctctttcttcatagcatttggaaatttggctgatgacaccatcaattttgaggcttttccccacaagctggtgcangtttgagag

SEQ ID NO: 80852 - DNA, 236 bp, Glycine max
atatttatcattccacaaaaaaaaaaaaaaaaaaggggggggtttcaaaaaaatttggtgcaaaaaaaaaacaaaaaaaaaaaaaaaaaaaaaaaaaaaaaaaaaaaaaaaacaaaaaaaaggggcggcccccaccaagggagctcgtcaccccggaaataaattccggcccggtcccggaaggggtaccaattttccctaaaggggggggtataaaagctgggcctaaaaagggc

SEQ ID NO: 80853 - DNA, 358 bp, Glycine max
gttcagtgtttacaataccaggtgattttgtcattggtgttaagttgacaaccataaacaatatgtgtgcatatgggctcaatcctggtatttcaggttctcgtcttttgggcaccattcctcagtccatttcacagcaaactgtttggaatcaaatggcaacagtgagaacaccattgaattttgattctagcaagcagagcttttgtcaattttctattgaccttctcggtggaggaattttagtggacaaaactggagattggatcacacttatacaaaattctccaattagtaacttgttgagagttgctgcttggaagaaaggttgtttaatggtcaagattgtgatgtctgg

SEQ ID NO: 80854 - DNA, 354 bp, Glycine max
tagatattgctatgaaaaattactgcgccaggctaaagctccaagtatgtttttacaatctttcaaaaattttgtttctttgtgtgtgtatggtgatgataacttaattagtgttcatgaatatgtcaagccttactttagtggttctaaattgaaaagctttctagctggtcataatatcaccattactgatggtattgacaaaactagtgcaactttgcaatttagaaagttagcagattgtgattttctcaagagaaactttaggcagatgtctaatgttttgtgggtggctcctgaggacaaggcgagtttatggtcacaacttcattatgtttcatgtaataatctgga

SEQ ID NO: 80855 - DNA, 352 bp, Glycine max
attttctgtttccctcccccttctgaaaattttcccgcgtgcccagaaagggcagaagcggcaacttgggtctccccaacacctcttttcccgtactcctatttccgagttaaaactcacgtccgacccctacactcattccgttgttgattccatctcacaacgtctctttgtcccttgtcgttgttcttgtttctgaaatgctttgtttcccatagcggtcacatataccccctgcattgatggagttcacgttcctgtgctctttcttccatttttccctcgaattttcaagcattccctccctataggtaggagagggaagtggggaaaacatttgtagatggtttca

SEQ ID NO: 80856 - DNA, 288 bp, Glycine max
gagttccatttgatgcagaggatgatgaatgctcctgattcaaatgataatattgatttactgttgagcattgatttgttgggtttacaaggagcaggtaaagcttttccaaacaaaattgtttttgatgataagcttgtgttggctaacacacaagaattctttgatggaaattttccagtggattcttggttaccaatttttgtgaattgtctttatcctgtaagtcaattaccttcagaagctgtcgttgtaaatgttacatgtggtagtggacgtggtggttta

SEQ ID NO: 80857 - DNA, 322 bp, Glycine max
caccattgaattttgattgtagcaagcagagctaaaggaagttacatatagacctattcaggggacgaataatagtggacataactggacataggatcacgctaatacaaaaattcttcaatgaagaacttgtgggcaaggaaaagattggaatgaatggcatatgcatgctgaagattgccatgcttatgaatgtatcacataataggagtgagggaaggtaatgggatcaagaattacaagcataccaatactgagcagcacatgacagtgcatgccagagatcaaactcggacatacagttcggggaaatgcgcttgct

SEQ ID NO: 80858 - DNA, 63 bp, Glycine max
aaaatatttaaaaaaaaaaaaaaaaaaaaaaaaaaaggaaaaaaaaaaaaaaaaaaaaaaaaa

SEQ ID NO: 80859 - DNA, 350 bp, Glycine max
tttgctttcatgtattctgaagtcagattttttaaatgaggatacaagaatctccattcaagttccctctaattttgagaatatgagtacatcaaagcaagtacaaatcacaatttctgctgaagagtttggggccaaagaaaaatctccctatctttcatatgcaggcggtgaagtaccgtcctcatcattatctcacattatcgggttgagggaaggaaatgtcatgtttaattacaggtattacaataataagttgcagaggacagaagtcaccaaagatttcacttgtccattctgtttggttaaatgcgcttgttttaagggtctaagatgtcatttgtcatcgt

SEQ ID NO: 80860 - DNA, 349 bp, Glycine max
gatgagtaagtgtctcctactttgcagtatataggtcttctaaagtttgctgacatttttgttcttgccctgtttgcatcatttataatttgggatttaataatatgtagtacgtagaatattcaatacataaaatatttacttagaatcataaccaacctataatttctaataatttgagggccttgctttttctctgaaatgtagtcatggggttcttgttacaatttgcttatatagtactatattcttttgtaaagttgattctttagatctctgaactggactgaataatcaaacattttgctaagaatttttaagttaaaaccataaaagattcatactattc

SEQ ID NO: 80861 - DNA, 287 bp, Glycine max
tcatcaatcatggattggtggccttggtggagtcttatgaaatgaaaattttcgaggtgaaacttattgtaatgatgtcttgttttacagccctgataacatacgtggctgatacatctgacgtcattgagactgcaactctgcttgttagaaatgctaactttctgtacattgacgtggtgcagatcttgtgggatgttttaatggatgctgttcaaatgtctggttaagatatctatccgaatgccaatgcttgccttgtgctagtaaacacttgggcagaattg

SEQ ID NO: 80862 - DNA, 359 bp, Glycine max
aacattttcaataccaaaaccttggtaattaattaactccaaaaaaatgcaagccaaacccattcacaacaccccaacatacattcctccacccataaggccatcaccaccggtgcaccaaacccctccctctataccatcaatcaaacctcgtgcaatatccatatccgcacctaatattcctattgccgtaccaattccaccaattgtagagcctgatgattccaatgctgcttattatgactaccaattcttgttcatgtcacaaagatccgaagcaacccgacccgtcactctaagcaccgtggaaggtgcgatccccgccgatttcccgtctggcacgtactatctaaccggac

SEQ ID NO: 80863 - DNA, 343 bp, Glycine max
gtgaggttcattatgaagaaaagggacaagcttagttgtcaagttggaatcaacccatactccatggaatggactggtttggccaataggttactgagtaagggcaacgatattctgtgttgcgattatgctagttttgatggtttgattaccaagcaagttatgagcaagatggcagaaatgataaacagtctttgtggtggtgatgaaaaattgatgcgtgaaaggacacacctgctgttggcttgttgttcaaggatggcaatttgtaagaaagatgtttggagagttgaatgtggaatcccttctggatttccgctcacagttatttgtaatagcattt

SEQ ID NO: 80864 - DNA, 359 bp, Glycine max
ctggatttccgctcacagttatttgcaatagcatttttaatgagatgctcattagatatagctatgaaaaattactgcgccaggctagagctccaagtatgtttttacaatccttcaaaaattttgtttctttgtgtgtgtatggtgatgataacttaattagtgttcatgaatatgtcaagccttactttagtggttctaaattgaaaagctttctagctggtcataatatcaccattactgatggtattgacaaaactagtgcaactttgcaatttagaaagttagcagattgtgattttctcaagagaaactttaagcagatgtctaatgttttgtgggtggctcctgaggacaag

SEQ ID NO: 80865 - DNA, 197 bp, Glycine max
ttgcgtcgctgccgcgtcgtaagctcggaatttttctcgagcatgataacgctcacagcatttatatagcgtgttaatgatatgctggtggggcgtcaacacaaaaaattactgcgccaggctagagctccaagcatgtttttgctattttttgttttgcttaagctctattttgtgtctctttgcacgtgaatgat

SEQ ID NO: 80866 - DNA, 325 bp, Glycine max
atggctgtaaaaagctgatgtgcctaccatagcacagattgaagagttccattcgatgcagaggatgatgaatgctcctgattcaaatgataatattgatctactgttgagcattgatttgttgggtttacaaggagcaggtaaagcttttccaaacaagattgtttttgatgataagcttgtgttggctaacacacaagaattctttgatggaaattttccagtggattcttggttaccaatttttgtgaattgtctttatcctgtaagtcaattaccttcagaagctgtcgttgtaaatgttacatgtggtagtggacgtggt

SEQ ID NO: 80867 - DNA, 350 bp, Glycine max
ctaatgagcatctcattaaatatagctatgaaaaattactgcgccaggctaaagctccaagtatgtttttacaatccttcaaaaattttgtttctttgtgtgtgtatggtgatgataacttaattagtgttcatgaatatgtcaagccttactttagtggttctaaattgaaaagctttctagctggtcataatatcaccattactgatggtattgacaaaactagtgcaactttgcaatttagaaagttagcagattgtgattttctcaagagaaactttaagcagatgtctaatgttttatgggtggctcctgatgacaaggcgagtttatggtcacaacttcattat

SEQ ID NO: 80868 - DNA, 353 bp, Glycine max
gttcagtgtctacaataccaggtgattttgtcattggtgtcaagttgacaaccataaacaatatgtgtgcatatgggctcaatcctggtatttcaggttctcgtcttttgggcaccattcctcagtccatttcacagcaaactgtttggaatcaaatggcaacagtgagaacaccattgaattttgattctagcaagcagagcttttgtcagttttctattgaccttctcgttggaggaatcttagtggacaaaactggagattggatcacacttatacaaaattctccaattagtaacttgttgagagttgctgcttggaagaaaggctgtttaatggtcaagattgtgatg

SEQ ID NO: 80869 - DNA, 342 bp, Glycine max
aatgttttgtgggtggctcctgaggacaaggcgagtttatggtcacaacttcattatgtttcgtgtaataatctggaaatgcaagaagcttatcttgtcaacctcgtaaatgtgttacgagaattgtatttgcacagtccagaggaagctcgccaattgagaaggaaagctctctctcgtattgaatggctgcaaaaagctgatgtgcctaccatagcacagattgaagagttccattcgatgcagaggatgatgaatgctcctgattcaaatgataatattgatttactggtgagcattgacttgttgggtttacaaggagcaggtaaagcttttccaaac

SEQ ID NO: 80870 - DNA, 238 bp, Glycine max
gcacgctcgtaagctcggaattcggctcggctatttgtcaatctcgaaatggacagaatgtttcacagccagaggaagctcccaatgaaaggaaagctttctgatgaggctgcaaaaagcatgcctaccatagcacaatgaagagtcatcagcaagatgtaatgctcgacaaatgtatatgttactgtggctgattgtggtacagggcagtagtttcacaaaatgtttgatgtagctg

SEQ ID NO: 80871 - DNA, 380 bp, Glycine max
ccttccgtaagctcggaattcggttcgagctcgagtttattcggctcgagcttaattagtgttcatgaatatgtcaagccttattttagtggttctaaattgaaaagctttctagctggtcataatatcaccattactgatggtattgacaaaactagtgcaactttgcaatttagaaagttagcagattgtgattttctcaagagaaactttaagcagatgtccaatgttttgtgggtggctcctgaggacaaggcgagtttatggtcacaacttcattatgtttcgtgtaataatctggaaatgcaagaagcttatcttgtcaatctcgtaaatgtgttacgagaattgtatttgcacagtccagaggaagctcgcca

SEQ ID NO: 80872 - DNA, 262 bp, Glycine max
tcatgattatcttcagatatcaaacaaaaaagaaagagaccaagaacctgtccttatgtgtttgtgagctcaagttgatgtttttagttccaagatttttactatccacagtccacactgttgtgttgtgcttcttctgggaaggttctggggtgcaactcttctactgaactcctgcccctctaaacccgtcaacctatcttgtaaaacatgttacagtccacatgtcccatcacgatcggaccactcgttagatacgtga

SEQ ID NO: 80873 - DNA, 348 bp, Glycine max
tttttattgtggagttctgagtgggcaaatcaaacttcatggcatttgagtttccttattgacaatcccaaacagtctacagtttttgatattctcttgggaatctctcaagattttgaaattgctggtaatactcttatgccagctttttctgttccacaggctactgccagatcttctgaaaatgcggaatcctctgcatgatctggaattcgtgttttctttcgcttgttcgtttgtttaattcaataaaggaaattaggcatgaccctcttgttgagtatgctctgcctatctgaaaatttccacacctcttttaattgtcgtaatgatgtgtgaagtgtgtgt

SEQ ID NO: 80874 - DNA, 275 bp, Glycine max
gtaagtgtacaaaatcagaaccacattcctgggaattaatcttcccaatagaggtatgtggtcctaataatggttttgaaatgtggagttctgagtgggcaaatcaaacttcatggcatttgagtttccttattgacaatcccaaacagtctacagtttttgagattcccaagagaatatcaaaaactgtagactgtttgggatattctcttgggaatctctcaagactttgagattgctgggaatactctgatgccagcttttttttgcccaca

SEQ ID NO: 80875 - DNA, 352 bp, Glycine max
acaatttgtttgtggaaaaaccttcaaatatgatataattggtgctggttcacattcttcaggagattttcctgaaaaggaagatcaagaaaaacccaaaaagattgataccagattgagacaaagaatagatcctcaatacaatgaggttcaggctcagatggaaacaaatttgtttaaattgtctcttgatgatgttgaaactcctaaaggttctatgttggatcttaaaatttctcaatctaaaattgcacttcccaagaacacagttggaggaaccattctgcgtagtgatctattggcaaattttttgacagagggcaattttagagcaagtgttgatttgcagcgc

SEQ ID NO: 80876 - DNA, 349 bp, Glycine max
  unsure (1)..(349): unsure at all n locations
tctcttttttgtgcagaggggtattaatcttgtcagtgaccctgcttataggcctggatactacagngacataattcaacatgataccggtgatgtctataatggacactactaccataaccattatgatactgaaagtaaccaaatacaaaatgatgagatcattgcacgggctcttcaagaagaattttcccggctagatattgctgagtgttcaggatattcacagacagatgaagaacagttccatgcttctgagcctacatatgattggaataatacatcgatgatgaactattgttcaagtcatgattatgcttacaacggagttggtgacatagaaccttct

SEQ ID NO: 80877 - DNA, 81 bp, Glycine max
gccatctcaattggcactgttggtttggaaaggggtgttggttgattaccaccccattcactaactgatcccgctgtcatg

SEQ ID NO: 80878 - DNA, 265 bp, Glycine max
aaataattaaaaaaaaaaaaaaaaaaaaaaaagggggaaaaaaaaaaaaaaaaaaggggaaaaaaaaaaaaaaaaaaaaaaaaaaaaaaaaaaaaaaaaaaaaaaaaaaaaaaaaaaaaaaaaaaaaaaaaaaaaaaaaaaaaaaaaaaaaaaaaggggggcgcccacccaaaaagcgtcccacccccggagaaaattttacatccttgtcctacataaaaaccatattacccaataggtggaaaaaaaaaacataccacaaaaa

SEQ ID NO: 80879 - DNA, 198 bp, Glycine max
ctctggtttcaagaacgagtgcaatgcgaagtgatagatattggtggaggttactccatcatctcattttaccatacatgccccccttatgactacccgctctgacagaatgccagaatcaactcgaccagaaggactaccaattctctgctcctgccctattggtgcccccttgggtactctatttcctttacatag

SEQ ID NO: 80880 - DNA, 440 bp, Glycine max
  unsure (1)..(440): unsure at all n locations
cacgcgtaccttaagcctcggaatttcggcttcgatggtgcacttcgtgtgattgaatgcgctttggggtacccggtgacggtgggacttctgtccgtcggctgaaaccggtggtgtgccctttccgtttgggcgacgagttgggacccgcgtgcagtcgtggtcgaaccgcgccagtctctttaaccagggaacctgtgtgaagcatcctggctgacggggaagtggaacccgccattgattgccaataccgaagctttcgagtacttaccatcttcgcgccttcttcaatgagaaccaaaagncccgtgcccaatatgccgaaccgcaacttgtgggcctcttccaagcctgatttcacttcccgtctaccgactccggaatcctccgcaacggacaggcagttacacctgcaagacctacacctacaagacctgcag

SEQ ID NO: 80881 - DNA, 398 bp, Glycine max
cttgacggcccaagcacacccttccttaagttcggaattcggttggagggtattttatcaagtctcactatctttcttggcctgctgtcggtgtttgtgacctcgaaatttttttcaccagtgtttagggttgaatactgattacccttcaagtattgttcagcttccgagaaaaaaatattggtgtggctagtcaaactagagacttggccatttacggtcgctattgagctcatattgctatacattctgatggtgttagctatgggcgggtagagctctcaagcgaagggctaagccgtgtggcacccactgataatgcattctcaagcctcaaagcaggaacatttaactccataaactcacaagaccaaatgcagctgatacaattccacact

SEQ ID NO: 80882 - DNA, 340 bp, Glycine max
ctttagtctaatcggctcgagtctctctgtgggtgggcctacctgtgcgttgaagatgcagatcttcgccaagaccctcaccggcaagaccatcacccttgaggtggaaagctctgacaccatcgacaacgtcaaggccaagatccaggacaaggaaggaatccccccggaccagcaacgtctcattttcgccggaaagcaacttgaggacggccgtacccttgctgactacaacattcagaaggagagtactcttcacctcgtcctccgtcttcgtggtggcatgcagaactttgttaagacactcaccggcaagaccataaccctagaggttggaagc

SEQ ID NO: 80883 - DNA, 309 bp, Glycine max
ggaacattcaacaacaatggctgtgtgctgttttctcatcaggaacagagagggattccgggtgctgaatttcgcagaggatgttcaaacttaactcactcaatcagaccttgtctaattctcaactctgctctgcttttctccaacaaaaaggcaaagataccagatattgagaaggcttagatgtgtgctacattgcaagcaaagagggtactgggagaagtggggatatgctggatattctatagtcttacacagcatgacacaacaaccaaccttttccattgcgaaggccttactgtgatttga

SEQ ID NO: 80884 - DNA, 145 bp, Glycine max
cggggggacgaagctcgaattctctttattgaagtttaatttccaacaaaacaacaaaccacgcgcggggtcctttggactgtagccggcccacctcatttcaacactcttttctaccacaggatactttacaacatacaaaaac

SEQ ID NO: 80885 - DNA, 351 bp, Glycine max
tgagaactccattgaattttgattctagcaagcagagcttttgtcaattttctattgaccttctcggtggaggaattttagtggacaaaactggagattggatcacacttatacaaaattctccaattagtaacttgttgagagttgctgcttggaagaaaggttgtttaatggtcaagattgtgatgtctgggaatgcagcagtcaaaaggagtgattgggcctcattggtacaagtgtttttaacaaacagcaacagtacagagcattttgatgcatgtaagtggacaaaatcagaaccacattcctgggaattaatcttcccaatagaggtatgtggtcctaataatg

SEQ ID NO: 80886 - DNA, 341 bp, Glycine max
attgaattttgattctagcaagcagagcttttgtcaattttctatcgaccttctcggtggaggaattttagtggacaaaactggagattggatcacacttatacaaaattctccaattagtaacttgttgagagttgctgcttggaagaaaggctgtttaatggtcaagattgtgatgtctgggaatgcagcagtcaaaaggagtgattgggcctcattggtacaagtgtttttaacaaacagcaacagtacagagcattttgatgcatgtaagtggacaaaatcagaaccacattcctgggaattgatctttccaatagaggtatgtggtcctaataatg

SEQ ID NO: 80887 - DNA, 353 bp, Glycine max
gttggaatcaacccatactccatggaatggactggtttggccaatagattactgagtaagggcaatgatattctgtgttgcgattatgctagttttgatggtttgattaccaagcaagttatgagcaagatggcagaaatgataaacagtctttgtggtggtgatgaaaaattgatgcgtgaaaggacgcacctgctgttggcttgttgttcaaggatggcaatttgtaagaaagatgtttggagagttgaatgtggaatcccttctggatttccgctcacagttatttgcaatagcatttttaatgagatgctcattagatatagctatgaaaaattactgcgccaggctaa

SEQ ID NO: 80888 - DNA, 350 bp, Glycine max
cttcttctcttgcggctagggttttagcgcagcttgttctagatttaaggaagatgggtaaggaaaaggttcacatcagtattgtggtcattggccatgtcgactctgggaaatccactaccactggtcacctgatttacaagcttggaggcattgacaagcgtgttattgagaggtttgagaaggaagctgctgagatgaacaagaggtctttcaagtatgcctgggtgctggacaaacttaaggctgagcgtgaaagaggaatcaccattgatattgctttgtggaagtttgaaacaacaaagtattattgcacagttattgatgcgcctggacatagggatttcatt

SEQ ID NO: 80889 - DNA, 342 bp, Glycine max
ttgttcttttagggggcgcgccagttctgatattggcaccatctgctctcaagactgtgaattatggaatcctgcttgcacaaaagcaatgactatgtcatttaatccaaacccgtgttctgatgcatggagtttggaatttctgaagcgtaccggatttcattgtgatatcatttgtgtcactggatggactgccaccccaatgcaggatgttcaggttacaattgattggtttatttcctctcaggaatgtgttcccaggacctattgtgttttaaatccacaaaatccttttgtgttaaataggtggatgggaaaactgactttccctcagggcacttt

SEQ ID NO: 80890 - DNA, 402 bp, Glycine max
  unsure (1)..(402): unsure at all n locations
gcgtcacgtaaggctcggatattcggcttcgaggaattgaattataatatatgaaaactgannagaattggtgtagctttggacaattgatttntttaattagatgatttttaatatnttaatagtagaattattttaatgattttaataatataagaaaaataaaacattagtataaagatattgtaatttggatttaatttgattaaggaaacaataattaaaattaaagaaattagtaaagattgatgggttggagctaaattataactactcacttttagatctaatataagtcttgtttttataatttttctgaaatttgcagtattctcacaatttgtcagtgtgacgatttttaaattttcagaaatagtttttaattgtcataaactgcagatt

SEQ ID NO: 80891 - DNA, 182 bp, Glycine max
aggcacgcgtacgtaagctcttaattcagctcgagttagaaacttatccacacgacatcgcaattactgtggtgtcctttctatagctgagggatctcaataatacaccgcaaacgatttttctttcccctctttttctattaccaattaatttatcatccaattattctttacatcataaa

SEQ ID NO: 80892 - DNA, 348 bp, Glycine max
aagagaatctctctcacgggtcaaaaccagaaggctgggactggcttctaactactgacactgacatcgatgcatcgcgggtgaaaggaactcgtgctgaacccacacatggaatcatgcactcaggctgtagtcttgctccaggagcaggtcgcgcttctttacatgccacccaagagcactggaaactactgactcaaaaacatctagcatgactgtgctgatcaccaaagtgaagctagactgttgtttgacttcactagaaggagctagcttgattacgaaacagatggaacctatgacttgacataccataggtacatcctgaccatcaaagaatctaaaaga

SEQ ID NO: 80893 - DNA, 377 bp, Glycine max
gtcaacaatgtaattccccagcagaaggcacgtgatacttgccagaaggaaggacgatctctcgtgtccattcacgatcaggagaaggaattgttcgtgaatggagttgtctcaatcttcggaaataagaagaagtattggatcggatatcagaacgatggaactcgatggaattgggatgacaagtcgactaatcctttcactgattgggataatgccaatggccagccgaataccaatggaggcaagaatatgtgcgcctatgcactacagggcactggattcaatgtgaagtggacggcagccaattgtgcagcaagaggaataatctacgtgtgcgagtctgcgccatgctcgatcgggaacaagaactgctg

SEQ ID NO: 80894 - DNA, 376 bp, Glycine max
gcaacagtgagaacaccattgaattttgattctagcaagcagagcttttgtcagttttctattgaccttctcggtggaggaatcttagtggacaaaactggagattggatcacacttatacaaaattctccaattagtaacttgttgagagttgctgcttggaagaaaggctgtttaatggtcaagattgtgatgtctgggaatgcagcagtcaaaaggagtgattgggcctcattggtacaagtgtttttaacaaacagcaacagtgcagagcattttgatgcatgtaagtggacaaaatcagaaccacattcctgggaattgatcttcccaatagaggtatgtggtcctaataatggttttgaaatgtggagtt

SEQ ID NO: 80895 - DNA, 378 bp, Glycine max
gttagcatattgtgattttctcaagagaaactttaagcagatgtctaatgttttgtgggtggctcctgaggataaggcgagtttatggtcacaacttcattatgtttcgtgtaataatctggaaatgcaagaagcttatcttgtcaatctcgtaaatgtgttacgagaattgtatttgcacagtccagaggaagctcgccaattgagaaggaaagctctctctcgtattgaatggctgcaaaaagctgatgtgcctaccatagcacagattgaagagttccattcgatgcagaggatgatgaatgctcctgattcaaatgataatattgatctactgttgagcattgatttgttgggtttacaaggagcaagtaaagc

SEQ ID NO: 80896 - DNA, 368 bp, Glycine max
gctggtgataatatcaccattactggtgggattgacaaaacttgtgcaactttgcactatagaaagttagcagattgtgattttattaagagaaactttaagcagatgtctaatgtttaatgggtggctactgaggacaaggcgagtttatggtcacaacttcattatgtttcgtgcaataatctggaaatgcaagaagcttatcttgtcaatctcgtaaatgtgttacgagaatctgttttgcacagttcagaagaagctcgccaattgagaaagaaagctctctctcgtattgaatggctgcaaaaagctgatgtgcctaccatagcacagattgaagagttgcattcgatgcagaggatgatgaa

SEQ ID NO: 80897 - DNA, 378 bp, Glycine max
ggtgattttgttcaagggaaagatctcgcaatggttaaagttaatgtagcatgtgctgctgttggcttgacatcaagttacactccaactccattgttggaatctggtttgcaaaaagacagagggttaattgtggagtattttggaaggatgtcttacgttgctcataacgttaatcagccccaagagaaagatttgttagagggaaatttttcctttgatattaaatctcgctctagattggaaaaagtttcctctacaaaagcacaatttgttagtggaaaaaccttcaaatatgatataattggtgctggttcacattcttcaggagattttcctgaaaaggaagatcaagaaaaacccaaaaagattgatacc

SEQ ID NO: 80898 - DNA, 151 bp, Glycine max
ctggaattcgtgttttctttcgcttgttcgtttgtttaattcaataaaggaaattaggcatgaccctcttgttgagtatgctctgcctatctgaaaatttccacacctcttttaattgtcgtaatgatgtgtgaagtgtgtgttattttaa

SEQ ID NO: 80899 - DNA, 378 bp, Glycine max
ccatctgctctcaagactgtgaattatggaatcctgcttgcacaaaagcaatgactatgtcatttaatccaaacccgtgttctgatgcatggagtttggaatttctgaagcgtaccggatttcattgtgatatcatttgtgtcactggatggactgccaccccaatgcaggatgttcaggttacaattgattggtttatttcctctcaggaatgtgttcccaggacctattgtgttttaaatccacaaaatccttttgtgttaaataggtggatgggaaaactgactttccctcagggcacttcccgaagtgttaagagaatgcctctttctatagggggaggagctggtgcaaagaatgctattctcatgaatatgc

SEQ ID NO: 80900 - DNA, 368 bp, Glycine max
cagggatacacttccttttggcctttgcattttttagaacaaattctggctactagctttagtagctcgggtagaattgaagaggttaaatttttatgacaatgacaatgtgcaatatatctattatttggtcataatttttaggctatggctcactggtttgggataatattaggcaattcgtgattggctttcatagaatataagactaggtcataccatttttgagcataggtaccatcacaggtgagcttcctcggtttcaagctggagttacaatggaaatatcctgtttggatgcttggtattctgacaaagatggcaccttagagtgccgagcaacatacatcgtgaaaggactttgtcgt

SEQ ID NO: 80901 - DNA, 365 bp, Glycine max
actctattgaggttgaacgtgttaaatgtttactggaactgttcaggaaatgttacttgaatcctttcccttttcttgtccatcttggtggcatgctaggagttgttaatgctgttggagcaggtgcaggaattttggtcaacatgaattttccaaattactctaggcaatctggctatcagaaggagtcttcttctgtcatgggccctctcctctcaagttctgattttgaaccatacttgacatcattggtgcaagagatgtttcttgtggcacagaattcggataatcatcagctacaacagtttgcttcctgggtacttgccttccttcgacatcatttatggtccaaggaacttttgggg

SEQ ID NO: 80902 - DNA, 373 bp, Glycine max
ggagctggtgcaaagaatgctattctcatgaatatgccaaatgctgttctttcaatgtggagatattttgttggagatctcgtctttgaagtttctaagatgacttctccctacattaaatgtacagtctctttcttcatagcatttggaaatttggctgatgacaccatcaattttgaggcttttccccacaagctggtgcagtttggagagattcaggaaaaagttgtgttgaaattttcacaagaggaatttcttacagcttggtcaactcaggtgcgtcccgcaacgactctgttggctgatgggtgcccatatttgtatgctatggtgcatgatagttcagtgtctacaataccaggtgattttgtca

SEQ ID NO: 80903 - DNA, 363 bp, Glycine max
tgaatactaggcgagtttatggtcacaacttcattatgtttcgtgtaataatctggaaatgcaagaagcttatcttgtcaatctcgtaaatgtgttacgagaactgtatttgcacagtccagaggaagctcgccaattgagaaggaaagctctctctcgtattgaatggctgcaaaaagctgatgtgcctaccatagcacagattgaagagttccattcgatgcagaggatgatgaatgctcctgattcaaatgataatattgatctactgttgagcattgatttgttgggtttacaaggagcatgcaaagcttttccaaacaagattgttattgatgataagcttgtgttggctaacacaca

SEQ ID NO: 80904 - DNA, 374 bp, Glycine max
ttaaatctcgctctagattggaaaaagtttcctctacaaaagcacaatttgttagtggaaaaaccttcaaatatgatataattggtgctggttcacattcttcaggagattttcctgaaaaggaagatcaagaaaaacccaaaaagattgataccagattgagacaaagaatagatcctcaatacaatgaggttcaggctcagatggaaacaaatttgtttaaattgtctcttgatgatgttgaaactcctaaaggttctatgttggatcttaaaatttctcaatctaaaattgcacttcccaagaacacagttggaggaaccattctgcgtagtgatctattggcaaattttttgacagagggcaattttaga

SEQ ID NO: 80905 - DNA, 310 bp, Glycine max
  unsure (1)..(310): unsure at all n locations
gttggttttttttttttttttctttttttttttttttttttttttttttttttttttttttttttgtttnnaaaaaaaaaaacccgaaccttttttttccctgggattttttccccttgtttttttgtttaaaacccccccttttccccttaacctttgaccaaaaaaaaaaaaaaagggtttccccctttttctgggacaaatttattatttcctttaattanggggcccccccccccctttttgcccctcccccccgggattttttttcggcccggtccctccgggcgtcccctttttcctttttggg

SEQ ID NO: 80906 - DNA, 63 bp, Glycine max
aaatagtttcttaagtcttgtaactgctactagttggtgaaatgaaatgtactgttccttttc

SEQ ID NO: 80907 - DNA, 374 bp, Glycine max
tacaataccaggtgattttgtcattggtgttaagttgacaaccataaacaatatgtgtgcatatgggctcaatcctggtatttcaggttctcgtcttttgggcaccattcctcagtccatttcacagcaaactgtttggaatcaaatggcaacagtgagaacaccattgaattttgattctagcaagcagagcttttgtcaattttctattgaccttctcggtggaggaattttagtggacaaaactggagattggatcacacttatacaaaattctccaattagtaacttgttgagagttgctgcttggaagaaaggttgtttaatggtcaagattgtgatgtctgggaatgcagcagtcaaaaggagtgatt

SEQ ID NO: 80908 - DNA, 328 bp, Glycine max
gcggagggaaaagaggggagaagcaatttgaattatgtgacaaacccaatgaatatttattttgggattcttatcatcttacagaaagtgcttacaaaaaattcgcagatcttatgtggggcttcaccaacaactcttcaaatatagggccttacactattggagatctcttccaactcccatgacttgtttacttggctcattgtttttcttgcaacaaattaagtcaaaatgttgatcattataccttgattgtgttaacaaattgcatgtataaccgcttggtccagtaataattatttacgtaattgatggtacaatacaatta

SEQ ID NO: 80909 - DNA, 364 bp, Glycine max
ccacatacctctattgggaagattaattcccaggaatgtggttctaataatggttttgaaatgtggagttctgagtgggcaaatcaaacttcatggcatttgagtttccttattgacaatcccaaacagtctacagtttttgatattctcttgggaatctctcaagattttgaaattgctggtaatactcttatgccagctttttctgttccacaggctactgccagatcttctgaaaatgcggaatcctctgcatgatctggaattcgtgttttctttcgcttgttcggttggttaattcaataaaggaaattaggcatgaccctcttgttgagtatgctctgcctatctgaaaatttccaca

SEQ ID NO: 80910 - DNA, 373 bp, Glycine max
gaatattacagatgtcatataagtactttactcgctgttattaatattatgcttgcttatttttggggtgttgcgcattattctttcaacatttcctgcaaatttaatccgtagaaaatctgcatgtgatgctgaaatttgtagctgtgtcgcttgtctattttgagaggagtatcataagaaaaaaccaattagaagggaagataaaaaaaaccttgtaaccattggcagagaagaaaagagaaaatcattctcatagttttacagaatagtcacggcaaaatcacatttgtgacttaatttgttaaccattagaatcagatgatttttgtcatcaagttcaggacgtgtgattcttcaatttaaatagtta

SEQ ID NO: 80911 - DNA, 109 bp, Glycine max
catacataatgattaagaccccacgcaaggggtaggcggagtgattttcgttcaagaaaaaccacattcaaagggatgacactacatttgacgcatatgtgggtggaaa

SEQ ID NO: 80912 - DNA, 342 bp, Glycine max
aaaaaaattatttaaaaaaaaaaaaaaaaaaaaaaagggggcaaataaaaaaaaaataaaaaaaaaaaaaaaaaaaaacaaaaaaaaaaaaaaagaaaaaaaaaaaaaaaaaaaaaaaaaaaaaaaaaaaggggccccccccccttaatgaacccggcaccccggaaataaattccggcccggctctcaggggtgtccaacatttccttaaagggggactttttaaacttggggaaaaaaagaacattacctgtatttgttgaaaaaattttttcttttaaaaattccaaaaaaattacaggccggaataaaaaagttaaaaccctggggtcccaaaggggg

SEQ ID NO: 80913 - DNA, 300 bp, Glycine max
aaaagctgatgtgcctaccatagcacagattgaagagttccattcgatgcagaggatgatgaatgctcctgattcaaatgataatatcgatctactgttgagcattgatttgttgggtttacaaggagcaggtaaagcttttccaaacaagattgtttttgatgataagcttgtgttggctaacacacaagaattctttgatggaaattttccagtggattcttggttaccaatttttgtgaattgtctttatcctgtaagtcaattaccttcagaagctgtcgttgtaaatgttacatg

SEQ ID NO: 80914 - DNA, 193 bp, Glycine max
gtgagaattccattgaattttgattctagcaagcagagcttttgtcaattttctattgaccttctcggtggaggaattttagtggacaaaactggagattggatcacacttatacaaaattctccaattagtaacttgttgagagtggctgttggaaaaaaaggttgttaaatggtcaaaatggtaatgtttg

SEQ ID NO: 80915 - DNA, 374 bp, Glycine max
cgccaattgagaaggaaagctctctctcgtattgaatggctgcaaaaagctgatgtgcctaccatagcacagattgaagagtttcattcgatgcagaggatgatgaatgctcctgattcaaatgataatattgatctactgttgagcattgatttgttgggtttacaaggagcaggtaaagcttttccaaacaagattgtttttgatgataagcttgtgttggctaacacacaagaattctttgatggaaattttccagtggattcttggttaccaatttttgtgaattgtctttatcctgtaagtcaattacctccagaagctgtcgttgtaaatgttacatgtggtagtggacgttgtggtttacccaccac

SEQ ID NO: 80916 - DNA, 415 bp, Glycine max
acgttgcatgcacgcgtacgtagctaattgtctcgagcaaaaccacaatttgtagtggaaaaaccttcaaatatgatataattggtgctggttcacattcttcacaagattttcctgaaaaggaagatcaagaaaaacccaaaaagattgatgccagattgagacaaagaatagatcctcaatacaatgaggttcaggctcagatggaaacaaatttgtttaaattgtctcttgatgatgttgaaactcctaaaggttccatgttggatcttaaaatttctcaatctaaaattgcacttcccaaaaacacagttggaggaaccattctgcgtagtgatttattggcaaattttttgacagaaggcaattttagagcaagtgttgatttgcagcgcactcatcgtattaaaagaat

SEQ ID NO: 80917 - DNA, 372 bp, Glycine max
tgtggagatattttgttggagatctcgtctttgaagtttctaagatgacttctccctacattaaatgtacagtctctttcttcatagcatttggaaatttggctgatgacaccatcaattttgaggcttttccccacaagctggtgcagtttggagagattcaggaaaaagttgtgttgaaattttcacaagaggaatttcttacagcttggtcaactcaggtgcgtcccgcaacgactctgttggctgatgggtgcccatatttgtatgctatggtgcatgatagttcagtgtctacaataccaggtgattttgtcattggtgttaagttgacaaccataaacaatatgtgtgcatatgggctcaatcctg

SEQ ID NO: 80918 - DNA, 370 bp, Glycine max
cctgtacattctgcattggggtggcagtccatccagtgacacaattgattggtttatttcctctcaggaatgtgttcccaggacctattgtgttttaaatccacaaaatccttttgtgttaaataggtggatgggaaaactgactttccctcagggcacttcccgaagtgttaagagaatgcctctttctatagggggaggagctggtgcaaagaatgctattctcatgaatatgccaaatgctgttctttcaatgtggagatattttgttggagatctcgtctttgaagtttctaagatgacttctccctacattaaatgtacagtctctttcttcatagcatttggaaatttggctgatgacaccatc

SEQ ID NO: 80919 - DNA, 323 bp, Glycine max
aaaaagaaaaaaagatggcccggtgcagcacactgatctggcgggcggaataagatctactgggaactcgcacccgctcgtttgaatagaacgtagagacgtactcgatactaatggcatctggaagttataactgtactacacatgtagctggcaattgcttgctccgcgctgaagtttgcttggttcatgagcaggttcgggaagagttaccgaagcgaggaagagatgagggagaggcacgagatattctagcaaaacgcgggggcttcattctttggcacatcaagaaccggtagtaatacactgtctctgctcatcat

SEQ ID NO: 80920 - DNA, 478 bp, Glycine max
  unsure (1)..(478): unsure at all n locations
tgcacgcgtccgtaggcctcgatttcggttcgagaaatggaaaagctttctagctggtcataatatcaccattactgatgggattgacaaaactagtgcaactttgcaatttagaaagttagcagattgtgattttctcaagagaaactttaagcagatgtctaatgttttgtgggtggctcctgaggacaaggcgagtttatggtcacaacttcattatgtttcgtgtaataatctggaaatgcaagaagcttatcttgtcaatctcgtaaatgtgttacgagaattgtatttgcacagtccagaggaagctcgccaattgagaaggaaagctctctctcgtattgaatggctgcaaaaagctgatgtgcctaccatagcacagattgaagagttccattcgatgcaaaggatgatgaatgctcctgattcaaatgataatatngatctactgttgagcattgatttggtgggttta

SEQ ID NO: 80921 - DNA, 73 bp, Glycine max
  unsure (1)..(73): unsure at all n locations
cacgcggagcaaagctcggaattcgnctcgagctcctaacacaccacatattatcacgcacaacaatacaaaa

SEQ ID NO: 80922 - DNA, 121 bp, Glycine max
cgtttgtttaattcaataatggaaattaggcatgaccctcttgttgagtatgctctgcctatctgaaaatttccacacctcttttaattgtcgtaatgatgtgtgaagtgtgtgttatttt

SEQ ID NO: 80923 - DNA, 433 bp, Glycine max
  unsure (1)..(433): unsure at all n locations
cgttgatgggtttggtaggtttaatttcaatgttggaatagctataatgatgtttctacaaagtctgagttatggtgttatcttcctgcactcattgcttcaatttgttggcaggtatatatccatggcaagagattacattggtgaagaaagttaaatacgacgatgccctggttgaggcagcatggcccctaggcagcgccattgaagctgtgtcatctgcgtaaaattactgggactatcgcttagatttgtctgaaatctaggggcacatgagtttcatcaccgggattttgtggtgaaatactgtcattcatgatgatcagagattaactttcaggctgaactgagattggatatgggtctgtgattcagaaataatgggagattatagcttcattatntttcatatgtaaataattcacaaacatct

SEQ ID NO: 80924 - DNA, 164 bp, Glycine max
gaaaggattgtcacatgcttttccctgtactaacgtttcaacacgggatcagctggaagatgttaaaagggtgttaacatagtgtatatatcgatagaaaaaagaagaagaaggaagccttatagaaaggtaaaggtacggaggcgggaaataaataaagaaag

SEQ ID NO: 80925 - DNA, 451 bp, Glycine max
tatggtggtcaacttaccaccaagggcaaaatgtgtgcatatgggctcaatcctggtatttcaggttctcgtcttttgggcaccattcctcagtccatttcacagcaaactgtttggaatcaaatggcaacagtgagaacaccattgaattttgattctagcaagcagagcttttgtcaattttctattgaccttctcggtggaggaattttagtggacaaaactggagattggatcacacttatacaaaattctccaattagtaacttgttgagagttgctgcttggaagaaaggttgtttaatggtcaagattgtgatgtctgggaatgcagcagtcaaaaggagtgattgggcctcattggtacaagtgtttttaacaaacagcaacagtacagagcattttgatgcttgaagtggacaaaatcagaaccacattcctgggaataatc

SEQ ID NO: 80926 - DNA, 181 bp, Glycine max
agcttgacgccatgccgcgtcgtagctcggattcggttagcctcacccgtttaacagggtaatggtgaaacgaaccttgtgaatatgtaacattgtagactttcagtgtaattctgttctgcttctgatgtatcatggttatagtatagtaatgaaattttagaagtatctgttaataatc

SEQ ID NO: 80927 - DNA, 324 bp, Glycine max
cgagaatagttctgtttggaatttttctgaactggcacaacccatctttgagagccatgtgccaatgctctttcttccttcttatgtcaatctcaatcactactattatgactctttcacgcttttgcttgtcgatttttaaaccctaaatctatctatctgtctaatggataggatcgggcaaaaacaaatcatagcaaaatataaccctagccatagtaagacctggttgagcagctgctgcagagagagcgaggcttatggaaggagttccggacccaatacccagaactgtcgaagaggttgtcaccgattttaagggca

SEQ ID NO: 80928 - DNA, 543 bp, Glycine max
  unsure (1)..(543): unsure at all n locations
cggctcgagtggagatatttcgttggagatctcgtctttgaagtccgtaggatgacttctccctacattaaatgtacagtctctttcttcatagcatttggaaatttggctgatgacaccattaattttgaggctttttccccacaaactggtgcagtttggagagattcaggaaaaagttgtattgaaattttcacaagaggaatttcttacagcttggtcaactcaggtgcgtcctgcaacaactctgttggctgatgggtgtccatatttgtatgctatggtgcatgatagttcagtgtctacaataccaggtgattttgtcattggtgttaagttggcaaccataaacaatatgtgtgcatatgggctcaatcctggtatttcaggttctcgtcttttgggcaccattcctcagtccatttcacagcanactgtttggaatcaaatggcaacagtgagaacaccatntgaatttgatcctagcaagcagagcttttgtcaattttctattgaccttctcggtggagggaatttagtgga

SEQ ID NO: 80929 - DNA, 315 bp, Glycine max
  unsure (1)..(315): unsure at all n locations
ctcaaaaagtaataagaaatctccatttcataggaaatcttttcccagtgcttccttttccaggaatgggaatggtattaagttaggttttagagatgatgacgaaaactttttaaggtgcaaaaagttttgcacgaacccaggctttaggtctcacgaccatgcacaccgaaacagattgatgtcttcaaacgaagacgtcaagtgaggcttgnactttgactgattgcgactggagtcctctatatagagagactgtacgttgaagatctacacagccatgtaaaaagaattcgtgccggtttagagtacttt

SEQ ID NO: 80930 - DNA, 398 bp, Glycine max
ctcaaaaagtaataagaaatctccatttcataggaaatcttttcccagtgcttccttttccaggaatgggaatggtattaagttaggttttagagatgatgacgaaaactttttaaggtgcaaaaagttttgcacaaccaaagctttaggtttcacacgcatgacccgaaacagaattgatgcttcaatctgaagacactcaatgaagacttacttctagactaattgcaactagaacctcgtatcaagagagactgtcggtttgaagactcaccaagccattgtaaaaagaaattcgtgccggtttcagagtactttgatgagatcagtaggagaggtgtcaattaccacaaagggtggatgagacagcctactcatctgcaaaatgcatgacctaa

SEQ ID NO: 80931 - DNA, 97 bp, Glycine max
tgatgagtgtccttttgcatttgtgaactagtatgtaatattttattcacttaaataaagcgcattactatgtgcaatgagtgtgttttaatataaa

SEQ ID NO: 80932 - DNA, 447 bp, Glycine max
  unsure (1)..(447): unsure at all n locations
gatattttgttggagatctcgtctttgaagtttctaagatgacttcgccctacattaaatgtacagtctctttcttcatagcatttggaaatttggctgatgacaccatcaattttgaggcttttccccacaagctggtgcagtttggagagattcaggaaaaagttgtgttgaaattttcacaagaggaatttcttacagcttggtcaactcaggtgcgtcccgcaacgactctgttggctgatgggtgcccatatttgtatgctatggtgcatgatagttcagtgtctacaataccaggtgattttgtcattggtgttaagttgacaaccataaacaatatgtgtgcatatgggctcaatcctggtatttcaggttctcgtcttttgggcaccattcctcagtccatttcacagcanactgtttggaatcaaatggcaacagtga

SEQ ID NO: 80933 - DNA, 255 bp, Glycine max
aggacgggcgccgacgttggatgggctcacagctccatcataccacacgggaagacggctggtgacaatatcaaaggcgaggaggtgacgcacaagccggtgcagactcgaacagatacaagactcaatagcttttgaaacctcaccggaggaaaatcttacccatagggcgcctcaggtgcggcatccaacaactctattggatgctatgagactgtactggaatacactggaacacgaatggacatcgacttc

SEQ ID NO: 80934 - DNA, 456 bp, Glycine max
atgatatgtaagtgtctatggttactgaatttgaaaaacgtcaatggggggttgtgtttatacatgcagatattgatcaaaatcgtaattggtaagagtgtaagacctaccattagattttatggtctcacttataggctttcaaaatattggggaattggaaatttaagtgctctttgatcatagaatgatccatgttaattgttatgtttcacatcatttaagacttgaccgcatcttttaatatactcgatttacataataaatcattatgatagaactagaaggatgccatgtaattcagtcaagggtttggtttatgatagcatcagcagcaggaagaaggaggaagactctttggatgcatgcatggctattagttagttgccgagaccgttagttagttacaagctgttagttagttgcaacggcatttgaactactgcaacaagttag

SEQ ID NO: 80935 - DNA, 360 bp, Glycine max
cttttgagtaccactaccaatggtgattttgttcaaggaaaagatctcgcaatggttaaagttaatgtagcatgtgctgctgttggcttgacatcaagttacactccaactccattgttggaatctggtttgcaaaaagacagagggttaattgtggagtattttggaaggatgtcttacgttgctcacaacgttaatcagccccaagagaaagatttgttggagggaaatttttcctttgatattaaatctcgctctagattggaaaaagtttcctctacaaaagcacaatttgttagtggaaaaaccttcaaatatgatataattggtgctggttcaaattcttcagaagattttcct

SEQ ID NO: 80936 - DNA, 365 bp, Glycine max
attaaattaatagaggatgaaattctagtttaaggaaggttggttggttgggtgggggtaggagatactctcattcacctcccatcatcattataatcattcattccaacctacccttattcttcttcttcaatttcacacccatcatggaccgttttccgatcctctttctcgtcgccaccctcatcaccctcgcctccggtgcccgccacgatattctccggttaccctccgaagcttccaggttcttcaaagcacctgctaatgccgatcaaaacgatgagggcaccaggtgggccgttttagttgccggttccaatggctactggaattacaggcaccagtctgatgtttgccatgcatat

SEQ ID NO: 80937 - DNA, 356 bp, Glycine max
  unsure (1)..(356): unsure at all n locations
tgttatattttagaagcttatcttgtcaatctgggaggtgtgttacgagaattgtatttgcacagtccanaggaagctcgccaattgagaaggaaagctctctctcgtattgaatggctgcaaaaagctgatgtgcctaccatagcacagattgaagagttccattcgatgcagaggatgatgaatgctcctgattcaaatgataatatcgatctactgttgagcattgatttgttgggtttacaaggagcaggtaaagcttttccaaacaagattgtttttgatgataagcttttgttggctaacacacaagaattctttgatggaaattttccagtggattcttggttaccaat

SEQ ID NO: 80938 - DNA, 361 bp, Glycine max
caaaactagtgcaactttgcaatttagaaagttagcagattgtgattttctcaagagaaactttaagcagatgtctaatgttttgtgggtggctcctgaagacaaggcgagtttatggtcacaacttcattatgtttcgtgtaataatctggaaatgcaagaagcttatcttgtcaatctcgtaaatgtgttacgagaactgtatttgcacagtccagaggaagctcgccaattgagaaggaaagctctctctcgtattgaatggctgcaaaaagctgatgtgcctaccatagcacagattggaaaagttccattcgatgcagaggatgatgaatgctcctgattcaaatgataatattga

SEQ ID NO: 80939 - DNA, 311 bp, Glycine max
  unsure (1)..(311): unsure at all n locations
cacgcgtacgtaagctcnnaattcgtctctagctttttatatcacagaaaccggctcccccgcggtccgtaccctttaaaactattcctcctccacctacccagacatgtatcccatacccaattccaatgtcaacaatctttttttcaaatcatcaaccacttcgacttaaataactccacattcagccacactctcaattccatcatgtatcctaaccatttccaacaccaatccaaaccaattcaattcgacttctactctaccaatagagctttccttgaccttcttcatctttaagacagtcacct

SEQ ID NO: 80940 - DNA, 363 bp, Glycine max
aaaggacacacctgctgttggcttgttgtccaaggatggcaatttgtaagaaagatgtttggagagttgaatgtggaatcccttctggatttccgctcacagctatttgtaatagcatttgtaatgagatgctcattacatatagctatgaaaaattactgcgccaggctaaagctccaagtatgtttttacaatccttcaaaaattttgcttctttcgtgtgtgtatggtgatgataacttaattagtgttcatgaatatgtcaagccttactctagtggttctaaattgaaaagctttctagctggtcataatatcaccattactgatggtattgacaaaactagtgcaactttgcaattt

SEQ ID NO: 80941 - DNA, 241 bp, Glycine max
cggcgcggcacgcgaacgtaagcttcgaattcaggttttggctttttttttatgtaacatcctcaacaaatacgagacgtggcattctcattattgcgccccccacacaatgggggaaccattttgcaacacaactctatcatattaaaaacctaactcctacaaggcctgaaaccaaactatatcaaatttaaaactcgtgttacaacaagacaatctatcccccgacttataccataca

SEQ ID NO: 80942 - DNA, 364 bp, Glycine max
ctcgagccgattcggctcgaggaagaacgttgagtcccttttgttcaaggggaagaaggtggcggagaacaccaacatggacaagttggagttgtttgggggagagttaattaaggaacaagagagaagaaaaaccagcattttaccaacggtggtgttgaagaacaacaatgcctcaccttcccccagcagaacttcctctgccactaccttgtccactttgtcttcgactagttaaaacaagaagcaaacaagggagatccaaagttagatttttcattgtggggtttgaatttttatgcgagttttttttttttaagtttgtggtgttggggtagctgccgcttgggaccaaattgagact

SEQ ID NO: 80943 - DNA, 359 bp, Glycine max
caaaaagtgttgtaaaatgattgagcttactcaaggctgtgacgacatgacatgttggcttactaaacagaaagtgctaagcaaagggacttgcagacaagtggatgaggactgtaagttgaatcacggttatatgataacattaatgttttccggaacccaaatttcatgaaagttttgcattttttttttaaattaacttagtcatcatcagttatcacaaatttcttttgttgcttcaatcttaactatccatgtgttttactgatgtgtttgttcattagttattaccacataaggttcatgaataactttatctttggaattcactgaacaagcagcttgagctcaatttttgg

SEQ ID NO: 80944 - DNA, 360 bp, Glycine max
tgccaccttaatgcaggatgttcaggttacaatggaggggtttatttcctctcaggaatgtgttcccaggacctattgtgttttaaatccacaaaatccttttgtgttaaataggtggatgggaaaactgactttcccccagggcacttcccgaagtgttaagagaatgcctctttctatagggggaggagctggtgcaaagaatgctattctcatgaatatgccaaatgctgttctttcaatgtggagatattttgttggagatctcgtctttgaagtttctaagatgacttctccctacattaaatgtacagcctctttcttcatagcatttggaaatttggctgatgacaccatcaa

SEQ ID NO: 80945 - DNA, 363 bp, Glycine max
atgaaaatgaaggtccttgttttcttcgttgctacaattttggtagcatggcaatgccatgcgtacgatatgttccctctccgaatgaacactggctatggtgcccgtactccggaggtgaaatgcgcaagttggaggcttgctgtggaagcacacaacatctttggctttgagaccattcctgaagagtgcgttgaagcaacaaaggaatacatccatggcgaacaatatagatcagactccaaaacagttaaccaacaagcttacttttatgccagagacctcgaagtccatcccaaggacacatttgtgttcagtatagatggcaccgtactctctaatattccatactacaaaaaacat

SEQ ID NO: 80946 - DNA, 360 bp, Glycine max
gatattttgttggagatctcgtctttgaagtttctaagatgacttctccctacattaaatgtacagtctctttcttcatagcatttggaaatttggctgatgacaccatcaattttgaggcttttccccacaagctggtgcagtttggagagattcaggaaaaagttgtgttgaaattttcacaagaggaatttcttacagcttggtcaactcaggtgcgtcccgcaacgactctgttggctgatgggtgcccatatttgtatgctatggtgcatgatagttcagtgtctacaataccaggtgattttgtcattggtgttaagttgacaaccataaacaatatgtgtgcatatgggctca

SEQ ID NO: 80947 - DNA, 358 bp, Glycine max
ggatgttcaggttacaattgattggtttatttcctctcaggaatgtgttcccaggacctattgtgttttaaatccacaaaatccttttgtgttaaataggtggatgggaaaactgactttccctcagggcacttcccgaagtgttaagagaatgcctctttctatagggggaggagctggtgcaaagaatgctattctcatgaatatgccaaatgctgttctttcaatgtggagatattttgttggagatctcgtctttgaagtttctaagatgacttctccctacattaaatgtacagtctctttcttcatagcatttggaaatttggctgatgacaccatcaattttgaggctttt

SEQ ID NO: 80948 - DNA, 397 bp, Glycine max
acgcgtacgtaagttcggaattcggttagagttagagccgttctagccgaattcggtgctaacgtacgcgtgcttccgacgtaatagcacggcaatagaatcaccaaatttcaaaactctggctggcgtaaaacatgaaagagtaaggctataaacttaccaaaaaaagaaaacaccatgtatatgatcgatagcaaaactacttttattagtaaccatcacaatgctctctctctctctctctctctctctctatatatatatatatatatatatatatataatattccaaatttctttctaatcaatataatgttattttatttattaatgatttacaactattctattacaatatttaatattgattaaagatatttaaatatttattaatgat

SEQ ID NO: 80949 - DNA, 121 bp, Glycine max
tttctaccatattatataattttatatatacctgtttctgtgtttttgttggtatgattattttaatagttgttgttatcactgaagaaaaatatcaagctccttttttcaaattgggggt

SEQ ID NO: 80950 - DNA, 357 bp, Glycine max
gctgtgtgctaagaatgctattctcatgaatatgccaagtgctgttctttcaatgtggagatattttgttggagatctcgtctttgaagtttctaagatgacttctccctacattaaatgtacagtctctttcttcatagcatttggaaatttggctgatgacaccatcaattttgaggcttttccccacaagctggtgcagtttggagagattcaggaaaaagttgtgttgaaattttcacaagaggaatttcttacagcttggtcaactcaggtgcgtcccgcaacgactctgttggctgatgggtgcccatatttgtatgctatggtgcatgatagttcagtgtctacaatacc

SEQ ID NO: 80951 - DNA, 84 bp, Glycine max
agggaagtttgttttttcaactcaatcaggtccgtgcggctccccatctgaatcaaataatcaatcatccattcattattcatc

SEQ ID NO: 80952 - DNA, 360 bp, Glycine max
agagaacactgtttttgtgaaagaggagcattacagttttgacaagtgagatgagtggaagtggcaaaaagcgctcttcaaagtgggatttgagagacaatcctgatttttctcctgatgatggtaagcaattgcggtctgggtggtcctctgcaggtgataaattaaagcatttttctggaggcagaggatcaaataaggataatattatgaataaagattatagagttttggattcaacaatggaatgggatgaggatgaaagttatgaccataaaatgtctcctgggttggatgcatggaaacataagagacataatagtcaatcccccaaaaatggttggagcaggtcggtcagca

SEQ ID NO: 80953 - DNA, 364 bp, Glycine max
gtggaggaattttagtggacaaaactggagattggatcacacttatacaaaattctccaattagtaacttgttgagagttgctgcttggaagaaaggctgtttaatggttaagattgtgatgtctggaaatgcagcagtcaaaaggagtgattgggcctcattggtacaagtctttttaacaaacagcaacagtacagagcattttgatgcttgtaagtggacaaaatcggaaccacattcctgggaattgatcttcccaatagaggtatgtggtcctaataatggttttgaaatgtggagttctgagtgggcaaatcaaacttcatggcatttgagtttccttattgacaatcccaaacagtc

SEQ ID NO: 80954 - DNA, 376 bp, Glycine max
gtgttaagttgacaaccatttactttatgtgtgcatatgggcttaatcctggtatttcaggttctcgtcttttgggcaccattcctcagtccatttcacagcaaactgtttggaatcaaatggcaacagtgagaacaccattgaattttgattctagcaagcagagcttttgtcaattttctatcgaccttctcggtggaggaattttagtggacaaaactggagattggatcacacttatacaaaattctgcaattagtaacttgttgagagttgctgcttggaagaaaggctgtttaatggtcaagattgtgatgtctgggaatgcagcaagtaaaacgagtgattgggcctcattggtacaagtgtttttaac

SEQ ID NO: 80955 - DNA, 74 bp, Glycine max
  unsure (1)..(74): unsure at all n locations
aaagggaaataaaaaaaaanttaaaaaaaaaaaaaaaaaaaacttgttaatttaaaaagggngggggccccccc

SEQ ID NO: 80956 - DNA, 375 bp, Glycine max
cacgcgtgcgtaagctcggaattcgactcgagtagcaagcaaagcttttgtaattttctatcgaccttctcggtctgttgattttattggacaaaactggagattggatcacacttatacaaaattctccaattagtaacttgttgagagttgctgcttggaagaaaggctgtttaatggtcaagattgtgatgtctgggaatgcagcagtcaaaaggagtgattgggcctcattggtacaagtgtttttaacaaacagcaacagtacagagcattttgatgcatgtaagtggacaaaatcagaaccacattcctgggaattgatcttcccaatagaggtatgtggtcctaataatggttttgaaatgtggaagt

SEQ ID NO: 80957 - DNA, 239 bp, Glycine max
gtggctaccatggcgtatcctaaccacagcttcgcgttcaaaccgagccgaacctgcaccatctccgctcttcttaaagacatcaatccatactcgaatcgacctgaacctcctcttattcgcgctaatgctctcctcctatcgtcttacagcccgccgctctcgcgcaacgctcgctcgacgccgcgcgcgctactactgctcggtgtcgcgacttacactgcggcctcattatctcg

SEQ ID NO: 80958 - DNA, 375 bp, Glycine max
  unsure (1)..(375): unsure at all n locations
agctcggaattctgctcgagccaacattaaccaatnnttttaaaaaaaaaaaacaaaaaaaactcgtcgttttttaaaatccctgtgctctgctacaccacttgccaattcaaggctctcgacatggctactcatacgccaaaaaatatccacattactggagctgctgcattcatcatatttcatgttgcgaatcggcttaatccggaattatccccattacaaaattgtggatcttgacaagcttgattactgctcaaatctgaagaatctcattccttcaaaatcatcttctaactacaagttcgccaacgggcatattcgaagcgctggtctagtcaactaccttgtcatcactgagtcccattacacaat

SEQ ID NO: 80959 - DNA, 498 bp, Glycine max
  unsure (1)..(498): unsure at all n locations
cttaattagtgttcatgaatatgtcaagccttactttagtgggtgtggattgaaaagctttctagctggtcataatatcaccattactgatggtattgacaaaactagtgcaactttgcaatttagaaagttagcagattgtgattttctcaagagaaactttaagcagatgtctaatgttttatgggtggctcctgaggacaaggcgagtttatggtcacaacttcattatgtttcgtgcaataatctggaaatgcaagaagcttatcttgtcaatctcgtaaatgtgttacgagaattgtatttgcacagtccagaggaagctcgccaattgagaaggaaagctctctctcgtattgaatggctgcaaaaagctgatgtgcctaccatagcacagattgaagagttccattcgatgcagaggatgatgaatgctcctgattcaaatgataatatngatctactgttgagcatttgatttgtgggtttacaaggagc

SEQ ID NO: 80960 - DNA, 318 bp, Glycine max
  unsure (1)..(318): unsure at all n locations
acgaagcaaatcggatattcgttggatgatacttcggctccaccttcacctttaataaggcctcatctatactctacagacgctggcgcacacatataaattgccttaaaaaaatgtctgagacggctgctcttgtatcatggtcgaatggcttgtgcggttgcttctctgactgcaacacctagtgcctcacgttctggtgcccttgtgctaggtttgggagaataggatagatcgtggcaaaggaacaacttctcgttgncttcatggatcaactttatgcctaacttggggttcctcttatttagcgggtatcta

SEQ ID NO: 80961 - DNA, 156 bp, Glycine max
gcatgatctggaatttgtgttttctttcgcttgttcgtttgtttaattcggtaaaggaaattaggcatgaccctcttgttgagtatgctctgcctatttgaaaatttccacacctcttttaattgtcgtaatgatgtgtgaagtgtgtgttatttt

SEQ ID NO: 80962 - DNA, 444 bp, Glycine max
  unsure (1)..(444): unsure at all n locations
gaaaaattgatgcgtgaaaggacacacctgctgttggcttgttgttcaaggatggcaatttgtaagaaagatgtttggagagttgaatgtggaatcccttctggatttccgctcacagttatttgtaatagcatttttaatgagatgctcattagatatagctatgaaaaattactgcgccaggctaaagctccaagtatgtttttacaatccttcaaaaattttgtttctttgtgtgtgtatggtgatgataacttaattagtgttcatgaatatgtcaagccttactttagtggttctaaattgaaaagctttctagctggtcataatatcaccattactgatggtattgacaaaactagtgcaactttgcaatttagaaaagtagcagattgtgattttctcaagagaaactntaagcagatgtctaatgttttgtgggtg

SEQ ID NO: 80963 - DNA, 266 bp, Glycine max
  unsure (1)..(266): unsure at all n locations
gctcggattcgctcgtgaaaattgtgcgtgaatgcacacctgctgtggctggggggggtggcantcgaggcaatagaaacaatgtgtccactgtgtcctccgtttgtaagcttggatgcagctctgtgatactatgcaggtactggccggcttaacatcgagatgtcagactacactagatcaatgggtgcatccacaaagtctagccagaagtccacggatggcaacaaatccaaagattccaaggctaatagcagtggttctga

SEQ ID NO: 80964 - DNA, 485 bp, Glycine max
  unsure (1)..(485): unsure at all n locations
atatttgtggagatctttcttgaagtttctaagatgactctggctgcattaatgtacagtctctttcttcatagcatttggaaatttggctgatgacaccatcaattttgaggcttttccccacaagctggtgcagtttggagagattcangaaaaagttgtgttgaaattttcacaagaggaatttcttacagcttggtcaactcatgtgcgtcccgcaacgactctgttggctgatgggtgcccatatttgtatgctatggtgcatgatagttcagtgtctacaataccaggtgattttgtcattggtgttaagttgacaaccataaacaatatgtgtgcatatgggctcaatcctggtatttcaggttctcgtcttttgggcaccattcctcagtccatttcacagcaaacttgttggaatcaaatggcaacagtgagaacaccattgaattttgatctagcaagcagagcttntgtcaatt

SEQ ID NO: 80965 - DNA, 191 bp, Glycine max
cgtaagctcggaattcggcttcagctccaacctattaaaaccgtgattttaactatatattatcactcagtcgcctcttttattacttcaacctacacacaaacacacttcgatatgttgaaccaactaaaacaccacagcatccataatctttcgcctaaacactccatattcttttcacccaaacatac

SEQ ID NO: 80966 - DNA, 253 bp, Glycine max
  unsure (1)..(253): unsure at all n locations
ctaatataaaggaatngctacgagcaaaatggggatgtcggggggtgcggtttttaaaaggacctcttgctcctaatacgaacagactgatataacatgcagcatactatcacagcatctgaactcatgtatgcatacaaagtcgggatcacacgcctgggaatcaatcttcatcataaacgcatgcaatgctaatcatggttcctgaacgtgaagatctgcgtcagcaaaaaaaactttaacgcatttgaaa

SEQ ID NO: 80967 - DNA, 148 bp, Glycine max
tctcctagcgctgctctatttctagcctgccattgtgtattctagagaatggacttgctttactgcccccacaagcttttccttttccagtataacattcacttgtgctatgcatagtgattataagctgcacaccgagcttattatt

SEQ ID NO: 80968 - DNA, 352 bp, Glycine max
  unsure (1)..(352): unsure at all n locations
aatgcggcttcagggaaaaaataaaaaacatgtttattttggaaccgcagatagctactactgttcgtggacgttccactctccatgccacctctctctcacactcacaccaaacatgccacaaatgcatcatcatcatcctcgccgccacaatcttcatcattccaattccaaagccctctgcaagtgtcgattcgtcccgttttttcttcgagcgtggcctacgtcttcctcatcctcttcaccacctttttcttcatcggcttcgtcttcctctacttccgccagttcgcctccgacgcggncactttccgccgccgtcatccgccacgccgggaggaggaggaggacg

SEQ ID NO: 80969 - DNA, 123 bp, Glycine max
ctaaatcaaaccattttatttaactaccgaagagacaagattggttgggtatacaaggagcatgaaggacatattccaaacaagataggatgcgatgataaaacatcaaattggctaacacac

SEQ ID NO: 80970 - DNA, 464 bp, Glycine max
gtgattttctcaagagaaactttaagcagatgtctaatgttttgtgggtggctcctgaggacaaggcgagtttatggtcacaacttcattatgtttcgtgtaataatctggaaatgcaagaagcttatcttgtcaatctcgtaaatgtgttacgagaattgtatttgcacagtccagaggaagctcgccaattgagaaggaaagctctctctcgtattgaatggctgcaaaaagctgatgtgcctaccatagcacagattgaagagttccattcgatgcagaggatgatgaatgctcctgattcaaatgataatatttgattactgttgagcattgattggttgggttacaaggagcaggtaaagcttttccaaacaaaaatgtttttgatgataagcttgtgttggctaacacacaagaattctttgatggaaatttccagtggattcttgttaccaattttt

SEQ ID NO: 80971 - DNA, 473 bp, Glycine max
  unsure (1)..(473): unsure at all n locations
atcttaacccttttccgccatgcgagcgacacaaccacacgccaataatcgcacaacacaaatcaattcagcctccaattaacgcctccttttgattcggctcggttgttagagtaattggaggagggggtacaaatacaagagcgtaattgtttgtgctttcatctatgtttgggggtgttaacgctcctgctaatagtccacacttacgcaagtctgggagtagacctgttgtttatgatcttgatgaacatgaggtggaaaatggcatcgaggagggtttattgcatcccgtagaggcagatgattcaaagggtggtacgcccgtgagtgctgctgcaatgatgccatcgcccatnttgttgtggagattcaaggtactattgntcttcatttggggcttcatcttgtgcaagggtggatgggattctgtcatgagaatgagtgcagacaagcgggatttgtcctttatg

SEQ ID NO: 80972 - DNA, 424 bp, Glycine max
  unsure (1)..(424): unsure at all n locations
ctgggaatgcagcagtcaataggagtgattgggcctcattggtgcaagtgtttttaacaaacagcaacagtacagagcatttcgatgcatgtaagtggacaaaatcggaaccacattcctgggaattgatcttcccaatagaggtatgtggtcctaataatggttttgaaatgtggagttctgagtgggcaaatcaaacttcatggcacttgagtttccttattgacaatcccaaacagtctacagtttttgatattctcttgggaatttctcaagattntgaaattgctggtaatactcttatgccagctntttctgttccacaggctactgccagatcttctgaaaatgcggaatcctctgcatgatctggaatttgngttttctttcgtttgttcgtttggttaattcaataaaaggaaat

SEQ ID NO: 80973 - DNA, 402 bp, Glycine max
cagttatttgcaatagcatttttaatgagatgctcattagatatagctatgaaaaattactgcgccaggctaaagctccaagtatgtttttacaatccttcaaaaattttgtttctttgtgtgtgtatggtgatgataacttaattagtgttcatgaatatgtcaagccttactttagtggttctaaattgaaaagctttctagctggtcataatatcaccattactgatggtattgacaaaactagtgcaactttgcaatttagaaagttagcagattgtgattttctcaagagaaactttaagcagatgtctaatgttttgtgggtggctcctgaggacaaggcgagtttatggtcacaacttcattatgtttcgtgtaataatctggaaatgcaagaag

SEQ ID NO: 80974 - DNA, 375 bp, Glycine max
gatcggtgttcacttgatctcatcataatcgtcagcgtcaattgaagaagatgccgatcagaaacatcgccgtcggaaggcctgaagaggcgactcaccccgacacgttgaaggcggctttggctgagttcatctcaaccttcatcttcgtgttcgccggctcaagctccggcatcgcctacaacaagctcaccgacaacggcgctgccacccctgccggcctcatctccgcctccatcgcccatgcattcgccctcttcgtcgccgtctccgtcggcgccaacatctcctgcggccacgtcaaccccgccgtcaccttcggcgccttcgtcggcggcaacatcaccttcctccgcggcatcgtctacgtcatcg

SEQ ID NO: 80975 - DNA, 393 bp, Glycine max
gataaacagtctttgttgtggtgatggaaaattgatgcgtgaaaggacacacctgctgttggcttgttgttcaaggatggcaatttgtaagaaagatatttggagagttgaatgtggaatcccttctggatttccgctcacagttatttgcaatagcatttttaatgagatgctcattagatatagctatgaaaaattactgcgccaggctaaagctccaagtatgtttttacaatccttcaaaaattttgtttctttgtgtgtgtatggtgatgataacttaattagtgttcatgaatatgtcaagccttactttagtggttctaaattgaaaagctttctagctggtcataatatcaccattactgatggtattgacaaaactagtgcaac

SEQ ID NO: 80976 - DNA, 382 bp, Glycine max
  unsure (1)..(382): unsure at all n locations
taaatgtccagctttttttttcatagcatttggaaatttggctgagaacaccttcaattttgaggcttttccccacaagctggtgcagtttggagagattcaggaaaaagttgtgttgaaattttcacaagaggaatttcttacagctaaggcaactcaagtgcgtcccgcaacgactctgttggctgatgggagcccatatttgtatgctatggtgcatgatagntcagagtctacaataccaggtgattttgtcattggtgttaagttgacaaccatatacaatatgtgtgcatatgggctcaatcctggtatttcaggttctcgtcttttgggcaccattcctcaatccatttcacagcaaactggttggaatcaaatg

SEQ ID NO: 80977 - DNA, 355 bp, Glycine max
tctctttctttctaagaaaaatttcttctttttttattccccccccccttttttaatttttttttattctaaaaaaaaaaaaaaacacccacctcccactattgagcccaaaaccccccccttaattcccctcaaaacccccccccaaaccaaattttcttatttaaacccccccccaccctccccttttctttcaaaaaaccccacacccccaaaatttttcttttttttcccctccacacccccttttttcccttctcacccaataattatcccccccttctcttccccccctctaaaaaaaattaaaaaaaaaaaacttcccaaaaaccttcaaaaatctatttcttccccc

SEQ ID NO: 80978 - DNA, 398 bp, Glycine max
gcaccatagcattcatatatgggcacccatcagccaacagagtggacaataccaggtgattttgtcattggtgttaagttgacaaccataaacaatatgtgtgcatatgggctcaatcctggtatttcaggttctcgtcttttgggcaccattcctcagtccatttcacagcaaactgtttggaatcaaatggcaacagtgagaacaccattgaattttgattctagcaagcagagcttttgtcaattttctattgaccttctcggtggaggaattttagtggacaaaactggagattggatcacacttatacaaaattctccaattagtaacttgttgagagttgctgcttggaagaaaggttgtttaatggtcaagattgtgatgtctgggaatgc

SEQ ID NO: 80979 - DNA, 94 bp, Glycine max
taggcatgaccttcttgttgagtatcctctgcctatctgagaaggccacacctcttttaattgtcgtaatgatgtgtgaagtgtgtgttatttt

SEQ ID NO: 80980 - DNA, 396 bp, Glycine max
ctgcttggaagaaaggttgtttaatggtcaagattgtgatgtgggggaatgcagcagtcaaaaggagtgattgggcctcattggtacaagtgtttttaacaaacagcaacagtacagagcattttgatgcatgtaagtggacaaaatcagaaccacattcctgggaattaatcttcccaatagaggtatgtggtcctaataatggttttgaaatgtggagttctgagtgggcaaatcaaacttcatggcatttgagtttccttattgacaatcccaaacagtctacagtttttgatattctcttgggaatctctcaagattttgaaattgctggtaatactcttatgccagctttttctgttccacaagctactgccagatcttctgaaaatgcgg

SEQ ID NO: 80981 - DNA, 392 bp, Glycine max
aattaacatcctgcgtgttgttaattccctcacaattcatttgcaattcttgtgtggaaacaatgcttctagagctagagacttggacagctttggtttttttgtttttgcttgtgttgattctaaaggagtcgatcatgggaggtaagagttcaaaagggtctgaaagaaggcatgtttcatcatatggatctgctggttcttcatcttcatgggatgactacgaataccctcaatcaccaaatgcatacccacaacaaaatccttatcatacgcctcttcaccaccgtgcaccggctccattccacgactattcacagccaaaaaggaaattggataggagatattcaagaatagctgatgattaccattccctggatgaggttaccact

SEQ ID NO: 80982 - DNA, 434 bp, Glycine max
ccgtccgtaagctcggatttcggctcgaggacaaccataaacattttgtgtgcatatgggctcaatcctggtatttgaggttctcgtcttttgggcaccattcctcagtccatttcacagcaaactgtttggaatcaaatggcaacagtgagaacaccattgaattttgattctagcaagcagagcttttgtcaattttctattgaccttctcggtggaggaattttagtggacaaaactggagattggatcacacttatacaaaattctccaattagtaacttgttgagagttgctgcttggaagaaaggttgtttaatggtcaagattgtgatgtctgggaatgcagcagtcaaaaggagtgattgggcctcattggtacaagtgtttttaacaaacagcaacagtacagagcattttgatgcatgtaagtg

SEQ ID NO: 80983 - DNA, 201 bp, Glycine max
gaaattttcacatgtttaatttcttacagcttggtcaactgaagtgcgtcctgcaacaactctgttggctgatgggtgtccatatttgtatgctatggtgcatgattagttcagtgtctacaataccaggtgattttgtcattggtgttaagttgacaaccataaacaatatgtgtgcatatgggcttaatcctggtattt

SEQ ID NO: 80984 - DNA, 457 bp, Glycine max
gagcttgacggcgcatgcacgccgtccgtaggctcggatttcggctcgagggtcccagttttttttttttttttttcttctcgttagcttttgggctgtgtcgcttcccaaactaccctacgtttgggaactcgtccgactggctcacttaccgccacttgcaccccgggtcgtgcctgcttttcacagcaaacgcaccattcctcccatcgttccacaagaagctccgccagcccatcaacgattcgactcactctgcacgactccttgccgacaagcagcgcttcgttcgtgctcaccacgactcaagttcggttgtcgaaaagcctgttttttccccgcaacctcggaccatactccataccaccgcaaccagctccgaacgacgacgaaagaagaagcaagctcgaactggggcatcacgaagccgaccaccagctccgttcgagctgctttt

SEQ ID NO: 80985 - DNA, 411 bp, Glycine max
cagggcacttcccgatgtgttaagagaatgcctctttctatagggggaggagctggtgcaaagaatgctattctcatgaatatgccaaatgctgttctttcaatgtggagatattttgttggagatctcgtctttgaagtttctaagatgacttctccctacattaaatgtacagtctctttcttcatagcatttggaaatttggctgatgataccatcaattttgaggcttttccccacaagctggtgcagtttggagagattcaggaaaaagttgtattgaaattttcacaagaggaatttcttacagcttggtcaactcaagtgcgtcctgcaacaactctgttggctgatgggtgtccatatttgtatgcaatggtgcatgatagttcagtgtctacaataccaggt

SEQ ID NO: 80986 - DNA, 410 bp, Glycine max
tggtgatgataacttaattagtgttcatgaatatgtcaagcctgactttagtggttctaaattgaaaagctttctagctggtcataatatcaccattactgatggtatttacaaaactagtgcaactttgcaatttagaaagttagcagattgtgattttctcaagagaaactttaagcagatgtctaatgttttgtgggtggctcctgaagacaaggcgagtttatggtcacaacttcattatgtttcgtgtaataatctggaaatgcaagaagcttatcttgtcaatctcgtaaatgtgttacgagaactgtatttgcacagtccagaggaagctcgccaattgagaaggaaagctctctctcgtattgaatggctgcaaaaagctgatgtgcctaccatagcacaga

SEQ ID NO: 80987 - DNA, 384 bp, Glycine max
  unsure (1)..(384): unsure at all n locations
ttttaagaggaattgaaccagggattggattctgagtagtcccctcttgatagtgaaaagacaatccaacaggtagtccagtttttatagaaacaatcaatgatacctaccaaacttctcttttcttcctcaactaataatctnccattcctagttcataggatccaagaggtcctatatttgtagatgagtcctaagttttggcatggcatttatagctatttcatgggaaaggatgagagtcaattccctatctagagaaaatctagactttcacaaatggcaagcacaagaagcatgattcttctgcctagttttcataccctttggcagagaagagctgcctccataagtctgtctggaccaggtggcccatttagtttt

SEQ ID NO: 80988 - DNA, 126 bp, Glycine max
gtacgtaggtttaattcgctcgagctcagccgtcttattctcttaagagatgggttaaagaattgattagaacaagagatcttgaagaaaaatgagtacgatctgggccaatccctaaacgctctc

SEQ ID NO: 80989 - DNA, 336 bp, Glycine max
gatgggtgtccatatttttatgcaatggtgcatgatagttgagggtctacaataccaggtgattttgtcattggtgtcaagttgacaaccataaacaatatgtgtgcatatgggctcaatcctggtatttcaggttctcgtcttttgggcaccattcctcagtccatttcacagcaaactgtttggaatcaaatggcaacagtgagaacaccattgaattttgattctagcaagcagagcttttgtcagttttctattgaccttctcggtggaggaatcttagtggacaaaactggagattggatcacacttatacaaaattctccaattagtaac

SEQ ID NO: 80990 - DNA, 391 bp, Glycine max
  unsure (1)..(391): unsure at all n locations
aaccccaaccttccgcccttttttttttttttttttttttaagattttttttatttttttttattatattaaatatattttaaatttttttttttttttttttaataaatttttttttttttttatttttttttttttttttttttttattttttnnnnnnnnnaaaaaaaattnnngcaaaaaaaatggggaacaaacacccttaattttctcaaaacaaactcttaaaaaaaatctttccccatcgttaaaaaaaaaccccccaaaatttttataaaaaaacccccccaaaaaaaaaaaattcccccctataaaaaaaccaaacccctttttcctttttcaaaggggacccccccccccttaataccacaacccccccccccaattttt

SEQ ID NO: 80991 - DNA, 214 bp, Glycine max
  unsure (1)..(214): unsure at all n locations
gagctatgacgncgcatgcacgccgtccgtaagctcggatttcggctcgagggtcggtgaacactgtctcatgtcagcttgtaaagacagggtagcggatgcagtatacagattaaaaagccgtctactcaaggagagtgaggtgaggcagttgacagataaagagcangctgtgctgcagttagaaaaacaatacccagctgatgttggtgtc

SEQ ID NO: 80992 - DNA, 404 bp, Glycine max
gttctttcaatgtggttatattttgttggagatctcgtctttggagtttctaagatgacttctccctacattaaatgtacagtctctttcttcatagcatttggaaatttggctgatgacaccatcaattttgaggcttttccccacaagctggtgcagtttggagagattcaggaaaaagttgtattgaaattttcacaagaggaatttcttacagcttggtcaactcaggtgcgtcctgcaacaactctgttggctgatgggtgtccatatttgtatgctatggtgcatgatagttcagtgtctacaataccaggtgattttgtcattggtgttaagttgacaaccataaacaatatgtgtgcatatgggctcaatcctggtattttcaggtctcgtctttt

SEQ ID NO: 80993 - DNA, 404 bp, Glycine max
  unsure (1)..(404): unsure at all n locations
cgactcttcgcctttttttgctgcaaaacaacccttcgcctttggacgcccgccgctcaagatggttctcggtcctaccgcccgccgctggcttccctacatgaacttcaccgttgccgtgtccgcgcttgcgttccagaccggggtgctctacccgtggcacgaggagctggaccacgagttcaagaagctcaaggaggaacacaagcagcagctccacatctaccacgagatgaagctgaagcgtcttgaggacctggagaggaaggtcgccgctgagcgcgcctcacagaggttctccctctggctcccgtggcagagcgaagcctcgaccaactgatcgacctataacacacaccgtncaacatcgcgcaacccggggatgaccacattcgagccccaag

SEQ ID NO: 80994 - DNA, 316 bp, Glycine max
ggaaagtaagagtttagagtttgaactctgtttatccaatgcacaaagcgtagatctctgtgttataaaggaatacaagaaaatcaaagacgaggatgaagttagggatgcgggcgttgaagacattggaaaatcatttttgctgtcagtcccagataacgatttgacttccgagggagaaaccaaaatgacagccaggagaagtaagggagccagtagtgtcactgatgatgttacagtgaagatctatgtatcaaaagtgaagtattaggacacgtactatgggaattaatgctatatctgagctgagattgaa

SEQ ID NO: 80995 - DNA, 307 bp, Glycine max
  unsure (1)..(307): unsure at all n locations
aaagaaaaaaaaattgtcgctttctggtagtgttggcgaaagaagttcattttttaggagaatgcgggttgtcttcaaattttgctgggctcgttttgccaatgtgaggaagaattgttttggggaatgaagagcaaatttgattggttgagtttaggggtgtgttgatgaatctgcattntaagttctacggggagtagtgtggtgatcatgtgtgcctattcaagagaaagcatgtttcttataatgagttgtcgcaccatcgctgagaacgatcgcatctgctggacttccatggttatcagaa

SEQ ID NO: 80996 - DNA, 155 bp, Glycine max
caccaaattaactggtgaattaccattttcacttggtaatcttaaaaagcttcatttctggcaattgagtcaaaccaatctcaatgggacttttccagaatcacttgccagtctcccaagctagatcaatgttatgctagatttcaaatgatctc

SEQ ID NO: 80997 - DNA, 121 bp, Glycine max
cggattttataattattaaattgtaccttaacttctattaatacataagttagcgtacaatttaataatagaagttaaggtaggtagtggtcgactcaaattatttttactaattttttta

SEQ ID NO: 80998 - DNA, 389 bp, Glycine max
ggggaatagtgatttgtctttgaggttgggtatatgtttaaagaggaacatagcaagttcagcatatggatcagaagatattgggttaagagtgtctgaagagggcaggaaatttggccattcgtctcgacagaaaaaagaagggtactgtttttaccctagaggaacaggttatggttccatttagtgcatgtttgggaaccagatgtttttgggaagtgatcgttttttaagttctcaataaaaataatacaaataaatgattatttcttcaaaataagctgaacctaacatgcaattattccatgatgttgaagatgatcaaaatgctggcaacttttcagaagtacagtgtgcttctaggtagctaggtggatgggcaattttga

SEQ ID NO: 80999 - DNA, 362 bp, Glycine max
cattgatttgttgggtttacaaggagcaggtaaagcttttccaaacaagattgtttttgatgataagcttgtgttggctaacacacaagaattctttgatggaaattttccagtggattcttggttaccaatttttgtgaattgtctctatcctgtaagtcaattaccttcagaagctgtcgttgtaaatgttacatgtggtagtggacgttgtggtttacccaccactgcttggattagttctgcagttaacaatcgctcctcagacatcaacaaaaggattcgcacagcacttgggaaaggtaagaaaattgtttttcttactagagttgatccttttccagtagctttattggctgttc

SEQ ID NO: 81000 - DNA, 365 bp, Glycine max
aaaaaccaccaactttgtataaccctgcagagttttttctgttcctctccctgctgctgctgcttttgcagtctctgggggattttgctttgcgtttttttatgtgtcaattggtggcggctttcaagaggtggtggctattattgtgctgagtttacatttttccaagaatcatatataggatccacatttagacactgcttttgtggataagagagacaatgttgtctcagaagcaagcagaggaagccatagtcacaaacgagacagaacataaagttggcagcactagggaagaagagaaggagcaaggccactccattttcagcctcaagagcatcctttggcatggtggttctgtttgg

SEQ ID NO: 81001 - DNA, 365 bp, Glycine max
caaaatcagaaccacattcctgggaattaatcttcccaatagaggtatgtggtcctaataatggttttgaaatgtggagttctgagtgggcaaatcaaacttcatggcatttgagtttccttattgacaatcccaaacagtctacagtttttgatattctcttgggaatctctcaagattttgaaattgctggtaatactcttatgccagctttttctgttccacaggctactgccagatcttctgaaaatgcggaatcctctgcatgatctggaattcgtgttttctttcgcttgttcgtttgtttaattcaataaaggaaattaggcatgaccctcttgttgagtatgctctgcctatctgaa

SEQ ID NO: 81002 - DNA, 364 bp, Glycine max
gcccgaggtgggaggggagttatgctagtctctgtagaataactcgatcgatgcaggacctcatctcgatgacacctccggctggtatcgactgttctaggagaaaagcaccacggacgattttcgagacacaagagggtttggctgattcacgctcgacctaaaactggttctattggcatctaggctccccgaattccgacgacaatactccatgagaacaacgaacaactggtcccggaagagtcttcgagcctaactgaccaaactggccatgtttcattcgcagatgtgaaggccaaagtacgaatactttgttgcgcaatgtcccggagaacaaatcgacaagatcagagatgaaagg

SEQ ID NO: 81003 - DNA, 245 bp, Glycine max
tactctctatacaacgcggtccattccgcttaccttgtcgcttttgtacaaaacaaaaaaaattaaaaatttctccgaaaaccgtgtattatcggtctcggtcactgagttagggtttgctggtcttcctaggggtttattgtgtccaataaccagtgggggggggaggggaaccaaaccaaaaaaaaaaagggttaaaggcgacaatttgggatttttttttggaaaaaaaaaagaggaattta

SEQ ID NO: 81004 - DNA, 77 bp, Glycine max
aaaaaaaattataaaaaaaaaaaaaaaaaaaaaaaaagaaagaaaaaaaaaaaaaaaaaaaaaaaaaaaaaaaaaaa

SEQ ID NO: 81005 - DNA, 276 bp, Glycine max
gtaagctcggatttcggctcgggaaagaacataatgtagcccctgcatgggagaaatgcggcgggcttgtaaagaaacttctcgacaaacaccctcaaatttcggaccatgaggggggccgccaactaaaacattgtgtccaccacagtggtagtgccggaccgctccagaagacaatacacgatctccgcttcggaagctgaggctctatcaagagcattgagatactggaactgatccatgccaaagccgtgatgcctaaagcagacccttcca

SEQ ID NO: 81006 - DNA, 360 bp, Glycine max
aactactgtagccttcagagcccccaacaacttagccctcttaactttctccaatcttgtgcctctcatggaaggtcgtcgagtagccgtcttatgggactatgatacttgtcccattaccgccaacgttcctgcgtatcaggtagtcgacaacatcaacaacgtggctgcaagatatggaataccgaccactttcaacctttatctgtttgaccgatcgacagccaacaatgtcgtgttatccgagattgcatccaacggtgtctctctggttttcagtgtaccagccgtggacaaaaatcaagccgtcagggtgcgggctgatctaatgctcttcgcgggggactatggcgctgcctc

SEQ ID NO: 81007 - DNA, 301 bp, Glycine max
cactattgtatgctggagcgctagaaacaactaaggagtgttaactatgtccagattgcaacatatcatggaaggtgcttgagtaggctacttatgatactattattctagatgcattaccgacaacgttcgtgggtattatgaaatgcacaacatcaacaacgtgggtgacagatatggaatacataccacttataagcaccatcaggtagaccgagcgacagccaacagatgtccagttatccgagatagcattcaacagggaatgatgtttatcagtgtaacgatcatggacaaaaat

SEQ ID NO: 81008 - DNA, 363 bp, Glycine max
gtcaattttctattgaccttctcggtggaggaattttagtggacaaaactggagattggatcacacttatacaaaattctccaattagtaacttgttgagagttgctgcttggaagaaaggttgtttaatggtcaagattgtgatgtctgggaatgcagcagtcaaaaggagtgattgggcctcattggtacaagtgtttttaacaaacagcaacagtacagagcattttgatgcatgtaagtggacaaaatcagaaccacattcctgggaattaatcttcccaatagaggtatgtggtcctaataatggttttgaaatgtggagttctgagtgggcaaatcaaacttcatggcatttgagtt

SEQ ID NO: 81009 - DNA, 357 bp, Glycine max
gtgatgattacttaattagtgttcatgaatatgtcaagccttactttagtggttctaaattgaaaagctttctagctggtcataatatcaccattactgatggtattgacaaaactagtgcaactttgcaatttagaaagttagcagattgtgattttctcaagagaaactttaagcagatgtctaatgttttatgggtggctcctgaggacaaggcgagtttatggtcacaacttcattatgtttcgtgcaataatctggaaatgcaagaagcttatcttgtcaatctcgtaaatgtgttacgagaattgtatttgcacagtccagaggaagctcgccaattgagaaggaaagctc

SEQ ID NO: 81010 - DNA, 81 bp, Glycine max
aaaaaaaataaaaaaaaaaaaaaaaaaaaaaaaaaaagaaaaaaaaaaaaaaaaaaaaaaaaaaaaaaaaaaaaaaaaaaa

SEQ ID NO: 81011 - DNA, 291 bp, Glycine max
tcggctcgagtttccagatactaattcccaaaatttgttgtacaacagaggctattttcattttccaagccacaactattgcaaaacaaattctttttcctgttaatcattttccattaccctcaaaatttattcaacatatcattttcatcttattctttatcatcataatcactctttacctaaccattaccttcttatacttttctcaccctaattttcacttattacatcatatactactacttataattactttaaaaaaaccacctcaaccaacatattacttta

SEQ ID NO: 81012 - DNA, 358 bp, Glycine max
gcatgtttttacaatccttcaaaaattttgttggtgggtgtgtgtatggtgatgataacttaattagtgttcatgaatatgtcaagccttactttagtggttctaaattgaaaagctttctagctggtcataatatcaccattactgatggtattgacaaaactagtgcaactttgcaatttagaaagttagcagattgtgattttctcaagagaaactttaagcagatgtctaatgtttgtgggtggctcctgaggacaaggcgagtttatggtcacaacttcattatgtttcgtgtaataatctggaaatgcaagaagcttatcttgtcaatctcgtaaatgtgttacgagaattg

SEQ ID NO: 81013 - DNA, 137 bp, Glycine max
gaacaattttaattaacaccagccgttgttatttgccgcattaagtaaaaatgctttcaaaatccaaacagaaactgattattgctattggttcaaaaaaaaataaaaaacctaccctaattattattattaaatgg

SEQ ID NO: 81014 - DNA, 361 bp, Glycine max
ctattgtgttttaaatccacaaaatccttttgtgttaaataggtggatgggaaaactgactttccctcagggcacttcccgaagtgttaagagaatgcctctttctatagggggaggagctggtgcaaagaatgctattctcatgaatatgccaaatgctgttctttcaatgtggagatattttgttggagatctcgtctttgaagtttctaagatgacttctccctacattaaatgtacagtctctttcttcatagcatttggaaatttggctgatgacaccatcaattttgaggcttttccccacaagctggtgcagtttggagagattcaggaaaaagttgtgttgaaattttcacaa

SEQ ID NO: 81015 - DNA, 375 bp, Glycine max
aataatttatgattaagatatcaagagagagggagagggagagttgtttgtttcattgcgatccctcccaagaacggctctgatagctctttggtgcagcaagcggcgtaggaatatcaaagacaaagccattcgtgcctcatacctcatttcatcacacccattcatctccatcacaacacaacatacatacgaaccaggtgaagctcaggttcttcttcctcctcacttcccttttccattttcaattcctcttctgtattccctcttttcttcctttcatctatttttattttctttttcttttttaattgcatatatgtaaaaaaaaacatcttttttttctatcttcctaaaatcgttatcgcgaaactc

SEQ ID NO: 81016 - DNA, 376 bp, Glycine max
tgggaatgcagcagtcaaaaggagtgattgggcctcattggtacaagtgtttttaacaaacagcaacaggtcagagcattttgatgcatgtaagtggacaaaatcagaaccacattcctgggaattgatcttcccaatagaggtatgtggtcctaataatggttttgaaatgtggagttctgagtgggcaaatcaaacttcatggcatttgagtttccttattgacaatcccaaacagtctacagtttttgatattctcttgggaatctctcaagattttgaaattgctggtaatactcttatgccagctttttctgttccacatgctactgccagatcttctgaaaatgcggaatcctctgcatgatctggaatt

SEQ ID NO: 81017 - DNA, 360 bp, Glycine max
gagaatacatgtatagcattggcctgtgctatgaatggttcttttagggggcgcgccagttctgatatttacaccatctgctctcaagactgtgaattatggaatcctgcttgcacaaaagcaatgactatgtcatttaatccaaacccgtgttctgatgcatggagtttggaatttctgaagcgtaccggatttcattgtgatatcatttgtgtcactggatggactgccaccccaatgcaggatgttcaggttacaattgattggtttatttcctctcaggaatgtgttcccaggacctattgtgttttaaatccacaaaatccttttgtgttaaataggtggatgggaaaactgact

SEQ ID NO: 81018 - DNA, 358 bp, Glycine max
tgctcattagatatagctatgaaaaattactgcgccaggctaaagctccaagtatgtttttacaatccttcaaaaattttgtttctttgtgtgtgtatggtgatgataacttaattagtgttcatgaatatgtcaagccttactttagtggttctaaattgaaaagctttctagctggtcataatatcaccattactgatggtattgacaaaactagtgcaactttgcaatttagaaagttagcagattgtgattttctcaagagaaactttaagcagatgtctaatgttttatgggtggctcctgaggacaaggcgagtttatggtcacaacttcattatgtttcgtgcaataatct

SEQ ID NO: 81019 - DNA, 365 bp, Glycine max
caactgatgagagattggtaggcacagaacatgagggatatgatccttttcttggtggaattcaaaaatatgccactcccatgatgcccctagatgaagaaattctttctaaagttgcacaagatatggttgaggaatggtttgattgtgttgatgaggaggattcctttgaggaaggttctttaagtgcagcacttaatggtgttgagggtttggactatatggaaagaattcctcttgccacatctgagggttttcctcatgtgctttcacgcaaaaatggtgaaaaaggcaaaagaagatttgtttctggggttgaagagatgacattgattcgggaaccagtgttgaagaggcttacaaca

SEQ ID NO: 81020 - DNA, 375 bp, Glycine max
caaccagttcatctagttatcgaagatgagagcgaagtggagaaagaagcgcgtacgacgcctcaagcgtaagaggagaaaggtcagagcccgcagcaaataaacgactcgcctcctcgaacactgtcaccccgccacctaccatgacaacggctttgcgaattaacggcaatccttgatgcggttcgcaatcgactcccaactcagctctcggagtattacgtcatactctcggcaacggaggcacgaccgctctgagtgcggagcgtgggtcgactgcaatttatgtctcggactgtcgcattgtgggcatatggggaactggttgaacttcccttcgaggatatcaagcgtttactgcacaacactcaggcg

SEQ ID NO: 81021 - DNA, 370 bp, Glycine max
gcaccatagcatacaaatatgggctcaatcctggtatttcaggttctcgtcttttgggcaccattcctcagtccatttcacagcaaactgtttggaatcaaatggcaacagtgagaacaccattgaattttgattctagcaagcagagcttttgtcaattttctattgaccttctcggtggaggaattttagtggacaaaactggagattggatcacacttatacaaaattctccaattagtaacttgttgagagttgctgcttggaagaaaggttgtttaatggtcaagattgtgatgtctgggaatgcagcaatcaaaaggagtgattgggcctcattggtacaagtgtttttaacaaacagcaacag

SEQ ID NO: 81022 - DNA, 219 bp, Glycine max
ctccacatgctactgccagatcttctgaacatgcgggatcctatgcatgatctggaattcgtgatttctttcgctcgttcgtgtggccaattcaataaaggaacatgcgtaagaaaattcagcatgaccctgttgatgggtatgctcggcctatctagaaaatatccacacctcttttaattgtcgtaatgatgtgtgaagggtgtgttattttaaaac

SEQ ID NO: 81023 - DNA, 192 bp, Glycine max
ctagttttttttctgcttgcttccacacttttggggggtttgtctcctcctcaatcttcattgaccacggcttcccctaggtgacacacacacgcagagatcatggcttgcgttagtgaggttagaagattaagaaagaatggcatttgcaggaacaacccacacatctatgttctgtgacaaaactgttta

SEQ ID NO: 81024 - DNA, 353 bp, Glycine max
gtaataatctggaaatgcaagaagcttatcttgtcaatctcgtaaatgtgttacgagaattgtatttgcacagtccagaggaagctcgccaattgagaaggaaagctctctctcgtattgaatggctgcaaaaagctgatgtgcctaccatagcacagattgaagagttccattcgatgcagaggatgatgaatgctcctgattcaaatgataatattgatctactgttgagcattgatttgttgggtttacaaggagcaggtaaagcttttccaaacaagattgtttttgatgataagcttgtgttggctaacacacaagaattctttgatggaaattttccagtggattct

SEQ ID NO: 81025 - DNA, 349 bp, Glycine max
gctttctagctggtcataatatcaccattactgatggtattgacaaaactagtgcaactttgcaatttagaaagttagcagattgtgattttctcaagagaaactttaagcagatgtctaatgttttgtgggtggctcctgaggacaaggcgagtttatggtcacaacttcattatgtttcgtgtaataatctggaaatgcaggaagcttatcttgtcaatctcgtaaatgtgttacgagaattgtatttgcatagtccagaggaagctcgccaattgagaaggaaagctctctctcgtattgaatggctgcaaaaagctgatgtgcctaccatagcacagattgaaga

SEQ ID NO: 81026 - DNA, 370 bp, Glycine max
gctattctcatgaatatgccaaatgctgttctttcaatgtggagatattttgttggagatctcgtctttgaagtttctaagatgacttctccctacattaaatgtacagtctctttcttcatagcatttggaaatttggctgatgacaccatcaattttgaggcttttccccacaagctggtgcagtttggagagattcaggaaaaagttgtattgaaattttcacaagaggaatttcttacagcttggtcaactcaggtgcgtcctgcaacaactctgttggctgatgggtgtccatatttgtatgctatggtgcatgatagttcagtgtctacaataccaggtgattttgtcattggtgttaagttga

SEQ ID NO: 81027 - DNA, 392 bp, Glycine max
cccaggcaagggaagtaatgactggaggtactgattggaagatacgtcgatgggatcattacagtcctgacagaagttactgtatttgtggaccaaacttaaaaggaataggaaatgatgatttttatgaaacaaaatctagttttggggtgcaagttgtacaggagaccaaaagacgtcctcttacaatcaagctgacagcaaaggcaattcttgcagctgctgccactgattctgctggttgccatagggattctattgtttctttggcttctatcaagttaaaccagagacttttactttcaagtggtagagatggggcaatcaagggttggaagtaaacttctatagttcatttttgggtatttttgtacataattagtgtcaaatct

SEQ ID NO: 81028 - DNA, 386 bp, Glycine max
ttcacatctgaatcagtgaacgaggggcaccctgacaagctctgtgaccagatctccgatgctgtgctcgatgcatgcttggagcaggaccctgacagcaaggttgcctgtgaaacctgcaccaagaccaacatggtgatggttttcggagagatcacaaccaaggccaacgtggactatgagaagattgtgcgtgacacatgcaggaacattggttttgtctctgatgatgttggtcttgatgctgacaactgcaaggtcctcgtcaacattgagcaacagagtcctgatattgctcaaggtgtgcacggccacctcacaaagaggcctgaggagattggtgctggtgaccaaggtcatatgttcggctatgccactgacgagac

SEQ ID NO: 81029 - DNA, 284 bp, Glycine max
ccttttattttccctcacttcccaaaggcatcggagagacattctattatttctggtaccacccaaccttcatatcctattttttctaccccggatactaaattttcattgtacccttctgtaccagaacctaaatatatatcactccacatatttttgaccacgatattcttttgtcagcatgacttcctttacaattcgtctaactcatatccccatctaagaattcattatacctgcgtgttcttcatccattattatcattcaaagctctgactgcacat

SEQ ID NO: 81030 - DNA, 379 bp, Glycine max
aaaaagttgtattgaaattttcacaagaggaatttcttacagcttggtcaactcaggtgcgtcctgcaacaactctgttagctgatgggtgtccatatttgtatgctatggtgcatgatagttcagtgtctacaataccaggtgattttgttattggtgttaagttgacaaccataaacaatatgtgtgcatatgggctcaatcctggtatttcaggttctcgtcttttgggcaccattcctcagtccatttcacagcaaactgtttggaatcaaatggcaacagtgagaacaccattgaattttgattctagcaagcagagcttttgtcaattttctattgaccttctcggtggaggaattttagtggacaaaactgg

SEQ ID NO: 81031 - DNA, 183 bp, Glycine max
gagaggacctatctaaatgcatagagggagacttgtgttgcagttcccgattctgcgtggaaacagaatgctgcgccggatatgcaaccatatatggacacaaccgctgggtttgacatagatgccaaaggaagagcgctagtttggaattacgagtctgcagaccgcgactttggttcatgc

SEQ ID NO: 81032 - DNA, 206 bp, Glycine max
agtggacaaaactggagattggatcacacttatacaaaattctccaattagtaacttgttgagagttgctgcttggaagaaaggctgtttaatggtcaagattgtgatgtctgggaatgcagcaatcaaaaggagtgattgggcctcattggttcaagtgtttttaacaaacagcaacagttcagagcattttgatgcatgttatg

SEQ ID NO: 81033 - DNA, 93 bp, Glycine max
ctcagactttcttttcaagtaacacagaaccctacaaggcagccttttcttatcataggatctcaattacttaaatattttctcaaagatcga

SEQ ID NO: 81034 - DNA, 371 bp, Glycine max
tcggattattagtgtaaggagataactggtagtggaagatgtgttgccaattgagatgatggtcctttatacaaaggttttttttacaccaattattgtgtattatatatattttttttaggcaattacttttataagctattatttttttattgcacaattattttttggtcaataatatttttttttaaaatatttattttttacaaaaaattttttatttattcataaatttatttttttatacaaaacatatttttttattatttttatattttttttaaaatacaattatttttttcactccaaatatatttatattattcttaaaaattttcttcttttattattttatattattaatttttttt

SEQ ID NO: 81035 - DNA, 379 bp, Glycine max
catttgtgtcactggatggactgccaccccaatgcaggatgttcaggttacaattgattggtttatttcctctcaggaatgtgttcccaggacctattgtgttttaaatccacaaaatccttttgtgttaaataggtggatgggaaaactgactttccctcagggcacttcccgaagtgttaagagaatgcctctttctatagggggaggagctggtgcaaagaatgctattctcatgaatatgccaaatgctgttctttcaatgtggagatattttgttggagatctcgtctttgaagtttctaagatgacttctccctacattaaatgtacagtctctttcttcatagcatttggaaatttggctgatgacaccatc

SEQ ID NO: 81036 - DNA, 320 bp, Glycine max
gtgatgataacttaattagtgttcatgaatatgtcaagccttactttagtggttctaaattgaaaagctttctagctggtcataatatcaccattactgatggtattgacaaaactagtgcaactttgcaatttagaaagttagcagattgtgattttctcaagagaaactttaagcagatgtctaatgttttgtgggtggctcctgaagacaaggcgagtttatggtcacaacttcattatgtttcgtgtaataatctggaaatgcaagaagcttatcttgtcaatctcgtaaatgtgttacgagaactgtatttgcac

SEQ ID NO: 81037 - DNA, 377 bp, Glycine max
gattatgctagttttgatggtttgattaccaagcaagttatgagcaagatggcagaaatgataaacagtctttgtggtggtgatgaaaaattgatgcgtgaaaggacgcacctgctgttggcttgttgttcaaggatggcaatttgtaagaaagatgtttggagagttgaatgtggaatcccttctggatttccgctcacagttatttgcaatagcatttttaatgagatgctcattagatatagctatgaaaaattactgcgccaggctaaagctccaagtatgtttttacaatccttcaaaaattttggttctttgtgtgtgtatggtgatgataacttaattagtgttcatgaatatgtcaagccttactttag

SEQ ID NO: 81038 - DNA, 263 bp, Glycine max
gctgacgcatgcacgcgtcgtaagctggaattggtcgggtgtaacactccatgcacaggtagatatggcttaatggcggagtaaattgtggaagtcctgaagcagcctgtttgaatcaaatacctgtagagtggaaagtaattgaaaaaaaaatgtttacctagctataaaacagtgatgactacggtgggggaggaaccttagaggggagaaagggagattgaccgcacgcacttttgtgccaaagttgataggtcctatcg

SEQ ID NO: 81039 - DNA, 112 bp, Glycine max
gcatgacgtccgcctctagctgaatggtggagcatgctatgatcgaagagaggggcggtagtcttgtccaggagtgttgaggactatcatctgggctgagattggagctaag

SEQ ID NO: 81040 - DNA, 373 bp, Glycine max
ctttcttcatagcatttggaaatttggctgatgataccatcaattttgaggcttttccccacaagctggtgcagtttggagagattcaggaaaaagttgtattgaaattttcacaagaggaatttcttacagcttggtcaactcaggtgcgtcctgcaacaactctgttggctgatgggtgtccatatttgtatgcaatggtgcatgatagttcagtgtctacaataccaggtgattttgtcattggtgtcaagttgacaaccataaacaatatgtgtgcatatgggctcaatcctggtatttcaggttctcgtcttttgggcaccattcctcagtccatttcacagcaaactgtttggaatcaaatggcaac

SEQ ID NO: 81041 - DNA, 379 bp, Glycine max
tacagcttggtcaactcaggtgcgtcccgcaacgactctgttggctgatgggtgcccatatttgtatgctatggtgcatgatagttcagtgtctacaataccaggtgattttgtcattggtgttaagttgacaaccataaacaatatgtgtgcatatgggctcaatcctggtatttcaggttctcgtcttttgggcaccattcctcagtccatttcacagcaaactgtttggaatcaaatggcaacagtgagaacaccattgaattttgattctagcaagcagagcttttgtcaattttctattgaccttctcggtggaggaattttagtggacaaaactggagattggatcacacttatacaaaattctccaattagt

SEQ ID NO: 81042 - DNA, 375 bp, Glycine max
accataatcaatatgtgtgcatatgggctcaatcctggtatttcaggttctcgtcttttgggcaccattcctcagtccatttcacagcaaactgtttggaatcaaatggcaacagtgagaacaccattgaattttgattctagcaagcagagcttttgtcaattttctattgaccttctcggtggaggaattttagtggacaaaactggagattggatcacacttatacaaaattctccaattagtaacttgttgagagttgctgcttggaagaaaggttgtttaatggtcaagattgtgatgtctgggaatgcagcagtcaaaaggagtgattgggcctcattggtacaagtgtttttaacaaacagcaacagt

SEQ ID NO: 81043 - DNA, 87 bp, Glycine max
cgtcccttaaacccaccacacttcaaagtcatgggtattccatgggacgacgtcgttgtgatccagcaagggaaggatcacaatgag

SEQ ID NO: 81044 - DNA, 377 bp, Glycine max
ctcgagccggaaaagctttctagctggtcataatatcaccattactgatggtattgacaaaactagtgcaactttgcaatttagaaagttagcagattgtgattttctcaagagaaactttaagcagatgtctaatgttttgtgggtggctcctgaggacaaggcgagtttatggtcacaacttcattatgtttcgtgtaataatctggaaatgcaagaagcttatcttgtcaatctcgtaaatgtgttacgggaattgtatttgcacagtccagaggaagctcgccaattgagaaggaaagctctctctcgtattgaatggttgcaaaaagctgatgtgcctaccatagcacagattgaagagttccattcgatgc

SEQ ID NO: 81045 - DNA, 377 bp, Glycine max
aataactaccaccaatagtaacaatgagtcgcacacacgacgcagctgctgcagtaagaagaggcgttgacaacgtggagtctggcatccataaaggtgtcgataaagtagaacgcggatttgcacgtgtgcaagaagatgcttctacagctttgcaccgaggcgttcaacgtgtcgaaacgtacacgactgctttagacaactacatccttgcgcaagccacacgcctgcgaaatgatatccaacccctccttcctaccatctctactactggtctcatctttgctggttctttgcccttgagcttctatttcaactcattgagtattaagagagtggttggcgtgcaagactatggcttccctacaaacctcgta

SEQ ID NO: 81046 - DNA, 345 bp, Glycine max
cggagcctatatttgctccacacatcaatctttcagagcatgtattaaactcttggatctgtaacacatactcaatgcacaaggctacaagaggtgaagacaagctgaagagcggtgttactgattttcaacgggctgaggaagcacatctacagagcgatctcgacaggtacatgctggcacaggccgaagacgagggtgtggcacaaaggcgatggagataggtctgcagcgccctaaaacgggtcatggctaggacacgagggaacccattacaggtctggatgggtagaacatgaaggtccagacactattgaacaacgtgctcatgtatgccgtgaaaaa

SEQ ID NO: 81047 - DNA, 376 bp, Glycine max
caaaatccttttgtgttaaataggtggatgggaaaactgactttcccccagggcacttcccgaagtgttaagagaatgcctctttctatagggggaggagctggtgcaaagaatgctattctcatgaatatgccaaatgctgttctttcaatgtggagatattttgttggagatctcgtctttgaagtttctaagatgacttctccctacattaaatgtacagtctctttcttcatagcatttggaaatttggctgatgacaccatcaattttgaggctttttcccacaagctggtgcagtttggagagattcaggaaaagttgtattgaaattttcacaagaggaatttcttacagcttggtcaactcaggtgcg

SEQ ID NO: 81048 - DNA, 361 bp, Glycine max
  unsure (1)..(361): unsure at all n locations
attttcttggctgtaataacattgtgtggtttcttttgtatcattataagatgattatgttttattctggtcatgagttattctttgatgaaccttaccatggttatctgactgaatctcgtgactatcaatggagttattctttgatgaaccttaccgttaccactatcaagtggagcaaacctctgcattcctattcaaatagtactgtgtaatttgttccagcagccatgatggcatgtagtatgtcaaagctttgttgagattttaaaaaaaaaaaaaaaaaatataaatattaataaattttaatttanttaatttttttttttaattatttattttttttttttttttttttttt

SEQ ID NO: 81049 - DNA, 381 bp, Glycine max
cgtctttgaagtttctaagatgacttctccctacattaaatgtacagtctctttcttcatagcatttggaaatttggctgatgacaccatcaattttgaggcttttccccacaagctggtgcagtttggagagattcaggaaaaagttgtgttgaaattttcacaagaggaatttcttacagcttggtcaactcaggtgcgtcccgcaacgactctgttggctgatgggtgcccatatttgtatgctatggtgcatgatagttcagtgtctacaataccaggtgattttgtcattggtgttaagttgacaaccataaacaatatgtgtgcatatggtctcaatcctggtatttcaggttctcgtcttttgtgcaccattcc

SEQ ID NO: 81050 - DNA, 372 bp, Glycine max
ggaattttagtggacaaaactggagattggatcacacttatacaaaattctccaattagtaacttgttgagagttgctgcttggaagaaaggttgtttaatggtcaagattgtgatgtctgggaatgcagcagtcaaaaggagtgattgggcctcattggtacaagtgtttttaacatacagcaacagtacagagcattttgatgcatgtaagtggacaaaatcagaaccacattcctgggaattaatcttcccaatagaggtatgtggtcctaataatggttttgaaatgtggagttctgagtgggcaaatcaaacttcatggcatttgagtttccttattgacaatcccaaacagtctacagtttttgat

SEQ ID NO: 81051 - DNA, 370 bp, Glycine max
tttaaattttgtgaggttcattatgaagaaaagggacaggcttagttgtcaagttggaatcaacccatactccatggaatggactggtttggccaatagattactgagtaagggcaatgatattctgtgttgcgattatgctagttttgatggtttgattaccaagcaagttatgagcaagatggcagaaatgataaacagtctttgtggtggtgatgaaaaattgatgcgtgaaaggacgcacctgctgttggcttgttgttcaaggatggcaatttgtaagaaagatgtttggagagttgaatgtggaatcccttctggatttccgctcacagttatttgcaatagcatttttaatgagatgctcatt

SEQ ID NO: 81052 - DNA, 374 bp, Glycine max
agcatgcttagcttttgtcaattttctattgaccgtctcggtggaggaattttagtggacaaaactggagattggatcacacttatacaaaattctccaattagtaacttgttgagagttgctgcttggaagaaaggctgtttaatggtcaagattgtgatgtctgggaatgcagcagtcaaaaggagtgattgggcctcattggtacaagtgtttttaacaaacagcaacagtacagagcattttgatgcatgtaagtggacaaaatcagaaccacattcctgggaattgatcttcccaatagaggtatgtggtcctaataatggttttgaaatgtggagttctgagtgggcaaatcaaacttcatggcattt

SEQ ID NO: 81053 - DNA, 70 bp, Glycine max
atcttacttttctttccgttatctcaggagagaatgaaacaaacttagcctcctttaagggaggttggcc

SEQ ID NO: 81054 - DNA, 282 bp, Glycine max
ctcgatccgataatattgatctactgttgagcattgatttgttgggtttacaaggagcaggtaaagcttttccaaacaagattgtttttgatgataagcttgtgttggctaacacacaagaattctttgatggaaattttccagtggattcttggttaccaatttttgtgaattgtctctatcctgtaagtcaacgacagcttctgaaggtaattgacttacaggatagagacaattaccttcagaagctgtcgttgtaaatgttacatgtggtagtggacg

SEQ ID NO: 81055 - DNA, 383 bp, Glycine max
tcgggaattcaatttcacattttaagaaataggaggcaaaaagttcatatataattggaatatttgttttcaattaggcctatcctgaagccaaaggaaatgagatcggaattcctcggggaattccaattccacattttcaagaaataaggaggcaaaaatgttcatatatgaattggaattatttgttttcttattaggcctatcctgaagccaaaggaaatgagatcggaattcctcggggaattccaattccacattttcaagaaataaggaggcaaaaatgttcatatatgaattggaattatttgttttcttattaggcctatcctgaagccaaaggaaatgagatcggaattcctcgggggtaccgagctcgaatt

SEQ ID NO: 81056 - DNA, 286 bp, Glycine max
gcttgacgccgcacgcgtcgagctcggaattcggtcgagtcgggtatgatctaataatgaggtaatggaaatgccgatcagaaacatgcgcgaaggcctgaagactaccgcacgtgagcgtggtgattattaaccttatttggtcgcggtagctcgatgctacaacagtacgcacgctgcccctgcgctattcgctctgccatctcgctttgcgcgctcgcgccacattcgcgcacgtaacccgcgcacttggcttgcgcgacatacttctcggatgttacgtatg

SEQ ID NO: 81057 - DNA, 63 bp, Glycine max
acgcggacgtaagctcggaattcggctctagtcagattatacttttatctcatcataatcctc

SEQ ID NO: 81058 - DNA, 376 bp, Glycine max
caaacttgttcctgatcaatgttcaaatttgcatttttttttgccttttttctttttttcactactaatactacctccggaagccacaacaacacatcatcctgtcctactaacagctgcaaaaatggacctaagatcagttacccattttggttttcccaaggttcccttcctgatcaatattgcggttaccaagaacttgggcttttttgtgatgacaatggcaacgctattttttctccacccccaggtaaatactattacgtaaaagacatagactatgcaaaccatatacttaagctcgttgattttgacactgcaaacataacttgtccaagggcacttcacagctttcccttgggcaacctaccactct

SEQ ID NO: 81059 - DNA, 372 bp, Glycine max
gaatatgtcaagccttactttagtggttctaaattgaaaagctttctagctagtcataatatcaccattactgatggtattgacaaaactagtgcaactttgcaatttagaaagttagcagattgtgattttctcaagagaaactttaagcagatgtctaatgttttgtgggtggctcctgaggacaaggcgagtttatggtcacaacttcattatgtttcgtgtaataatctggaaatgcaagaagcttatcttgtcaatctcgtaaatgtgttacgagaattgtatttgcacagtccagaggaagctcgccaactgagaaggaaagctctctctcgtattgaatggctgcaaaaagctgatgtgcctacc

SEQ ID NO: 81060 - DNA, 366 bp, Glycine max
atagggggaggtgctggtgcaaagaatgctattctcatgaatatgccaaatgctgttctttcaatgtggagatattttgttggagatctcgtctttgaagtttctaagatgacttctccctacattaaatgtacagtctctttcttcatagcatttggaaatttggctgatgataccatcaattttgaggcttttccccacaagctggtgcagtttggagagattcaggaaaaagttgtattgaaattttcacaagaggaatttcttacagcttggtcaactcaggtgcgtcctgcaacaactctgttggctgatgggtgtccatatttgtatgcaatggtgcatgatagttcagtgtctacaata

SEQ ID NO: 81061 - DNA, 369 bp, Glycine max
cagcagtcaaaaggagtgattgggcctcattggtacaagtgtttttaacaaacagcaacagtacagagcattttgatgcatgtaagtggacaaaatcagaaccacattcctgggaattaatcttcccaatagaggtatgtggtcctaataatggttttgaaatgtggagttctgagtgggcaaatcaaacttcatggcatttgagtttccttattgacaatcccaaacagtctacagtttttgatattctcttgggaatctctcaagattttgaaattgctggtaatactcttatgccagctttttctgttccacaggctactgccagatcttctgaaaatgcggaatcctctgcatgatctggaattc

SEQ ID NO: 81062 - DNA, 362 bp, Glycine max
ctctctcgtattgaatggctgcaaaaagctgatgtgcctaccatagcacagattgaagagtttcattcgatgcagaggatgatgaatgctcctgattcaaatgataatattgatctactgttgagcattgatttgttgggtttacaaggagcaggtaaagcttttccaaacaagattgtttttgatgataagcttgtgttggctaacacacaagaattctttgatggaaattttccagtggattcttggttaccaatttttgtgaattgtctttatcctgtaagtcaattacctccagaagctgtcgttgtaaatgttacatgtggtagtgggcggtgtggttttcccaccactgcttggat

SEQ ID NO: 81063 - DNA, 308 bp, Glycine max
gctagacgccatgcacgcgtacgtaagctcgattcggtcgagctcgagccgccagttgatttacaccatagttaagactggaatatggaatctgttgccaaaacagcttgtataatccaaaccctgttgacatgggtttgaatttgagcgtccgatcattggattattggcactggatggactgccccaagcagagtcagtcatgatggtatttcttcagaggtcccagactatggttaaatccaaacctttggtaatggggtgggaaaactgacttcctaggacttccgaggtaagagagcctttta

SEQ ID NO: 81064 - DNA, 70 bp, Glycine max
gtaatatttaaacacactcattgcacatagtaaggggggttatttaattgtatattgcgcttaactattt

SEQ ID NO: 81065 - DNA, 334 bp, Glycine max
caggagttccaaccaagatgctgacggtaaattgttcggcgagaatgacagtgcataaccctgcaaccttcttcggaattcatgtcagctctaaagcagtgaatcttatgtattctgagatgacagttgcaactggtgagctgaagaagcattatctatcgagaaagagtacccgtacagtgtctgtgaacctgcaaggaagcaaggtttctctatatggtgctgatgcaagcttaactggcttggtggacaatggaaaaataccaatgactcttgtctttgaagttggatcgctagggaatattgttgggagggtggggaggtccaaacatcg

SEQ ID NO: 81066 - DNA, 379 bp, Glycine max
aatcagatccacattcctgggaattaatcttcccaatagaggtatgtggtcctaataatggttttgaaatgtggagttctgagtgggcaaatcaaacttcatggcatttgagtttccttattgacaatcccaaacagtctacagtttttgatattctcttgggaatctctcaagattttgaaattgctggtaatactcttatgccagctttttctgttccacaggctactgccagatcttctgaaaatgcggaatcctctgcatgatctggaattcgtgttttctttcgcttgttcgtttgtttaattcaataaaggaaattaggcatgaccctcttgttgagtatgctctgcctatctgaaaatttccacacctcttt

SEQ ID NO: 81067 - DNA, 300 bp, Glycine max
agagcttgacgcctgcacctcgtagctcgatcgtggcgccacaccacacgctgatttgcgtcttatttgcggtctttttttacgctacctaacatttttaaaacatgttggagaggaagaaaccccaactaaatggacagtttgaggcaatgcttaatgactggagtcattgttctgaccagttgacagttaacagcatcatgccatgatagtttcagtttgaagcctgcagatggagctcaccgttaaaatcgagctgagcagtcagaattccagaatatggtggttgagtgggtctga

SEQ ID NO: 81068 - DNA, 375 bp, Glycine max
cttatacataattctccaattagtaacttgttgagagttgctgcttggaagaaaggctgtttaatggtcaagattgtgatgtctgggaatgcagcagtcaaaaggagtgattgggcctcattggtacaagtgtttttaacaaacagcaacagtacagagcattttgatgcatgtaagtggacaaaatcagaaccacattcctgggaattgatcttcccaatagaggtatgtggtcctaataatggttttgaaatgtggagttctgagtgggcaaatcaaacttcatggcatttgagtttccttattgacaatcccaaacagtctacagtttttgatattctcttgggaatctctcaagatttttgaattgctggt

SEQ ID NO: 81069 - DNA, 226 bp, Glycine max
gcttgacgcctgccctcgtaagctcgattcggctcgaggaacacttctattgttagacttcggcagataaacttttgttttttagtcttgtaattcaagcagcgtgaaatggttggtccacttctattggttggactcgggtgacttctcttttctttttactttttttactgccgatgcgtcaaaggctattgaaacactggcgtgggcaagtgttgtatttttg

SEQ ID NO: 81070 - DNA, 209 bp, Glycine max
gcagacgtccgcacgcgtacgtaagctcggaattcctcgaggaaagacatctcccgctaactttgtcgggctatatcactacttttatttcttgcctatggcagcctacccaaggaggctatcatatctttattcccaaacctgtcagctgatctgggaaccattggagggtcccactgtgcagctgaccttctgcgttttcatgattg

SEQ ID NO: 81071 - DNA, 85 bp, Glycine max
ccatcatacacagagggggggtccttttctcatagcccttaatttcacccttcattttccatgtgccacaagaaagagccccact

SEQ ID NO: 81072 - DNA, 327 bp, Glycine max
cacaaagcgggttactgtctgttcaagctaccatctgtctctctctttcttagtgcctccttgccagaagttaaaatggcccaagaaactttcctattcacatctgaatcagtgaacgaggggcaccctgacaagctctgtgaccagatctccgatgctgtgctcgatgcatgcttggagcaggaccctgacagcaaggttgcctgtgaaacctgcaccaagaccaacatggtgatggttttcggagagatcacaaccaaggccaacgtggactatgagaagattgtgcgtgacacatgcaggaacattggttttggctctgatgat

SEQ ID NO: 81073 - DNA, 296 bp, Glycine max
gtgatgataacttaattagtgttcatgaatatgtcaagccttattttagtggttctaaattgaaaagctttctagctggtcataatatcaccattactgatggtattgacaaaactagtgcaactttgcaatttagaaagttagcagattgtgattttctcaagagaaactttaagcagatgtccaatgttttgtgggtggctcctgaggacaaggcgagtttatggtcacaacttcattatgtttcgtgtaataatctggaaatgcaagaagcttatcttgtcaatctcgtaaat

SEQ ID NO: 81074 - DNA, 284 bp, Glycine max
cttttgcatttgtgaactagtatgtagtatttgatgggcttaaataaagcgcattactatgtgcaatgagtgtgtttaaatataaaaaaaaaaaaaaaaaaaaaaaaaaaaaaaaaaaaaaaaaaaaaaaaaaaaaaaaaaaaaaaaaaaaaaaaaaaaaaaaataaaaaataaaaaaaaaaaaaaaaaaatatataaagggggggcccccctcttgagaaccttttcccccagaatttaatttcggaccggtcctttaaagggttaccattttttctttaatg

SEQ ID NO: 81075 - DNA, 62 bp, Glycine max
gcttgacgcatgcacgcgtacgtgtgatggtgaggggctgaacacttggtggggggcatatt

SEQ ID NO: 81076 - DNA, 379 bp, Glycine max
gaagcttatcttgtcaatctcgtaaatgtgttacgagaattgtatttgcacagtccagaggaagctcgccaattgagaaggaaagctctctctcgtattgaatggctgcaaaaagctgatgtgcctaccatagcacagattgaagagttccattcgatgcagaggatgatgaatgctcctgattcaaatgataatattgatctactgttgagcattgatttgttgggtttacaaggagcaggtaaagcttttccaaacaagattgtttttgatgataagcttgtgttggctaacacacaagaattctttgatggaaattttccagtggattcttggttaccaatttttgtgaattgtctctatcctgtaagtcaattac

SEQ ID NO: 81077 - DNA, 313 bp, Glycine max
ttgtgttttaaatccacaaaatccttttgtgttaaataggtggatgggaaaactgactttccctcaaggcacttcccgaagtgttaagagaatgcctctttctatagggggaggagctggtgcaaagaatgctattctcatgaatatgccaaatgctgttctttcaatgtggagatattttgttggagatctcgtctttgaagtttctaagatgacttctccctacattaaatgtacagtctctttcttcatagcatttggaaatttggctgatgacaccatcaattttgaggcttttctctccaaactgcac

SEQ ID NO: 81078 - DNA, 391 bp, Glycine max
aggcacgcgtacgtaagctctgtattcggctcgagtaatacttttatttcacaaaatccatttgtttcaaataaagaatatgttaaaacttactttccctctattcacttcccgaagtgcttatagtattcctctttctattatttgataaatcttttccaaaaatgctttactcatgaatataccaaatgcttctctttcacattttatatatattttcttagtatatccttattttaatatttctaaatattacttacctcctactattaaatattacaatctcctttacttcatattctatttttaaattttcgcctatatatacacctatccaattttttgtaatctttttcttcttttcatatactcgcatctctatctttatcta

SEQ ID NO: 81079 - DNA, 378 bp, Glycine max
ttaacacttcgggaagtgttaagagaatgcctctttctatagggggaggagctggtgcaaagaatgctattctcatgaatatgccaaatgctgttctttcaatgtggagatattttgttggagatctcgtctttgaagtttctaagatgacttctccctacattaaatgtacagtctctttcttcatagcatttggaaatttggctgatgacaccatcaattttgaggcttttccccacaagctggtgcagtttggagagattcaggaaaaagttgtgttgaaattttcacaagaggaatttcttacagcttggtcaactcaagtgcgtcccgcaacgactctgttggctgatgggtgcccatatttgtatgctatgg

SEQ ID NO: 81080 - DNA, 373 bp, Glycine max
cgtctattcagagttgcaggagaaaaatgccaacgaaaacaacacgacccggattttggctgcgattttccgaccagaaatactaaaatcgccattaatcctaatctccctcatccgttcctttcggagccggccacccccacgaaggggctactggttctgggagtcggaccaaagatagggtccccgcttccgggtgtcgctcgtgagcacaaaagaccttccaggttggggtgtaaacaccgtgaacctgaagcaccaattcctccccttgtgggggtgcatgggatgagtgacatcgaagtccttctcatgatctttatttctgccctctgaacgggctcacatttcacctttgtattgcacatcgggg

SEQ ID NO: 81081 - DNA, 326 bp, Glycine max
ggctgcataaagctgatgtgcctaccatagcacagattgaagagttccattcgatgcagaggatgatgaatgctcctgattcaaatgataatattgatttactgttgagcattgatttgttgggtttacaaggagcaggtaaagcttttccaaacaaaattgtttttgatgataagcttgtgttggctaacacacaagaattctttgatggaaattttccagtggattcttggttaccaatttttgtgaattgtctttatcctgtaagtcaattaccttcagaagctgtcgttgtaaatgttacatgtggtagtggacgtggtggt

SEQ ID NO: 81082 - DNA, 378 bp, Glycine max
gaagagaatggctcccaagggtttaatctttttggctgtgttatgcttctcagcactgtcactgagtcgttgtcttgcggaggataatggacttgttatgaacttctacaaggaatcatgccctcaggctgaagacatcatcaaagaacaagtcaagcttctctacaagcgccacaagaacactgctttctcctggctcagaaacatcttccatgactgtgctgttcagagttgtgatgcttcactgttgctggactccacaagaaggagcttgtctgagaaggaaacagatagaagctttgggttgagaaatttcaggtacattgagaccatcaaagaagctttggaaagggaatgcccaagagttgttttctgtgc

SEQ ID NO: 81083 - DNA, 371 bp, Glycine max
gaaaacaccaatatacaattctagagtagtggtcctgtccctttgatgcttcttgtaccagtcttccatgaggctccttctttgcaatgatccctttcattctcttttgtctcgttgctcattgtgcttccatttctttactcccagtaaaaagggttgtcacaaaaaaacacacatgagcttgcacatatttgacaagctcaaactctcaagacctggccaaagccaattgctttgaaattttcctaattttttcttctctcactttgatcttctctctctctctctctctctctctctctctctttatatataaaattggtcctctaagatgggtaatgaaaaccattaccaccatcagttttactatc

SEQ ID NO: 81084 - DNA, 400 bp, Glycine max
gttttaaatccacaaaatccttttgtgttaaataggtggatgggaaaactgactttccctcagggcacttcccgaagtgttaagagaatgcctctttctatagggggaggagctggtgcaaagaatgctattctcatgaatatgccaaatgctgttctttcaatgtggagatattttgttggagatctcgtctttgaagtttctaagatgacttctccctacattaaatgtacagtctctttcttcatagcatttggaaatttggctgatgacaccatcaattttgaggcttttccccacaagctggtgcagtttggagagattcaggaaaaagtttgtgtgaaattttcacaagaggaattttttacagcttggtcaactcaggtgcgtcccgcaacga

SEQ ID NO: 81085 - DNA, 398 bp, Glycine max
ggcaacagtgagaacaccattgaattttgattctagcaagcagagcttttgtcaattttctattgaccttctcggtggaggaattttagtggacaaaactggagattggatcacacttatacaaaattctccaattagtaacttgttgagagttgctgcttggaagaaaggttgtttaatggtcaagattgtgatgtctgggaatgcagcagtcaaaaggagtgattgggcctcattggtacaagtgtttttaacaaacagcaacagtacagagcattttgatgcatgtaagtggacaaaatcagaaccacattcctgggaattaatcttcccaatagaggtatgtggtcctaataatgggtttgaaatgtggagttctgagtgggcaaatcaaactt

SEQ ID NO: 81086 - DNA, 174 bp, Glycine max
  unsure (1)..(174): unsure at all n locations
cacgcggacgaagctcgnaatacggcacgagcctaactctgttattagatcactactaacacactacgggtcggggttattaacaaccatgcgctctcccatttactccagatgcactttaccatttcatctcattacactttacatgttacataattagtatagcactaccaa

SEQ ID NO: 81087 - DNA, 304 bp, Glycine max
gtccattttttttttcagaaaacaacagggaaagaagaggggtggcctctaaccgcgtgtcgttaaaatcctcaaacgcattagtagacatagaattatcaaaaagcggggaaagggtgattgaattcgatcctgggacgttaacgttgtttcaattcattagtggtcctgtctttgtcctattctttacttctttgttcttttttttatttgtgggcctatataattttttattttttttgtaatttatttttctttttttttttttttttattatttttgtgggtgttattttttttttttt

SEQ ID NO: 81088 - DNA, 398 bp, Glycine max
ctcgagccgattcggctcgagattaaatgtacagtctctttcttcatagcatttggaaatttggctgatgacaccatcaattttgaggcttttccccacaagctggtgcaatttggagagattcaggaaaaagttgtattgaaattttcacaagaggaatttcttacagcttggtcaactcaggtgcgtcctacaacaactctgttggctgatgggtgtccatatttgtatgctatggtgcatgatagttcagtgtctacaataccaggtgattttgtcattggtgttaagttgacaaccataaacaatatgtgtgcatatgggctcaatcctggtatttcaggttctcgtcttttgggtaccattcctcagtctatttcacagcaaactgtttggaa

SEQ ID NO: 81089 - DNA, 197 bp, Glycine max
cggggcatgcacgcgggacctaagactccgaattctgcgtcgagcatgtatgttactctgtggtgagcatggccatgggtgatgcttattttccaataacacctgtctataatgtacgtggcaacttataagagaccacattggcttttttttttacatgagaacgatgaggttttgttcaatttctttcaacaacc

SEQ ID NO: 81090 - DNA, 408 bp, Glycine max
atttcaggttctcgtcttttgggcaccattcctcagggcatttcacagcaaactgtttggaatcaaatggcaacagtgagaacaccattgaattttgattctagcaagcagagcttttgtcaattttctattgaccttctcggtggaggaattttagtggacaaaactggagattggatcacacttatacaaaattctccaattagtaacttgttgagagttgctgcttggaagaaaggttgtttaatggtcaagattgtgatgtctgggaatgcagcagtcaaaaggagtgattgggcctcattggtacaagtgtttttaacaaacagcaacagtacagagcattttgatgcatgtaagtggacaaaatcagaaccacattcctgggaattaatcttcccaatagag

SEQ ID NO: 81091 - DNA, 375 bp, Glycine max
accggatttcattgtgatatcatttgtgtcactggatggactgccaccccaatgcaggatgttcaggttacaattgattggtttatttcctctcaggaatgtgttcccaggacctattgtgttttaaatccacaaaatccttttgtgttaaataggtggatgggaaaactgactttccctcagggcacttcccgaagtgttaagagaatgcctctttctatagggggaggagctggtgcaaagaatgctattctcatgaatatgccaaatgctgttctttcaatgtggagatattttgttggagatctcgtctttgaagtttctaagatgacttctccctacattaaatgtacagtctttttcttcatagcattt

SEQ ID NO: 81092 - DNA, 123 bp, Glycine max
cagtagcctaatttggttcagtgtctttggaaaaacggtaagagatgatttaaagggtgctgttccacactcttcagaagatgctcctgacaagggcgatcccgaaaaacccaaaaagattga

SEQ ID NO: 81093 - DNA, 406 bp, Glycine max
acctcaaacaatttttcaaaccacaacgattgcattggaggggcttaaacaacatgctgcaggataacaagccacatccaacaaaacaaattcataatgcgctcatgagggagacatgtctgatgtcccaaatagtgtcgagccctatgctaagaacaatgggcatgagccggcatgcaggccttctgactctaacatccgactacgtaacgcagcatctatagctgctactgtttacacttcaacaccaactgaacctcacaatgttccaagtcaagccttacatagtgatgctaaactacctgatgacatcaaagtcaagctagctgctaagaagacttgatttatgatgagcttatcatattccagagaggaagaatatcatgattgtatcatacataagact

SEQ ID NO: 81094 - DNA, 184 bp, Glycine max
gcaacggttgaattttgactgaagacaaagttagaaggaaaaaaacatgtcttgctccgtcgcggtttccaattcgccggtgttctctccttttctttccttttcttgttcgaggccctccttattttttttttggccggattccttttccttttttttgtggattttaaaactttgaaccttt

SEQ ID NO: 81095 - DNA, 157 bp, Glycine max
ggctctacctatgatgacagatcaggggccaatgaggtaaggcttgctgaaaaaaagggcgaagcagatgtacatgcttgatggtacagctctcaacattattatgcgagacactgaccaataccgtaactagacaacctggacccatatcagactc

SEQ ID NO: 81096 - DNA, 401 bp, Glycine max
cattgttatcaacaagccgacaatcgggttttggaggataggtacaagcaactaaacgactggctgtccaatgatccaaatacctgatggctggcgttgacgcctctcgagtccaagttatttaatcgttcctttgccctcatgaaggcgaaagcgcatgctccgccaggagtgccactcgaaacaagcgccgagttgtcgcaaaaagatattgacattattgctgatgtcttagcgcgctggccatccttgcagaggttccctgtcgttgatctcttgagacttcttattgcttattctcccaacacatttgaagcccctcagacattgcagaaactgattgatgctttgttcgaagcatcggaatggaaggaatcatggccatcacccctaccgaagca

SEQ ID NO: 81097 - DNA, 121 bp, Glycine max
gtccaactcagtagtcaacactaggcactctctattcccattcattgcagaagaagatggaggcttaccccttacttccaacccgattggaactaacccggctaccctcccggtttccttt

SEQ ID NO: 81098 - DNA, 61 bp, Glycine max
gcttttggagccgatccaaccaatcatcgctggcgccgaatacaaaatctcatccctttcc

SEQ ID NO: 81099 - DNA, 310 bp, Glycine max
aaggaactcttcaatctgtgctatggatgatgaagagtcctgattcaaatgataatattgatttactgttgagcattgatttgttgggtttacaaggagcaggtaaagcttttccaaacaaaattgtttttgatgataagcttgtgttggctaacacacaagaattctttgatggtaatttttcagtggattcttggtttccaatttttgtgtatttgtctttatactttatgacaatttccttttaaagttttttttttattattgttcgatttgtgtattgattcttttttcattttatttttttttt

SEQ ID NO: 81100 - DNA, 151 bp, Glycine max
  unsure (1)..(151): unsure at all n locations
ncctagaataaaatcaccattggttaaagttaataaagcatgtgctgctgttggcttgacatcaagttacactccaactccattgttggaatctggtttgcaaaaagacagagggttaatttgtggagtatttttggaagagatgtttttt

SEQ ID NO: 81101 - DNA, 80 bp, Glycine max
agacgtcgcatgtcacgcgtccttaggctgggatttcggttcgggtcctaaatcttttaaatgggttcttcttctattac

SEQ ID NO: 81102 - DNA, 434 bp, Glycine max
agagcttgacgtcgcatgcacccctacctaagcctcggatttcggctcgaggaaatggttctctgcagaagatgctttagagttcgctaagggcatatctaatcatgaattgtgcttcatagaaagagctgatcatgaatatacttatcatcaagatgagttgaccagcttagttttggaattcatcaagattcatattgacaaagacaaagatacatcgaagcaggcacgatttggaagagtacataaacctattcattcccggttgtagtttgtgcaaatatgtgtagatccagtatttcttttgaaaccatctttcttacaaataaagacacagccttcataaatagatcaccaagaaaagatggacgaacctcattccatttctaacattccaagtgcccacctgagagccgtttattagcatttgcaag

SEQ ID NO: 81103 - DNA, 294 bp, Glycine max
  unsure (1)..(294): unsure at all n locations
cagaaaatacaaacagtctttgtggtggtgataaagaaaggtttctaaaaatgacgagcgaccccccactncttgnnntttaagaatactatattttttatatagtaattttgaaattttatattactattacttcttatttatttattactattatatatttattatttaatatatttattaattattatcttttttattttattatattaatatatactataatttttttactctttaatttttatttatatatatttactataatctattctattatttttttttaatctt

SEQ ID NO: 81104 - DNA, 331 bp, Glycine max
atgctgctcctaagcaaccaaaaccaattaagaatagaatgtctgctttaaaagatggaaaacttagagagacaagttctccaataagaggcaatcgcataaaggttggtggtgtttagacccataatatatattcttagacagtgttcatattgcccaatcccattttttgagcttatgatttgattccttttttttatgtgctactttttttccttttaatttcatcttctgttttttcattaagaatttctttttttttcttcttggaggtgtgtattttccattttctttttttctatttctatttctttattttcgtatcttttat

SEQ ID NO: 81105 - DNA, 155 bp, Glycine max
ctcggatttcggctcgagcggctcgttgttctagccgctttgcgacgccgtgagaaagtaatgctttcaaaaaaagaagaacacatcggggtgggaggcacacgctcaaacgcagagtcagaatctccattctccaatcggagacatagcgagct

SEQ ID NO: 81106 - DNA, 399 bp, Glycine max
  unsure (1)..(399): unsure at all n locations
aaaaaataatatttaaaaaaaaaaaaaaaaaaaacaaaagaaattttttttatttttgtggcccccccccccccccccttcttnttctcttcccctcctctttttctctttccctttctccctatttctctactctctttcctcttttggcccccccccccccccttttccctctcccccccaatattatttccccccctccccccttaattctccccattttcccctctaaaaagcctttttaaccctccccttactattccctcatccctctccccttaaaaaattttttcccctcccaatatccccccccctcccatcccgtttccttaaattttaaacccccgttcccctctttattccccccccccccccttttctctttccccccctcccccc

SEQ ID NO: 81107 - DNA, 280 bp, Glycine max
cacatgctggtgcagtttggagagattcaggaaaaagtggtgttgaaattttcacaagaggaatttcttacagcttggtcaactcaagtgcgtcccgcaacgactctgttggctgatgggtgcccatatttgtatgctatggtgcatgatagttcagtgtctacaataccaggtttttttgtcatttggtgttaagttgtcaactctttttctattttgtgcgcttctttgttctcttatttctgaggttttccagtgtttccttggtttttttcgtttc

SEQ ID NO: 81108 - DNA, 381 bp, Glycine max
ctcgttcctttcgaccaatcgtgctactgaccttggggcgttaggcggggaaattcggggcagtctgcttgatcgcgttcgcgatcgacttgacgatcttcaatgtcttgcgggagaccgacgtcgagcccctcctcgccaagaccgtctccacggtgatcgcgacgaccgtcgcgttcctgggcaaccgcttctggacctggcggcacggggcgcacgaccacatggcccggcagtacacgatgttcttcgtgttgaacgccatcggcctgggtatagccctgacctgcctggcgatcagccactacggtctcgggcagatctggccggtctagcatagcccgctcgccgacaacatctcgggccagttcatcggcaccg

SEQ ID NO: 81109 - DNA, 428 bp, Glycine max
gtgcacacttttattgttaccacaagtgattgcgagaagacgggtgagatgtttcaggtgaccactttgctgagtgaggcggagagattggagaaagagttgttgcagaatccacctccgtcagaagcggatgtggaggcggcttgggttgttgttcaaagagaaaggggaggttgtgttttatattaaaagtttccaatggtagttaatctatttatttattgcttcctgttgattcattctttattaaatccattatatatatctttttcttattttgtagaggattgatgtattttttatatttttttttatttttatattttttattatatagttttattgtgttatcttttagttttaatctattaatttattcttctaatttttgttaatatatttattctagtattttttattatattttt

SEQ ID NO: 81110 - DNA, 87 bp, Glycine max
ctctttttttattcagctcgagctgaactgcagaaagaagctttcaacttcagtggggcccacctcactctttattcggttctttaa

SEQ ID NO: 81111 - DNA, 381 bp, Glycine max
gacaaatctagtgcaactttgcaatttagaaagggagcagattgtgattttctcaagagaaactttaagcagatgtctaatgttttgtgggtggctcctgaagacaaggcgagtttatggtcacaacttcattatgtttcgtgtaataatctggaaatgcaagaagcttatcttgtcaatctcgtaaatctgttacgagaactgtatttgcacagtccagaggaagctcgccaattgagaaggaaagctctctctcgtattgaatggctgcaaaaagctgatgtgcctaccatagcacagattgaagagttccattcgttgcagaggatgatgaatgctcctgattcaaatgataatattgatctactgttgagcattgat

SEQ ID NO: 81112 - DNA, 516 bp, Glycine max
  unsure (1)..(516): unsure at all n locations
tgacggcgcatgcaccggcgtccgtaaggctcggatttcggctcgagctatccatttgttagaatatgtgccaaccgaattaaaagaggagcgatgtgtatagcgcttcgcgatggcacgatatagagaaagaatatgggaaggcaataggtttcccgcagttttaggtcttttcatataaaaaaaaatgtttaaaatttatttaatttnnttctatagaataaggatttgggttttctttagtccttttttttctccttgttttataagaaattttcgagtggtatttttaaaacaagtttggtaaaagcaacttcttgcggcttcttcttctgtcattggatccattgttacaatcttaccaaggcattgcctcctcttggtagttttttccaaaccctgccttggcgctttgcaagggggtttggttaaaacctaaatcaaataattatttaaaattaaatttaccattcttggcttttcttcatattatttcattattttcgtttttttggt

SEQ ID NO: 81113 - DNA, 117 bp, Glycine max
  unsure (1)..(117): unsure at all n locations
acttccctgtataaggaagancaagaaaaacccaaaagtatttttaccagattgagagcgtccaacccatccccaanacaattaggctcaggctcattattgatacatatctaattt

SEQ ID NO: 81114 - DNA, 240 bp, Glycine max
gcgtacgtaagctctgtattcggctcgagctctcctcctgtctctagaattctcagattaggaaggcgagttgattcattagggaggaccccgcttggcacctcccaccatgggccagctgccgtcgcaacagtaccagcagcctccgtcgcatcagcagcaaccctacgtcatgattccaccgcatgcccaggccccgcaggccatgtgggcccccttcgtccagccttcgccttagca

SEQ ID NO: 81115 - DNA, 80 bp, Glycine max
  unsure (1)..(80): unsure at all n locations
gactctcttgtatnggctgatgggtgcccataaaagagatgctttggagcatgatagggcatnntctacaattccaggtg

SEQ ID NO: 81116 - DNA, 156 bp, Glycine max
cgcgtcgaagctcgaattcgctcgagcagagctttactctcaggtctaggaaatgctaagagacggtagcagtagtaggtttctattctaatattcaaaaaccccagtgtcagtcactggaatgatgggttactcactcacagtctttgggagtta

SEQ ID NO: 81117 - DNA, 106 bp, Glycine max
tggcctttttttttattcaaccctgtcagaaaaccgggaatttttgggtgggtcagaatttgatgggttccccacaagaaaaatcccccctccacaatttaaaggg

SEQ ID NO: 81118 - DNA, 262 bp, Glycine max
  unsure (1)..(262): unsure at all n locations
gaagacgccccatgcacgcgtacgtaagctcttaattcttctcgagttctcgctctctgtcacaggtgtagcggcgaaactaagatcttttaaagaatggcgagaacctaccccnttgttgctcttttcacagctcctcctctttaccttatctctcattcaatctaataatatcttttgagttttctttggattatttccctctattccttcctcttactttttcctttctttctttcttattctttcttttctctttctt

SEQ ID NO: 81119 - DNA, 313 bp, Glycine max
  unsure (1)..(313): unsure at all n locations
cccagatcnccacccaagagcaggagtttctcaaagaaagggtatgtcccatcagcagcacacataactttgggcttggacatgcccaagggcagcgcgttttgctagatgggtgaaggttggacatgtatcattactaaaactgaggggcctgatgcttgcttatgtttcgtttaatgtggagtaaattgctcatttacttttgtggtttttatctgtttcttttatattttatattttttaatttttcgtttttttttttcttttggcgtggggggtggtttctttttttcatttattttttttctttttt

SEQ ID NO: 81120 - DNA, 280 bp, Glycine max
  unsure (1)..(280): unsure at all n locations
gagcgtnggcggacgatgcatgcacgcgtaagctaggaattatgctggtcgagaatcagtgtaagaaagataaaattctcaaaatgggagccagttcgatccccatccgagtcgccggaatccaaccgtgctccaccttcggccaccgcaggaccgatcccgatcgccggagagcctcctccaccagctggtggaccccgctgttcggctggtcctccgaaccggactacattgactcaaacaacagagcatcgagtcttcaacggaccaagcctgtacc

SEQ ID NO: 81121 - DNA, 106 bp, Glycine max
acgatgcatgcactcgtaagtaaggtaataattcggatcgagcggctttttaaaggaaggaaaaatggagttgtgggggggacttttttgttcggtggtttgggag

SEQ ID NO: 81122 - DNA, 116 bp, Glycine max
  unsure (1)..(116): unsure at all n locations
ctnctnatcatgcacacaaattaggtgtcactaaagaacctttgtaaacgcacttgacaagaccctgatgacaggaagcataacgaagacaaggttactgaaaaccctgtaccacc

SEQ ID NO: 81123 - DNA, 326 bp, Glycine max
agaagagcttgacgtgcatgcaccgtacgtaagcttgggtcggcgaaagtaatgcgtctagtcactcgctttccagttaggttcggtcttaccctatttcacttgaaccttaattacgacagttgacaatctggttggtgaccttggcttaggagtaagtttatgttgaataacatcaattctctgcttgatcctttgctgatgcaatgctatactcgtgctggtaaaggagttgtcatattctgtcagaccaaatggtggaaagctgcaccgacaggatgaaaaatgattatttaacaagatctaaagcgtaagaagacttgtgc

SEQ ID NO: 81124 - DNA, 53 bp, Glycine max
ctcgagccgagaattctgagaagtaaaaaatatatattttgaatatttaaaaa

SEQ ID NO: 81125 - DNA, 292 bp, Glycine max
ggagcaggtaaagcttttccaaacaagattgtttttgatgataagcttgtgttggctaacacacaagaattctttgatggaaattttccagtggattcttggttaccaatttttgtgaattgtctctatcctgtaagtcaattaccttcagaagctgtcgttgtaaatgttacatgtggtagtggacgtggtggtttacccaccactgcctggattagttttgcaactatcattgactcttgattcatgaaccaatagtttcttgcagcactttggaaagggtccgaaaatt

SEQ ID NO: 81126 - DNA, 259 bp, Glycine max
ttctttccaacttttggcccttcaaggattgggcaaactagggccctggtgctctttacaatgcttcttttttggaccctttcattttttcccgccgagggatccaaaggggtttttgaaggattgaacctccacggtttctttttttttttgaattattggaaagaaacaaggcctgttttgcaagggcttttttgaaaaggttgttcaaaaacctggggtaaacttttaggctttttgactttgggaaaagggacct

SEQ ID NO: 81127 - DNA, 93 bp, Glycine max
tatggctcgtcactccttgctcttagccctgctactatgcgccgacgtggccaccggctggattgcagacgcctcgtccgacgcaccactaca

SEQ ID NO: 81128 - DNA, 340 bp, Glycine max
tacagctcttctataccaagctcagagccctcctacgggggggcgacttggccacctgcgggactgcacactcctgatccaacgcaccacacatctcatccacgccaggtaaagccaaagagtgatctgaacgaagtagcccaaaaagcctactgtacaccgagcgaccaatggaagagcaagcaggtcgagttgggaaggacctactcgaccagggtggtgcacaaactgcggtaaagtttctagcagttcaacctggggaaaatcagactggtcaccaaggtaaccctctccactacacaggtaggtaccaaacattcaattctaactagcttcatgc

SEQ ID NO: 81129 - DNA, 341 bp, Glycine max
aatgcaggatgttcaggttccaattgattggtttatttcctctcaggaatgtgttcccaggacctattgtgttttaaatccacaaaatccttttgtgttaaataggtggatgggaaaactgactttccctcagggcacttcccgaagtgttaagagaatgcctctttctatagggggaggagctggtgcaaagaatgctattctcatgaatatgccaaatgctgttctttcaatgtggagatattttgttggagatctcgtctttgaagtttctaagatgacttctccctacattaaatgtacagtctttttcttcatagcatttggaaatttggctgatg

SEQ ID NO: 81130 - DNA, 374 bp, Glycine max
cgggtggttacatttccgaataccattgtgcagattgaaccagacatgaattcaaggtttcagcttttgagtaccactaccaatggtgattttgttcaagggaaagatcttgcaatggttaaagttaatgtagcatgtgctgctgttggcttgacatcaagttacactccaactccattgttggaatctggtttgcaaaaagacagagggttaattgtggagtattttggaaggatgtcttacgttgctcataacgttaatcagccccaagagaaagatttgttggagggaaatttttcctttgatattaaatctcgctctagattgcaaaaagtttcctctacaaaagcacaatttgttagtggaaaaacctt

SEQ ID NO: 81131 - DNA, 131 bp, Glycine max
aaaaaaaaataaaaaaaaaaaaaaaaaaaaaaaaaagggggaaaaaaaaaaaaaaaaacaagaacaaccaccaaaaacaaagaaaactttaaccaacaaaaaaaaaaatttttctgccctctttaaacaaa

SEQ ID NO: 81132 - DNA, 370 bp, Glycine max
gcaacagttagaacaccattgaattttgattctagcgagcagagcttttgtcaattttctattgaccttctcggtggaggaattttagtggacaaaactggagattggatcacacttatacaaaattctccaattagtaacttgttgagagttgctgcttggaagaaaggctgtttaatggtcaagattgtgatgtctgggaatgcagcagtcaaaaggagtgattgggcctcattggtacaagtgtttttaacaaacagcaacagtacagagcattttgatgcatgtaagtggacaaaatcagaaccacattcctgggaattgatcttcccaatagaaggttgtggttctaataatggttttgaaatgt

SEQ ID NO: 81133 - DNA, 410 bp, Glycine max
  unsure (1)..(410): unsure at all n locations
gagcangacgcgcagcacgcgacgaagctcggaatcggctcgagcacagagatatagcagaaaaaaaccgcgccaggggagagcttcaagtatgaccgtacacaccatcaaaaacgtagattgagggggagcccgtggagccacattctctaaagaagctaatctttaagtttttgctgcgcgctcttgtttttttttctttcatttattgtctccttgtttctttttatgctctatgcaagtaaattcttattttttacaatgtgtgcttggttttttgttgtatcaaaatcactgcttattaacctgtctatcaagttagttctgttacacagtattcatggccttttaacacttttgttctttcaggttcattagatttcattgttttttattaaggttgtccctta

SEQ ID NO: 81134 - DNA, 371 bp, Glycine max
cacggatctgcacggggttcagttcttcgtgaagtcggcggcgtttgatgtgaattatccgcccgggagtgatgctcgtgaggcagttgaggagagtgtgatgaaggattataggagtatgctgagaagatactgtcaggtggagatgcagagacggagctggaataggaatctgccagctcctcactgtgataagctgcataactttgcagtgatggcatgaaggtttgtgaattttcctttcctgtctggtaagagtactacttggattggtgattaaatgttggactccggtgacaccattttacggtaaaaaaaatggcaaaacaataatctaatgcatcttgcttactcatacagtttcaattacg

SEQ ID NO: 81135 - DNA, 375 bp, Glycine max
aacctcattatttttcgggccataatcttgaaaatccaggagcttatcttgtcaatctcggtaatgtggtacgagaattgtatttgcacagtccagaagaagctcgccaattgagaaagaaagctctctctcgtattgaatggctgcaaaaagctgatgtgcctaccatagcacagattgaagagttccattcgatgcagaagatgatgaatgctcctgattcaaatgataatattgatctactgttgagcattgatttgttgggtttacaaggagcaggtaaagcttttccaaacaagattgtttttgatgataagcttgtgttggctaacacacaagaattctttgatggaaattttccagtggattcttggt

SEQ ID NO: 81136 - DNA, 369 bp, Glycine max
gggaaaactgactttcccccagggcacttcccgaagtgttaagagaatgcctctttctatagggggaggagctggtgcaaagaatgctattctcatgaatatgccaaatgctgttctttcaatgtggagatattttgttggagatctcgtctttgaagtttctaagatgacttctccctacattaaatgtacagtctctttcttcatagcatttggaaatttggctgatgacaccatcaattttgaggcttttccccacaagctggtgcagtttggagagattcaggaaaaagttgtattgaaattttcacaagaggaatttcttacagcttggtcaactcaagtgcgtcctgcaacaactctgttagc

SEQ ID NO: 81137 - DNA, 378 bp, Glycine max
ctcgagcttttctagccgcgctcttctggccgattgtgcagtctccgtcatcatggcatctccacagcagctccgcaccaccaccaccgatctgctcaagatcaaccaccccgtcctcctggccggcatgaacgtcgctgccggccccaagctggctgctgctgtcaccaacgccggcggtctcggtgtcattggcggcgtcggatacacgcccgacatgctgcgggagcagatcgccgagctcaagggctacctgaaggacaagaacgctcccttcggcgtcgatctgctgctgccgcaggtcggcggaagcgcccgcaagaccaactacgactacaccaagggcaagcttgacgagctcattaccatcatcatcgg

SEQ ID NO: 81138 - DNA, 376 bp, Glycine max
gaattttattggacaaaactggagattggatcacacttatacaaaattctccaattagtaacttattgagagttgctgcttggaagaaaggctgtttaatggtcaagattgtgatgtctgggaatgcatcagtcaaaaggagtgattgggcctcattggtacaagtgtttttaacaaacagcaacagtacagagcattttgatgcatgtcagtggacaaaatcagaaccacatttctgggaattgatcttcccaatagaggtatgtgggcctaataatggttttgaaatgtggagttctgagtgggcaaatcaaacttcatggcatttgagtttgcttattgacaatcccaaacagtctacagattttgatattct

SEQ ID NO: 81139 - DNA, 374 bp, Glycine max
acaggacactatcaactcgaccgagtcagccaatgccatgaccgccatactctgcgtcatagtcatcatcatcatcatcatgcagagcgcagcgtcatcgtcgccgtcgccggaggccattctggaatggctgcacaaagaaatgggctaccgtccgctcggcacctacgcctccggcaagtcgcacctgccgtccgtcgactccatccgccggatttgccgcggcaacatgattccggtcttgaacttcctcgtcacgcgcgccaagtccgagaagaccgtgcggaacatccgccggaacatcaccgtgcacggcggctcaaacggcggctgagaggcgaaggaggagggaagggggaagggcgcgaggaaga

SEQ ID NO: 81140 - DNA, 330 bp, Glycine max
  unsure (1)..(330): unsure at all n locations
gtgtttgatgggactataggtggctcttctgatgctgtggggaaattgacagaggcagacttgagatttttatttgttacctaagcaggctttgttatctcgaccagaaatttctcgatgcttctggtcattcatttctcgatttttttttttatatatatagaaaaaagcattagctgtaaattattggcccaccgtagnngcctcagccaaagaaacccagcactgtgctgttgaatagcgggattttgaagcttcaggttttctatttcaatcgtggaatgtcaactattaattttttgacaaaaaaaaaaaaataaaaatattaaa

SEQ ID NO: 81141 - DNA, 274 bp, Glycine max
gaagagacgtgacatgcactcctccctaacctcagctttgaattccggtcaggcatatatttttagcatgcttcaaatctacctcccgctgggctccttgtgcaccatactatctccttatcaccatccaacttcactcgaactacaaatatgtatagcctgctgaagcctcgaacactcacattctgatccattcacaagaccatctacatactgcccctttaagctttgaaaccgctcttcaccctttgctgaacgaaaaaacaaagcacct

SEQ ID NO: 81142 - DNA, 126 bp, Glycine max
ccgcgacgaagctcggaatggctcggaagctttttttgatggacagcaaatggttggggggttttatggtatcttcacgattgaggcttgatgttcaacttcatgatttatgagactattgtgaca

SEQ ID NO: 81143 - DNA, 405 bp, Glycine max
tgatgataacttaattagtgttcatgaatatgtcaagccttactttagtggttctaaattgaaaagctttctagctggtcataatatcaccattactgatggtattgacaaaactagtgcaactttgcaatttagaaagttagcagattgtgattttctcaagagaaactttaagcagatgtctaatgttttatgggtggctcctgaggacaaggcgagtttatggtcacaacttcattatgtttcgtgcaataatctggaaatgcaagaagcttatcttgtcaattctcgtaaatgtgttacgagaattgtatttgcacagtccagaggaagctcgccaattgagaaggaaagctctctctcgtattgaatggctgcaaaaagctgatgtgcctaccatagcac

SEQ ID NO: 81144 - DNA, 404 bp, Glycine max
atgaatatgtcaagccttactttagtggttctaaattgaaaagcgttctagctggtcataatatcaccattactgatggtattgacaaaactagtgcaactttgcaatttagaaagttagcagattgtgattttctcaagagaaactttaggcagatgtctaatgttttgtgggtggctcctgaggacaaggcgagtttatggtcacaacttcattatgtttcatgtaataatctggaaatgcaagaagcttatcttgtcaatctcgtaaatgtgttacgagaattgtatttgcacagtccagaggaagctcgccaattgagaaagaaagctctctctcgtattgaatggcttcaaaaaagctgatgtgcctaccatagcacagattgaagagtccattcgatg

SEQ ID NO: 81145 - DNA, 259 bp, Glycine max
  unsure (1)..(259): unsure at all n locations
gttcatctccatggccataggatatctgattgatgccaggtttgtgatgaatgcatatggggagttggtgnctggaggttacacacaaactatattagaaagagggttcaccttagctcttgttggtaatagggtgcattgagtagcttgattctatatttaatggattatcggttcatatttattatattgagagtaattggtatcttcatttttttttatttttttaattattttatattctcatataatttatttt

SEQ ID NO: 81146 - DNA, 411 bp, Glycine max
cggctcgagcctgaattacagaatcaaatatggacaatatttaagaaatatgaaagctcaattgaagtcgaaatacagcaaagatctgttgaatattttgcattgagtagaaaagtctgcattgatcaaaaaggctgaagacactgaagtcgatacagcggaactaagtgctataaagttacgagctcagcagcaatcccaaacatcaaatgctttggttgtaacaggccaaagtcatgctaatggaactccacctgttggccaacttagccttgtaaaggtgcccagcatgagtagcaatgcggatgaggcagatcaaagattatcccaggaaaatgggactttgagtaaagtagattctcaacctccctctgcagatctccttggtgatctcttgggtccacttgctat

SEQ ID NO: 81147 - DNA, 408 bp, Glycine max
gatgtcttacgttgctcacaacgttaatcagccccaagagaaagatttgttggagggaaatttttcctttgatattaaatctcgctctagattggaaaaagtttcctctacaaaagcacaatttgttagtggaaaaaccttcaaatatgatataattggtgctggttcacattcttcagaagattttcctgaaaaggaagatcaagaaaaacccaaaaagattgataccagattgagacaaagaatagatcctcaatacaatgaggttcaggctcagatggaaacaaatttggttaaaatggtctttggatgatgttgaaactcctaaaggttccatgttggatcttaaaatttctcaatctaaaattgcacttcccaaaaacacagttggaggaaccattctgcgta

SEQ ID NO: 81148 - DNA, 133 bp, Glycine max
  unsure (1)..(133): unsure at all n locations
acgcgtacgtaagctaggaattcgacaagttttatttaaatttttaaattaaaaaaaaaaaaaaaaaaacttaaacggtaaaaataaaaaaagggggctggggaaaaaaaaaaaaaaaaaaaanaaataatac

SEQ ID NO: 81149 - DNA, 404 bp, Glycine max
atggtgatgataacttaattagtgttcatgaatatgtcaagccttactttagtggttctaaattgaaaagctttctagctggtcataatatcaccattactgatggtattgacaaaactagtgcaactttgcaatttagaaagttagcagattgtgattttctcaagagaaactttaagcagatgtctaatgttttatgggtggctcctgaggacaaggcgagtttatggtcacaacttcattatgtttcgtgcaataatctggaaatgcaagaagcttatcttgtcaatctcgtaaatgtgttacgagaattgtatttgcacagtccagaggaagctcgccaattgagaaggaaagctctctctcgtattgaatggctgcaaaaagctgatgtgcctaccata

SEQ ID NO: 81150 - DNA, 99 bp, Glycine max
ggcataatttgtaaatgaagcttattaagaggttgtttgtgatattgttgtaaatttgtaacttttaagttgtaaatttataattttgttgtgttaaaa

SEQ ID NO: 81151 - DNA, 128 bp, Glycine max
  unsure (1)..(128): unsure at all n locations
agaccacgggagnaattatatcttccacacgttttctcgacattacttgagtcactgttattgcgggcncaggggannganncnactctnncctcancanngnntgtngantcaatcacctgagaacg

SEQ ID NO: 81152 - DNA, 334 bp, Glycine max
gcaacataaacaagttcccctttctttgcttcttgtggtggggtttttctctttccttgatcccttgctttgttatccttttcttcactttttctctcaccaattttctctcttctcacaccttcttgttgttttgtaattttccattttattaaaaaaaaggcaaaattgaatttaatatttaaaaggttatttttttattctagaatttttgtttcacgcaaccacatgcatgttctcttcatgcttgtctgatctggattggatcactagaatctttgccatctgcgctttttgtttggtacatgaagggtagtagtgagtggtgtggggg

SEQ ID NO: 81153 - DNA, 102 bp, Glycine max
cagaagggttggtggctgagaaatcataattaccctttcctcttttcctgttgaatacttgttttatatcatatatatacactagcctttttgttgtcaaaa

SEQ ID NO: 81154 - DNA, 438 bp, Glycine max
  unsure (1)..(438): unsure at all n locations
gtccgtaagttcgaaattcggttcgggctgaggccaaggcgagtttatgttcacaacttcattatgtttcgggtagtgatctggaaatgcaggaagctgatcttgtcaacctcgaaaatgtgttacgagaattgtatttgcacagtccagaggaagctcgccaattgagaaggaaagctctctctcgtattgaatggctgcaaaaagctgatgtgcctaccatagcacagattgaagagttccattcgatgcagaggatgatgaatgctcctgattcaaatgataatattgatttactgttgagcattgatttgttgggtttacaaggagcaggtaaagcttttccaaacaaaattgttnttgatgataagcttgtgttggctaacacacaagaattctttgatggaaattttccagtggattcttggttaccaattt

SEQ ID NO: 81155 - DNA, 84 bp, Glycine max
caattcacaaaaattgtttctattctgtaagtcaattaccttcagaagctgtcgttgtaaatgttacatgtggtagtggacgtg

SEQ ID NO: 81156 - DNA, 346 bp, Glycine max
aaccaacatagctatttcaatcttctgttaccatgagtggacaagtcaagacaattgcccgcattctgcaggcagcaggttccgctatacaagcaaatggcaatctcgtcctcctcaatgtggagaatggccaccttgtagagaggatctttgacggggaggaactcaaagaccagagactggtcgtggatggcgtgaagtctggcgcattcgcagccttcgtcgtttcagacaaccatgccttgatcctctacattactgatgggggtgaactcaaggctagggagtttgaccccgactcaaaagagtgggatgagtctgagctcaatggcttgggcgaaatcaa

SEQ ID NO: 81157 - DNA, 99 bp, Glycine max
gtagttgcgtataatgtgacagtctcaaagggcactttccaccaacacagtgctatgaaccatggtgattggcgatctattgcactaaacaatgactga

SEQ ID NO: 81158 - DNA, 407 bp, Glycine max
agctggtgcagtttggttagattcaggaaaaagttgtgttgaaattttcacatgaggaatttcttacagcttggtcaactcatgtgcgtcccgcaacgactctgttggctgatgggtgcccatatttgtatgctatggtgcatgatagttcagtgtctacaataccaggtgattttgtcattggtgttaagttgacaaccataaacaatatgtgtgcatatgggctcaatcctggtatttcaggttctcgtcttttgggcaccattcctcagtccatttcacagcaaactgtttggaatcaaatggcaacagtgagaacaccattgaattttgattctagcaagcagagcttttgtcaattttctattgaccttctcggtggaggaattttagtggacaaaactggg

SEQ ID NO: 81159 - DNA, 238 bp, Glycine max
cccatacgttatcacttttgtgtcaaccttgctcaaccaaatttgtacgtttctaaagcacaagggggggagaaatcatattgatggacctactgctgaaggaaaaaacactatccaagctgatccctttgagcaacaaactctgaaccaaatcatctacagtttgtttagctcaaatgactccccatcctgaaagagaaaaaacagccctttcaaaatttcattgtcatccatcatc

SEQ ID NO: 81160 - DNA, 410 bp, Glycine max
gtgttaaataggtggatgggaaaactgactttccctcagggcacttcccgaagtgttaagagaatgcctctttctatagggggaggagctggtgcaaagaatgctattctcatgaatatgccaaatgctgttctttcaatgtggagatattttgttggagatctcgtctttgaagtttctaagatgacttctccctacattaaatgtacagtctctttcttcatagcatttggaaatttggctgatgacaccatcaattttgaggcttttccccacaagctggtgcagtttggagagattcaggaaaaagttgtgttgaaattttcacaagaggaatttcttacagcttggtcaactcaagtgcgtcccgcaacgactctgttggctgatgggtgcccatatttgtatgc

SEQ ID NO: 81161 - DNA, 186 bp, Glycine max
ctctgaacgcgatcttgcatggcacgccaaggacgcaactaactagctaggtatgtatttttcatgcggcggagaccattcaaaatactatgctacatctgcgccagaacaacccgctatgacaaccctaatcacacatcaagttctacatcaaaggcacgcgaatacaaaaactcaacacggaca

SEQ ID NO: 81162 - DNA, 326 bp, Glycine max
gacacgcgagcatgcatgcacgccgactctagcggatcctctcgggtgaagtgcaattgcacatgctctagaaatagcggatgcaaaaatggacatgtgtgaatcggaagaatgggttaacattactaagcctattcgcaatccaaaagaaatgaaatcggcaaaactaccagaatatcaattccacattgaaaagacataaggaggtaaacatgaacatatatgaactggaagaattacgcatacttattacatctatccggaaaccaaaggaaaggaagaacggaaatcctcgacgaataacaagttcacattatgaagaaata

SEQ ID NO: 81163 - DNA, 340 bp, Glycine max
ggccttatgatctactttgacttgcgtttaaaattatggttccgagcaaacacatcaccaacttcatcaccaacactaataacaggattagcgttatgggtctcttgctttctaggaattggcctagcaaactcatataccctgttctttacatcaataaggtttcaaaggatgatgatcccgcaccaatatggagaacatggtggttgtgggatatgctagactggcgggcgtttgcagcgctatgacaaatgctgtggacatgttgtgggatgcattccttccagatgcaagaacaatgaggcacaggtttaggtattagaggttcttgagatttgtg

SEQ ID NO: 81164 - DNA, 129 bp, Glycine max
attgaattaaacaaacgaacaagcgaaagaaaattaggcatgaccctcttgttgagtatgctctgcctatctgaaaatttccacacctcttttaattgtcgtaatgatgtgtgaagtgtgtgttatttt

SEQ ID NO: 81165 - DNA, 465 bp, Glycine max
gagcaagatggcagaaatgataaacagtctttgtggtggtgatgaaaaattgatgcgtgaaaggacgcacctgctgttggcttgttgttcaaggatggcaatttgtaagaaagatgtttggagagttgaatgtggaatcccttctggatttccgctcacagttatttgcaatagcatttttaatgagatgctcattagatatagctatgaaaaattactgcgccaggctaaagctccaagtatgtttttacaatccttcaaaaattttgtttctttgtgtgtgtatggtgatgataacttaattagtgttcatgaatatgtcaagccttactttagtggttctaaattgaaaagctttctagctggtcataatatcaccattactgatggtattgacaaaactagtgcaactttgcaatttaaaaagttagcagattgtgattttctcaagagaaactttaagca

SEQ ID NO: 81166 - DNA, 444 bp, Glycine max
attggtttaaatccacaaaatccttttgtgttaaataggtggatgggaaaactgactttccctcagggcacttcccgaagtgttaagagaatgcctctttctatagggggaggagctggtgcaaagaatgctattctcatgaatatgccaaatgctgttctttcaatgtggagatattttgttggagatctcgtctttgaagtttctaagatgacttctccctacattaaatgtacagtctctttcttcatagcatttggaaatttggctgatgacaccatcaattttgaggcttttccccacaagctggtgcagtttggagagattcacgaaaaagttgtgttgaaattttcacaagacgaatttcttacagcttggtcaactcaggtgcgtcccgcaacgactctgttggctgatgggtgcccatatttgtatgctatggtg

SEQ ID NO: 81167 - DNA, 462 bp, Glycine max
cggctcgagcggctcgagcggctcgagactagttctaggaggagctggtgcaaagaatgctattctcatgaatatgccaaatgctgttctttcaatgtggagatattttgttggagatctcgtctttgaagtttctaagatgacttctccctacattaaatgtacagtctctttcttcatagcatttggaaatttggctgatgacaccatcaattttgaggcttttccccacaagctggtgcagtttggagagattcaggaaaaagttgtgttgaaattttcacaagaggaatttcttacagcttggtcaactcaagtgcgtcccgcaacgactctgttggctgatgggtgcccatatttgtatgctatggtgcatgataggtcagtgtctacaataccaagtgattttgtcattggtggtagttgacaaccataaacaatatgtgtgcatatgggctcaat

SEQ ID NO: 81168 - DNA, 245 bp, Glycine max
ctttaaattgccgaaattacgtgtgaagagtgtgttatttgaaaaaaagggaaacaataaaatacgggggaggggaccaaaaaaacaaaataaaaatgcaaaaaaaatcaaatactacaactaaaaacataaaggggaacaaaccaaaaaaaacctaaaaggggcggaccccaccatacggggctgtcccaccccaaattaattttcgggacccctaattaaattcaaccccgttcccccaaggg

SEQ ID NO: 81169 - DNA, 406 bp, Glycine max
agcttatcttgtcaatctcgtaaatgtgttacgagaattgtatttgcacagtccagaggaagctcgccaattgagaaggaaagctctctctcgtattgaatggctgcaaaaagctgatgtgcctaccatagcacagattgaagagttccattcgatgcagaggatgatgaatgctcctgattcaaatgataatattgatctactgttgagcattgatttgttgggtttacaaggagcaggtaaagcttttccaaacaagattgtttttgatgataagcttgtgttggctaacacacaagaattctttgatggaaattttccagtggattcttggttaccaatttttgtgaattgtctttatccctgaagtcaattaccttcagaagctgtcgtggaaatgttacat

SEQ ID NO: 81170 - DNA, 435 bp, Glycine max
  unsure (1)..(435): unsure at all n locations
cagagaggggctgctgcagttctttactgggtgcaggtgtaatgttcgcaaaatcgatcttcgtttgcctctggacctcaacaacgaccatctcttggcggtggcaaagaatttcgatgggctcacgagcataaggcttcagagctgctgcctcgttaggggggggggccngaaagcnncaccgaancatattcatcagcataatataaactgaacctggttaacagagctaaagtgcccagctttaacacctaccacgaccaccgaacccgatttaatgcacgaatgcagagagacaccaaaagggccgactacctgcttcggcgcctggctgtcggaaaacccacctacgccgcggaggcattcgggtcggacgtggtttccggaatggagcaaggtagcggagaatacttcgggagaatcggagttggaagc

SEQ ID NO: 81171 - DNA, 170 bp, Glycine max
tctccaaactgcaccagcttggagagattcaggaaaaagttgtgttgaaattttcacaagaggaatttcttacagcttggtcaactcaggtgcgtcccgcaacgactctgttggctgatgggtgcccatatttgtatgctatggtgcatgatagttcagtgtctacaaaa

SEQ ID NO: 81172 - DNA, 437 bp, Glycine max
attggaaaaagtttcctttacaaaagcacaatttgttagtggaaaaaccttcaaatatgatataattggtgctggttcacattcttcaggagattttcctgaaaaggaagatcaagaaaaacccaaaaagattgataccagattgagacaaagaatagatcctcaatacaatgaggttcaggctcagatggaaacaaatttgtttaaattgtctcttgatgatgttgaaactcctaaaggttctatgttggatcttaaaatttctcaatctaaaattgcacttcccaagaacacagttggaggaaccattctgcgtagtgatctattggcaaattttttgacagaaggcaattttagagcaagtgttgatttgcagcgcactcatcgtattaaaggaatgattaaaatggtggccacagttggtattcctgagaata

SEQ ID NO: 81173 - DNA, 305 bp, Glycine max
ctcgagccgcaatcccaaacagtctacagtttttgatattctcttgggaatctctcaagattttgaaattgctggtaatactcttatgccagctttttctgttccacaggctactgccagatcttctgaaaatgcggaatcctctgcatgatctggaattcgtgttttctttcgcttgttcgtttgtttaattcaataaaggaaattaggcatgaccctcttgttgagtatgctctgcctatctgaaaatttccacacctcttttaattgtcgtaatgatgtgtgaagtgtgtgttattttaaaa

SEQ ID NO: 81174 - DNA, 431 bp, Glycine max
ctagtgcaactttgcaatttagaaagttagcagattgtgattttctcaagagaaactttaagcagatgtctaatgttttgtgggtggctcctgaagacaaggcgagtttatggtcacaacttcattatgtttcgtgtaataatctggaaatgcaagaagcttatcttgtcaatctcgtaaatgtgttacgagaactgtatttgcacagtccagaggaagctcgccaattgagaaggaaagctctctctcgtattgaatggctgcaaaaagctgatgtgcctaccatagcacagattgaagagttccattcgatgcagaggatgatgaatgctcctgattcaaatgataatattgatctactgttgagcattgatttggtgggtttacaaggagcaagcaaagcttttccaaacaagattgtttttgatgat

SEQ ID NO: 81175 - DNA, 455 bp, Glycine max
  unsure (1)..(455): unsure at all n locations
ggaaaaagttgtgttgtaattttcacaagaggaatttcttacagcttggtcaactcaggtgcgtcccgcaacgactctgttggctgatgggtgcccatatttgtatgctatggtgcatgatagttcagtgtctacaataccaggtgattttgtcattggtgttaagttgacaaccataaacaatatgtgtgcatatgggctcaatcctggtatttcaggttctcgtcttttgggcaccattcctcagtccatttcacagcaaactgtttggaatcaaatggcaacagtgagaacaccattgaattttgattctagcaagcagagcttttgtcaattttctattgaccttctcggtggaggaattttagtggacaaaactggagattggatcacacttatacaaaattctncaattagtaacttgttgagagttgctgcttggaaaaaaggtggtt

SEQ ID NO: 81176 - DNA, 292 bp, Glycine max
gccagatcttctgaaaatgcggaatcctctgcatgatctggaatttgtgttttctttcgcttgttcgtttgtttaattcaataaaggaaattaggcatgaccctcttgttgagtatgctctgcctatttgaaaatttccacacctcttttaattgtcgtaatgatgtgtgaagtgtgtgttattttaaaaaaaaaaaaaaaaaaaaaataaaaataaaaaaaaaaaaggaagaacttaaaaaacttggcaagccgccctatacttgaatttttgactcaaacgtggagttgg

SEQ ID NO: 81177 - DNA, 145 bp, Glycine max
cttttgagttgaaatgcatgatggactccaattttgaagaactgaagtctgaaaccttcaagagatggggtacacaagttttttttgtgcaaaaaaaaaacaaaaggggaaaaaaaaaataaaaaaaaaaaaaaaaaaataaaat

SEQ ID NO: 81178 - DNA, 197 bp, Glycine max
atcataaagagatatgatttaagaacttgatcttgaattgcatggtgaagggggggtcgacggcttgcgtactatgtgacccgggaatgaactccggaccgatacctgatggcaaaccagctttccgtatgctgagagctttagagcgtgcggagaaaggagaataggagcggcctgtgaaaaaggggaatacgatg

SEQ ID NO: 81179 - DNA, 392 bp, Glycine max
caagataaagatttgtttgagggaaatttttcctttgatattaaatctcgctctagattggaaaaagtttcctctacaaaagcacaatttgttagtggaaaaaccttcaaatatgatataattggtgctggttcacattcttcaggagattttcctgaaaaggaagatcaagaaaaacccaaaaagattgataccagattgagacagagaatagatcctcaatacaatgaggttcaggctcagatggaaacaaatttgtttaaattgtctcttgatgatgttgaaactcctaaaggttctatgttggatcttaaaatttctcaatctaaaattgcacttcccaagaacacagttggaggaaccattctgcgtaggatctattggcaaatttt

SEQ ID NO: 81180 - DNA, 370 bp, Glycine max
tagctatgaaaaattactgcgccaggctagagctccaagtatgtttttacaatccttcaaaaattttgtttctttgtgtgtgtatggtgatgataacttaattagtgttcatgaatatgtcaagccttactttagtggttctaaattgaaaagctttctagctggtcataatatcaccattactgatggtattgacaaaactagtgcaactttgcaatttagaaagttagcagattgtgattttctcaagagaaactttaagcagatgtctaatgttttgtgggtggctcctgaggacaaggcgagtttatggtcacaacttcattatgtttcgtgtaataatctggaaatgcaagaagcttatcttgtc

SEQ ID NO: 81181 - DNA, 373 bp, Glycine max
tttggctgatgacaccatcaattttgaggcttttccccacaagttggtgcagtttggagagattcaggaaaaagttgtattgaaattttcacaagaggaatttcttacagcttggtcaactcaggtgcgtcctacaacaactctgttggctgatgggtgtccatatttgtatgctatggtgcatgatagttcagtgtctacaataccaggtgattttgtaattggtgttaagttgacaaccataaacaatatgtgtgcatatgggctcaatcctggtatttcaggttctcgtcttttgggcaccattcctcagtctatttcacagcaaactgtttggaatcaaatggcaacagtgagaacaccattgaatttt

SEQ ID NO: 81182 - DNA, 379 bp, Glycine max
gagaatatacgttactttcaaaaaaaagattgtgagaggagaagtattgaagtattgcataatggaaataatgaacagtgagaaaggcaaagaggtgaaaagaaatattatgcaatggaaggctttggctgcacgagctgttagtgaggaaggaagttctcataaaaacattgcagaattcgtgaatagcttgttcaatttaaaacagggaattgcaaattatcctgattaaaccaagcagtttgtttgtatactatatatggtgcatctttgtagaaaatgacacctttgtgggtcatgatgaagaagttataatttaaataaacaagtggaataaatttggatgttcacaaactgttatgaatgggaagctacgtgc

SEQ ID NO: 81183 - DNA, 373 bp, Glycine max
tgcagagatcacgtgaagctcttctacatagaagaagagctaaaactgggtctggctataaactctctctctcattgctttttcttttgtggcctctaatcttccgcgctcatggttaccccgcacccacaggtaaataaattgcaattatgggtcttgcttttgagaataatcaaaacaatattcttgttagtcactttattatctatggatgtagagtctaattggaagcaaaataagcaaggacagtgtaaaacctctaattttgctaataaatgtttgctcaaagaaactcatgattacattctccctgaccctgaagatgctgagtcagtcccaaatgatagtgatactcccactagagaggatgtgc

SEQ ID NO: 81184 - DNA, 291 bp, Glycine max
gtgcagaatggatgacaagacgttgccggctctctttgagtgagacacgatgatccacttcgcaaacaccgttaccggtgacaacaacaacgttgaggagaaggggtgcgacgctatgcataaatgcgaggacatgatccatgatatgggatggatctctcccaaccagaccaaactaaatttcagcagcaagaatctgaagaacattgtggcgtcattgtatactgcatagataacgggtacaatctcacactatgactggatatacattgtggagtcttgacacgcaag

SEQ ID NO: 81185 - DNA, 371 bp, Glycine max
tgtggaacagccgaaacctgtggtgtgtgctgtgcttgacttgagtattgaacatcgattgttaattggaagtgaaagaaagtagattgaattgaagaacaaaggcaatgccaggtcctggtcctcacctcatgtatgccatgggttctggtttgtgtctcacaagcatcagcaatggaaggttcggtccccaccacacactcttctacaccattaacgccttctttggccctgatgttggttccttcacggagtggcttggttcactctttggtggttctgctcatgctttgggatcttcccttgaagatctcattcaccatcccttcttctacatccttcttttaagacttcctctctcttttctctat

SEQ ID NO: 81186 - DNA, 356 bp, Glycine max
agagattgtctctttctatatggggaggagctggtgcaaagaatgctattctcatgaatatgccaaatgctgttctttcaatgtggagatattttgttggagatctcgtctttgaagtttctaagatgacttcttcctacattaaatgtacagtctctttcttcatagcatttggaaatttggctgatgacaccatcaattttgaggctttttcccacaagctggtgcagtttggagagattcatgcaaaagttgtgttggaattttcacaagaggaatttcttacagcttggtcaactcaggtgcgtcccgcaacgactctgttggccgatgggtgcccatatttgtatgctatg

SEQ ID NO: 81187 - DNA, 378 bp, Glycine max
ctccatcgagaaggtttttagaattttagtggacaaaactggagattggatcacacttatacaaaattctccaattagtaacttgttgagagttgctgcttggaagaaaggctgtttaatggtcaagattgtgatgtctgggaatgcagcagtcaaaaggagtgattgggcctcattggtacaagtgtttttaacaaacagcaacagtacagagcattttgatgcatgtaagtggacaaaatcagaaccacattcctgggaattgatcttcccaatagaggtatgtggtcctaataatggttttgaaatgtggagttctgagtgggcaaatcaaacttcatggcatttgagtttccttattgacaatcccaaacagtc

SEQ ID NO: 81188 - DNA, 379 bp, Glycine max
attttggaaggatgtcttacgttgctcataacgttaatcagccccaagagaaagatttgttggagggaaatttttcctttgatattaaatctcgctctagattggaaaaagtttcctctacaaaagctcaatttgttagtggaaaaaccttcaaatatgatataattggtgctggttcacattcttcagaagattttcctgaaaaggaagatcaagaaaaacccaaaaagattgatgccagattgagacaaagaatagatcctcaatacaatgaggttcaggctcagatggaaacaaatttgtttaaattgtctcttgatgatgttgaaactcctaaaggttccatgttgggatcttaaaatttctcaatctaaaattg

SEQ ID NO: 81189 - DNA, 66 bp, Glycine max
  unsure (1)..(66): unsure at all n locations
ccggaacctgccaggcgtnnaccagctttccctattagtgacgtcgtatttagacgcttggcttat

SEQ ID NO: 81190 - DNA, 100 bp, Glycine max
cggatcgagatcggagcaggattctttgctataggaggcgaaactatgctgggtccaaataacgaaaccgtggagttcagaatcacacgcgacgacctcg

SEQ ID NO: 81191 - DNA, 373 bp, Glycine max
ctagacacagttaatctccttactgacgggcagaagaactcacacacacacactttccattttttgtggtactgcttgtgactactataatcttcaaatacctttgatgctacacgatgatatgaatccctttatggcaagcatctgtatatcacctagggagtgcaaaaagagtcagacttagaatactgttatggaaggccaagcgattgaagaattgagagccagtttcttatgatccgtctgctaagaaattattacatatgctttcattcagacacatatggtagcaattgatccctaacagcttgtttctttcttgttggattaaagggggtgtgtatgctaaacctgttgcatacattttttaata

SEQ ID NO: 81192 - DNA, 329 bp, Glycine max
ctcgagcggttccagccgttgctgctagagcatactcgtgcatgtttaacgcgtatggggctaatgccaccactagatactgagctgacagggactgtatactgtgacaaatggggaatccggtgaaccactccacttatctatgacaagaactttggtggacaaaagcatggaacaaacctggatagtggtgacaactgactcgatgcaggctagtaatgctagcacaggcatgatcatatagaccgtaaggtacacacatgggaggagagacttgggaccatctaagggatgggcatacctatcgaacggatgctatctagtggagg

SEQ ID NO: 81193 - DNA, 378 bp, Glycine max
ctatggtgcatgatagttcagtgtctacaataccaggtgattttgtcattggtgttaagttgacaaccataaacaatatgtgtgcatatgggctcaatcctggtatttcaggttctcgtcttttgggcaccattcctcagtccatttcacagcaaactgtttggaatcaaatggcaacagtgagaacaccattgaattttgattctagcaagcagagcttttgtcaattttctattgaccttctcggtggaggaattttagtggacaaaactggagattggatcacacttatacaaaattctccaattagtaacttgttgagagttgctgcttggaagaaaggttgtttaatggtcaagattgtgatgtctgggaatg

SEQ ID NO: 81194 - DNA, 370 bp, Glycine max
cagagcttttgtcaattttctattgaccttctcggtggaggaattttagtggacaaaactggagattggatcacacttatacaaaattctccaattagtaacttgttgagagttgctgcttggaagaaaggctgtttaatggttaagattgtgatgtctgggaatgcagcagtcaaaaggagtgattgggcctcattggtacaagtgtttttaacaaacagcaacagtacagagcattttgatgcatgcaagtggacaaaatcggaaccacattcctgggaattgattttcccaatagaggtatgtggtcctaacaatggttttgaaatgtggagttctgagtgggcaaatcaaacttcatggcatttga

SEQ ID NO: 81195 - DNA, 370 bp, Glycine max
gttctttcaatgtggagatattttgttggagatctcgtctttgaagtttctaagatgacttctccctacattaaatgtacagtctctttcttcatagcatttggaaatttggctgatgataccatcaattttgaggcttttccccacaagctggtgcagtttggagagattcaggaaaaagttgtattgaaattttcacaagaggaatttcttacagcttggtcaactcaggtgcgtcctgcaacaactctgttggctgatgggtgtccatatttgtatgcaatggtgcatgatagttcagtgtctacaataccaggtgattttgtcattggtgtcaagttgacaaccataaacaatatgtgtgcatatg

SEQ ID NO: 81196 - DNA, 83 bp, Glycine max
  unsure (1)..(83): unsure at all n locations
ttaaaaattttaaaaaaaaaaaaaaaaggggaaaatgggaaaataaaaaaaggaaatccgaaaaaaaaaaaaatantatatat

SEQ ID NO: 81197 - DNA, 136 bp, Glycine max
  unsure (1)..(136): unsure at all n locations
agagccangacggcgcatgcacgcgtacataagctcgtaatccggctcatatatacttttttaaaaccaaacacaaaaccgcaaatttgatatatttacccgctccaccacctaaacaaatatcttacttaaaccc

SEQ ID NO: 81198 - DNA, 370 bp, Glycine max
cttaacaatctcgtatctcgtaatatataaatacgcggtccttccactccttcttctgaccattaaaaaaaccctgtgcaccaagaaaggtaacttgaaaccccagccctagaaccttcctctggaatcctccccaatgttataacccctacccatttctcttctcatcgctccaagaaaaacccagaaagcaaaatcgcaacttgatcattaattaatcagggacatggttgaaaagaagagatcatggctctctaagaggctcaagagagagtcactgaggtggaagtacctgggtgctgcattcaagtggaagaggctttcctctttgccagtttccttcttcaacaacgtcgctttcaagattctc

SEQ ID NO: 81199 - DNA, 375 bp, Glycine max
gttgggtttacaaggagcaggtaaagcttttccaaacaagattgtttttgatgataagcttgtgttggctaacacacaagaattctttgatggaaattttccagtggattcttggttaccaatttttgtgaattgtctctatcctgtaagtcaattaccttcagaagctgtcgttgtaaatgttacatgtggtagtggacggtgtggtttacccaccactgcttggattagttctgcagttaacaatcgctcctcagacatcaacaaaaggattcgcacagcacttgggaaaggtaagaaaattgtttttcttactagagttgatccttttccagtagctttattggctgttctttttggcgttaagaatgaaat

SEQ ID NO: 81200 - DNA, 155 bp, Glycine max
gtgtgttcgggaaagatgagtggtgccgatagggctgcattggaatccaccactagtgtttgggcacttgtgcaaagaagccatgggcttcttccaaagaggggctttttcactggggcagaacaaccacctttggattcaacgccccggccttc

SEQ ID NO: 81201 - DNA, 383 bp, Glycine max
gtgtattatcatttcaacattttccttttcttatcactttatttatttaattattttttattatatttaaagaaaaaataattaatatatctaaaacttataaaaagaaacctgcatgaatataaatttttttacataatcattctatcacaatctataactcataaccataatgtataataagtttgttaatttttaaaatagttattttaaaataattcaaacaatgatttattattaaataagagtataaaattattatttaatgcataaaccttaaactcaaataataattgtcatatttagaaataaatccttatattaaattcattcaaattttgtaggacgatacattaattggggacatgtcttctgttgacatg

SEQ ID NO: 81202 - DNA, 242 bp, Glycine max
aggcacgcgacgaaagctcggaattcggttcgagctccctttaaacaaccatggggtgttggtccatggttaaaggaaattaaggacactactaaagaaggatatagttttgaagagctatgcatcaagaaagaagccattgagggagaagagaagttttgtgcaaaatccttgggaacagtaattggttttgccatttcaaagctgggaaagaacattcaagtactttcaagttcctttgt

SEQ ID NO: 81203 - DNA, 204 bp, Glycine max
  unsure (1)..(204): unsure at all n locations
cgcatcgcacgcgtaccgtaanngctcggatatttcggctcgagggctntgttttatcattttttttttactttcctctcacgccctctgccacaagggannntccgtctcnncgcaattaaccgggagagtaaaaaaaccaagnntttaattacctnnattatggcnngccganngggatcaatannagacaagnncaacgct

SEQ ID NO: 81204 - DNA, 456 bp, Glycine max
gagcatctcattaaaaatagctatgaaaaattactgcgccaggctaaagctccaagtatgtttttacaatccttcaaaaattttgtttctttgtgtgtgtatggtgatgataacttaattagtgttcatgaatatgtcaagccttactttagtggttctaaattgaaaagctttctagctggtcataatatcaccattactgatggtattgacaaaactagtgcaactttgcaatttagaaagttagcagattgtgattttctcaagagaaactttaagcagatgtctaatgttttatgggtggctcctgaggacaaggcgagtttatggtcacaacttcattatgtttcgtgcaataatctggaaatgcaagaagcttatcttgtcaatctcgtaaatgtgttacgagaattgtatttgcacagtccagaggaagctcgccaattgagaaggaaa

SEQ ID NO: 81205 - DNA, 321 bp, Glycine max
ttgaaaccaataaagacacggatttccgtggagatatagtagtagtagtaggtgaataaagattgccgctctttttgttttgattgttgaacaagtttatatatagctctttgttttggcaaaaatctgacaagggagggatgctataacctttgagatagagggagacttcgtaagaaataaacagcacgtaaaaaacgctggagagtctaggagtttgcttctttcatatattgttgagaacatataacagcttctaaagaaattaacaaaacttgaagtgggagcttagcatcttcttttaaccctacattagttggt

SEQ ID NO: 81206 - DNA, 419 bp, Glycine max
caaattccggccaccgtcgccacctgcttttcccgaataacctgattgatacctttgaacatgtaatcaaatataccattgaagaaaagcagactttccattccaatttgaaatcatcacttcacttgcaatggcgagtaccacaccctctgctgactctgcttcagcagatgaagttaccgcaaaagccgttcacaagcgctaccaagggttgctcacggttcgaaccaaagctataaagggcaaaggagcttggtattggccgcacctggaacccatgttgctgcacaacaccgaaacgggcctccccaaagcggttaaactcaggtgctccctatgcgacgccgttttttccgcttccaatccttcacgcaccgcttctgagcatctcaagcgcggaacctgccccaattttaatt

SEQ ID NO: 81207 - DNA, 370 bp, Glycine max
gactgtagataatcatgttaagcttggaggatgtaccacttctgatgtgacacacaatgcatgagctgataatgggaacttttcttgtggtccaaacaattaccgacagaaaggtatctcgggttgccccggttgttcggcccataaactgccgtgtttaaccattagcatttgcagttgcgctctctggattgtctttgtgcgggcgttttgctatctcgccaaaagcatgtaatagccgtgttcgatgcaaaaatgttttccgttcatacagccccacgtattatattccagaaattttaggtgctagacctggggggcctttagggggggcttactcgaataaatttgttagggttcccttcctttt

SEQ ID NO: 81208 - DNA, 422 bp, Glycine max
aaatatgtgaatggctttttcttattccattccaaccaaccaggtcgggtgttcataagtctaagtaaggatatggttgggttgttattgctatggctgggatatcttccaccagatcgagggctttggtcagctaaattagtcaagaaccggtcatagcacaaacaattcaaagagaagattttcatgaatcttggtgcatgtgtgccaacgtggaaagatagggtgtatgtgtgtacaagtggaatttttgtggaatttttgtgtggctaggtagccagaaatcacaaggaagatgttcaactcgacaaattgtgatactgatgatgccaactgtgcaagggcattgctatctatatccgaaatcacttttgggagcatcctttgagtcttgggaagtccagcgtttggaatagttcttc

SEQ ID NO: 81209 - DNA, 440 bp, Glycine max
gtacttatgaggcccattcactccttttgactgctgcattcccagacatcacaatcttgaccattaaacagcaacagtacagagcattttgatgcatgtaagtggacaaaatcagaaccacattcctgggaattgatcttcccaatagaggtatgtggtcctaataatggttttgaaatgtggagttctgagtgggcaaatcaaacttcatggcatttgagtttccttattgacaatcccaaacagtctacagtttttgatattctcttgggaatctctcaagattttgaaattgctggtaatactcttatgccagctttttctgttccacaggctactgccagatcttctgaaaatgcggaatcctctgcatgatctggaatttatgttttctttcgcttgttcgttcgtttaattcaataaaggaaattgggcatgac

SEQ ID NO: 81210 - DNA, 158 bp, Glycine max
tttgaaatgtggagttctgagtgggcaaatcaaaaccattattaggaccacatacctctattgggaagattaattcccacgaatgtggttctgattttgaccacttacatgcatgaaaaagctctgtgctgttcctgcttgccaaaaacacttgtacc

SEQ ID NO: 81211 - DNA, 462 bp, Glycine max
  unsure (1)..(462): unsure at all n locations
ttccaatatattccattctctctgtgtatttccctacctctccctgcaagatgcagatcttcgtcaagaccctcaccggcaagaccatcacccttgaggtggaaagctctgacaccatcgacaacgtcaaggccaagatccaggacaaggaaggaatccccccggaccagcaacgtctcattttcgccggaaagcaacttgaggacggccgtacccttgctgactacaacattcagaaggagagtactcttcacctcgtcctccgtctccgtggtggcatgcagatcttcgttaagacactcaccggcaagaccataaccctagaggttgaaagctccgacaccatcgataacgtcaaggccaagatccaggacaaggagggtatccccccggaccagcaacgtctcatcttcgccggaaagcagctcgaggacgggcgcaccctngccgactacaacattc

SEQ ID NO: 81212 - DNA, 172 bp, Glycine max
acgcgtacgtaagcaatttggtctagagatgcgtgtttttttgcgttttttcgtgggttaaataaaataagggaagttgggcttgccccttttgtggagtatgctctgcctatctgaaaatttccacacctcttttaattgtcgtaatgatgtgtgaagtgtgtgttttttt

SEQ ID NO: 81213 - DNA, 299 bp, Glycine max
acaaatacaaacagttgtggtgttatgtatggagagagacacatatcggtgaggatgtttctgcatttaatacagcctagggagtctacctttgcgcatgaggaacgatgaactcgttgttggtgacattaaacgactacaggatgaagacattcaggacaatggggtcaccataattggtgcagatattctgggcatatgcatgactgggccaacagagccactgacatcgattggtattaagctaacattcatgggcatgcttgccacgactataatgacgcttttcacatgggaga

SEQ ID NO: 81214 - DNA, 77 bp, Glycine max
cacaaacaggagcagcttgtagagagtcaggaaaaagatgtattgaaatcgtcacatgaggaatgaacacacctagt

SEQ ID NO: 81215 - DNA, 458 bp, Glycine max
ctcgagccgctcgagccgattcggctcgaggagataactagaaacagtgtgatgaaaatgaaggtccttgttttcttcgttgctacaattttggtagcatggcaatgccatgcgtacgatatgttccctctccgaatgaacactggctatggtgcccgtactccggaggtgaaatgcgcaagttggaggcttgctgtggaagcacacaacatctttggctttgagaccattcctgaagagtgcgttgaagcaacaaaggaatacatccatggcgaacaatatagatcagactccaaaacagttaaccaacaagcttacttttatgccagagacctcgaagtccatcccaaggacacatttgtgttcagtatagatggcaccgtactctctaatattccatactacaaaaaacatggatatggggtggaaaatttaactcgaccttgtatgatgaatgg

SEQ ID NO: 81216 - DNA, 467 bp, Glycine max
gattctagcaagcagagcttttgtcaattttctattgaccttctcggtggaggaattttagtggacaaaactggagattggatcacacttatacaaaattctccaattagtaacttgttgagagttgctgcttggaagaaaggttgtttaatggtcaagattgtgatgtctgggaatgcagcagtcaaaaggagtgattgggcctcattggtacaagtgtttttaacaaacagcaacagtacagagcattttgatgcatgtaagtggacaaaatcagaaccacattcctgggaattaatcttcccaatagaggtatgtggtcctaataatggttttgaaatgtggagttctgagtgggcaaatcaaacttcatggcatttgagtttccttattgacaatcccaaacagtctacagtttttgatattctcttgggaatctctcaagattttgaaattgctggtaatac

SEQ ID NO: 81217 - DNA, 326 bp, Glycine max
attagtcctttttagaataaaatgtgaaaaataaagatgaaaacgataaaaatgaataattttttacagtgttagactagtaagaaattcttacagtatcatataccgaggtttactgccaagtgcaaaatctaggtatgtgccatttgatgatttggtttgtacatgtaattatatattatgatctaatctcaaattatcatttgaattacgttaagatagttatttaaaaaatcaatcacgctttcatacataataagttatgattggatgtttgagtaaaaaatcacactttatcacggcatgtctatgttgaatgcaattta

SEQ ID NO: 81218 - DNA, 272 bp, Glycine max
atctcggattgaaaggaatcagcgttggcggagaagctcttccgattccggaatcgatttttgaggttgacgccatcggcggcggagggattattatcgatttcggcacggcggtgacgcggcttaagagtgaggtttacgacacgctccgcgacgcgtttgtcaagggggcgaaggggatgccgtaggcgaacggcgtgttttggattgctacacgctacgacttgaaataaacggtgagcgtgccagacatgacacgggtctgattggat

SEQ ID NO: 81219 - DNA, 102 bp, Glycine max
aggaaattaggcatgactctcttgttgagtatgctctgcctatctgaaaatttccacacctcttttaattgtcgtaatgatgtgtgaagtgtgtgttatttt

SEQ ID NO: 81220 - DNA, 369 bp, Glycine max
gtgggaggaaattgaaggtcctggtttttttcgtggttccaattttggtagcatggcaatgccatgcgtccaatatgttccttttccgaatgaacactggctatggggcccgtcctccggaggtgaaatgcgcaagttggaggcttgctgtggaagcacacaacatctttggctttgagaccattcttgaagagtgcgttgaagcaccaaaggaatacatccatggcgaacaatatagatcagactccaaaacagttaaccaacaggcttacttttatgccagagaccttgaagtccatcccaaggacacatttgtgttcagtatagatggcaccgtactctctaatattccatactacaaaaaacatg

SEQ ID NO: 81221 - DNA, 445 bp, Glycine max
gccttactttaattgttataaatctgaaagctttctagctggtcataacatcaccattactgatggtattgacaaaactagtgcaactttgcaatttagaaagttagcagattgtgattttctcaagagaaactttaagcagatgtctaatgttttgtgggtggctcctgaggacaaggcgagtttatggtcacaacttcattatgtgtcgggtaataatctggaaatgcaagaagcttatcttgtcaatctccagaatgtgttacgagaattgtatttgcacagtccagaggacgctcgtcaattgagaaggaaagctctctctcgtattgaatggctgcaaaaagctgatgtgcctaccatagcacagattgaagagttccattcgatgcataggatgatgaatgctcctgattcaaatgataatatagatttactgttgagc

SEQ ID NO: 81222 - DNA, 426 bp, Glycine max
  unsure (1)..(426): unsure at all n locations
gaaaagtaaaggcgaaagacnttacgtttggaattgggaattagggttcaattctggtcgcatatcaatgccgtgcgtacgatatgttccctctccgaatgaacactggctatggtgcccgtactccggaggtgaaatgcgcaagttggaggcttgctgtggaagcacacaacatctttggctttgagaccattcctgaagagtgcgttgaagcaacaaaggaatacatccatggcgaacaatatagatcagactccaaaacagttaaccaacaagcttacttttatgccatagacctttaagttcattccaaggacacatttgtgttcagtatagatggcaccgtactctctaatattccatactacaaaaaacatggatttggggtggagaaatttaacttcaccttgtatgatgaatgggttt

SEQ ID NO: 81223 - DNA, 467 bp, Glycine max
gcacgcgtacgtaacctcggacattcggatcgagctcatgtatgtgtcaaagtgtgaactcaaaacagacccttctctgtctatgagctaattttggagggatgtcactatctctagctccatgaactttgtctaacacacaacacaagaagaggaagaaggggaacaagaagatcgaagaagaagaagaagaaagttaagatatgttgcttggaaaacgtcctcgggcaccgattatgaaaagaactacaagcatgagtggtggtttggccgtggaaaccaaaacaagcaaggaggaagaagtactcatgtctgataacatgaaactacgggatccacatgttaacgttgttgccatgggaacaccaaatgatcaattcgtgcctaaccacaccaaaaatgtttatcaggccaacggttcatatgtatatggtgacccgttgatcggcatgggcgttaacatgagc

SEQ ID NO: 81224 - DNA, 463 bp, Glycine max
ctcgagccgcgtctttgaagtttctaagatgacttctccctacattaaatgtacagtctctttcttcatagcatttggaaatttggctgatgacaccatcaattttgaggcttttccccacaagctggtgcagtttggagagattcaggaaaaagttgtgttgaaattttcacaagaggaatttcttacagcttggtcaactcaggtgcgtcccgcaacgactctgttggctgatgggtgcccatatttgtatgctatggtgcatgatagttcagtgtctacaataccaggtgattttgtcattggtgttaagttgacaaccataaacaatatgtgtgcatatgggctcaatcctggtatttcaggttctcgtcttttgggcaccattcctcagtccatttcacagcaaactgtttggaatcaaatggcaacagtgagaacaccattgaattttgattctagc

SEQ ID NO: 81225 - DNA, 389 bp, Glycine max
gcaaccagttctttaacttcttgctgccggacataacccttgacgccaagagacaacttacacccactatcggactcgatatgcttgacaggaatagggtaactactatgaaaacacctgccacaatgtataaccgagcaccactgcaccatgaatatgggtaacaccgagaaccattcagcacagtgtctcaatggacaccatactcatacaaagcccacacagtggatgagagtcagatctaaagagatgctggtcaaacaagctgtgcagaccaagcaaatgctttccaaacaggccgttaagattgccaaacaagctgaggaacacgaaaggttcattaacaaggtgacccatcttgcgggagttctcggttttggtggattttg

SEQ ID NO: 81226 - DNA, 348 bp, Glycine max
gtggaaacaataggccatgcaaaggtggtagcatcgatgttaaagtggtagattcctgttcaaggtcaccatgtcccaacaccctcctcatgtcaaatgatgcatttgcagctattgcacgcttccctcatgttaaaatcaatattgaatatacccagatatgacttgccagtgatacgtcacaaccagtgcatatgtacactactcataaacaacatcaaggaataagctgtgatttgttgaagagaagtgcaaagcagaatgtgatccaaaacaggatgtggaatttttatgtacttagattgaatattcaatatcatgacgttaataaactgttgatgttcgtgc

SEQ ID NO: 81227 - DNA, 110 bp, Glycine max
caaatatctggttgatgagtgtccttttgcatttgtgaactagtatgtaatattttattcacttaaataaagcgcattactatgtgcaatgagtgtgtttaaatataaaa

SEQ ID NO: 81228 - DNA, 214 bp, Glycine max
  unsure (1)..(214): unsure at all n locations
tgggtttacaaggagcaggtaaagcttttccaaacaaaattgtttttgatgataagcttgtgttggctaacacacaagaattctttgatggaaattttccagtggattcttggttaccaatttttgtgaattgtctttatcctgtaagtcaattaccttcagaagctgtcgttgtaaatgttacatgtggtagtggacgtgtggnttatccacc

SEQ ID NO: 81229 - DNA, 341 bp, Glycine max
gaaattctttctaaagttgcacaagatatggttgaggaatggtttgattgtgttgatgaggaggattcctttgaggaagtttctttaagtgcagcacttaatggtgttgagggtttggactatatggaaagaattcctcttgccacatctgagggttttcctcatgtgctttcacgcaaaaatggtgaaaaaggcaaaagaagatttgtttctggggatggtgaagagatgacattgattccgggaaccagtgttgaagaggcttacaacaagctaatagttgaacttgagaaaagtgttcctacattggttggcattgaatgtcccaaggatgagaaact

SEQ ID NO: 81230 - DNA, 352 bp, Glycine max
ataatattgatctactgttgagcattgatttgttgggtttacaaggagcaggtaaagcttttccaaacaagattgtttttgatgataagcttgtgttggctaacacacaagaattctttgatggaaattttccagtggattcttggttaccaatttttgtgaattgtctttatcctgtaagtcaattacctttagaagctgtcgttgtaaatgttacatgtggtagtggacgtggtggtctacccaccactgcttggattaattctgcaggtaataatcgctcctcagatatcaacaaaaggattcgcacagcactcgtgaaaggtaagaaaattgtttttcttactagagt

SEQ ID NO: 81231 - DNA, 319 bp, Glycine max
ctgaagttctctctcaatcacagcactacatggctagggctttaactcccatgcgtgatgttaggtgattaatcaatcacatccaacctccataacttcaagtctctaactgcttaaacaagctcaaaagctttacacacaacactctatgctgagtaaacctgtctaattccttcttgaaagacagacttcatggacatactgcacggataagcgtgagggtgacttgcacacctgccactccatctcaagtcaaggccttggggtgggccttaattgcaccactcttcaagctcaacgcgcacacaacagccccatc

SEQ ID NO: 81232 - DNA, 170 bp, Glycine max
ctcaacttatctctcattccctacgctacatccccagcgttttacatgtggtgtcggaggttatgtgatcaatcaaccacaccacacttgctcaaatttgatcctctactgatttaaacatgtctacaatggttgactcgcaccgcacggacagactgaaacttgcaacc

SEQ ID NO: 81233 - DNA, 338 bp, Glycine max
gggaaattaactctcgttaattgcagggcatccataggatccttttgagggtgtccgagggaaagtgattgatcttcaaatggctacatggtcaacttcaaagatttttgggttagaacatgtattacatggtggacactcagcgcaccttgttgggaaaaccttattaattttttgtggacgagatgcagaacggacacttcttgagtgatcttaatatgcttgacttggaacccatcacatgagactaaatttatgctgttggggtgcgcactaatggaacgacagttgatgctgctcgtgaacacgacgagcgatacttactgatattcggtggg

SEQ ID NO: 81234 - DNA, 353 bp, Glycine max
gttggaaaaggaggcaaattgaatagagacagggtaaacaagttgaggtgtaattaaaaatatgtgcaatatactaatctaatattctccttctcatttgtaataataataaagtcatgtgctgatgtagtaaaactagtacaagcctagtgatagccatagtgccatggctgctaacagcagaccaagaaggactaccaggaggccaacatacctctgcgattacgcataagggacagatcaagaaaaggactaggatccaaaatatttccttaatctcgttaacaattctgttacaacaaattcacaaattctgttatttgtagttagtgcattcccaggtggccaaggat

SEQ ID NO: 81235 - DNA, 318 bp, Glycine max
ctcttttcacttcaacaccaactgtgcctcataatgttctttctcaggccttccagattgatgctaaactggttgatgacatcaaggccaagcttgctcctaagaagacttaatttatgttgagcttatgatattccagagaggaagattatgataatagtttcataattaagactactttccctatatttttcctataattcttgaagggttatgattcattgtatcacttaccgtgttgcattttgctcattgatattacgtcgagaataatgatgtaattgtatcgcggattatggtacatgttaagagtaatat

SEQ ID NO: 81236 - DNA, 353 bp, Glycine max
gttgtgaattgcagtccatgggatgatgctctatataaggatgctgctgagagaactaacatgggttacatatctcttaatggattcctggcgcaggtggggttaacttatgctgttttttattcttcagaatgagttattgatatatctcttaaattgtatgatgcagtgggtccttatgacattacttgatccaccatgtagcctggctaatttgatttacattggatatagtggtaatccagctgctgctcttcgtgttacccgtagaagagcagtagatcgcaagaagcaagcaacagaaaagaatgtgttccaatgctatgtttttggttctaaaaatgctgggaagt

SEQ ID NO: 81237 - DNA, 349 bp, Glycine max
ctttaatctgattctgcaacaacatgaacctgagaatcggccacagggtgctgtgtggagtgacaaacagggtagatctagacaccgccagttataatcacacggtgatcgacaaccatgatgaatacgagaggctaatgctgctcacacagatgagctacctgaaaacattctttctgtacactgttattaccgacatctgaactaatctagaacggccggctcccagaatcaagtgcacggtctatgatcactaatgggggcatccatgttaccagatcggggaactcaacgaggactgcatcatgctatgcgttttgtggaaggtattgcagatggactcctcaat

SEQ ID NO: 81238 - DNA, 351 bp, Glycine max
gtgatatcatttgtgtcactggatggactgccaccccaatgcaggatgttcaggttacaattgattggtttatttcctctcaggaatgtgttcccaggacctattgtgttttaaatccacaaaatccttttgtgttaaataggtggatgggaaaactgactttcccccagggcacttcccgaagtgttaagagaatgcctctttctatagggggaggagctggtgcaaagaatgctattctcatgaatatgccaaatgctgttctttcaatgtggagatattttgttggagatctcgtctttgaagtttctaagatgacttctccctacattaaatgtacagtctctttct

SEQ ID NO: 81239 - DNA, 341 bp, Glycine max
caccatttctgatggtattgacaaaactagtgcaagggtgcaatttagaaaggtaggagattgtgattttctcaagagaaactttaagcagatgtctaatgttttatgggtggctcctgaggacaaggcgagtttatggtcacaacttcattatgtttcgtgcaataatctggaaatgcaagaagcttatcttgtcaatctcgtaaatgtgttactagaattgtatttgcacagtccagaggaagctcgccaattgagaaggaaagctctctctcctattgaatggctgcaaaaagctgatgtgcctaccatagcacagattgaagagttccattcgatgc

SEQ ID NO: 81240 - DNA, 347 bp, Glycine max
attttaagccaaagctggatatttcaagccttactttagtgggtctaaattgaaaagcttggtagctagtcataatatcaccattactgatggtattgacaaaactagtgcaactttgcaatttagaaagttagcagattgtgattttctcaagagaaactttaagcagatgtctaatgttttgtgggtggctcctgaggacaaggcgagtttatggtcacaacttcattatgtttcgtgtaataatctggaaatgcaagaagcttatcttgtcaatctcgtaaatgtgttacgagaattgtatttgcacagtccaaaggaagctcgccaactgagaaggaaagctc

SEQ ID NO: 81241 - DNA, 346 bp, Glycine max
atcagatctcatataaaacactaaactgtaaaacacgcgctctctctttcgcctgggagttttcttcttccttttcgttttctcagtctattgctcttccttcaccaccacgcattatttttagggtttccaacatttccatcattttcctctcttttttttctctatatttttttgttatttatttatttatttttataatttttgaatttggtgtttgaattgagaagcggttttcgacgattctgatgtcggcttccacggtgtccatcacggcagcaaacccgggggcgcgtcggagaccggtgatcgccatcgagaagaaaaccgccaccaacctcgaact

SEQ ID NO: 81242 - DNA, 354 bp, Glycine max
atcgagataactagaaacagtgtgatgaaaatgaaggtccttgttttcttcgttgctacaattttggtagcatggcaatgccatgcgtacgatatgttccctctccgaatgaacactggctatggtgcccgtactccggaggtgaaatgcgcaagttggaggcttgctgtggaagcacacaacatctttggctttgagaccattcctgaagagtgcgttgaagcaacaaaggaatacatccatggcgaacaatatagatcagactccaaaacagttaaccaacaagcttacttttatgccagagacctcgaagtccatcccaaggacacatttgtgttcagtatagatggcacc

SEQ ID NO: 81243 - DNA, 122 bp, Glycine max
tcgtttgtttaattcaataaaggaacaagcgcatgaccctcttgttgagtatgctctgcctatctgaaaatttccacacctcttttaattgtcgtaatgatgtgtgaagtgtgtgttatttt

SEQ ID NO: 81244 - DNA, 145 bp, Glycine max
tgttctttcaatgtggagatattttgttggagatgtgatattataaaaaagtagggggacttgtccctacattaaacggacagattgttttttcatctcatttggaactattgactatgatgccatgaaatcataatgcattcta

SEQ ID NO: 81245 - DNA, 256 bp, Glycine max
gggaatctctcaagattttgaaattgctggtaatactcttatgccagctttttctgtgccacaggctactgccagatcttctgaaaatgcggaatcctctgcatgatctggaatttatgttttctttcgcttgttcgttcgtttaattcaataaaggaaattgggcatgaccctcttgttgagtatgctctgcctatttgaaaatttccacacctcttttaattgtcgtaatgacgtgtgaagtgtgtgttatttt

SEQ ID NO: 81246 - DNA, 354 bp, Glycine max
gatatttacaccatctgctctcaagactgtgaattatggaatcctgcttgcacaaaagcaatgactatgtcatttaatccaaacccgtgttctgatgcatggagtttggaatttttgaagcgtaccggatttcactgtgatatcatttgtgtcactggatggactgccaccccaatgcaggatgttcaggttacaattgattggtttatttcctctcaggaatgtgttcccaggacttattgtgttttaaatccacaaaatccttttgtgttaaataggtggatggggaaactgactttcccccagggcacttcccgaaatgttaagagaatgcctctttctatagggggagga

SEQ ID NO: 81247 - DNA, 355 bp, Glycine max
atcagaatgcgttgtattcatccctatcgatgtcatactttgttttcagggggggagggagcactccctctacttcgatgcccatgtgcttgatgctcaaagactacggcattatctacgaggctgccattgtatatttctggcacgttatgctcatactcagtcaccgtaaattccgccgattccgaatatttgaactctgcaccaaaaccctttatcgattacagcatctacatgctttgaatgatgcagctcctatggatcagcataaaactgagatggatccagtatcccatgttaatgcaccaagggctactactactgaaccagcaacaaatgttaacgccgctagggc

SEQ ID NO: 81248 - DNA, 361 bp, Glycine max
  unsure (1)..(361): unsure at all n locations
cggctgagctcgagccgaatcggctcgaggcagatacgatttctgaaattgtttctatggatcaatgtgaagtatttttagatacgtnaaaaaaaaaaaaaaaaaaaaaaaaaaaaaaaaaaaaaaaaaaaaaaaaaaaaaaaaaaaaaaaaaaaaaaaaaaaaaaaaaaaaaaaaaaaaaannaaaaaaaaaaaaaaaaaaaaaaaaaaaaaaaaaaaaaaaaggggggggccccccatttgtgagtttttcaccccggaaataaattcggaaccggtccctggggggtaaaaaattttccttataagggggggtataaaaattgggggaaaaaaaggaaaaaggtttttcctggggaaa

SEQ ID NO: 81249 - DNA, 243 bp, Glycine max
ccttaagttcgcaattcgtttcgagttaaaattctttttccagaccttccactctcacccattgggaacgataactatctctcgtgttgaacggcttcaaaaagctgatctgcctacacaatcttcagattaaaccgaatcgaaatcgcatgattgttggcactctccctggcttaaaccagattatgaacttacctggtgccatcactttgtaagtggatgccaatgagaaaaatgacatac

SEQ ID NO: 81250 - DNA, 350 bp, Glycine max
tgtatttgcacagtccagaggaagctcgccaattgagaaggaaagctctctctcgtggtgaatggctgcaaaaagctgatgtgcctaccatagcacagattgaagagttccattcgatgcagaggatgatgaatgctcctgattcaaatgataatattgatctactgttgagcattgatttgttgggtttacaaggagcaggcaaagcttttccaaacaagattgtttttgatgataagcttgtgttggctaacacacaagaattctttgatggaaattttccagtggattcttggttaccaatttttgtgaattgtctttatcctgtaagtcaattaccttcagaagct

SEQ ID NO: 81251 - DNA, 396 bp, Glycine max
gtcttacgttgctcataacgttaatcagccccaagagaaagatttgttggagggaaatttttcctttgatattaaatctcgctctagattggaaaaagtttcctctacaaaagcacaatttgttagtggaaaaaccttcaaatatgatataattggtgctggttcacattcttcagaagattttcctgaaaaggaagatcaagaaaaacccaaaaagattgatgccagattgagacaaagaatagatcctcaatacaatgaggttcaggctcagatggaaacaaatttgtttaaattgtctcttgatgatgttgaaactcctaaaggttccatgttggatctgaaaatttctcaatctaaaattgcacttcccaagaacacagttggaggaaccat

SEQ ID NO: 81252 - DNA, 307 bp, Glycine max
  unsure (1)..(307): unsure at all n locations
tcatctcaaccactctcgatctcttctgttcttctcaaatcccacaatctcatcagattgaattgtttgttgagaattggcgctcgattcaatctgattgattcacaatggcttccccaaacaaccacaacccttctncacccccattcccttcgacatgcactccttctttaacccccaaccaccaccaccaccttgctctaaccctaaccctaaccctaaccctaaccataaccctttcttcttctacccttccccctttcacttncccaaactttgaccttcccttttccttccccacacccca

SEQ ID NO: 81253 - DNA, 393 bp, Glycine max
ataccatcaattttgaggcttttccccacaagctggtgcagtttggagagattcaggaaaaagttgtattgaaattttcacaagaggaatttcttacagcttggtcaactcaggtgcgtcctgcaacaactctgttggctgatgggtgtccatatttgtatgcaatggtgcatgatagttcagtgtctacaataccaggtgattttgtcattggtgtcaagttgacaaccataaacaatatgtgtgcatatgggctcaatcctggtatttcaggttctcgtcttttgggcactattcctcagtccatttcacagcaaactgtttggaatcaaatggcaacagtgagaacaccattgaattttgattctagcaagcagagcttttgtcagtttt

SEQ ID NO: 81254 - DNA, 90 bp, Glycine max
acgctacgtagctcggaattcgcctcggaggtctacaattttagattttcttttgggaatctctcaaaattttggaagtgctgctaatac

SEQ ID NO: 81255 - DNA, 394 bp, Glycine max
ctcgagccggctcgagtgaaattttcacaagaggaatttcttacagcttggtcaactcaggtgcgtcctgcaacaactctgttggctgatgggtgtccatatttgtatgctatggtgcatgatagttcagtgtctacaataccaggtgattttgtcattggtgttaagttgacaaccataaacaatatgtgtgcatatgggcttaatcctggtatttcaggttctcgtcttttgggcaccattcctcagtccatttcacagcaaactgtttggaatcaaatggcaacagtgagaacaccattgaattttgattctagcaagcagagcttttgtcaattttctatcgaccttctcggtggaggaattttagtggacaaaactggagattggatca

SEQ ID NO: 81256 - DNA, 391 bp, Glycine max
gagatctcgtctttgttgtttctaagatgacttctccctgcattaaatgtacagtctctttcttcatagcatttggaaatttggctgatgacaccatcaattttgaggcttttccccacaagctggtgcagtttggagagattcaggaaaaagttgtgttgaaattttcacaagaggaatttcttacagcttggtcaactcaggtgcgtcccgcaacgactctgttggctgatgggtgcccatatttgtatgctatggtgcatgatagttcagtgtctacaataccaggtgattttgtcattggtgttaagttgacaaccataaacaatatgtgtgcatatgggctcaatcctggtatttcaggttctcgtcttttgggcaccattcctca

SEQ ID NO: 81257 - DNA, 195 bp, Glycine max
caggctactgccagatcttctgaaaatgcggaatcctctgcatgatctggaattcgtgttttctttcgcttgttcgtttgtttaattcaataaaggaaattaggcatgaccctcttgttgagtatgctctgcctatctgaaaatttccacacctcttttaattgtcgtaatgatgtgtgaagtgtgtgttatttt

SEQ ID NO: 81258 - DNA, 394 bp, Glycine max
ctcattagtcattatttaagtatgaggctgcacacttagagagataaggttgtcttgagagctgttgcgcgtctctgagttgctgtgtaagccaatgatcattataattgaatttgccaaacagctctccatacacacacacacacaaaacaaacatacctcgcctcattcctttctgcttcttcttttggcttcttcttcttcttcttcttcttctgggtataacaaggcaatgacgatgtttacagcagttggactagacatgagtgaagagcagtgtcctggcaaggtgactcagtatctgtgaaactccatgtggtcttttgcactgatgctgttgatgcagcctgtgtgcatgacacttcctctcctgtctgagaaaaggcgaatctga

SEQ ID NO: 81259 - DNA, 389 bp, Glycine max
gcatttttaatgagatgctcattagatatagctatgaaaaattgctgcgccaggctaaagctccaagtatgtttttacaatccttcaaaaattttgtttctttgtgtgtgtatggtgatgataacttaattagtgttcatgaatatgtcaagccttactttagtggttctaaattgaaaagctttctagctggtcataatatcaccattactgatggtattgacaaaactagtgcaactttgcaatttagaaagttagcagattgtgattttctcaagagaaactttaagcagatgtctaatgttttgtgggtggctcctgaagacaaggcgagtttatggtcacaacttcattatgtttcgtgtaataatctggaaatgcaagaagct

SEQ ID NO: 81260 - DNA, 251 bp, Glycine max
tattggaaaaaaaaaaaaaagaagagggcaaaaaaaaaaaaaaaaaaaacaaaaaacataaaaaaaaaaaaaagttatgcaaataatttaataaacatacacaaccagaaaattaattacctcacctcacatgaagcttatccatcttttaccttaataaaattttttattttttgttgtaaataacaaaataatttcatcttgtccaaaatttgatcttttcattaatttcaaaaaaaattaccaacctt

SEQ ID NO: 81261 - DNA, 392 bp, Glycine max
tcaagagaaactttaagcagatgtctaatgttttatgggtggctcctgaggacaaggcgagtttatggtcacaacttcattatgtttcgtgcaataatctggaaatgcaagaagcttatcttgtcaatctcgtaaatgtgttacgagaattgtatttgcacagtccagaggaagctcgccaattgagaaggaaagctctctctcgtattgaatggctgcaaaaagctgatgtgcctaccatagcacagattgaagagttccattcgatgcagaggatgatgaatgctcctgattcaaatgataatattgatctactgttgagcattgatttgttgggtttacaaggagcaggtaaagcttttccaaacaagattgtttttgatgataaagct

SEQ ID NO: 81262 - DNA, 383 bp, Glycine max
gtaagaaagatgtttggagagttgaatgtggaatcccttctggatttccgctcacagttatttgcaatagcatttttaatgagatgctcattagatatagctatgaaaaattactgcgccaggctaaagctccaagtatgtttttacaatccttcaaaaattttgtttctttgtgtgtgtatggtgatgataacttaattagtgttcatgaatatgtcaagccttacttttttggttctaaattgaaaagctttctagctggtcataatatcaccattactgatggtattgacaaaactagtgcaactttgcaatttagaaagttagcagattgtgattttctcaagagaaactttaagcagatgtctaatgttttatgggtg

SEQ ID NO: 81263 - DNA, 372 bp, Glycine max
atacattcaattccttttaattttgttctctctaatctctctcggtacaatggatactccatcatgggcagcaagaagaatcacatgatcccaaatcgccttcaacaacaacatcctcgtttcaagaaaaaagaacgagaatgctgaatgtgagaagagtgtgataaccaggtccttgctgttggacttctcggacaaatccgaggtttcagaatgctcttctgaggtgacatatcaagaagtgacacaaggaagtgttggtagccgtgggtccaccgaggatgattgtgcttccatttggtccattcaggtgaatgcgagcacgcatgactaatatgatgaccatgaggaaatggctgaagaggaagaaga

SEQ ID NO: 81264 - DNA, 393 bp, Glycine max
aacaggtggagttttatctcatagatgaccacagcaatggtgccctttattggtgttgttcataacggaacatggtttttgaaaggacttggatctaatcgaaatgtcatatgtgaatcctattcccaggaaactgatacctggaccccagtgagtaatggaatggtcaatggttggcgtaatcctagtatctcgctgaacggacaactctatgcacttgattgccaggatgggtgcaagctcaaagtatatgacagagcatcagattcatggaagaagttcattgatagcaaactccatttaggtagatcccgtgctcttgacgctgctgctcttgttccccttaatggaaagctttgcattatacgcaacaatatgagcatcagtctattt

SEQ ID NO: 81265 - DNA, 383 bp, Glycine max
gacctattgtgttttaaatccacaaaatccttttgtgttaaataggtggatgggaaaactgactgtccctcagggcacttcccgaagtgttaagagaatgcctctttctatagggggaggagctggtgcaaagaatgctattctcatgaatatgccaaatgctgttctttcaatgtggagatattttgttggagatctcgtctttgaagtttctaagatgacttctccctacattaaatgtacagtctctttcttcatagcatttggaaatttggctgatgacaccatcaattttgaggcttttccccacaagctggtgcagtttggagagattcaagaaaaagttgtgttgaaattttcacaagaagaatttcttacagctt

SEQ ID NO: 81266 - DNA, 314 bp, Glycine max
gaagaaaaaagaagacatagacaagaaggagaagaagaaagttactggaaaggacaagaccaaggagcttagtgcgctgaagcagaagcttgaaaaaattaacggaaaaatacaaccactccttgaaaacaaaactgatgtagagaaggtcaaggggaaagaagacaaagagaagaagaaaaaggaaaagaaagtcaaggatgacaaaactgatgctgagaaggtcaaggggaaagaagatgatggggaggacaatgaagagaaggaggaaaagaaaaaaaagaaaaagaaggaaaaggatgacaaaattgatg

SEQ ID NO: 81267 - DNA, 302 bp, Glycine max
  unsure (1)..(302): unsure at all n locations
cgtacgtaaactcagaattcggctcgatcacataaccattttttttccccccacaccaaacccnnaaggccgcagaataaacaaaaaaggcccgccccacataatcttttcacacacccacccaaatactcctctttttttaccatcacccacatccttcaccctctttccaccctatattctctcacaaattcctccttctctcataccccccaaannnnnnaacataacaacacttcttcaatctatacatcactctccacaaccatacttatcctccataatacatctttaacaccaaa

SEQ ID NO: 81268 - DNA, 396 bp, Glycine max
gtgagaacaccattgaattttgattctagcaagcagagcttttggcaattttctattgaccttctcggtggaggaattttagtggacaaaactggagattggatcacacttatacaaaattctccaattagtaacttgttgagagttgctgcttggaagaaaggttgtttaatggtcaagattgtgatgtctgggaatgcagcagtcaaaaggagtgattgggcctcattggtacaagtgtttttaacaaacagcaacagtacagagcattttgatgcatggtagtggacaaaatcagaaccacattcctgggaattaatcttcccaatagaagtatgtggtcctaataatgcgtttgaaatgtggagttctgagtgggcaaatcaaactttatgg

SEQ ID NO: 81269 - DNA, 58 bp, Glycine max
caaatactacattaagcgcaccttaagcgcccaccgttgggatatgatcttttacatt

SEQ ID NO: 81270 - DNA, 424 bp, Glycine max
tgcacgcggacgtaagctcggaattcggttcgagctgggaatgtagcagtttaatttagtgattgggcctcattggtagaaggggttttaacaaacagcaggagggcagagcattttgatgcatgtaagtggacaaaatcagaaccacattcctgggaattgatcttcccaatagaggtatgtggtcctaataatggttttgaaatgtggagttctgagtgggcaaatcaaacttcatggcatttgagtttccttattgacaatcccaaacagtctacagtttttgatattctcttgggaatctctcaagattttgaaattgctggtaatactcttatgccagctttttctgttccacaggctactgtcagatcttctgaaaatgcggaattctctgcatgatctggaatttatgttgtctttc

SEQ ID NO: 81271 - DNA, 364 bp, Glycine max
  unsure (1)..(364): unsure at all n locations
ccaaactgcaccagnctngnggggaaagcgctatttcaatttggggaggggccaaaaaaaatttttattaaaatctttacaaaaggaatttgttacactttcgacaactaccttgcgcacatcaacaacaaatataatctcatggatgcccataacaagatgctattacatactgatcttgcacgccatcataacaactaaatttgtacttaagttaatgcacggcactttccaatccagttgttccatctaagtttaatccatcaattttacatgccaaaagtttagatcaactttttttgttgaagaccaaaattacattgtaatttgccaatagattttaaaaattcttttaaagtttaat

SEQ ID NO: 81272 - DNA, 274 bp, Glycine max
attgcaaacaagcttttgtggctatagagaagggtccccctcccggctagattacgtcatctcgtgggtcttctcggcaacatcatcagaagtcttctcggcaacatcccaatgttggaaggaatcaccctgtgaatccaggaagaactgttgcagtttctcaaaatttacaatccagcggtcctataggcatatcttcttttgataacacaaatttccagtttggtcctcactccaaaatggctggctttgttaaaaaagatggatcatcttc

SEQ ID NO: 81273 - DNA, 139 bp, Glycine max
  unsure (1)..(139): unsure at all n locations
gtccgtgatctgatatttcctttgtatgtngcgctactccaaccggcccggtcttttcaacatatttcccggagttaattttatttcctatcataacttctttttcttcaacaataccggttttatcaattttcttgcc

SEQ ID NO: 81274 - DNA, 160 bp, Glycine max
aaagtggtcttgatgtctgaggcattggaagaggttgttccttcaatgaaaggagggtgtgaagaagaagggttgaacctggaggctactgagctgaggcttgggttgccagggtgtgagtcaccagagagggagggtgtgtttaagagtgtggtcggtg

SEQ ID NO: 81275 - DNA, 395 bp, Glycine max
cggctcgagcggctcgaggttcatgaatatgtcaagccttacttgagtggttctaaattgaaaagctttctagctagtcataacatcaccattactgatggtattgacaaaactagtgcaactttgcaatttagaaagttagcagattgtgattttctcaagagaaactttaagcagatgtctaatgttttgtgggtggctcctgaggacaaggcgagtttatggtcacaacttcattatgtttcgtgtaataatctggaaatgcaagaagcttatcttgtcaacctcgtaaatgtgttacgagaattgtatttgcacagtccagaggaagctcgccaattgagaaggaaagctctctctcgtattgaatggctgcaaaaagctgatgtgcctac

SEQ ID NO: 81276 - DNA, 396 bp, Glycine max
gattatcctaagtctttgggaatagtgctgcaatggcttcaagtcaggaggaggtgacccttttgggagctactggaagcccatttgtgtgcagggttcatattgccctcaagttgaagggagttcaatacaaatatgtcgaagaaaatttgaggaacaagagtgaactgcttctcaaatccaacccagttcacaagaaggttccagtgtttattcacaatgagaagcccatagcagagtctcttgtgattgttgaatacattgatgagacatggaagaacaaccccatcttgccttctgatccttaccaaagagccttggctcgtttctggtccaaattcattgatgataaggtttttggtgctgcatggaaatccgttttcacagctgatgaga

SEQ ID NO: 81277 - DNA, 341 bp, Glycine max
cacttagcgatcaaagttttacttcagacttatacacttaagggtaccgggttcttcccctacctctgacggttttaaacttttacttcgggattcagtctccaccttctggtggatctaaccttgacctactatgagtactgctctatgtacacggtagaacaaacaaactattactcacttaaaatttcaaactcgtgtagattcgggtgaactcgttgctgagtcaaaggagtatatgcatattcgcgtccagcatattaatggtgagaaaagcctgtcaaccgtttaggggtggaagatagaatttacctataacaagcttcttaacgacgttaaga

SEQ ID NO: 81278 - DNA, 288 bp, Glycine max
agacgccatgcacgcgcgtaagctcgattcgttcgagcactttgggcaggattttagtgatcctgagactatatgcaggataacctgatggcgggatgttatggaagtcgattattggaattgcaaaggtctgggtccggatattgggcaggtctcttggttgcctgtaatgggctgaggcatgccgatgaagtggatgagataggtccgtggggggggcattaaaggactgagacgccaaaatggccagcaggacgttttacctacagcagactcacctatgggaga

SEQ ID NO: 81279 - DNA, 281 bp, Glycine max
gtgtggtttttttttttttttttttttttttttttttttttttttttttttttttttttttttttttttaccaaaaaaatttaaattttccttttttggggggggaagttttttttttcttggttcccccttttatgatctccttttccgttaaaaaacccctaaatttttctttttttcttcacaaattttctttttttttatgctcttttaaccggtttaaaataaattccaaatcttcttttaggggggaatggggatatatctcttttttttttttt

SEQ ID NO: 81280 - DNA, 396 bp, Glycine max
aaacaatatgtgtgcatatgggctcaatcctggtatttcaggtggtcgtcttttgggcaccattcctcagtccatttcacagcaaactgtttggaatcaaatggcaacagtgagaacaccattgaattttgattctagcaagcagagcttttgtcaattttctattgaccttctcggtggaggaattttagtggacaaaactggagattggatcacacttatacaaaattctccaattagtaacttgttgagagttgctgcttggaagaaaggctgtttaatggtcaagattgtgatgtctgggaatgcagcagtcaaaaggagtgattgggcctcattggtacaagtgtttttaacaaacagcaacagtacagagcattttgatgcatgtaagtg

SEQ ID NO: 81281 - DNA, 396 bp, Glycine max
caactacaaagatgggtgcttttttatgaatgtcaggttcgggagcatgaacaagtttccttactctcacatcgtttaaatatcacactcgctcgaacattcccagcatgattttatctgatgggtgagcgaaatacgacactgtaactggaaatgcttctcgctctgcctcctgcggcataaaccctgccaatccctcacgctcccatgattctttcattcgagctgcctggacccgaagatctcgaggtgaagctgcaaagaaacctaacaggaaatcgtggaagcagaggacagacatgtacatgagaccgttcttattaaatgttttcttctccaaaagatttattcatgcaaaagtggtacaccgaggaacaagcaaagtgatatgtgttg

SEQ ID NO: 81282 - DNA, 388 bp, Glycine max
atttgtatgctatggtgcatgatagttcagtgtctacaatgccaggtgattttgtcattggtgttaagttgacaaccataaacaatatgtgtgcatatgggctcaatcctggtatttcaggttctcgtcttttgggcaccattcctcagtccatttcacagcaaactgtttggaatcaaatggcaacagtgagaacaccattgaattttgattctagcaagcagagcttttgtcaattttctattgaccttctcggtggaggaattttagtggacaaaactggagattggatcacacttatacaaaattctccaattagtaacttgttgagagttgctgcttggaagaaaggttgtttaatggtcaagattgtgatgtctgggaatgc

SEQ ID NO: 81283 - DNA, 426 bp, Glycine max
cacgcgtccgtaagctcggaattcggttcgagtgtcattggtgttaagttgactaccataaacaatatgtgtgcatatgggctcaatcctggtatttcaggttctcgtcttttgggcaccattcctcagtccatttcacagcaaactgtttggaatcaaatggcaacagtgagaacaccattgaattttgattctagcaagcagagcttttgtcaattttctattgaccttctcggtggaggaattttagtggacaaaactggagattggatcacacttatacaaaattctccaattagtaacttgttgagagttgctgcttggaagaaaggttgtttaatggtcaagattgtgatgtctgggaatgcagcagtcaaaaggagtgattgggcctcattggtacaagtgtttttaacaaacagcaac

SEQ ID NO: 81284 - DNA, 394 bp, Glycine max
caatttgttagtggaataaccttcaaatatgatataattggtgcgtggttcacattcttcagaagattttcctgaaaaggaagatcaagaaaaacccaaaaagattgatgccagattgagacaaagaatagatcctcaatacaatgaggttcaggctcagatggaaacaaatttgtttaaattgtctcttgatgatgttgaaactcctaaaggttccatgttggatctgaaaatttctcaatctaaaattgcacttcccaagaacacagttggaggaaccattctgcgtagtgatctattggcaaattttttgacagagcgcaattttagagcaagtgttgatttgcagcgcactcatcgtattagaggaatgattaaaatggtggccacagtt

SEQ ID NO: 81285 - DNA, 341 bp, Glycine max
  unsure (1)..(341): unsure at all n locations
ctttgattctgtaatttgtcaatttaagctgattattgaattgagctgccattcctcttataagggacttgggcaagtaatactgtgtttccagtatagagtttcttatgtggtctatgttattgttactagttgcttagttttttaaatctgtgcattggtctactatcaataatgtattgttgncttactgaactccatgtagaggaatggcaggacaattcaatctcgagcttagtcctggtggttgcgtctttgctttcctatatttttttatctatttggtgggggggggggggggtctatttttattcttctttctattctgtttctttctatct

SEQ ID NO: 81286 - DNA, 384 bp, Glycine max
acaataccaggtgattttgtcattggtgtcaagttgacaaccatggacaatatgtgtgcatatgggctcaatcctggtatttcaggttctcgtcttttgggcaccattcctcagtccatttcacagcaaactgtttggaatcaaatggcaacagtgagaacaccattgaattttgattctagcaagcagagcttttgtcagttttctattgaccttctcggtggaggaatcttagtggacaaaactggagattggatcacacttatacaaaattctccaattagtaacttgttgagagttgctgcttggaagaaaggctgtttaatggtcaagattgtgatgtctgggaatgcagcagtcaaaaggagtgattgggcctcattg

SEQ ID NO: 81287 - DNA, 340 bp, Glycine max
atgagtatgctcattatttatagctatgaaaaattactgcgccaggctaaagctccaagtatgtttttacaatccttcaaaaattttgtttctttgtgtgtgtatggtgatgataacttaattagtgttcatgaatatgtcaagccttactttagtggttctaaattgaaaagctttctagctggtcataatatcaccattactgatggtattgacaaaactagtgcaactttgcaatttagaaagttagcagattgtgattttctcaagagaaactttaagcagatgtctaatggtttgtgggtggcttctggagacaaggcgagtttatgggcacaac

SEQ ID NO: 81288 - DNA, 194 bp, Glycine max
  unsure (1)..(194): unsure at all n locations
tttgccgtcaatgcacgcgtccgtaagctcgaattcggttcggggaaagttnttgaaaagcattacattttctgattttatgtttgggctggctggtttgaacaagttggttaggaatatgcacttaaagaatatgcaaccttgtatttgtacttgaatttattcataatgataagactttagtgttttgattt

SEQ ID NO: 81289 - DNA, 402 bp, Glycine max
gcttccttaagctccttagtgctgctccttgcagctctgggtcgatcccctcaagttcttgcaaacgatgagaatcccccagtgtacaagcctcccactgagaaaccaccagtttataagcccccagttgagaagcctcctgtttacaaacctccagttgaaaaccccccaatttataagcctccagtagagaagccaccagtgtacaagcccccagttgagaaacccccagtgtacaagcccccagttgaaaaaccaccagtgtacaagcccccagttgagaaaccaccagtgtacaagcccccagttgaaaaacccccagtttacaagcccccagttgaaaaacccccagtgtacaagcccccagttgaaaaaccaccagtgtacaagcccccagttgag

SEQ ID NO: 81290 - DNA, 402 bp, Glycine max
cggctcgagtcccacactctcttttctctacctacaaaaaaaagggcatctaagttctaacgatgaatcaccaacaacaatctcctgcagtgactgcatatccagcaggggctcagagcaacctagcagctccaccaccacctgtaggttatcccactaaggatgatcttccttcccaacaaaatgttcctgtcaaaaccactaccaggggtgatggcttctggaagggatgttgtgcgggcttgtgctgttgctgtgccctggattgttgtctctgattgaacatccctgcagtactttatggatttgagcttgttctctctgtcttttgttattttctttagcagattaattttgtatttgtctacgctaataaggatatttgtgtcctaagggacagca

SEQ ID NO: 81291 - DNA, 172 bp, Glycine max
aatgcacgcggacgtaagctcggaattcggttcgagtgccaccccaatgcatgttgtttaggttacaattgattggtttattccgtctcatgaatgtgttcccagcgcctattgtgttttaaatccacaaaatccttttgtgctaaataggttgaaagcaacaacttatttc

SEQ ID NO: 81292 - DNA, 403 bp, Glycine max
ctggaaatgcaagaagcttatcttgtcaatctcgtaaatgtgttgcgagaattgtatttgcacaggccagaggaagctcgccaattgagaaggaaagctctctctcgtattgaatggctgcaaaaagctgatgtgcctaccatagcacagattgaagagttccattcgatgcagaggatgatgaatgctcctgattcaaatgataatattgatctactgttgagcattgatttgttgggtttacaaggagcaggtaaagcttttccaaacaagattgtttttgatgataagcttgtgttggctaacacacaagaattctttgatggaaattttccagtggattcttggttaccaatttttgtgaattgtctctatcctgtaagtcaattaccttcagaagctg

SEQ ID NO: 81293 - DNA, 290 bp, Glycine max
  unsure (1)..(290): unsure at all n locations
tcggcncgagggagtctgtttttgatattctcttgggaatctctcaagattttgaaattgctggtaatactcttatgccagctttttctgttccacaggctactgccagatcttctgaaaatgcggaatcctctgcatgatctggaattcgtgttttctttcgcttgttcgtttgtttaattcaataaaggaaattaggcatgaccctcttgttgagtatgctctgcctatctgaaaatttccacacctcttttaattgtcgtaatgatgtgtgaagtgtgtgttatttt

SEQ ID NO: 81294 - DNA, 295 bp, Glycine max
gttgtgcatgtttggagtttcatgtaacaggccatgtgtgcaaagagcgtcggtgctttaaggaatgtggtcgagtcgatcatggctctattgtgaatatgggcaatgttgcaactgaaccaatcctaggattaggttgtgtgaatttagtttttactttcggaaaaagtttgtatttggataatgtcttatttgtacctggtattcgtaagaacttattgtctggtatggttttaaataattgtggttttaagcaagtacttgaaagtgacaagttcatctttttaagacatgg

SEQ ID NO: 81295 - DNA, 403 bp, Glycine max
gtaaacatgggtttgatattggtcaggaaatctatgacggggaatgcagcagtcaaaaggagtgattgcccctcattggtacaagtgtttttaacaaacagcaacagtacagagcattttgatgcatgtaagtggacaaaatcagaaccacattcctgggaattaatcttcccaatagaggtatgtggtcctaataatggttttgaaatgtggagttctgagtgggcaaatcaaacttcatggcatttgagtttccttattgacaatcccaaacagtctacagtttttgatattctcttgggaatctctcaagattttgaaattgctggtaatactcttatgccagctttttctgttccacaggctactgccagatcttctgaaaatgcggaatcctctgcat

SEQ ID NO: 81296 - DNA, 393 bp, Glycine max
ccatactccatggaatggactggtttggccaatagattactgagtaagggcaatgatattctgtgttgcgattatgctagttttgatggtttgattaccaagcaagttatgagcaagatggcagaaatgataaacagtctttgtggtggtgatgaaaaattgatgcgtgaaaggacgcacctgctgttggcttgttgttcaaggatggcaatttgtaagaaagatgtttggagagttgaatgtggaatcccttctggatttccgctcacagttatttgcaatagcatttttaatgagatgctcattagatatagctatgaaaaattactgcgccaggctaaagctccaagtatgtttttacaatccttcaaaaattttgtttctttgtgtgtg

SEQ ID NO: 81297 - DNA, 228 bp, Glycine max
  unsure (1)..(228): unsure at all n locations
tcaagcttttcgtcaacctccacaacccggagggtcacaccagtcagttgcttgtgagaaacaactgcgttttgttcatttcgccgaaccttcccattggagaagatcagtcggtcaatcccgcctccggatctgtgatcgaggcggcaatgcacgccgaggctacgcaagctgcacctncgacctacgctgtgcaccacctcgatcagatgtacagagacatcgacc

SEQ ID NO: 81298 - DNA, 180 bp, Glycine max
  unsure (1)..(180): unsure at all n locations
agaagtgacagaacatgcacgcgtacgtacgctcggtattcggctcgatgttcgagtttgttatatcgccttgtatcgctcgttccatggtggtggcttctaaagtggttgtgcggaataagnaagccactataaacggttttttaacggtgtgcacttttcaatcatttttcatgtttt

SEQ ID NO: 81299 - DNA, 344 bp, Glycine max
gtaagttcggaattcggcttgagtggggattataacttaattagtgttcatgaatatgtcaagccttactttagtggttctaaattgaaaagctttctagctagtcataatatcaccattactgatggtattgacaaaactagtgcaactttgcaatttagaaagttagcagattgtgattttctcaagagaaactttaagcagatgtctaatgttttgtgggtggctcctgaggacaaggcgagtttatggtcacaacttcattatgtttcgtgtaataatctggaaatgcaagaagcttatcttgtcaatctcgtaaatgtgttacgagaattgtatttgca

SEQ ID NO: 81300 - DNA, 52 bp, Glycine max
cacattctgttcttccttccactgcacaatcacctagttggttcttatcctt

SEQ ID NO: 81301 - DNA, 202 bp, Glycine max
gatggtattgacaaaactagtaactttgcaatttagaaagttagcagattgtgatggtctcaagagaaactttaagcagatgtctaatgttttgtgggtggctcctgaggacaaggcgagtttatggtcacaacttcattatgtttcgtgtaataatctggaaatgcaagaagcttatcttgtcaatctcgtaaatgtgtta

SEQ ID NO: 81302 - DNA, 190 bp, Glycine max
ttttctcatatttcacaggaacagacacacttccatgtagaacattctttctatatgtggcaaaaacaacgtagacacacttgagcgacacatgcaagggcgaaagtgatctaccaagaaattgagattgaaggggagcgaacgaaagagagcttaatctcgtggatacagtgacgaaattggggatgcc

SEQ ID NO: 81303 - DNA, 152 bp, Glycine max
cgtgtatttacaccaagaacacaagacaaatgtctggttgttttaagcgatccgagggacactatgaaaacatgttggtttaccaggacctccttacaggtgatgagcttctctatgactccttccgttacacagaaattgctaatgaaatg

SEQ ID NO: 81304 - DNA, 184 bp, Glycine max
  unsure (1)..(184): unsure at all n locations
cgaagatgcacgcgtacgtaagctcgtaattcggctcgatgccagtttcnatgatgccacagcagatgcttcctaggggacgtgtctatcgttatcctcctggtaggggtattcctgatgttcctatacctggggttgctggaggtatgttttctgttccatatgatgtgggtgggatgccgct

SEQ ID NO: 81305 - DNA, 130 bp, Glycine max
ttgacccatatgagatgaagaccaaaattatgtgtgctaatgtaaagagcatatatatgtagatatgtaatgtgctaactataatactttgtgtataatattagattagattaggtagggggagaaaaag

SEQ ID NO: 81306 - DNA, 123 bp, Glycine max
  unsure (1)..(123): unsure at all n locations
gatcctcaatacaatgaggttcangctcagatggaaacaaatttgtttaaattgtctcttgatgatgttgaaactcctaaaggttctatgttggatcttaaaatttctcaatctaaaattgca

SEQ ID NO: 81307 - DNA, 237 bp, Glycine max
  unsure (1)..(237): unsure at all n locations
cgtttcttgcgactcaaactcaaaccaatcgcgactggttattaaacaaaatggcggtccanatattaaaaaacctttatcctccaattcaaattcctaacactaagctatatccttctaaaaacgtgggaacgactttctaattaaccttcaacactatctctatctaacgaccctctagtttattaaatactatctctacttataaataaaatccattacttaacccaaccctat

SEQ ID NO: 81308 - DNA, 301 bp, Glycine max
ctcttcttcttttttttttttttttttttccttttttttttttttctttttttttcccctctctctttttttttcttttttttttctttttttcctttcttctttttattcttttttttcttttccccttttttcttcttttctcttcttctcctttttttcttctttttttttttttttttccttctttttttttttcttcccttttcttttctattttcttttcctctttttctcttttctttttcttttctttttttcttcttttttcttttttcttttctttttcttcctctttttt

SEQ ID NO: 81309 - DNA, 313 bp, Glycine max
catttgtgtcactggatggactgccaccccaatgcaggatgttcaggttacaattgattggtttatttcctctcaggaatgtgttcccaggacctattgtgttttaaatccacaaaatccttttgtgttaaataggtggatgggaaaactgactttccctcaaggcacttcccgaagtgttaagagaatgcctctttctatagggggaggagctggtgcaaagaatgctattctcatgaatatgccaaatgcttgtctttcaatgtggagatattttgttggagatctcgtctttgaagtttctaaaatgact

SEQ ID NO: 81310 - DNA, 63 bp, Glycine max
aaaaaaaaaaatttaacattttttaaaaaccaaaaaaaaaaaaaaaaaggggcggttcatatt

SEQ ID NO: 81311 - DNA, 323 bp, Glycine max
  unsure (1)..(323): unsure at all n locations
ttcatattttatagtgacttctgcatgctctctgatgcatgcaggcagatgttataatggctttggctgggtcaaatggaggatcttggtccactgcattctctcctaaatctgttgtaaagatggttagtgatggtaacttgcatggtggagaaaatgaaacaggtctagttagtaatgtggcattcccacaggagcttcatgggaaattgtctattactggcagttctagccatgccatcgggcttggtgatcgagtaactactncagcaggtaatccttaaactcaaacataatacctggtttgatttggctacattcta

SEQ ID NO: 81312 - DNA, 203 bp, Glycine max
ctcatagttgccactcactttatagcacaaacgtattgtttttctctctatccgcgggctagatctgaacatgagggaaaccgtaactgctctcaccaacgacatcaccaattttgtcgaacaactacctatttcgacagacctagtcatcggaggaattgcacccgggggatcacagattgacgctcgccaatatgatacca

SEQ ID NO: 81313 - DNA, 333 bp, Glycine max
ccaataggttactgagtaagggcaacgatattctgtgttgcgattatgctagttttgatggtttgattaccaagcaagttatgagcaagatggcagaaatgataaacagtctttgtggtggtgatgaaaaattgatgcgtgaaaggacacacctgctgttggcttgttgttcaaggatggcaatttgtaagaaagatgtttggagagttgaatgtggaatcccttctggatttccgctcacagttatttgtaatagcatttttaatgagatgctcattagatatagctatgaaaaattactgcgccaggctaaagctccaaatatgtttttac

SEQ ID NO: 81314 - DNA, 95 bp, Glycine max
  unsure (1)..(95): unsure at all n locations
gacgcacctgagttgttgcaggacgcacctgagttgttgcaggacgcacctgagttgaccaagctgtaagaaattcctcttgtgcgtnctgcaac

SEQ ID NO: 81315 - DNA, 376 bp, Glycine max
cttttgttttgtctacaacctccccgacaaaaaatgcacaggcacttatttctgcatggaaaaccggtgagacgatgccattcatatttgacacggtaacttattatttatcatgcagatttaccatatggagccacttaatgctccaactgatttgtttgaattgtaattatgagttatgatagtttaaacttacgattagtttggttcagaaatggtgtattattccttgatctggcaggtctgggacttgattaaattggcagattatctaacacacagagaggatgtagacccttttaggataggaatcactggaatatcacttggaggaatgcatgcatgtgttgctgcagttggtgatacttgctatgct

SEQ ID NO: 81316 - DNA, 311 bp, Glycine max
gtttagctcagagagagagagagagagagagagagacatcgctttataaaggcaaagagagtcaacagtgacagtttggcattgaaattctaagctttttcagatagggtcatactcgccaacagtaacacccacctacttgtcagcaacactcactcgtttactaaattccccaaatctaccttacccatccagatcataacccgaatagtccctatccccttccttaatttcccacattcctcattcaattgattcctttcaccaccacaccaacaccaaaacactaacctttattttatttttccccc

SEQ ID NO: 81317 - DNA, 352 bp, Glycine max
gggcacttcccgaagtgttaagagaatgcctctttctatagggggaggagctggtgcaaagaatgctattctcatgaatatgccaaatgctgttctttcaatgtggagatattttgttggagatctcgtctttgaagtttctaagatgacttctccctacattaaatgtacagtctctttcttcatagcatttggaaatttggctgatgataccatcaattttgaggcttttccccacaagctggtgcagtttggagagattcaggaaaaagttgtattgaaattttcacaagaggaatttcttacagcttggtcaactcaagtgcgtcctgcaacaactctgttggctgat

SEQ ID NO: 81318 - DNA, 219 bp, Glycine max
tacaataccaggtgattttgtcattggtgttaagttgacaaccataaacaatatgtgtgcatatgggctcaatcctggtatttcaggttctcgtattttgggcaccattccttagttcatttcacagcaaactgtttggaatcaaatggcaacagtgagaacaccattctattttgattctagcaagcagagctttttgtcaatttttcttttgaccct

SEQ ID NO: 81319 - DNA, 110 bp, Glycine max
gttctaattttattaatcctatgctgacgcgacttgttgagaactgtaagagtcttcaaatatctggttgatgagtgtccttttgcatttgtgaactagtatgtagtatt

SEQ ID NO: 81320 - DNA, 204 bp, Glycine max
ttcaaaaatatgccactcccatgatgcccctagatgaagaaattctttctaaggttgcacaagatatggttgaggaatggtttgattgtgttgatgaggaggatttaatttaggaaaatttttttttttgtaagacttaatggtgaaaaaactgctggtgacaagataaattctactatagtttataagtttgctataattatg

SEQ ID NO: 81321 - DNA, 290 bp, Glycine max
atgagatgctcattagatatagctatgaaaaattactgcgccaggcaaaagctccaagtatgtttttacaatccttcaaaaattttgtttctttgtgtgtgtatggcgatgataacttaattagtgttcatgaatatgtcaagccttactttagtggttctaaattgaaaagctttctagctggtcataatatcaccattactgatggtattgacaaaactagtgcaactttgcaatttagaaagttagcagattgtgattttctcaagagaaactttaagcagatgtct

SEQ ID NO: 81322 - DNA, 406 bp, Glycine max
gcacgcgtacgtaagttcggaattcggctttgtatctcgtttttgaagcttctaagatgacttctccctacattaaatgtacagtctctttcttcatagcatttggaaatttggctgatgacaccatcaattttgaggcttttccccacaagctggtgcagtttggagagattcaggaaaaagttgtgttgaaattttcacaagaggaatttcttacagcttggtcaactcatgtgcgtcccgcaacgactctgttggctgatgggtgcccatatttgtatgctatggtgcatgatagttcagtgtctacaataccaggtgattttgtcattggtgttaagttgacaaccataaacaatatgtgtgcatatgggctcaatcctggtatttcaggtctcgcttttgg

SEQ ID NO: 81323 - DNA, 273 bp, Glycine max
  unsure (1)..(273): unsure at all n locations
agagtgcttgacgtccatgcacgcgtaccgtagctcggaattcggcttgagctcgagcctttcgagcggctcgagcggctcgaggagtgggaaaagttgatgggatggcgttatctaacaagttgcatgcatttgttgaatatggatctgttgagctggctgagagagctgacgctgagccgaatgatgagggaaactggcggagttgccttcggattcccctgatgcttaaacacaggnctaaacctgctcaaggacggcgaaagaagggac

SEQ ID NO: 81324 - DNA, 323 bp, Glycine max
ccgaagtgttaagagaatgcctctttctatagggggaggagctggtgcaaagaatgctattctcatgaatatgccaaatgctgttctttcaatgtggagatattttgttggagatctcgtctttgaagtttctaagatgacttctccctacattaaatgtacagtctctttcttcatagcatttggaaatttggctgatgacaccatcaattttgaggcttttccccacaagctggtgcagtttggagagattcaggaaaaagttgtattgaaattttcacaagaggaatttcttacagcttggtcaactcaggtgcgtcctg

SEQ ID NO: 81325 - DNA, 402 bp, Glycine max
  unsure (1)..(402): unsure at all n locations
gtgagctataagctagtttatcgtgaggagaatatgaagttgtttgttttctttgttgctgcagtagttttggtagcatggccatgccatggcgcaggctaccaaaggttccctctccgaatgaaaactggctatggtgagcgttcttcggaggtaaaatgcgcaagttttaggcttgctgtggaagcacacaacatccgagcctttaaaaccattcctgaagagtgcgttgaaccaacaaaggactacattaatggcgaacaatttagatcagactctaaaacagttaaccaacaagctttcttttatgctagtgaacgcgaagtccatcacaacgacatatntatattcggcatagataacaccgtactctctaatatcccatactatgaaaaacatgga

SEQ ID NO: 81326 - DNA, 297 bp, Glycine max
  unsure (1)..(297): unsure at all n locations
ttttgatattctcttgggaatctctcaagattttgaaattgctggtaatactcttatgccagctttttctgttccacaggctactgccagatcttctgaaaatgcggaatcctctgcatgatctggaattcgtgttttctttcctttattgaattaaacaaacgaacaagcgaaagaaaattaggcatgaccctcttgttgagtatgctctgcctatctgaaaatttccacacctcttttaattgtcgtaatgatgtgtgaagtgtgtgttntttttaaaaaaaaaaaaaacaaaaa

SEQ ID NO: 81327 - DNA, 138 bp, Glycine max
gcaagtagtagctcttgacccttctttccaccttttctggtccctccctccagaaatggcttctaattccattcttcttctttgtatctttcttggggttgccactaaagttttttcctatgatgaagatctcaagac

SEQ ID NO: 81328 - DNA, 147 bp, Glycine max
gattggtcccattgattccgaagagaaaagaaaagatgtttgagccacaacagctatacactcgcgcgaagaccgaggaattcgacctcgaatcaggagaaaccctttacccaaggctgagcgtcggcgagaaccagctccgatggg

SEQ ID NO: 81329 - DNA, 413 bp, Glycine max
ctaaattgaaaagctttctagctagtcataacatcaccattactgatggtattgacaaaactagtgcaactttgcaatttagaaagttagcagattgtgattttctcaagagaaactttaagcagatgtctaatgttttgtgggtggctcgtgaggacaaggcgagtttatggtcacaacttcattatgtttcgtgtaataatctggaaatgcaagaagcttatcttgtcaatctcgtaaatgtgttacgagaattggattttgcacagtccagaggaagctcgccaattgagaaggaaagctctctctcgtattgaatggctgcaaaaagctgatgtgcctaccatagcacagattgaagagttccattcgatgcagaggatgatgaatgctcctgattcaaatgataatat

SEQ ID NO: 81330 - DNA, 375 bp, Glycine max
ctcaagcctaatcggctactttcttacccaacatcactcaaagagcgggtgcaattccaagtttccagtttaacaccctatttcgagcacatcccaatcctccttcccagctaccaaccctgattaactcattcccatagcctcagaagagcccactgccacattggaacccgatttcacacctcccaacagtctagctacacactgctgagatctatatgccataacctgtagccaacgctcagaaaaccaaagtacccattccttataagggttactgaccactcaaccctcccacttatactgactacaaagagttgattaacgacccaattacctttttccacggagaaaaccagttcgagccaacacgcg

SEQ ID NO: 81331 - DNA, 414 bp, Glycine max
tttttaatgagatgctcattagatatagctatgaaaaattactgcgccaggctaaagctccaagtatgtttttacaatccttcaaaaattttgtttctttgtgtgtgtatggtgatgataacttaattagtgttcatgaatatgtcaagccttactttagtggttctaaattgaaaagctttctagctggtcataatatcaccattactgatggtattgacaaaactagtgcaactttgcaatttagaaagttagcagattgtgattttctcaagagaaactttaagcagatgtctaatgttttgtgggtggctcctgaagacaaggcgagtttatggtcacaacttcattatgtttcgtgtaataatctggaaatgcaagaagcttatcttgtcaatctcgtaaatgtgttac

SEQ ID NO: 81332 - DNA, 67 bp, Glycine max
ttttaattgtcgtaatgatgtgtgaagtgtgtgttattttaaaagaggtgtggaaattttcagatag

SEQ ID NO: 81333 - DNA, 405 bp, Glycine max
gaaaaattgatgcgtgaaaggacgcacctgctgttggcttgttgttcaaggatggcaatttgtaagaaagatgtttggagagttgaatgtggaatcccttctggatttccgctcacagttatttgcaatagcatttttaatgagatgctcattagatatagctatgaaaaattactgcgccaggctaaagctccaagtatgtttttacaatccttcaaaaattttgtttctttgtgtgtgtatggtgatgataacttaattagtgttcatgaatatgtcaagccttactttagtggttctaaattgaaaagctttctagctagtcataacatcaccattactgatggtattgacaaaactagtgcaactttgcaatttagaaagttagcagattgtgattttctc

SEQ ID NO: 81334 - DNA, 168 bp, Glycine max
gcggaatcctctgcatgatctggaatttgtgttttctttcgcttgttcgtttgtttaattcaataaaggagattaggcatgaccctcttgttgagtatgctctgcctatttgaaaatttccacacctcttttaattgtcgtaatgatgtgtgaagtgtgtgttatttt

SEQ ID NO: 81335 - DNA, 321 bp, Glycine max
gtcgctgcacgcgtacgtaagctcggatttcggctcgggtaaaaacaaaactaaatttattataaaaaaaaaaaaaaaaaaaactagagggggtcactatggcggtggctgggcgtgactgatcttcttgaccttaaaattgtcctgctccgttctcccgccactaaccccctgctgtctcggcttcttgattcctgtcagggtctcatatttctgtttgctgtgccctccttaagctccgtgtcctttcatgtaatccctcattctctgaaataaatttctttactatatgccgtggggtcctttatgtgtgaattattt

SEQ ID NO: 81336 - DNA, 409 bp, Glycine max
gcacgaagaatgagagaataaaaaggattgagcatcttccttgtcacttaactatcttatggcaaatctggcaaatgctaatgatttcaggcttgtggactggctactttttgtatatgtacttagaattcaatgtgttgtttatatgcttatatttgatgtactagacttcatatggctgagctagatagtgacaagctacatactattgactttatttctctgatgatgtgaacagactaatataatgtctaggtgtttttgccgcagttttggttttattgttaagattttgttcttacgcagtcattttagttggaccacaggaagtactatagccattttgttcttatgcattgaatgcttataactcaatgtattgtttttctttaactttttttggggggca

SEQ ID NO: 81337 - DNA, 413 bp, Glycine max
gatgtcttacgttgctcataacgttaatcagccccaagagaaagatttgttagagggaaatttttcctttgatattaaatctcgctctagattggaaaaagtttcctctacaaaagcacaatttgttagtggaaaaaccttcaaatatgatataattggtgctggttcacattcttcaggagattttcctgaaaaggaagatcaagaaaaacccaaaaagattgataccagattgagacaaagaatagatcctcaatacaatgaggttcaggctcagatggaaacaaatttgtttaaattgtctcttgatgatgttgaaactcctaaaggttctatgttggatcttaaaatttctcaatctaaaattgcacttcccaagaacacagttggaggaaccattctgcgtagtgatc

SEQ ID NO: 81338 - DNA, 408 bp, Glycine max
gtttggaatttctgaagcgtaccggatttcattgtgatatcatttgtgtcactggatggactgccaccccaatgcaggatgttcaggttacaattgattggtttatttcctctcaggaatgtgttcccaggacctattgtgttttaaatccacaaaatccttttgtgttaaataggtggatgggaaaactgactttccctcagggcacttcccgaagtgttaagagaatgcctctttctatagggggaggagctggtgcaaagaatgctattctcatgaatatgccaaatgctgttctttcaatgtggagatattttgttggagatctcgtctttgaagtttctaagatgacttctccctacattaaatgtacagtctctttcttcatagcatttggaaatttggctg

SEQ ID NO: 81339 - DNA, 108 bp, Glycine max
agcgaaagaaaattaggcatgaccctcttgttgagtatgctctgcctatctgaaaatttccacacctcttttaattgtcgtaatgatgtgtgaagtgtgtgttatttt

SEQ ID NO: 81340 - DNA, 409 bp, Glycine max
caatgatattctgtgttgcgattatgctagttttgatggtttgattaccaagcaagttatgagcaagatggcagaaatgataaacagtctttgtggtggtgatgaaaaattgatgcgtgaaaggacgcacctgctgttggcttgttgttcaaggatggcaatttgtaagaaagatgtttggagagttgaatgtggaatcccttctggatttccgctcacagttatttgcaatagcatttttaatgagatgctcattagatatagctatgaaaaattactgcgccaggctaaagctccaagtatgtttttacaatccttcaaaaattttgtttctttgtgtgtgtatggtgatgataacttaattagtgttcatgaatatgtcaagccttactttagtggttctaaattg

SEQ ID NO: 81341 - DNA, 410 bp, Glycine max
caataccaggtgattttgtcattggtgttaagttgacaaccataaacaatatgtgtgcatatgggctcaatcctggtatttcaggttctcgtcttttgggcaccattcctcagtctatttcacagcaaactgtttggaatcaaatggcaacagtgagaacaccattgaattttgattctagcaagcagagcttttgtcaattttctattgaccttctcggtggaggaattttagtggacaaaactggagattggatcacacttatacaaaattctccaattagtaacttgttgagagttgctgcttggaagaaaggctgtttaatggttaaaattgtgatgtctgggaatgcagcagtcaaaaggagtgattgggcctcattggtacaagtgtttttaacaaacagcaac

SEQ ID NO: 81342 - DNA, 56 bp, Glycine max
tggagtttaatcttgtggtccgtcaaaagtttttaaattttgtgaggttcattatg

SEQ ID NO: 81343 - DNA, 410 bp, Glycine max
gtttgggagagagagtacacaattcaacaaatttagtggatgcatctgcgaacttggccagaggattaggttctcaggtctctccagatttggatagtaaactagatgagttccaacctgaatctgtgctgtctaatccagttaacattaattttgaacagaatcagggctctgttgctgttcagcagaccagaggtacacaagatggcggcgaaataactacttcaggactaagagatgggtcctcggatgatatgcacagggatggcggtctggttaaagtcaatggcatcagtgacacaaatgggcctggtcatcagctagattctgttgaagaaactagagaagcaataaattctagattacaagatagtaaccacttagtaatcaaagagaaggttagagcagaa

SEQ ID NO: 81344 - DNA, 416 bp, Glycine max
tttcagacttaaatcctctcctgcaccaacttgttcacacctgcaaagatctgttaacagggaaagctgattttgaaaattttatcgaggaagtggcatttgctttggactggagcattaataacagtgtcacctccacaaatgctgccattgcaagggataagatcaagaagcaattcagcagtcatttatcacaaaatcaaagtaaaacagatgttgaagataaacagtcttctcgcttgccctcatttgcatatcctgacgaacagtgtgaactcttcaacacacagaatgatcagtgtgatctccttgaagagattagaaaactaaaatatgatttgaggagcacaaaaactgcgaagaaagacttggaagaaaagctgctgtcagtaactgatgagaggcagaacttagca

SEQ ID NO: 81345 - DNA, 406 bp, Glycine max
tgaattttgattctagcaagcagagcttttgtcaattttctattgaccttctcggtggaggaattttagtggacaaaactggagattggatcacacttatacaaaattctccaattagtaacttgttgagagttgctgcttggaagaaaggctgtttaatggttaagattgtgatgtctgggaatgcagcagtcaaaaggagtgattgggcctcattggtacaagtgtttttaacaaacagcaacagtacagagcattttgatgcatgtaagtggacaaaatcggaaccacattcctgggaattgatcttcccaatagaggtatgtggtcctaataatggttttgaaatgtggagttctgagtgggcaaatcaaacttcatggcatttgagtttccttattgacaa

SEQ ID NO: 81346 - DNA, 413 bp, Glycine max
ctgcaacaactctgttggctgatgggtgtccatatttgtatgcaatggtgcatgatagttcagtgtctacaataccaggtgattttgtcattggtgtcaagttgacaaccataaacaatatgtgtgcatatgggctcaatcctggtatttcaggttctcgtcttttgggcaccattcctcagtccatttcacagcaaactgtttggaatcaaatggcaacagtgagaacaccattgaattttgattctagcaagcagagcttttgtcagttttctattgaccttctcggtggaggaatcttagtggacaaaactggagattggatcacacttatacaaaattctccaattagtaacttgttgagagttgctgcttggaagaaaggctgtttaatggtcaagattgtgatgtct

SEQ ID NO: 81347 - DNA, 406 bp, Glycine max
aagcagagcttttgtcaattttctattgaccttctcggtggaggaattttagtggacaaaactggagattggatcacacttatacaaaattctccaattagtaacttgttgagagttgctgcttggaagaaaggttgtttaatggtcaagattgtgatgtctgggaatgcagcagtcaaaaggagtgattgggcctcattggtacaagtgtttttaacaaacagcaacagtacagagcattttgatgcatgtaagtggacaaaatcagaaccacattcctgggaattaatcttcccaatagaggtatgtggtcctaataatggttttgaaatgtggagttctgagtgggcaaatcaaacttcatggcatttgagtttccttattgacaatcccaaacagtctacag

SEQ ID NO: 81348 - DNA, 351 bp, Glycine max
taataatggttttgaaatgtggagttctgagtgggcaaatcaaacttcatggcatttgagtttccttattgacaatcccaaacagtccacagtttttgatattctcttgggaatctctcaagattttgaaattgctggtaatactcttatgccagctttttctgttccacaggctactgccaggtcttctgaaaatgcggaatcctctgcatgatctggaatttgtgttttctttcattcaataaaggaaattgggcatgaccctcttgttgagtatgctctgcctatttgaaaatttccacacctcttttaattgtcgtaatgatgtgtgaagtgtgtgttattttaaaa

SEQ ID NO: 81349 - DNA, 419 bp, Glycine max
gtgccaatggttgggcttgtccttttcttcggggatcacatttcagaaacaattacttccttcagagaatcacggctcagcccagaatggctaaaaaatgctgcagaagaaatggctaaaaaagccagaaattatattaatcaagtttgcaacatatttacttatatgacagcaattcttgatcctcgaataaagggagacctgatccctgatagtttaaactcagaaaactttctggatgaagcaagaacccattttataagaaattattcagccagccatttctcatccatgagttctggatacaatgctcaagaaattgaagatggaggaagtgtttcctttgctgaggaaatagcacgcaagaagcgaaggacaagcatgagctctgccactgatgagcttacgcagtacctatc

SEQ ID NO: 81350 - DNA, 377 bp, Glycine max
gttgggatttaacagatcattaagtatatcaaatgtggtgacagtggcaatatttgtctttgttttcatatctacatttatgtaattttccttttctatttccccttatcggtaagtgcaggttatgaatttgattatgtatttgattggactattttaaagtaccagcaggcacaaaagaatagagtccagtctcgtatatctgtgagtatatttgctctacatgaagaggtttgagtcttcccatgcttataatactaatttttgtcatattgcagacagtccctggaacaagcagtagtcctgcaatgccaatggatgtagacaaccaatgaggttggtgcatctgaaattatttacataattttttgtgattc

SEQ ID NO: 81351 - DNA, 376 bp, Glycine max
ctgggaatgcagcagtcaaaaggagtgattgggcctcattggtacaagtgtttttaacaaacagcaacagtacagagcattttgatgcatgtaagtggacaaaatcagaaccacattcctgggaattaatcttcccaatagaggtatgtggtcctaataatggttttgaaatgtggagttctgagtgggcaaatcaaacttcatggcatttgagtttccttattgacaatcccaaacagtctacagtttttgatattctcttgggaatctctcaagattttgaaattgctggtaatacttttatgccagctttttctgtttcacaggctactgccagatcttttgaaaatgcggaatcctttgcatgatctggaat

SEQ ID NO: 81352 - DNA, 377 bp, Glycine max
tgtgtgtgtatggtgatgataacttaattagtgttcatgaatatgtcaagccttactttagtggttctaaattgaaaagctttctagctggtcataatatcaccattactgatggtattgacaaaactagtgcaactttgcaatttagaaagttagcagattgtgattttctcaagagaaactttaagcagatgtctaatgttttatgggtggctcctgaggacaaggcgagtttatggtcacaacttcattatgtttcgtgcaataatctggaaatgcaagaagcttatcttgtcaatctcgtaaatgtgttacgagaattgtatttgcacagtccagaagaagctcgccaattgagaaggaaagctctctctcgt

SEQ ID NO: 81353 - DNA, 278 bp, Glycine max
tgactccactacctaaattatgatgatctggtcctgtgtcacccaaaacacgagcagggctgcaggtcaagtgtgactacaggtccctctatattggctttaatggttacccgagggttggggggaaaagccacataccgagggctcttgaatctgtagatagaaatgcttttatgtgaagggtgtatgtgtatgcctccagaacctaaaatcttttgtctaacacgtatttatcatcatgtgtatacttatatatgatgaggatgatcattatgcag

SEQ ID NO: 81354 - DNA, 377 bp, Glycine max
ttcattatgaagaaaagggacaagcttagttgtcaagttggaatcaacccatactccatggaatggactggtttggccaatagattactgagtaagggcaatgatattctgtgttgcgattatgctagttttgatggtttgattaccaagcaagttatgagcaagatggcagaaatgataaacagtctttgtggtggtgatgaaaaattgatgcgtgaaaggacgcacctgctgttggcttgttgttcaaggatggcaatttgtaagaaagatgtttggagagttgaatgtggaatcccttctggatttccgctcacagttatttgcaatagcatttttaatgagatgctcattagatatagctatgaaaaattact

SEQ ID NO: 81355 - DNA, 364 bp, Glycine max
ggagttcgcgtgccagtacgcatacacggtagtgaatagattcctgtgagaaatgtgacttttaaagatatgtcagttggtctaacctacaagaagaagcatatctttcagtgtgcatttgttcaaggccgtgtaataggtaccatctatcctgctccctgtgagaaccttgatcggtacaatgagcaaggacagttggtaaagcattctgcgtcccagaatgtaacagatatagattatgatttttgaggtttcatgttcactaattcctggccttgttccttttactagggcctcaatttatgtctgtattagatcattttttggtggggttggagaagtcaagtcacgcttttcttttttt

SEQ ID NO: 81356 - DNA, 383 bp, Glycine max
  unsure (1)..(383): unsure at all n locations
tcggctcgagggtgnngagttctgagnttgggcaaatcaaaccttcatnggcatcttgagttgtccttatgtgacaaggtccgaaacacgtctacatgtcttttgatatatctcttcgcgaatctcttcaagattattgaaatgtgctaggtaatactccttatgcgcagcttgtttctgttccacagagctcactgacagatcttctgaaaatgtctgaatcctacgcatgatctggaattcgcgttttcttacgcttgttcgcttgtttaattcaataaacgaaattactcatgaccctttagcagagcatgctctgcctatctgaaaatatacacacctattttaattgttgtattgatgtgtgaagggtgtgttttttt

SEQ ID NO: 81357 - DNA, 370 bp, Glycine max
gtgattttctcaagagaaactttaagcagatgtctaatgttttatgggtggctcctgaggacaaggcgagtttatggtcacaacttcattatgtttcgtgcaataatctggaaatgcaagaagcttatcttgtcaatctcgtaaatgtgttacgagaattgtatttgcacagtccagaggaagctcgccaattgagaaggaaagctctctctcgtattgaatggctgcaaaaagctgatgtgcctaccatagcacagattgaagagttccattcgatgcagaggatgatgaatgctcctgattcaaatgataatattgatctactgttgagcattgatttgttgggtttacaaggagcaagtaaagcttt

SEQ ID NO: 81358 - DNA, 380 bp, Glycine max
gtgattgttgtgactcgttcttcttcgtcgttatcttcttcttttgttgtttgtgtgtttgttttttctctcacctgaaaatgtcttgctgcggtggtaactgtggttgcggaagcgcctgcaagtgcggcaacggctgcggaggctgcaagatgtacccagacttgagctacaccgagtcaaccaccaccgagaccttggtcatgggagtggcaccagttaaggctcaattcgagagtgctgaaatgggtgttcccgctgagaacgatggctgcaaatgtggagctaactgcacctgcaacccctgcacttgcaagtgaggtgttggagagctaaagcttcaagcagaaatggcccttagaaataatgataaaaactat

SEQ ID NO: 81359 - DNA, 384 bp, Glycine max
ggctgctgattatgttagtcaggtggatgcttcaacagctgatgttccagctaatagttatgacactaaggttggtgatgatagttctgggctccttttggaagctcaaagaaaggaggtaactatttgtcacactgaggaagccttggtgattaaaaatcatgaagatcatcatttacaaactgattcagaagaggttgtatcttgtatgaagagacagagtgtcttcaaaagttgtttggaattaaatgagtttactcaccaccaggctggaaatgctgattcacaagatgtaagtttcttcattggaggttcaaaattcagcagaggaatctaatgcgaattgttcaattacggattaaaatgaacaggaaaacatcaaac

SEQ ID NO: 81360 - DNA, 382 bp, Glycine max
aaacccgtgttctgatgcatggagtttggaatttctgaagcgtactggatttcattgcgatatcatttgtgtcactggatggactgccaccccaatgcaggatgttcaggttacaattgattggtttatttcctctcaggaatgtgttcccaggacctattgtgttttaaatccacaaaatccttttgtgttaaataggtggatgggaaaattgactttcccccagggcacttcccgaagtgttaagagaatgcctctttctatagggggaggagctggtgcaaagaatgctattctcatgaatatgccaaatgctgttctttcaatgtggagatattttgttggagatctcgtctttgaagtttctaaaatgacttctccc

SEQ ID NO: 81361 - DNA, 368 bp, Glycine max
attaaatgtacagtctctttcttcatagcatttggaaatttggctgatgacaccatcaattttgaggcttttccccacaagctggtgcaatttggagagattcaggaaaaagttgtattgaaattttcacaagaggaatttcttacagcttggtcaactcaggtgcgtcctacaacaactctgttggctgatgggtgtccatatttgtatgctatggtgcatgatagttcagtgtctacaataccaggtgattttgtcattggtgttaagttgacaaccataaacaatatgtgtgcatatgggctcaatcctggtatttcaggttctcgtcttttgggtaccattcctcagtctatttcacagcaaac

SEQ ID NO: 81362 - DNA, 112 bp, Glycine max
caataaaggaaattaggcatgaccctcttgttgagtatgctctgcctatctgaaaatttccacacctcttttaattgtcgtaatgatgtgtgaagtgtgtgttattttaaaa

SEQ ID NO: 81363 - DNA, 71 bp, Glycine max
attaatcgaccagaactatgtaagtactttttgttaatccgatcactttacaatcgcttttcctttatacc

SEQ ID NO: 81364 - DNA, 191 bp, Glycine max
gaacgagacacatgtgttggaagagtcacaggagaatggggcaacaacgctgggcagtatcttgctgcggataacattgagagcgctataaagactaatgaaagcctcaatggacaccacaagaatgtcaagtgcatgtgtgctgaagtcacttgtacaaactagtatattgagcaagggtcggttgatct

SEQ ID NO: 81365 - DNA, 388 bp, Glycine max
caaagccccattccataaccctaaccctaaatccgaatcttctcatgaaacctcccacgcaacactccaccgtttcagaatcaggttcgattccctaaccctccacaaatcccctttcttttctttgcagtttctccatggagggctctgcagaggatctcggagcccccgagtcatgggaggtcgctgatttggacgagtccatgaaccgcttgaacctcatggtcttttccaacaacgattctaagcaacctcaccagcgtctcgccgattataatgacgatgatgctccgctgccgccgcctccttcgtccagttgcgacgaggtttccgatgacgccatcaatcaggttgatcagttccttcgcgaagccattcagaaccctcg

SEQ ID NO: 81366 - DNA, 121 bp, Glycine max
gctcaactcgatagaggtatgtggacctaataatggatttgaaaagtgaacatctgagcggacaaagcaaactaaacgggattcgagcttgctcattgacaaacccaaacactctacagct

SEQ ID NO: 81367 - DNA, 288 bp, Glycine max
cggctcgagcaggctactgccagatcttctgaaaatgcggaatcctctgcatgatctggaatttgtgttttcttttgcttgttcgtttgtttaattcaataaaggaaattaggcatgaccctcttgttgagtatgctctgcctatttgaaaatttccacacctcttttaattatcgtaatgatgtgtgaagtgtgtgttattttaaaaaaaaaaataaaaaaaaatcatatactaaaaataacatataaattaccaaaaaatatcttctcctcttctaattaaacttt

SEQ ID NO: 81368 - DNA, 355 bp, Glycine max
ctctgatttaagctattttatgtggtcttctattgatgtaagtgtttaagcttatgtgaaccagcaagtacatcaggtgtgcaattagctttggattattctgaatgtgatgtgcatctaattgattgaaggaataatttggtcaatcaacttcgatattttttgtttttaaacccttttttgaatttttaagtcaaatataaatctattatatgtacaagaaaaacttatcatgtgaacactaaagatatttgttaaaagtttatatttgatttcaacttggtcttgttaactgttaatgccctgaaaattgtgtgaaaaaaccaaaatgcttcaatttcattttcttatatgc

SEQ ID NO: 81369 - DNA, 351 bp, Glycine max
gtatagcattggcctgtgctatgaatagttcttttagggggcgcgccagttctgatatttacaccatctgctctcaagactgtgaattatggaatcctgcttgcacaaaagcaatgactatgtcatttaatccaaacccgtgttctgatgcatggagtttggaatttctgaagcgtaccggatttcattgtgatatcatttgtgtcactggatggactgccaccccaatgcaggatgttcaggttacaattgattggtttatttcctctcaggaatgtgttcccaggacctattgtgttttaaatccacaaaatccttttgtgttaaataggtggatgggaaaactgactt

SEQ ID NO: 81370 - DNA, 102 bp, Glycine max
  unsure (1)..(102): unsure at all n locations
ctttttcttttttttgaaaaaaaaaaaaaaaaaaaaaaaaaattataaaaaaaagggggggncttttattaaaaaaaataaaaaaaccaaaaattaatattt

SEQ ID NO: 81371 - DNA, 353 bp, Glycine max
  unsure (1)..(353): unsure at all n locations
attcaggaaaaagttgtgttgaatctctccaaactgcaccagcttgttgngaaatttctgtattcagatgtcatcttaactaccatagttgctgctccaaaaagggttttactaacaccgcccatgcaatcaatttccgggttgtacaattctttaataggttgttgcttgttctgaaaagtagtggatagtaaaaaatattgaactttttttgagagaaaaatgcacagttaagaagctgttgtgtaatatggggaaataaagagtgtgactgttgtaggttttgacatcgatggttttgaccaattttggtgacgatgacataatgcatttgcagtatacaaattcattct

SEQ ID NO: 81372 - DNA, 159 bp, Glycine max
gccgtgccgtggcctgctcccgtacgtcagcattgagttcgggaccagctggatttgcctttccaatcacaacgggaagtgccggtcccttcaacgcactcattgtcacccaaactgttaatcccccagcccacccccgcattgtcaacgccaaggccg

SEQ ID NO: 81373 - DNA, 354 bp, Glycine max
ggaatggctgcatctttatggttgcaactattttcttagctgaataaatatccctatgaatcggcttcaccacgaaatctgtctatttcttgtcatgtaaaaagaacatacctttgcgtgcatatattcaatgagttaataaactgaagacagttcatggtacgattgcagctgatctagaatatatcacacttagttgaatgtctgggtgattgaatgcttactccttatacgtataattaacggagtatcattatctgtgttggcagtctccattcattaacaggtattacggataaggctcatgaggctctgtgattggctccaagacaatgatgacaatttttctggttt

SEQ ID NO: 81374 - DNA, 63 bp, Glycine max
aaaaaaaaaaaaaaaaaaaaaaaaaaaaaaaaaagaaaaaaaaaaaaaaaaaaaagaaaaaaa

SEQ ID NO: 81375 - DNA, 363 bp, Glycine max
gttgttcaagaatggcaatttgtaagaaagatgtttggagagttgaatgtggaatcccttctggatttccgctcacagttatttgtaatagcatttttaatgagatgctcattagatatagctatgaaaaattactgcgccaggctaaagctccaagtatgtttttacaatccttcaaaaattttgtttctttgtgtgtgtatggtgatgataacttaattagtgttcatgaatatgtcaagccttactttagtggttctaaattgaaaagctttctagctggtcataatatcaccattactgatggtattgacaaaactagtgcaactttgcaatttagaaagttagcagattgtgattttc

SEQ ID NO: 81376 - DNA, 335 bp, Glycine max
cgtagtttctcaccactttcacagtacgaatatgtggctgtcttgtgcgattcgagacaaactttcataacatgtcggttttccaggtccttcttacaggtgatgagcttctctatcactacctacgttacacggaaagtgcaaatgatatgctataagaagataagggaagagaggcttggtctcatatcgcgatgggtctacatactaacgtgcaaggttaaatatgttgtgctgaaggctttgggtcacacttgaacctttaatgagttgcaggcttcaatttttgaacttcagcacctgcattgcttgatggaattcgtgaatgacacttg

SEQ ID NO: 81377 - DNA, 365 bp, Glycine max
aatcttcccaatagaggtatgtggtcctaataatggttttgaaatgtggagttctgagtgggcaaatcaaacttcatggcatttgagtttccttattgacaatcccaaacagtctacagtttttgatattctcttgggaatctctcaagattttgaaattgctggtaatactcttatgccagctttttctgttccacaggctactgccagatcttctgaaaatgcggaatcctctgcatgatctggaattcgtgttttctttcgcttgttcgtttgtttaattcaataaaggaaattaggcatgaccctcttgttgagtatgctctgcctatctgaaaatttccacacctcttttaattgtcgta

SEQ ID NO: 81378 - DNA, 111 bp, Glycine max
caataaaggaaattaggcatgaccctcttgttgagtatgctctgcctatctgaaaatttccacacctcttttaattgtcgtaatgatgtgtgaagtgtgtgttattttaaa

SEQ ID NO: 81379 - DNA, 371 bp, Glycine max
cctgagcccgatctctctctagatgcaaccgtaggagagagaacctctgactgcgatagagtaagaccctaccgcaaacgctctgctatcattatcaccacagagtgtcacttgaccgacatcgcagaacgtatccacgatcctggctcgctgcttctgatacacttggactagcttgtggcaacaattacaatggcgacttcagagcgtcaagggcctcctccaactcctgcagctgatattgctggcaatgctcttgtggatcagttctgccacctcttgcacgaaagccctaggcttgctcatatgatttaccaagatgtcactaagccaggccaccctgagcagaacggcattatgggtcttacaac

SEQ ID NO: 81380 - DNA, 125 bp, Glycine max
gtactcacttactcactcactcgcaagcaaaaaaaaaggattccacccccggagaaagatgggggggaaggggccagatttttcctttggagcgaacaaatttccccagagacaacccatttgga

SEQ ID NO: 81381 - DNA, 371 bp, Glycine max
gagaacaccattgaattttgattctagcaagcagagcttttgtcagttttctattgaccttctcggtggaggaatcttagtggacaaaactggagattggatcacacttatacaaaattctccaattagtaacttgttgagagttgctgcttggaagaaaggctgtttaatggtcaagattgtgatgtctgggaatgcagcagtcaaaaggagtgattgggcctcattggtacaagtgtttttaacaaacagcaacagtacagagcattttgatgcatgtaagtggacaaaatcagaaccacattcctgggaattgatcttcccaatagaggtatgtggtcctaataatggttttgaaatgtggagttctg

SEQ ID NO: 81382 - DNA, 368 bp, Glycine max
caaggtttcagcttttgagtaccactaccaatggtgattttgttcaagggaaagatctcgcaatggttaaagttaatgtagcatgtgctgctgttggcttgacatcaagttacactccaactccattgttggaatctggtttgcaaaaagacagagggttaattgtggagtattttggaaggatgtcttacgttgctcataacgttaatcagccccaagagaaagatttgttagagggaaatttttcctttgatattaaatctcgctctagattggaaaaagtttcctctacaaaagcacaatttgttagtggaaaaaccttcaaatatgatataattggtgctggttcacattcttcaggagatttt

SEQ ID NO: 81383 - DNA, 358 bp, Glycine max
gtctcttctccttcttctctgatttgaaggatttgtgtggctggagatggtggtttcggggccgatcacgccggggcaggtgtctttcttgctgggggttattccagtttttgtttcatggatatattcagagtacttggagtacaagaaaccctcatcttctcccaaagttcattcagatgtttgtcttgaagagttggggaaggatgcaattaaggaagatgatcgggccattttgctggaatcagggcttacaagatcagcattagcaaaattccatccatcatctgtcaaattgaatttgattcggtttttgaccatggatgattctttcttgttagaaaatcgagcaactttg

SEQ ID NO: 81384 - DNA, 366 bp, Glycine max
ctcgagccgttttgtgttgaataggtggatggggaaactgactttcccccagggcacttcccgaagtgttaagagaatgcctctttctatagggggaggagctggtgcaaagaatgctattctcatgaatatgccaaatgctgttctttcaatgtggagatattttgttggagatctcgtctttgaagtttctaagatgacttctccctacattaaatgtacagtctctttcttcatagcatttggaaatttggctgatgacaccatcaattttgaggcttttccccacaagctggtgcagtttggagagattcaggaaaaagttgtattgaaattttcacaagaagaatttcttacagcttggtc

SEQ ID NO: 81385 - DNA, 297 bp, Glycine max
taacttgaaatatattacactttttaatcatataataatatgggcaaccctatgtatgatcagtcacctcacatcaaactttacagtgtcgaaaacttatgcatcagaacaccttggacttgtaattttgacttaaataaaataacataacaattcaagggaaaaataaagcatggaacttttattggtttatcgtgttgggaaggaggcaacgagcccaagtattgaccttcaccaaaaataaccaacatttactcaccacagttctctttattccgaatgcttactgctttcata

SEQ ID NO: 81386 - DNA, 367 bp, Glycine max
atcagaaccacattcctgggaattgatcttcccaatagaggtatgtggtcctaataatggttttgaaatgtggagttctgagtgggcaaatcaaacttcatggcatttgagtttccttattgacaatcccaaacagtctacagtttttgatattctcttgggaatctctcaagattttgaaattgctggtaatactcttatgccagctttttctgttccacaggctactgccagatcttctgaaaatgcggaatcctctgcatgatctggaatttatgttttctttcgcttgttcgttcgtttaattcaataaaggaaattgggcatgaccctcttgttgagtatgctctgcctatttgaaaatttc

SEQ ID NO: 81387 - DNA, 369 bp, Glycine max
atcaattttgaggcttttccccacaagctggtgcagtttggagaaattcaggaaaaggttgtattgaaattttcacaagaggaatttcttacagcttggtcaactcaggtgcgtcctgcaacaactctgttggctgatgggtgtccatatttgtatgctatggtgcatgatagttcagtgtctacaataccaggtgattttgtcattggtgttaagttgacaaccataaacaatatgtgtgcatatgggctcaatcctggtatttcaggttctcgtcttctgggcaccattcctcagtccatttcacagcaaactgtttggaatcaaatggcaacagtgagaacaccattgaattttgattctagcaag

SEQ ID NO: 81388 - DNA, 277 bp, Glycine max
ctcaactaatcatgtgtggctcaagtggctgcaaaagaatcacatgatctacaatgactgttctgacactaaaagatttccacagggcctttctcgagaaagcaacacagcctaaaaatatctgaatatggctgtgtggagtgatgcaaactccaaggctaagctctctctcagagtgtccctttcctgaacttttgcaacatccataatgattaatgctctgatctgctggaaaccaataccttcaagctctgcttatgggctggcgtcctctggt

SEQ ID NO: 81389 - DNA, 102 bp, Glycine max
aaataattaacaaaagcaactggatctgcaacagaaggggcacctgattcacaggcgaaggaagccacctataaaggccttacaaaaaccccgaagaagctt

SEQ ID NO: 81390 - DNA, 511 bp, Glycine max
  unsure (1)..(511): unsure at all n locations
atagaagtagctanntgacgtcgcatggcaccgtcgtaancgtaagcntnncggaannttcggctttcgagggcaagtgatcatatattcctgggcttgttgaccaagnnttgtattctgacttaaggtnntaataagttgtgcgagaaaattatgannaccttagacaaaagtnngttgtttggtganntcttaaacnnttcttacttgatgggaaagttgtattgaagggtaaagcatttattcctgtattnnttaatattagtgcaagggnngaaaatcatgnntagttcaaataccccttaattggcaccaggagggaaattcttgtcttcttagtgcaaagtnngatttcagaacctgcaattggtgaaggtaaaaataagnncaaacctcnaagctttacttgcaattgcattgtgggaagctatttagaaattattcattgataggtttcgcaaggtcctgattgcaacaatagttggtgccaatgctttttggttgatactta

SEQ ID NO: 81391 - DNA, 219 bp, Glycine max
tgagcattgatttgttgggtttacaaggagcaggtaaagcttttccaaacaagatcgtttttgatgataaacttgtgttggctaacacacaggaattctttgatggaaattttccagtggattcttggttaccaatttttgtgaattgtctttatcctgtaagtcaattacctccagaagctgttgttgtaaatgttacatgtggtggtggacgtggtg

SEQ ID NO: 81392 - DNA, 336 bp, Glycine max
  unsure (1)..(336): unsure at all n locations
gtgagaacacccatgtattgtgattctatcacgcagtgcaccatgcaacttgctatggaccttaccactggaagaattgtagaggccaccactgcaaattggatcacacttatacaaacacatccacatcatgactaaaacctagctgatggtgggcatagaaccaagctgaatgacagggaagactggcatgacaacgcgacagtcaagcactgtctnataccataaatggtacgggtgcaacatgcatacagagtcttgactgcacagatggacacatctaagcagtcacctacaagccctccagtggggacattgatcatacttataagagct

SEQ ID NO: 81393 - DNA, 369 bp, Glycine max
gacaaaactagtgcaactttgcaatttagaaagttagcagattgtgattttctcaagagaaactttaagcagatgtctaatgttttatgggtggctcctgaggacaaggcgagtttatggtcacaacttcattatgtttcgtgcaataatctggaaatgcaagaagcttatcttgtcaatctcgtaaatgtgttacgagaattgtatttgcacagtccagaggaagctcgccaattgagaaggaaagctctctctcgtattgaatggctgcaaaaagctgatgtgcctaccatagcacagattgaagagttccattcgatgcagaggatgatgaatgctcctgattcaaatgataatattgatctactg

SEQ ID NO: 81394 - DNA, 368 bp, Glycine max
gaaactttaagcagatgtctaatgttttgtgggtggctcctgaggataaggcgagtttatggtcacaacttcattatgtttcgtgtaataatctggaaatgcaagaagcttatcttgtcaatctcgtaaatgtgttacgagaattgtatttgcacagtccagaggaagctcgccaattgagaaggaaagctctctctcgtattgaatggctgcaaaaagctgatgtgcctaccatagcacagattgaagagttccattcgatgcagaggatgatgaatgctcctgattcaaatgataatattgatctactgttgagcattgatttgttgggtttacaaggagcaggtaaagcttttccaaacaagatt

SEQ ID NO: 81395 - DNA, 369 bp, Glycine max
ttttgtcattggtgtcaagttgacaaccataaacaatatgtgtgcatatgggctcaatcctggtatttcaggttctcgtcttttgggcaccattcctcagtccatttcacagcaaactgtttggaatcaaatggcaacagtgagaacaccattgaattttgattctagcaagcagagcttttgtcagttttctattgaccttctcggtggaggaatcttagtggacaaaactggagattggatcacacttatacaaaattctccaattagtaacttgttgagagttgctgcttggaagaaaggctgtttaatggtcaagattgtgatgtctgggaatgcagcagtcaaaaggagtgattgggcctcatt

SEQ ID NO: 81396 - DNA, 369 bp, Glycine max
aaaatgcactgttgatcatggttcagctatgctgaaattatggagttctgcttgaatcggtgattgtgagatttggatttgacagtgctggggtcaagcttttgtgtgtgaagcttttttttcttttcttgttattatcaaacttttccattacgtttaatcattcaactttctttttcccctattggaagaaagggggggattcactgaataagggtggctaggtgtctcaattgccttttttttctttaatgggaagagtggactgcaattttcagcttttttctgtggaacctgttctggttatggtctgtacatgaagaaagaaggcattgatacctttccctccaaagaaatcttatattgctt

SEQ ID NO: 81397 - DNA, 280 bp, Glycine max
ctcgtgtgtcaggacgcgcacgctatccttgcagcgagtgttctactctctcgttacaacacccacacttagcacacgctggtcgtccacctcgacaaacgacacacgaaacccctttattcacatatctatttgaaaacccgggcaactccgacatgctgtgcgactcagactctgatgctgagctcgatacctaccttgtacatgaccctgacaggacagctggacgcgtgacatgcgccttgaacaacttcttcattgcctctggtgagatcacttc

SEQ ID NO: 81398 - DNA, 313 bp, Glycine max
accaactgaagagaccaatacggccaccattaccaagcctccttttaatatatgtttactggtcatggtgcttttagtacacttgcattagggccaaatccaagttgactagagtcactactctaaaagctgtccagaagctgaagagacagtcaaggctctagtcacacacctcttcagcaagcgtggaaactccggcgccgagcgggtcataaataaggtccacgacagcgtgggtatgtgatgcgatgcatgactactgaacgggaacgttagcagtgtagtctgcgatcacgacgcggacacacagtgg

SEQ ID NO: 81399 - DNA, 345 bp, Glycine max
ggtaatactcttatgccagcaatttcaaaatcttgagagattcccaagagaatatcaaaaactgtagactgtttgggattgtcaataaggaaactctcaagattttgaaattgctggtaatactcttatgccagctttttctgttccacaggctactgccagatcttctgaaaatgcggaatcctctgcatgatctggaattcgtgttttctttcgcttgttcgtttgtttaattcaataaaggaaattaggcatgaccctcttgttgagtatgctctgcctatctgaaaatttccacacctcttttaattgtcgtaatgatgtgtgaagtgtgtgttattttta

SEQ ID NO: 81400 - DNA, 390 bp, Glycine max
  unsure (1)..(390): unsure at all n locations
tgacgtcgcatgcgacgcgtacgtaaggtcggaactcggctcgcatgaaaggacaaatgcagaggcctttgcaagggggaagcaaaaactgactggaggctagcaactactgatacatgacctgaatgatgggaagcatttgaaactatgattccaaatctaaagtttgaggttcctcgagttgatgttaactgaagctggtttcgttcaatttgctcctatgacctctttctataaatgttagaccaatggccgggactgtttcatgtgtaataatcttgtttaaaatatggataataatgtgtattcaagttgctgtagtagtatttgcatgtttagtgtaaacaggactatgttacttggnnnaaaaaaaaaaaaaaaaaatttaaa

SEQ ID NO: 81401 - DNA, 380 bp, Glycine max
aactctcccggatcgctgttcacgcacgcatctcggaacgcttcgaaggcttctcttgtctctctggagtcgaccagcagctaccgtaacccatggaacgacagcggcattaacctgcctgatgatgaacattcgcacaatggttggcccgtagcacccgcgcccggcttcggcatccactcgaactcttccaaactttcttttcacggcacccccactacgtcggcggcgcccggggatatgacaccgcggtacgacccccgtgcgtcggtcgacagtggacgcccgagcacttcccattctgcttctggatacccggccccgattgggcctcctcgttgaaccacaaaaaagaatttagccgtgcagcccacaaaagc

SEQ ID NO: 81402 - DNA, 273 bp, Glycine max
  unsure (1)..(273): unsure at all n locations
aaggaagaagaaaaangagaaaggaggaaagcagaagaacganganagngangaaaggccaaacccaaagggannnncaaggaagaagaaaaangagaaaggaggaaagaagaagaaaganganganagngangaaaggccaaanccaaaggncnnnncaagaaaaaaaaaggagaaaggaggaaagcagaagaggccaacaccaacaaagncngcccccaaagagagaaccgcagaaaaggccaccaaaggaaaaggaaagaagaaagagaa

SEQ ID NO: 81403 - DNA, 360 bp, Glycine max
atcatgatctatcatttgcccatgtcatttatttactataataaaagttacttttggcttgctttgtctcgtgtttttcttgaagtgtcttttttctattattcatcaataatttcacctgttaattgttaggcggtgattcatgattcatggacactgttatttgccttatatatcctttttcaacattgattatattcttctctgtttatcacatttatacttttgtcactttctctccctagacgtaaatattgaatggtccatcgtccatgcaacatttttcttaatagtttttttttttaattttagaaaatggttgctaaatatatttttttacttaaaatatttcttgagcac

SEQ ID NO: 81404 - DNA, 238 bp, Glycine max
gagctaactaagcactttccacttcttgttattcaccctttcataggcgagcacaatgagagaattgggcgtggcagcaatactgtgttgaattgagagcttggacgatatggtctacactgaaggcgatgcatccatgaatactggcatgaatgactaagactttgcactgtacttcaatgccttaatatcttgactgctactttccataaccttattcttttacaggaacagacct

SEQ ID NO: 81405 - DNA, 332 bp, Glycine max
aaaagattccttgacatctcttttaattcaaatgggaatgagttgccaaatcgctcatattcttaaacataaaattttacagaatatgaatactagtgagaatggtggttgtttgctcccgggtgatcgttatccagattggtggactttccacagtgaagattcttctgtgatttttgaaatccctcaagtgaacaaacgtaacttgaagacaatgatgtgccatgtccattattcttccccagtcaatatagcaacagatggcttgaaaaatttgttggtgataaatcacacaaagaccaccattcagctttacaagagtgatgcattag

SEQ ID NO: 81406 - DNA, 380 bp, Glycine max
gtctctttcttcatagcatttggaaatttggctgatgataccatcaattttgaggcttttccccacaagctggtgcagtttggagagattcaggaaaaagttgtattgaaattttcacaagaggaatttcttacagcttggtcaactcaggtgcgtcctgcaacaactctgttggctgatgggtgtccatatttgtatgcaatggtgcatgatagttcagtgtctacaataccaggtgattttgtcattggtgtcaagttgacaaccataaacaatatgtgtgcatatgggctcaatcctggtatttcaggttctcgtcttttgggcaccattcctcagtccatttcacagcaaactgtttggaatcaaatggcaacagt

SEQ ID NO: 81407 - DNA, 365 bp, Glycine max
cggacttgctgtgaggatctgacacatgcttcagtgaaacccttgataatagggcttacagaaggtgacaccaatccacgattagattaaaaggatgccagtgaattgagaaaatggagtaccagagaagacatatgttgacccaagcaaggcgtataagtttgtgagcacgacacagaccatggagctaagaagtcagagaaggtgaccaagcttggaccctgtggtaccaacaaagacaaatgctgaagaccgtgtgaaggataccatggtgctcttacagcaaaagagtgtgaagccttacgactatgactctgaagatgaagcacctgcacacttaatagtaaacgatgaatcatgtatga

SEQ ID NO: 81408 - DNA, 375 bp, Glycine max
attttgtgaggttcattatgaagaaaagggacaagcttagttgtcaagttggaatcaacccatactccatggaatggactggtttggccaatagattactgagtaagggcaacgatattctgtgttgcgattatgctagttttgatggtttgattaccaagcaagttatgagcaagatggcagaaatgataaacagtctttgtggtggtgatgaaaaattgatgcgtgaaaggacacatttgctgttggcttgttgttcaaggatggcaatttgtaagaaagatgtttggagagttgaatgtggaatcccttctggatttccgctcacagctatttgcaatagcatttttaatgagatgctcattagatatagct

SEQ ID NO: 81409 - DNA, 152 bp, Glycine max
taaaaattcatattctttgtagccttcaaaagtttatcagggtttcatatttccttgtactattctataatattctatgaaactgttttttatgttatttgcttgttgcaaatcttgcattgatgttcttggaaagaaagtaccttcttctc

SEQ ID NO: 81410 - DNA, 362 bp, Glycine max
ctctgtagagatctatgaaaaagttgggagggagtgtgcacacattgattacatgcaacctcattgcattgaagcctaacatgaagagatgacgaagagtacagggtgtacataatcgactgttatggagcttgattctttagtgtctacaatatcattttagcttgagagggtaaataaaaaatggacgatatacagtgtgcgggtataaccattgaattttggtattttacgtcgtagcatgccgggtaccatgatcgaatctatcttaacgcgtaatcgcgagaatgagatgggtacaactttaacattattgaatcacgcatactattagccgagctttagtcaaatagttattgacc

SEQ ID NO: 81411 - DNA, 205 bp, Glycine max
cgagcatgcctgcacgctctactctagacgatacctcccgctaatctcaaccccatatttttacccatgaggcaaaattgttcagggtgaatgaggcaatttatgggactattaaacctatcctgacaccacaagtaatgatatcggaattactcaatgaattcaaatacttcattttcaaaaaatattactgcaaaaaagtcca

SEQ ID NO: 81412 - DNA, 299 bp, Glycine max
  unsure (1)..(299): unsure at all n locations
aaaagcccnacaaggacccancacccccaccnccaggnnacaaaaacaaaacaccaccaccaccggggnacaaggacaagggcccaccaccaccaccaccnaagaaggccgacaaanacccancnccnccaccaccggggnacaaggacaagggaccnccgccgcccgacaagaacccnncnccaccaccaccaccanacaaggacccaacnccnccaccacccccagcggatgactacaaaacaccgccaccaccacccaagaaaccacacaaggatccancnncaccgccaccacac

SEQ ID NO: 81413 - DNA, 241 bp, Glycine max
ggagagaccgctagatgcctgcacgccgacttagggatcctccgggggagccaatccacatttcaagacacagtgggcaaaaagcccagatatgaatgggcattattcgacacctattaaagctatactgcatccacaggaaattatattggcatgcctcggcggattccaactccacattttctagaaatgaagccgcaaatctgttcatatatacagtgggagtttttcttggctaatc

SEQ ID NO: 81414 - DNA, 369 bp, Glycine max
caattttgaggcttttccccacaagctggtgcagtttggagagattcaggaaaaagttgtgttgaaattttcacaagaggaatttcttacagcttggtcaactcaggtgcgtcccgcaacgactctgttggctgatgggtgcccatatttgtatgctatggtgcatgatagttcagtgtctacaataccaggtgattttgtcattggtgttaagttgacaaccataaacaatatgtgtgcatatgggctcaatcctggtatttcaggttctcgtcttttgggcaccattcctcagtccatttcacagcaaactgtttggaatcaaatggcaacagtgagaacaccattgaattttgattctagcaagct

SEQ ID NO: 81415 - DNA, 380 bp, Glycine max
gtgatgataacttaattagtgttcatgaatatgtcaagccttactttagtggttctaaattgaaaagctttctagctggtcataatatcaccattactgatggtattgacaaaactagtgcaactttgcaatttagaaagttagcagattgtgattttctcaagagaaactttaagcagatgtctaatgttttgtgggtggctcctgaagacaaggcgagtttatggtcacaacttcattatgtttcgtgtaataatctggaaatgcaagaagcttatcttgtcaatctcgtaaatgtgttacgagaactgtatttgcacagtccagaggaagctcgccaattgagaaggaaagctctctctcgtattgaatggctgcaa

SEQ ID NO: 81416 - DNA, 381 bp, Glycine max
ctttaagcagatgtctaatgttttgtgggtggctcctgaggacaaggcgagtttatggtcacaacttcattatgtttcgtgtaataatctggaaatgcaagaagcttatcttgtcaatctcgtaaatgtgttacgagaattgtatttgcacagtccagaggaagctcgccaattgagaaggaaagctctctctcgtattgaatggctgcaaaaagctgatgtgcctaccatagcacagattgaagagttccattcgatgcagaggatgatgaatgctcctgattcaaatgataatattgatctactgttgagcattgatttgttgggtttacaaggagcaggtaaagcttttccaaacaagattgtttttgatgataagct

SEQ ID NO: 81417 - DNA, 380 bp, Glycine max
tggatggactgccaccccaatgcaggatgttcaggttacaattgattggtttatttcctctcaggaatgtgttcccaggacctattgtgttttaaatccacaaaatccttttgtgttaaataggtggatgggaaaattgactttcccccagggcacttcccgaagtgttaagagaatgcctctttctatagggggaggagctggtgcaaagaatgctattctcatgaatatgccaaatgctgttctttcaatgtggagatattttgttggagatctcgtctttgaagtttctaagatgacttctccctacattaaatgtacagtctctttcttcatagcatttggaaatttggctgatgataccatcaattttgaggctt

SEQ ID NO: 81418 - DNA, 326 bp, Glycine max
ttactacttaatcagtcattcatcctatataatatggagtaatatgagtatatgacgttgcaattttctagatgccacttatgacaaaaaacgcccaccacattctaccctgcacagttgtaaggggaacttgagaggaacttgcaactagtcaatggggcgttttacaaaggattcaaattcaactagcttttacaaacgcccaccaactagttttctttatattataggaaaaccactatagtcaggattagcaggcaaaggtagtttcttagtcagctcctcctgctttccttgtttctatgcttaggtattcttagttgact

SEQ ID NO: 81419 - DNA, 137 bp, Glycine max
tgacattgcaaatacaaggagtctttcttttttcagatagcaaaacataaattgtataattctgaaatctccatctgtcatgtgatccacatgccatatggagggttcagaattatacaatttatgttatgccatct

SEQ ID NO: 81420 - DNA, 285 bp, Glycine max
gtaaaggggaaaaaattggtctgcttgaaataaccagtctaggggttcaaatccatcaaatgaagctagttatagttaaggggggcgatttggggtaaaggaaaaaaagggatatgggttggtggtaatgggaggttttggttgtaatgtaaaagtggaaagggttggagggctgaagggctgtatggcctggggtaaaaggaatagacgtgccccgttggggtggagggcgacttcccgcttaatggggttgatattttgaatcatagaccattgaagatgaac

SEQ ID NO: 81421 - DNA, 367 bp, Glycine max
gggaagtgccctgagggaatgcctctttctatagggggaggagctggtgcaaagaatgctattctcatgaatatgccaaatgctgttctttcaatgtggagatattttgttggagatctcgtctttgaagtttctaagatgacttctccctacattaaatgtacagtctctttcttcatagcatttggaaatttggctgatgacaccatcaattttgaggcttttccccacaagctggtgcagtttggagagattcaggaaaaagttgtgttgaaattttcacaagaggaatttcttacagcttggtcaactcaggtgcgttccgcaacgactctgttggctgatgggtgcccatatttgtatgcta

SEQ ID NO: 81422 - DNA, 268 bp, Glycine max
  unsure (1)..(268): unsure at all n locations
gaagattctggtgaatgcgtagaataggaaactgaagaaattagcgtgacaaatgtcgggtgtgtccagcatctccatagggtcagtcgncggaggagctcgttgacgtcagcagacgtacacacgtcgacgacgattaccgatgatgttctctctatgctgcatcaggagaagaacccgtacatggtgtcggcagacgcaggagagcattttcagacaccttgtattgagaacaacttagatggcaagcttgtctactgcctttata

SEQ ID NO: 81423 - DNA, 321 bp, Glycine max
attacagcagcaaaggaaggttgtggtaagtaaatagtagtaacctaacccttgcgtttgcgagtgaggctgatgttgggtttggaaggcaaaggctggtgttgtcccaatccaaggtttgtttgtgtttgtgtttgcgccctgtcttgtctcaatttcgccggtgttttttgcttacttagatatctcatcgacatatctgagctgtgtagagagaagtaatgttaagcaaacggaatggcgaacatatacattgaatggatcttgaagcaacagcctgattattggcgcgttccttgagactaaaatattgtgtacttt

SEQ ID NO: 81424 - DNA, 371 bp, Glycine max
gaggggacacaatgtgcggaagcaagcgcagatgacgatgcggtgcatgcaagcactggtgagggtgcaggcacgagtacgggctcgccgattccaattgagtcacgcggatcaggaaagagagaagaaagaagagcccaagcccatacccgtgcccgtgcccatgagccccctgagaagaatagacgacattaatgactgggacaataggcgtcaaagtagctacaaaattaaggaaaacgatttgcggaaacatgaagctgtaatgaagagagagagagctcttgcatacgctttcaactatcaacagcaacaacaaaagcaatttttgcagccagactggaatggtaatgatgatgtaggaacaaact

SEQ ID NO: 81425 - DNA, 352 bp, Glycine max
gttctgatgcatggagtttggaatttttgaagcgtaccggatttcactgtgatatcatttgtgtcactggatggactgccaccccaatgcaggatgttcaggttacaattgattggtttatttcctctcaggaatgtgttcccaggacttattgtgttttaaatccacaaaatccttttgtgttaaataggtggatggggaaactgactttcccccagggcacttcccgaaatgttaagagaatgcccttttctatagggggaggagctggtgcaaagaatgctattctcatgaatattccaaatgctgttctttcaatgtggagatattttgttggagatcttgtgtttta

SEQ ID NO: 81426 - DNA, 159 bp, Glycine max
cgggtgcgtattgataggtcttgaggcacatacattggggtttcttatattattttttaatgcatgatcatcaggttgcaactttgttttttttcttcaatttagttttcactttctcatcttgtatatacactattctctattatcattatttttttt

SEQ ID NO: 81427 - DNA, 368 bp, Glycine max
aaagcaatgactatgtcatttaatccaaacccgtgttctgatgcatggagtttggaatttctgaagcgtaccggatttcattgtgatatcatttgtgtcactggatggactgccaccccaatgcaggatgttcaggttacaattgattggtttatttcctctcaggaatgtgttcccaggacctattgtgttttaaatccacaaaatccttttgtgttaaataggtggatgggaaaactgactttccctcagggcacttcccgaagtgttaagagaatgcctctttctatagggggaggagctggtgcaaagaatgctattctcatgaatatgccaaatgctgttctttcaatgtggagatattttgg

SEQ ID NO: 81428 - DNA, 367 bp, Glycine max
gtagtgccttactgcttggtcaactcaggtgcgtcctgcaacaactctgttggctgatgggtgtccatatttgtatgcaatggtgcatgatagttcagtgtctacaataccaggtgattttgtcattggtgtcaagttgacaaccataaacaatatgtgtgcatatgggctcaatcctggtatttcaggttcttgtattttgggcaccattcctcagtccatttcacagcaaactgtttggaatcaaatggcaacagtgagaacaccattgaattttgattctagcaagcagagcttttgtcagttttctattgaccttctcggtggaggaatcttagtggacaaaactggagattggatcacactt

SEQ ID NO: 81429 - DNA, 369 bp, Glycine max
ctcgagccgcaatttgttagaaagatgtttggagagttgaatgtggaatcccttctggatttccgctcacagttatttgcaatagcatttttaatgagatgctcattagatatagctatgaaaaattactgcgccaggctaaagctccaagtatgtttttacaatcccttcaaaaattttgttctttgtgtgtgtatggtgatgataacttaattagggttcatggatatgtcaagccttactttagtggttctaaattgaaaagctttctagctagtcataacatcaccattactgatggtattgacaaaactagtgcaactttgcaatttaaaaagttagcagattgtgattttctcaagagaaact

SEQ ID NO: 81430 - DNA, 68 bp, Glycine max
gtgtgaagtgtgtgttattttaaaaaataaaaaaaaaaaaaaaagaaaaaaaaataaatgataaggtg

SEQ ID NO: 81431 - DNA, 383 bp, Glycine max
gacttaacaacagcacaaagcgggttactgtctgttcaagctaccatctctctctctctttcttagtgcctccttgccagaagttaaaatggcccaagaaactttcctattcacatctgaatcagtgaacgaggggcaccctgacaagctctgtgaccagatctccgatgctgtgctcgatgcatgcttggagcaggaccctgacagcaaggttgcctgtgaaacctgcaccaagaccaacatggtgatggttttcggagagatcacaaccaaggccaacgtggactatgagaagattgtgcgtgacacatgcaggaacattggttttgtctctgatgatgttggtcttgatgctgacaactgcaaggtcctcgtcaacattg

SEQ ID NO: 81432 - DNA, 303 bp, Glycine max
gacgctgacgcacgcgtacgaagctcgaaattcggatcgaggtggatctaaattgaaaagctttctagctagtcataacatcaccattactgatggtattgacaaaactagtgcaactttgcaatttagaaagttagcagattgtgattttctcaagagaaactttaagcagatgtctaatgttttgtgggtggctcctgaggacaaggcgagtttatggtcacaacttcattatgtttcgtgtaataatctggaaatgcaagaagcttatcttgtcaacctcgtaaatgtgttacgagaatt

SEQ ID NO: 81433 - DNA, 394 bp, Glycine max
gtaaatgtgttacgagaattgtatttgcacagtccagaggaagctcgccaattgagaaggaaagctctctctcgtattgaatggctgcaaaaagctgatgtgcctaccatagcacagattgaagagttccattcgatgcagaggatgatgaatgctcctgattcaaatgataatattgatttactgttgagcattgatttgttgggtttacaaggagcaggtaaagcttttccaaacaaaattgtttttgatgataagcttgtgttggctaacacacaagaattctttgatggaaattttccagtggattcttggttaccaatttttgtgaattgtctttatcctgtaagtcaattaccttcagaagctgtcgttgtaaatgttacatgtggta

SEQ ID NO: 81434 - DNA, 300 bp, Glycine max
ctagagcagattcggttggcgctagtgaacacaaggagcgacatgacagggggaacaaagcagaccaagattgtaacataggcaaggatgggtgaaacagacggctgaaaaaatgagacgagctccttagagtgcatgattgcgctaaacactttacgagtggaagaaatgggagctgattatggggcatatgctggattctaaatgatgaacaacaacggactatagtgtgaccctaggaaagacgaattatgaagctttctcagaggactaagcaagatatgtaccaccagatcgtaa

SEQ ID NO: 81435 - DNA, 286 bp, Glycine max
agcacaacgaaccaaagttaactactctagagagagagagagagagagagagagagagagagagagatggagagtgaaagaagaagataatgatgagtgagagaaacaacatctatgacgaggaatgtggaggttgctgagataagatacaaaggaataatgttgatgaagtgggacatgtcagtcattaaaaatatagaacccaataagcgttcaaggatgtttgttcgtgttctattctaccgctgtcgattccttaagtgtctactaaactaactttttttat

SEQ ID NO: 81436 - DNA, 334 bp, Glycine max
  unsure (1)..(334): unsure at all n locations
caaagacaaatttatntttatacaactccctacgtcctccgggcgcagtgtttctttccaaatccgaccacactaacaacaaacttcctatcttcctctactttcacggcggctccttttgcgtcgaatcctgtcttcttctttttcgtccaccgttctctcaacatcttggtctcataagccaatataatagtcatctccgtcgaacttagactccttctacaccatcctatcccttgttgcttacgaagacagttggaccactctcaaatggattgcttatccacgccaacaacaccaacaccaccaaccttgagccatggctacttatcca

SEQ ID NO: 81437 - DNA, 196 bp, Glycine max
caaggagcaggtaaagcttttccaaacaagattgtttttgatgataagcttgtgttggctaacacacaagaattctttgatggaaattttccagtggattcttggttaccaatttttgtgaattgtctctatcctgtaagtcaattaccttcagaagctgtcgttgtaaatgttacatgtggtagtggacgtggtg

SEQ ID NO: 81438 - DNA, 241 bp, Glycine max
ttcgtttgtttaattcaataaaggaacaagcgcatgaccgcttgtgtgagaatgctatgcctatctggaaattttcacacctattttaatttgcgtaatgatcagtgaagactgcgtttttttaattcttaaaaaaattaaaatgggggtccgttgactcttgagcttgttgatcctggaaatttatatcggtccgtctcctgctggctttccttcttttcctttaatgaggattcatttc

SEQ ID NO: 81439 - DNA, 387 bp, Glycine max
ctcgagccgctcgagccgcgctcacagttatttgcaatagcatttttaatgagatgctcattagatatagctatgaaaaattactgcgccaggctaaagctccaagtatgtttttacaatccttcaaaaattttgtttctttgtgtgtgtatggtgatgataacttaattagtgttcatgaatatgtcaagccttactttagtggttctaaattgaaaagctttctagctggtcataatatcaccattactgatggtattgacaaaactagtgcaactttgcaatttagaaagttagcagattgtgattttctcaagagaaactttaagcagatgtctaatgttttgtgggtggctcctgaggacaaggcgagtttatggtcacaac

SEQ ID NO: 81440 - DNA, 243 bp, Glycine max
aaatgataatattgatttactgttgagcattgatttgttgggtttacaaggagcaggtaaagcttttccaaacaaaattgtttttgatgataagcttgtgttggctaacacacaagaattctttgatggaaattttccagtggattcttggttaccaatttttgtgaattgtctttatcctgtaagtcaattaccttcagaagctgtcgttgtaaatgttacatgtggtagtggacgtggtgg

SEQ ID NO: 81441 - DNA, 387 bp, Glycine max
ctcgagccgtgccaccccaatgcaggatgttcaggttacaattgattggtttatttcctctcaggaatgtgttcccaggacctattgtgttttaaatccacaaaatccttttgtgttaaataggtggatgggaaaattgactttcccccagggcacttcccgaagtgttaagagaatgcctctttctatagggggaggagctggtgcaaagaatgctattctcatgaatatgccaaatgctgttctttcaatgtggagatattttgttggagatctcgtctttgaagcttctaagaagacttcttcctacattaaatgtacagtctttttctttattgcattttgaaattttgctgcagataccatcaattttgaggttttttccca

SEQ ID NO: 81442 - DNA, 272 bp, Glycine max
gttaaataggtggatggtaaaactgactttccctcagggcacttcccgaagtgttaagagaatgcctctttctatagggggaggagctggtgcaaagaatgctattctcatgaatatgccaaatgctgttctttcaatgtggagatattttgttggagatctcgtctttgaagtttctaagatgacttttccctacactaaatgtacaggctctttcttcatagcatttggaaaatttggctgatgacacccattaattttaggttttttcc

SEQ ID NO: 81443 - DNA, 386 bp, Glycine max
ctttccagaagttaaaactctcttcacttgaagcgtaagtatatccttggcatgctgctttttattttagttgtacctgagtgattatatgttttcctataaatataataagaaaatggttatacacactaacatttagaagaccaaaaagtcggattgaatacatgttatccgctttaggggaattgtctatatagtagtttattaacatggtcttataccccattgagtgtgtggtctgcattttatttactgattttcttgtttactttcatgctttgtagtactgggcaaaagcataaaggttcaagtggctcacaaagtaaaagggcaaaaaaaatcaaacctgtgaaacgtgcatcaaaaaataagttgcatcaagagga

SEQ ID NO: 81444 - DNA, 290 bp, Glycine max
caagaaaaacccaaaaagattgataccagattgagacaaagaatagatcctcaatacaatgaggttcaggctcagatggaaacaaatttgtttaaattgtctcttgatgatgttgaaactcctaaaggttctatgttggatcttaaaatttctcaatctaaaattgcacttcccaagaacacagttggaggaaccattctgcgtagtgatctattggcaaattttttgacagagggcaattttagagcaagtgttgatttgcagcgcactcatcgtattaaagggaatga

SEQ ID NO: 81445 - DNA, 308 bp, Glycine max
gacaaaactagtgcaactttgcattttagaaagttagcagattgtgattttctcaagagaaactttaagcagatgtctaatgttttatgggtggctcctgaggacaaggcgagtttatggtcacaacttcattatgtttcgtgcaataatctggaaatgcaagaagcttatcttgtcaatctcgtaaatgtgttacgagaattgtatttgcacagtccagaggaagctcgccaattgagaaggaaagctctctctcgtattgaatggctgcaaaaagctgatgtgcctaccatagcacagattgaaga

SEQ ID NO: 81446 - DNA, 60 bp, Glycine max
  unsure (1)..(60): unsure at all n locations
aggggccaagaaacaaagnggagancggagagagagagagagagagagaggagggaaagg

SEQ ID NO: 81447 - DNA, 331 bp, Glycine max
tgtgggtggctcctgagtacaaggcgagtttatggtcacaacttcattatgtttcgtgtaataatctggaaatgcaagaagcttatcttgttaatctcgtaaatgtgttacgagaattgtatttgcacagtccagaggaagctcgccaattgagaaggaaagctctctctcgtattgaatggctgcaaaaagctgatgtgcctaccatagcacagattgaagagtttcattcgatgcaaaggatgatgaatgctcctgattcaaatgataatattgatctacttgtgagcattgattttgttgggtttacaaggagcatgtaaagcttttt

SEQ ID NO: 81448 - DNA, 321 bp, Glycine max
  unsure (1)..(321): unsure at all n locations
cgcaaacacaatgaattattgtgactaaccccagatttgttctgtgctgacctcattttgcactctaaaccatggcttcaaagctcacannttttgctgtctttatggctgatatgctggatctaacacttagcctaactgtttgacaaagaagaaacaccactagtggcgtgtcttgcaagagaccagaatgttattatctgggtgtataactctgatataacagctggctattgcgtgggcgcatatttgtttctgtctgtaagacaagacctgataatgattgaatgtagatgctgaaggtgccgtcagccttttaac

SEQ ID NO: 81449 - DNA, 332 bp, Glycine max
ctcgagccgcaaactgtttggaatcaaagggcaccagtgagaccaccattgaattttgattctagcaggcagagcttttgtcaattttatatggaccttctcggtggaggaattttagtggacaaaactggagattggatcacacttatacaaaattctccaattagtaacttgttgagagttgctgcttggaagaaaggctgtttaatggttaagattgtgatgtctgggaatgcagcagtcaaaaggagtgattgggcctcattggtacaagtgtttttaacaaacagcaacagtacagagcattttgatgcatgtaagtggacaaaatc

SEQ ID NO: 81450 - DNA, 156 bp, Glycine max
  unsure (1)..(156): unsure at all n locations
gatcgttcttcttctttccactcactctcactctctgtgttggtgagatgggtatgtcatggctgggcgtctntnaatggctcancctcacaatggcttcaccaacaacacttcaaaccagctattggtacttcatgactttctgggtatgattgc

SEQ ID NO: 81451 - DNA, 196 bp, Glycine max
tctcaagcgaattatcagtgatcgtcgccggaaaaattctccgtggaagccatatagcaccggaatatgccctcaatattctccaacccgagattctgattattcgggaaattttggagattctgatgaaacaaattcagaaatttcacatacggatgaggtaatcacaacattagagagaaacggtataagtttt

SEQ ID NO: 81452 - DNA, 128 bp, Glycine max
ttcttaatccattatgcctttttatttcaccagtttgcatatctgaacattttccatttctttccctcgtgtaaagtttgttgtacacttatgtaggcaatttcacatattgtcctgtttgtttgggg

SEQ ID NO: 81453 - DNA, 210 bp, Glycine max
aacgattacggaacccacttcgacgcagacggcaacaaggcgttgccctcatccttccaatctttgacagcatcttctatctatatcggagacttgtttggtgcccttatcgcggcgtcaatcaacgatcgatggggtcgcaaaatggtcttctggattgcgtctatctgcatcctgctcggcggttgtgcgcatgttggcctttccacc

SEQ ID NO: 81454 - DNA, 370 bp, Glycine max
cattgatagagatttcagaaaccaaatttcatttcttggtcatattcttatgaagccaaggatatatggtgatcttgtttgtttatggcctagcagccctgtgtgttccacttctttctactgtgtatctgttactctctagctcgttctgcaacctaattcaaaatggaagaaatgaagtaaaagcacataaatctagtgtaattataatcatattttcattttttcccttctgttttacttttatttaagaataaaatatgttttttttataccaatataggtctagttggtaaggaacaaattcatgttccaaaaaaaaaaaaattaaaaataaaactatatcattctataattgtaagattaattt

SEQ ID NO: 81455 - DNA, 388 bp, Glycine max
ggtgatgataacttaattagtgttcatgaatatgtcaagccttactttagtggttctaaattgaaaagctttctagctggtcataatatcaccattactgatggtattgacaaaactagtgcaactttgcaatttagaaagttagcagattgtgattttctcaagagaaactttaagcagatgtctaatgttttgtgggtggctcctgaggacaaggcgagtttatggtcacaacttcattatgtttcgtgtaataatctggaaatgcaagaagcttatcttgtcaatctcgtaaatgtgttacgagaattgtatttgcacagtccagaggaagctcgccaattgagaaggaaagctctctctcgtattgaatggctgcaaaaagctg

SEQ ID NO: 81456 - DNA, 376 bp, Glycine max
gtgagaacaccattgaattttgattctagcaagcagagcttttgtcaattttctattgaccttctcggtggaggaattttagtggacaaaactggagattggatcacacttatacaaaattctccaattagtaacttgttgagagttgctgcttggaagaaaggctgtttaatggttaagattgtgatgtctgggaatgcagcagtcaaaaggagtgattgggcctcattggtacaagtgtttttaacaaacagcaacagtacagagcattttgatgcatgtaaatggacaaaatcggaaccacattcctgggaattgatcttcccaatagaggtatgtggtcctaataatggttttgaaatgtggagttctgagt

SEQ ID NO: 81457 - DNA, 120 bp, Glycine max
tgggttggggattaagggaaatagggcttgcccttttggtggggatggctttgcttatttgaaaatttcaacacctctttaaatggtcggaaaggatggggggaaggggtgtgtattttt

SEQ ID NO: 81458 - DNA, 378 bp, Glycine max
cgagataactagaaacagtgtgatgaaaatgaaggtccttgttttcttcgttgctacaattttggtagcatggcaatgccatgcgtacgatatgttccctctccgaatgaacactggctatggtgcccgtactccggaggtgaaatgcgcaagttggaggcttgctgtggaagcacacaacatctttggctttgagaccattcctgaagagtgcgttggagcaacaaaagaatacatccatggcgaacaatatagatcagactccaaaacaggtaaccaacaagcttacttttatgccagagaacctcgagtccatcccaaggacacatttgtgttcagtatagatggcaccgtactctctaatattccatactacaa

SEQ ID NO: 81459 - DNA, 371 bp, Glycine max
gtgtaatggctagaagttttttgttcttgatgctacctcttgttcgttctagcggtacaaccataagggcataacccatgtatgattgcgataatatgatttatgaatataaaacttattatggctctcatgctaaatgatcaaggggtatcaagtggctgctcaagtcatgagcatatcataatgatggttgttggacgatctacagagagtgatatttgccagcattatgaaccattcgtggctagtctggtagctatacattgaaatcagtagactaaaatgcttacttatatgccaactaccaaaaagttgtagatgcgacacacttgtgctcaacttagatggtacaactcttctataatatgtca

SEQ ID NO: 81460 - DNA, 345 bp, Glycine max
gtttgtactaatgttgtgcataggaggacgaatttgtgggtgttggtgggttcaactgttggaggaattggtgtcttgtttttagttagaacttattaagtactttgtaacatttgccaggagatttatcttaaactaaggacaattcaaagttgttgttgaacatttatgagttatgatggagtgtagaaattatatttgattctggaaaactggttattatggtcttttttagctgaatttagttttatttttaaaggtattatttttaaataattttgttagatttttgatatttatgtttgtattttgttgtgatatttttatgaatttttttttttgtta

SEQ ID NO: 81461 - DNA, 376 bp, Glycine max
agaagatggtcacagaaacatggggcttacacatcacagcacaaaatttcttaccttacataccggttgcgtgaaagacgcgccactcatccttttccgattgggcgagaggcatcagatcagagcagggtcccctgatatctacatattctcattattctgtccagaaactaactacactgacgtttttgttctcgtgtcaatttctaaatccaccaccacaccctctcttctcttctcttctctccactcaacacaacgtaaccttcttcttctctcgaatcttccaccgcaatgaccaccgccaccgagaagctctccgctctcaaatccgccgtcgccggattgaacgaaatcagtgagagtgagaagaacg

SEQ ID NO: 81462 - DNA, 201 bp, Glycine max
ttatgatcatagcagtttcaaggtactaagccacgaccttatttagttcctttctacacaaactgggggatggcaaaacaacctactcttccatctttgattcacaaaaacacagtagctatctgagcaggacttttacctcaaaaccacgaaatggaggttcccaaggtaactccacataaacttggatctgtatccata

SEQ ID NO: 81463 - DNA, 373 bp, Glycine max
ggctcgagtcttttaactccaactcctaatcctctttctccacccctccgcatctcgccgacaacgtaacggtttcgcggtggccgtttctgccgccgtcgccgtcgccgtcgccgctctttctcaacctccaccgccagatttacctcaactcctctactcttctcctttcggattcgcattttactttccttctctctctttctccaccgcaactcactcaccttcagggatacaaaatgataggatcctttcttacctgggcgcttgtgatggtttttggctatgcttatccagcttatgaatgctataaagcagttgaaaaaaataagccggaaattgaacaactccgcttttggtgccagtattggat

SEQ ID NO: 81464 - DNA, 372 bp, Glycine max
cgcgaagaacgccagatttcgacatcaacaccacagcggtggggaaaaaaaaaaaaaaaaaaaacaggaaacacaagaaaacgaactcacagcaacgctggctctcaaacgcgccatgacacacttcaagatcgacatcatctccgacaccgtctgcccctggtgctacgtcggccacaagcgcctcacccgcgccatcacccagcaccaacgaacccaccccaacgacacctttaccacgacctggcaccccttctaccttgaccccaccgtgcccacccctggcgaagacaagcaggcgcgctacgagcggcgcttcggcgcctcgcgcatggccatgatgaaccagcggctcgcgcagctcgggcgcca

SEQ ID NO: 81465 - DNA, 361 bp, Glycine max
atatagctaaaagagcctaaaactttgtcagtgaaattcagtattttttgtccataattgaaagtttaaagtataaacacaactttttgttagaaaaaattctgaactctgatttcacaaagttaaaaaaaaaaatatattttttaactattcgggtagccctattgctagaggtagagggaaaccgagaaaaactataggtgaaaccattaggaaggaccttagaataaataaaaaaccagtaagaaggatttagagatcactggtttatctaaggacatgatagaagactcaagcatcatttgatccatgtagctgatcccatctagtaagcaaagtttgttgtattgagggtataata

SEQ ID NO: 81466 - DNA, 385 bp, Glycine max
caagaagcttatcttgttaatctcgtaaatgtgttacgagaactgtatttgcacagtccagaggaagctcgccaattgagaaggaaagctctctctcgtattgaatggctgcaaaaagctgatgtgcctaccatagcacagattgaagagttccattcgatgcagaggatgatgaatgctcctgattcaaatgataatattgatctactgttgagcattgatttgttgggtttacaaggagcaggcaaagcttttccaaacaagattgtttttgatgataagcttgtgttggctaacacacaagaattctttgatggaaattttccagtggattcttggttaccaatttttgtgaattgtctttatccctgaagtcaattacctt

SEQ ID NO: 81467 - DNA, 295 bp, Glycine max
attatactaacgataataccgctgcaacaactacggaccatactcacagtgcaggtggtgattttgctgtacagactgaaacaaattagaatgctggtaagcttattgctgactatagtattagtgaacgtggaaaacatatagaagatatacccaaagatgttacaggacgagacttctatcttgtatgcaagagacttcagaactgcatggggacggaatatagcgagcctaacgctactgcacagcatgtgggagcaatataaattattattgatagtttagtatgatatga

SEQ ID NO: 81468 - DNA, 61 bp, Glycine max
attttactaacgttaattatcttgcaaaagtgatgaaccttagggatagtgttgcttgtta

SEQ ID NO: 81469 - DNA, 372 bp, Glycine max
tgataaacagtctttgtggtggtgatgaaaaattgatgcgtgaaaggacgcacctgctgttggcttgttgttcaaggatggcaatttgtaagaaagatgtttggagagttgaatgtggaatcccttctggatttccgctcacagttatttgcaatagcatttttaatgagatgctcattagatatagctatgaaaaattactgcgccaggctaaagctccaagtatgtttttacaatccttcaaaaattttgtttctttgtgtgtgtatggtgatgataacttaattagtgttcatgaatatgtcaagccttactttagtggttctaaattgaaaagctttctagctggtcataatatcaccattactgatg

SEQ ID NO: 81470 - DNA, 62 bp, Glycine max
  unsure (1)..(62): unsure at all n locations
gaagagctangacgncgcatgcacgcgnacgnaagcncggaanncggcncgagaggaaaaga

SEQ ID NO: 81471 - DNA, 104 bp, Glycine max
ggtaagcgtgatgagtttacaactgacatcagtgattttctttttcctactctcaacccctagtttgttgtatagctaatgagaattcttattcgtttattatt

SEQ ID NO: 81472 - DNA, 360 bp, Glycine max
gtttggcacatggttatacagttggatatgctagctaatacaggggatcatggcggtctcatactgctggccaggaactggctgtgtgctacaaacgagcccgtctctatttggcatacacctccgtggaatacttgtcggattcatgcaagccgacaacaggcaggtgatttagtccctctctgccctccttggggattacatgtacaacgtcggagagctactaggccatactataatgaagagccttctggggacaaaggtggaatggctatactatattctgaaggctatcaattctggtgatctgaaacgaactcaacaattatgtaggttgcataatgctgttctaagagccca

SEQ ID NO: 81473 - DNA, 184 bp, Glycine max
catagagaaagcgcggtttcagctaaaattttctaataaacggatgggacttacaggaggatacatagcaaggattatggtaagttaataattaccgatacccacaatagaaaccttattcagacggatatcagctcgctaggtgctcctgatgcaaaggcgagatagtggtgacaacatcatc

SEQ ID NO: 81474 - DNA, 389 bp, Glycine max
aaattgaaaagctttctagctggtcataatatcaccattactgatggtattgacaaaactagtgcaactttgcaatttagaaagttagcagattgtgattttctcaagagaaactttaagcagatgtctaatgttttgtgggtggctcctgaggataaggcgagtttatggtcacaacttcattatgtttcgtgtaataatctggaaatgcaagaagcttatcttgtcaatctcgtaaatgtgttacgagaattgtatttgcacagtccagaggaagctcgccaattgagaaggaaagctctctctcgtattgaatggctgcaaaaagctgatgtgcctaccatagcacagattgaagagttccattcgatgcagaggatgatgaatgc

SEQ ID NO: 81475 - DNA, 353 bp, Glycine max
gtgggaatcatgtagttttttggtggcaagttattaaatacagccgatcatatgactatgacactgtgggtatggttcatctcagacggctccatctatgactgttctacttaaaacaaaacccgaattcaaagtgatgactctgcatgtgagacatatgctgctgtaaaaagctacgctcctggaatcgttgtgcttaaggagttgtggacgtgtggactgtgaaattaaaaactatgcgttgataattaccaactaagtatgctgattaaagctcttagatcaaacctctacactgctatgagggacatagcatttgcacaaccccaacatttgtatgatgaatttaatgg

SEQ ID NO: 81476 - DNA, 280 bp, Glycine max
gatggcagaaatgataaacagtctttgtggtggtgatgaaaaattgatgcgtgaaaggacgcacctgctgttggcttgttgttcaaggatggcaatttgtaagaaagatgtttggagagttgaatgtggaatcccttctggatttccgctcacagttatttgcaatagcatttttaatgagatgctcattagatatagctatgaaaaattactgcgccaggctaaagctccaagtatgtttttacaattcttttaaaaattatgtttctttgagtgtgtt

SEQ ID NO: 81477 - DNA, 377 bp, Glycine max
tatagctatgaaaaattactgcgccaggctaaagctccaagtatgtttttacaatccttcaaaaattttgtttctttgtgtgtgtatggtgatgataacttaattagtgttcatgaatatgtcaagccttactttagtggttctaaattgaaaagctttctagctggtcataatatcaccattactgatggtattgacaaaactagtgcaactttgcaatttagaaagttagcagattgtgattttctcaagagaaactttaagcagatgtctaatgttttgtgggtggctcctgaagacaaggcgagtttatggtcacaacttcattatgtttcgtgtaataatctggaaatgcaagaagcttatcttgtcaatct

SEQ ID NO: 81478 - DNA, 220 bp, Glycine max
  unsure (1)..(220): unsure at all n locations
ctctagccgctcgagccgaagtccgngtttaatcacttaaacttggaacctaaggctttgagggttgaatattggtattcgtatgtatggaccttactggagcgttcaatgaccttcttcaagaacaggatggcttatctgttattaagtatgcttttagtaagggtataacatttttggatactgcgtatttttatggagtcaacgcttatgaactttt

SEQ ID NO: 81479 - DNA, 386 bp, Glycine max
cttcattatgtttcgtgttataatctggaaatgcaagaagcttatcttgtcaatctcgtaaatgtgttacgagaactgtatttgcacagtccagaggaagctcgccaattgagaaggaaagctctctctcgtattgaatggctgcaaaaagctgatgtgcctaccatagcacagattgaagagttccattcgatgcagaggatgatgaatgctcctgattcaaatgataatattgatctactgttgagcattgatttgttgggtttacaaggagcaggcaaagcttttccaaacaagattgtttttgatgataagcttgtgttggctaacacacaagaattctttgatggaaattttccagtggattcttggttaccaatttttgt

SEQ ID NO: 81480 - DNA, 499 bp, Glycine max
  unsure (1)..(499): unsure at all n locations
gacaccnatannnaagagctatgacnngtcgcatgctacgctngtacgtaagcntnncggaattcggcttcgaggaatatccttttgctgttaaatcaggtcggatggggagaaacgttgactttctccccaggtgcagcttcgccagaagttgtgtaagaggaatgctctctatttgtattgagggggaggggagctgcgtgccaaagcaatcgctnnattctcaaatgaagtatgcnncaaatgccctgttcttttcatatggtggagtatcatttttgttgcgagatcctctgtctttgaagttttctaatgatgacgttctctcctaccattataatgtcacacgtcttctttctctcattagcatcttggaaaatttggcttgatgacactcatcaatttttgaggcttttttcccacatgcttggtgcagttttggagatgttcaaggaaaaagttgtattgaaactttcacatgaggaattttttacagctt

SEQ ID NO: 81481 - DNA, 406 bp, Glycine max
  unsure (1)..(406): unsure at all n locations
ccaagccccccgaccgaaggccgggaatccggttgggggaaaggcaccagagggtgccacaggtcatctagctcgtcgattaaggaaaattctggtggacctcaatgaatatgatcatgctaggaccatggctagaaccttccatctcaaggaggcattgtgagctcactgggaagtgggaattcatgtttcattatacttattctcttggtttgtcgttgaatctgggcctaaggttgccccttctcgcgtgcaattttttgtaaatgaacacanactattcatgtgattaattatgaggcttgaaagntgaaacatagttgttggttattcatgtgaatgaagtaggcatgccctttttggatcctatgaaaagggggaatttaaaaagatgattttttttttt

SEQ ID NO: 81482 - DNA, 361 bp, Glycine max
acaatcaaaagcaaagatgtgaagagagagagaaagagatcattctagagacagagagaaaaattagcttcagtagatattagtggtgggttagggtaagaagagaggagacatgcctaacttgaacccaacacttcaggatcttgcatgttcataccctgaccggagcccaacaggatacatgaagccataagtttgtaaaggagtatacaacaccgggctccaatgatcacaagtagaatgtagtcactgagtggctcatgcttatgatccctaccgcgagccaacaattggttatggaccacacgctcttagagacacccaaatgatacccccgatgctgggactagcatccaccaga

SEQ ID NO: 81483 - DNA, 77 bp, Glycine max
  unsure (1)..(77): unsure at all n locations
ggaanncggcncgagacaancaaaagcaaagaagngaagagagagagaaagagancacncgagagacagagagaaaa

SEQ ID NO: 81484 - DNA, 79 bp, Glycine max
tgcacgcgtacgtaagctcggaattcggctcgggaaaaaaatttaattaaaaaaaaaaaaaaaaaaaaaagagggaggg

SEQ ID NO: 81485 - DNA, 370 bp, Glycine max
ctgactcttttgttgcatggactatttttcttgggactagttcctttcttcttcttcttctctctctctctctgagcactgtttgtgtttcagccaccccccatttttcattcttccaaacacaacaacagaggcagagagaatcagagaaaggagtattaagtaagtgcctccttttagctcttcacttacatcactcttttttttctctttctttctgtgtcagatctctttggattaggatctttgtccttcttgcacttctctgattctttcatttttcattcctttctgccacagatctgatttctgcatgtgggttctctgcctcttcttggtttttgttctttggcttcagtttgctgttttt

SEQ ID NO: 81486 - DNA, 168 bp, Glycine max
gcggaatcctctgcatgatctggaattcgtgtggtcggtcgcttgttcgtttgtttaattcaataaaggaaattaggcatgaccctcttgttgagtatgctctgcctatctgaaaatttccacacctcttttaattgtcgtaatgatgtgtgaagtgtgtgttatttt

SEQ ID NO: 81487 - DNA, 372 bp, Glycine max
cggctcgagatttacttgacgcaacaaaacaaaaaaagattgattaaattgaaatatattaattcaacaaaataattaaaaaaacttctacaacaaataatttataaagtaaaaaaaataatcactatgaaacaataatttctataatcttattttatttattcctattattattattattattattattattacacatcatagtgaagatgcatacttgaaatacactaagacaaaaataaacactgtatcaaaccattttgtatactttcaaatgtttcttaatgctctaatatatatgttaaactgctataggaaatctcaaacagcaaaaacagtgccacaaggaatcacgtacagggcactttcaac

SEQ ID NO: 81488 - DNA, 345 bp, Glycine max
gggtgggttgtgagcgtgctcctgctaggggctctcacctcctttttagtccctgcaactgcaacaaaagaaagaagataatggtttggtagtgccatcaccgggagccaactacacactcacatggaatgaattatagaacccagacccacaccattcacagatctcaaggatctcacaataccctttttttcccctcaataataaagttgtgctctctttggacttatgagtgctcactcctcttgcttggattcaaagtctccattttccaacttggttttgtggtggcaaagaaagaagcaattgtggccctgggctctggttggtttgttgtttcattga

SEQ ID NO: 81489 - DNA, 78 bp, Glycine max
atttgctgctttctaagttcataataatttctgtacaagtaacaaggcacaataaatctctacagattattcaagtcc

SEQ ID NO: 81490 - DNA, 326 bp, Glycine max
ctcgagccgaatcggctcgagcaaacagtctacagtgtttgatattctcttgggaatctctcaagattttgaaattgctggtaatactcttatgccagctttttctgttccacaggctactgccagatcttctgaaaatgcggaatcctctgcatgatctggaattcgtgttttctttcgcttgttcgtttgtttaattcaataaaggaaattaggcatgaccctcttgttgagtatgctctgcctatctgaaaatttccacacctcttttaattgtcgtaatgatgtgtgaagtgtgtgttattttaaaaaaaaaaaaaaatatt

SEQ ID NO: 81491 - DNA, 348 bp, Glycine max
ttttcgtagtgttaagagaatgcctctttctatagggggaggagctggtgcaaagaatgctattctcatgaatatgccaaatgctgttctttcaatgtggagatattttgttggagatctcgtctttgaagtttctaagatgacttctccctacattaaatgtacaggctctttcttcatagcatttggaaatttgtctggattcaccatcaatttttgaggcttttccccacaagctgttgcaaattttagagttttatgaataaggtgtgttgtattttttacattattgatattcttttccttctttttcaattttattgttctttcctaatacttcttttttat

SEQ ID NO: 81492 - DNA, 367 bp, Glycine max
gtgcatgatagttcagtgtctacaataccaggtgattgtgtcattggtgttaagttgacaaccataaacaatatgtgtgcatatgggctcaatcctggtatttcaggttctcgtcttttgggtaccattcctcagtctatttcacagcaaactgtttggaatcaaatggcaacagtgagaacaccattgaattttgattctagcaagcagagcttttgtcaattttctattgaccttctcggtggaggaattttagtggacaaaactggagattggatcacacttatacaaaattctccaattagtaacttgttgagagttgctgcttggaagaaaggctgtttaatggttaagattgtgatgtctg

SEQ ID NO: 81493 - DNA, 65 bp, Glycine max
aaaaaaattttataaaaaaacataaaaaaaaaaaaaagagggaaactaaaaaaatataaggaggg

SEQ ID NO: 81494 - DNA, 238 bp, Glycine max
ctttctctacgtcaaagattctttatattttgtgtgtctctctctttgcttgtttttgttttctctataaacttataatatttgtatctatcatttaatcatttgttcaaaaccagccagtttgaatgttgtcctttataaatgtatgatgaatgtcaaaagaaatatttttgattctttcttacattaaataaactattattattactacctttttcatttttattattttttattc

SEQ ID NO: 81495 - DNA, 354 bp, Glycine max
ttgggattagggtatttgggtatgcttaaatcgcaccctcccacgtgtttcattacttgttttctataatgttattgatcgaggttgtgaaagtttgattcttttgtagatagttggggttgggttttttctagatatgattaaacagatattcggttaaatacctcgcaaaccctcaaaatcatctcacaataattcaaacggggaaggaggtttcaatgatggtttctcactgaactcatcttctaataccctcttgaaatccaattcagtttcttcaaaatcttcaagttctggttcagttgggtctttgtctgggaatgagactattgctctacactattcaaaccaatc

SEQ ID NO: 81496 - DNA, 339 bp, Glycine max
gcccctagatgaagaaattctttctaaggttgcacaagatatggttgaggaatggtttgattgtgttgatgaggaggattcctttgaggaagtttctttaagtgcagcacttaatggtgttgagggtttggactatatggaaagaattcctcttgccacatctgagggttttcctcatgtgctttcacgcaaaaatggcgaaaaaggcaaaaggagatttgtctctggggatggtgaagagatgacattgattccaggaaccagtgtggaagaggcttacaacaagctaatagttgaacttgagaaaagtgttcctacattggttggcatttgaatgtc

SEQ ID NO: 81497 - DNA, 363 bp, Glycine max
ctagttctatgcattgacaaacagaatccgattgatgtgtatgagaacactctaattatatttattgtataactcgtcatttgttcaaaaaaaaaaaaaaaaaaaaaaaaaaaaaaaaaaaaaaaaaaaaaaaaaaaaaaaaaaaaaaaaaaaaaaaaaaaaaaaaaaaaaaaaaaaaaaaaaaaaaaaaataaaaaaaaaaaagaataaaaaaaaaaaatagaaaaaaaatataaaaaaaaaactaaaacaacaattaataactctttttcttggggtggggggagtcttccttttattaaaatttcctccaattttattatatatattatccactaaaaaagacaaacatatttttataaa

SEQ ID NO: 81498 - DNA, 356 bp, Glycine max
ctgctgttggcttgttgttcaaggatggcaatttgtaagaaagatgtttggagagttgaatgtggaatcccttctggatttccgctcacagttatttgtaatagcatttttaatgagatgctcattagatatagctatgaaaaattactgcgccaggctaaagctccaagtatgtttttacaatccttcaaaaattttgtttctttgtgtgtgtatggtgatgataacttaattagtgttcatgaatatgtcaagccttactttagtggttctaaattgaaaagctttctagctggtcataatatcaccattactgatggtattgacaaaactagtgcaacctttcaatttagaaa

SEQ ID NO: 81499 - DNA, 350 bp, Glycine max
ataatagtctccaaactgatggatatgagggtgactttgaataagaggtccaaatacaaaaatgtaaaaacacaaaattaaacaacattctttataatggctagtgttaatatataaactcctaaaggtctcatgttaggatatcaaatattaacatgcttatccggaagttgattctatctcaattatatgaacttgtatgagctcctatttctttaagatatgtttctctttcatttaatcttttccaatcatttccaatcttcgttgtcgattttttctattttttcgatatatatgttgataatatagtatcacacctctttatcattttttctatattaattatt

SEQ ID NO: 81500 - DNA, 369 bp, Glycine max
acggtacaaaagttgaaaaagacgaggttggttcggggtggtgaaaacagagaggaaaaaacagagcccattgagaacacacgtgcttcattcactacttcagtgtcgcttcccatctctatctctttcacaacgttcttcaattcaaaaccacttgtttcttcagttccactctgcttcttcccctttctcttctcatactcacccagctttcctttttattaaaaaataaaaaaaaatgttgaagctttcgtgcaatggcttggaccgggctcactcgctggcccaatgcggctttgcgggccggcccgcctgcgtcgtccctcgccggaggataagcggcgtctccggattctggtcgccgggcgg

SEQ ID NO: 81501 - DNA, 344 bp, Glycine max
gtagtcaatactaacaagtctaattgatagtttgcaactctagcacatggtcaaggtatacatctcatttcgtgtggaaatggaaatggccatgttgatgatcaggctgaggatttcatcagaaggttctatgaacagctgagaatgcaaagccgcatgcagttgctggagtatcaagagatgtgattgtaaagaaaaaaatgacttttgtgcttgtgctcctcaacttgatgatgatcaacaagtttagctagccattcctgggattaatatttaatttgcttttgttgatctttcaagtttcaacttcattgttttttcccagggaaatttggctgtcctgt

SEQ ID NO: 81502 - DNA, 370 bp, Glycine max
ttccaatccaagtagatagagtgataagattctgtttggatgatctctcttccatttttggtcactggattgattactttgattacctttgtcagtgggtattacgggctgaaagctgtgtagcaccccaaggagatcttgtgagacgggtttttgacaaggagattgacaatcattatgaagagaagctgttgatcagccaaatttgttgctccaacatggaaaagttacctattttgaagtcctgggcggacaaagatgaattcagaagctatttagatggacggagagctagattttcccatcaattggtgtcatatgctgaagaccatattgggaagcaggaaggaaatgattggataggaagcgt

SEQ ID NO: 81503 - DNA, 52 bp, Glycine max
ctcgatctagattgccagcgaaccaaatactattcggggggggttcttccaa

SEQ ID NO: 81504 - DNA, 333 bp, Glycine max
ggtgttttttttatttttgggcggctgacaacttttgagaatttttcttactgtttagacgttcatgggacagaatggttttcttagttattctggttattgtctatgaagattatctattcctataaaaataaaaaaaaagggttgccgttgatttgttagatttgcaacccctccatttatttcagtcctatgctttgatgcgtaccatcttatcctatcaggagtaacgctagtgcttggggtcttacttgtcatatcttttgacattgtgaaaacatttttcctttacaaattcttttatttttattttacgttttctttcttttttta

SEQ ID NO: 81505 - DNA, 124 bp, Glycine max
gagaactgtaagagtctgaaatatctggttgatgagggtccttttgcatttgtgaactagtatgaaatattttattcacttaaataaagcgcattactatgtgcaatgagtgtgtttaaatata

SEQ ID NO: 81506 - DNA, 372 bp, Glycine max
gctctcaagactgtgaattatggaatcctgcttgcacaaaagcaatgactatgtcatttaatccaaacccgtgttctgatgcatggagtttggaatttctgaagcgtaccggatttcattgtgatatcatttgtgtcactggatggactgccaccccaatgcaggatgttcaggttacaattgattggtttatttcctctcaggaatgtgttcccaggacctattgtgttttaaatccacaaaatccttttgtgttaaataggtggatgggaaaactgactttccctcagggcacttcccgaagtgttaagagaatgcctctttctatagggggaggagctggtgcaaagaatgctattctcatgaatatgc

SEQ ID NO: 81507 - DNA, 109 bp, Glycine max
ccctcgtactcggaattcgctcgaggttgatttgtgcaaagacaagtattggggtttgaaggtgtactctatactataccaaaaagatggaggaatttcttgtttaatt

SEQ ID NO: 81508 - DNA, 371 bp, Glycine max
gcatgatggcagaaatgataaacagtctttgtggtggtgatgaaaaattgatgcgtgaaaggacacacctgctgttggcttgttgttcaaggatggcaatttgtaagaaagatgtttggagagttgaatgtggaatcccttctggatttccgctcacagttatttgtaatagcatttttaatgagatgctcattagatatagctatgaaaaattactgcgccaggctaaagctccaagtatgtttttacaatccttcaaaaattttgtttctttgtgtgtgtatggtgatgataacttaattagtgttcatgaatatgtcaagccttactttagtggttctaaattgaaaagctttctagctggtcataat

SEQ ID NO: 81509 - DNA, 367 bp, Glycine max
gtggaatcctgcttgcacaaaagcaatgactatgtcatttaatgcaaacccgtgttctgatgcatggagtttggaatttctgaagcgtactggatttcattgcgatatcatttgtgtcactggatggactgccaccccaatgcaggatgttcaggttacaattgattggtttatttcctctcaggaatgtgttcccaggacctattgtgttttaaatccacaaaatccttttgtgttaaataggtggatgggaaaattgactttcccccagggcacttcccgaagtgttaagagaatgcctctttctatagggggaggagctggtgcaaagaatgctattctcatgaatatgccaaatgctgttctt

SEQ ID NO: 81510 - DNA, 295 bp, Glycine max
acacatagaagagcttgacgtcccactgctcacgttacggttagctattcggctcgagtgagcatatgaacagctttaaagagttgctgttgttgatgttatgcaggacttggatctaggatcatcatgtagtgacatacttttgttttcttgcctttttggcaatggacatccattttagaaacgatgaaattaaataagtgcttatttctgatttttttttttttatttgcgagcttgttgaaaccgtaattactggttactataataatggttattgtgcttgccatcagtt

SEQ ID NO: 81511 - DNA, 375 bp, Glycine max
ctcgagccgaatcggctcgagtttaaatccacaaaatccttttgtgttgaataggtggatggggaaactgactttcccccagggcacttcccgaagtgttaagagaatgcctctttctatagggggaggagctggtgcaaagaatgctattctcatgaatatgccaaatgctgttctttcaatgtggagatattttgttggagatctcgtctttgaagtttctaagatgacttctccctacattaaatgtacagtctctttcttcatagcatttggaaatttggctgatgacaccatcaattttgaggcttttccccacaagctggtgcagtttggagagattcaggaaaaagttgtattgaaattttcacaaga

SEQ ID NO: 81512 - DNA, 418 bp, Glycine max
tcgcatgcaccgcgtaccgtaatgctcaggaatttcggcttcgaggggaaaaagttgtattggaaattttcacaagagagaatttcttacagcttggtcaactcaggtgcgtcctacagcaactctgttggctgatgggtgtccatatttgtatgctatggtgcatgatagttcaatgtctacaataccaggtgattttgtcattggtgttaagttgacaaccataaacaatatgtgtgcatatgggctcaatcctggtatttcaggttctcgtcttttgggtaccattcctcagtctatttcacagcaaactgtttggaatcaaatggcaacagtgagaacaccattgaattttgattctagcaagcagagcttttgtcaattttctattgaccttctcggtggaggaattttagtg

SEQ ID NO: 81513 - DNA, 367 bp, Glycine max
ccagaacctattgtgttttaaatccacaaaatccttttgtgttaaataggtggatgggaaaactgactttcccccagggcacttcccgaagtgttaagagaatgcctctttctatagggggaggagctggtgcaaagaatgctattctcatgaatatgccaaatgctgttctttcaatgtggagatattttgttggagatctcgtctttgaagtttctaagatgacttctccctacattaaatgtacagtctctttcttcatagcatttggaaatttggctgatgacaccatcaattttgaggcttttccccacaagctggtgcagtttggagagattcaggaaaaagtttgtattgaaattttcac

SEQ ID NO: 81514 - DNA, 144 bp, Glycine max
gaagagctatgacatttcatccactcgtacgtaagctcgtaattctgctcgagcgcttttgcatttttttgttaaaaaaaaaaatcctcacaacagagattcttcttattcttcggggatctaccaaaacttcatatactcctt

SEQ ID NO: 81515 - DNA, 101 bp, Glycine max
atctggttgatgagtgtccttttgcatttgtgaactagtatgtaatattttattcacttaaataaagcgcattactatgtgcaatgagtgtgtttaaatat

SEQ ID NO: 81516 - DNA, 362 bp, Glycine max
acgcgtacgtaagctcggaattcgtctcgagtttccttgtccaagttatgttttttaaaaacaaaagacataaccccgaggcccttcctctctctctgtgtggtcatatagttcatacatctaaattacagtgcctatcttgtatctcactcgctccctctcctactcgcctgagcttatcctttatcttctccacctatcaccttcacctttctcccagtctgattccatatattgtgtgaacactgatttctatgatccacttagaggaactaatattgtttcacattcctacccttctgatcatgacaactttaatgaatcttctgttcattatcctacatattagtttatctctttca

SEQ ID NO: 81517 - DNA, 352 bp, Glycine max
ctcgtctttgaagtttctaagatgacttctccctacattaaatgtacagtctctttcttcatagcatttggaaatttggctgatgacaccatcaattttgaggcttttccccacaagctggtgcagtttggagagattcaggaaaaagttgtgttgaaattttcacaagaggaatttcttacagcttggtcaactcaggtgcgtcccgcaacgactctgttggctgatgggtgcccatatttgtatgctatggtgcatgatagttcagtgtctacaataccaggtgattttgtcatttgtgttatgttgacaaccatatacattttgtgtgcattatggcttaatcctggta

SEQ ID NO: 81518 - DNA, 369 bp, Glycine max
ttaagccttactttagtggttctaaattgaaaagctttctagctggtcataatatcaccattactgatggtattgacaaaactagtgcaactttgcaatttagaaagttagcagattgtgattttctcaagagaaactttaagcagatgtctaatgttttgtgggtggctcctgaggacaaggcgagtttatggtcacaacttcattatgtttcgtgtaataatctggaaatgcaggaagcttatcttgtcaatctcgtaaatgtgttacgagaattgtatttgcatagtccagaggaagctcgccaattgagaaggaaagctctctctcgtattgaatggctgcaaaaagctgatgtgcctaccatag

SEQ ID NO: 81519 - DNA, 367 bp, Glycine max
cttctggatttccgctcacagttatttgcaatagcatttttaatgagatgctcattagatatagctatgaaaaattactgcgccaggctaaagctccaagtatgtttttacaatccttcaaaaattttgtttctttgtgtgtgtatggtgatgataacttaattagtgttcatgaatatgtcaagccttactttagtggttctaaattgaaaagctttctagctggtcataatatcaccattactgatggtattgacaaaactagtgcaactttgcaatttagaaagttagcagattgtgattttctcaagagaaactttaagcagatgtctaatgttttatgggtggctcctgaggacaaggcgag

SEQ ID NO: 81520 - DNA, 370 bp, Glycine max
gagattggtaggcacagaacatgagggatatgatccttttcttggtggaattcaaaaatatgccactcccatgatgcccctagatgaagaaattctttctaaggttgcacaagatatggttgaggaatggtttgattgtgttgatgaggaggattcctttgaggaagtttctttaagtgcagcacttaatggtgttgagggtttggactatatggaaagaattcctcttgccacatctgagggttttcctcatgtgctttcacgcaaaaatggcgaaaaaggcaaaaggagatttgtctctggggatggtgaagagatgacattgattccaggaaccagtgttgaagaggcttacaacaagctaatagtt

SEQ ID NO: 81521 - DNA, 305 bp, Glycine max
cttattgacaatcccaaacagtctacagtttttgatattctcttgggaatctctcaagattttgaaattgctggtaatactcttatgccagctttttctgttccacaggctactgccagatcttctgaaaatgcggaatcctctgcatgatctggaattcgtgttttctttcgcttgttcgtttgtttaattcaataaaggaaattaggcatgaccctcttgttgagtatgctctgcctatctgaaaatttccacacctcttttaattgtcgtaatgatgtgtgaagtgtgtgttattttaaaaa

SEQ ID NO: 81522 - DNA, 163 bp, Glycine max
atcagagatcgaggcttgactaggagtagagtatagtttcccctgtattgatgcgcaaagatttcatgtgttcgtttcaagatcttatgaaattccgctatcggaaggctataatcattcgataacatcgggtttggtccataatgaattttatttgatattc

SEQ ID NO: 81523 - DNA, 343 bp, Glycine max
gtgatgggggacgcctgcggaccccaagcccagctcaatggtggggtgtcctatctgccccaatggctgtcaataatcgcggacttatactgtggctgtactacctcgcatacatatattgtcgcaagcagagcacatgattccggggctgccacggatcaatagatagcctgtgatgaacagctcttgctcgaactcatcttccctgagcttcgtgataacgcacattctgaactcttcaagaagagggagctatttcaagatctgttccattgctatggaattctttttgttcaatagctttacttttgtaggaaattatttcattttacccttctttttt

SEQ ID NO: 81524 - DNA, 372 bp, Glycine max
  unsure (1)..(372): unsure at all n locations
gcctcgatgccgacagcctctccaccaccggcgacctcgtcacgcttgacaacgcgtgcggcatgggcattctgaccgttaacctgtacgacgcgctgccgagccacgccaaagaccgcatccagcacacgtgcggtgacatctcgccgagcatgatcgacgcggtgcgaagccgcatcgacgagaacgggtggaagggcgcgagcgcgaaagtcatcgatgcgcagaacatggacgtcccctccaacaccttcacgcacgtnctcaccaacttcggcttcgtcggcatcgcggatccacggcgcgtcctgagcgaatggcgccgcgtgctccgccccgccggtgtctgcggcttcaccatctgggagtcgg

SEQ ID NO: 81525 - DNA, 369 bp, Glycine max
actggagattggatcacacttatacaaaattctccaattagtaacttgttgagagttgctgcttggaagaaaggctgtttaatggtcaagattgtgatgtctgggaatgcagcagtcaaaaggagtgattgggcctcattggtacaagtgtttttaacaaacagcaacagtacagagcattttgatgcatgtaagtggacaaaatcagaaccacattcctgggaattgatcttcccaatagaggtatgtggtcctaataatggttttgaaatgtggagttctgagtgggcaaatcaaacttcatggcatttgagtttccttattgacaatcccaaacagtctacagtttttgatattctcttgggaatc

SEQ ID NO: 81526 - DNA, 370 bp, Glycine max
  unsure (1)..(370): unsure at all n locations
aaaagtgttagatccagagcttgtcacttcactgaaacagatcaatgaaagggtggtacagattagtctgaccaattgcaattactggaatgctcatacctttgccctcactgaatcagggaagctgtatgcatttggtgctggagacaaaggacagctaggaattgaacttgttgctaaccagactgaaaggggaaatccagaaagggttgaaattgatcttggttaattgtttgtgcctttaacctaccccncccccccccccccaccccagtcctccacaattctttacaccatgctgtcctctaatttatggtcatcatgcatagcattttagtatttaaattccttgtctattttgtaaatataa

SEQ ID NO: 81527 - DNA, 193 bp, Glycine max
aaaaaaaaaaaatttttttaaaataaaaaaaaaaaaaaaaaagggggaaaaaaaaaaaaaaaaaggggaataaaaaaaaaaataaaaaaaggggcggcccccgactagtgagctctccgacccggaatttattcccggaccgttcccttctggcttcccacttttccctatagtgagcctatttaaagcttgg

SEQ ID NO: 81528 - DNA, 97 bp, Glycine max
atttaagaaaggagaatacccatttgttaaatctcccaccaatggtcccatatgttaaccgcgggggaacatatttgaactgcctgctattgccatt

SEQ ID NO: 81529 - DNA, 281 bp, Glycine max
ggaaatttggctgatgataccatcaattttgaggcttttccgcacaagctggtgcagtttggagagattcaggaaaaagttgtattgaaattttcacaagaggaatttcttacagcttggtcaactcaggtgcgtcctgcaacaactctgttggctgatgggtgtccatatttgtatgctatggtgcatgatagttcagtgtctacaataccaggtgattttgtcattgttgtcaagttgacaaccataaacaatatgtgtgcatatggtctcaatcctgg

SEQ ID NO: 81530 - DNA, 353 bp, Glycine max
gagaatgcctctttctatagggggaggagctggtgcaaagaatgctattctcatgaatatgccaaatgctgttctttcaatgtggagatattttgttggagatctcgtctttgaagtttctaagatgacttctccctacattaaatgtacagtctctttcttcatagcatttggaaatttggctgatgacaccatcaattttgaggcttttccccacaagctggtgcagtttggagagattcaggaaaaagttgtattgaaattttcacaagaggaatttcttacagcttggtcaactcatgtgcgtcctgcatcaactctgttggctgatgggtgtccatatttgtatgcta

SEQ ID NO: 81531 - DNA, 274 bp, Glycine max
gctttgacgtcgcatgcacgcctacgcgagcctaagcattcagagtcggggcctgacgacccttgcatgtatatacttcacgccaagattgcctgggaagactctgtctatagatacagcactcataccgcgggaaagaagctttctgatgctcataccgagagatacaattcgtgccatctttgtgtggttgagcggtatcacagacgggagagcacggatcactagctctctcattcggccagagtggccggcagctgacatcccccttgat

SEQ ID NO: 81532 - DNA, 335 bp, Glycine max
ggagactttagcctggcgcagtaattttttacaatccttcaaaaattttgtttctttgtgtgtgtatggtgatgataacttaattagtgttcatgaatatgtcaagccttactttagaggatctaaattgaaaagctttctagctggtcataatatcaccattactgatggtattgacaaaactagtgcaactttgcaatttagaaagttagcagattgtgattttctcaagagaaactttaagcagatgtctaatgttttgtgggtggctcctgaagacaaggcgagtttatggtcacaacttcattatgtttcgtgttataatcttgaaatgc

SEQ ID NO: 81533 - DNA, 143 bp, Glycine max
aacacacaagaattctttgatggaaattttccagtggattcttggttaccaatttttgtgaattggctttatcctgtaagtcaattaccttcagaagctgtcgttgtaaatgttacatgtggtagtggacgtggtgtttctcc

SEQ ID NO: 81534 - DNA, 289 bp, Glycine max
  unsure (1)..(289): unsure at all n locations
gcatgcacagcgtacgtaagctcggaattcggctcgttaccaactttatggaaacacacaacanatgtggattacgtactattattggctttgaaggttttctaactcttactaaaagtctaagctcaactgcatttgatgttagtgaatatgaagattggaagagcattgatttagcatatcctatcttaagttatggtgaattgggtgacactgaataaatcgaatttcattattttctttcgtttattttccattttttatctgatctacttatcctttattattt

SEQ ID NO: 81535 - DNA, 404 bp, Glycine max
  unsure (1)..(404): unsure at all n locations
gcacgcgtacgtaagctcggaattcggctcggggctcgagttccaacgcttgtagtagaggtaccagcagcggctccgtcgtcacataagcgtanaaggcacangcacangcacaggaggcatcaggcaccagctccagcaccaacaattgttcgcaaaagtcccccggcaccacctgattccacagcagaatcagacacaacaccagcaccatcaccaagtctgaatttgaatgctgcatcgtcaaaccaccagcaagggagaaatatatgggcaacagctgcacttgctattgctgttttgctagccgtcaccggctacagctgctagcaatctcatggtgaccatggattcactttaatgaattatttggtttgcaaaatatattatcattttatgtgtat

SEQ ID NO: 81536 - DNA, 375 bp, Glycine max
caaaacttttgcaactttgcaatttagaaagttagcggattgtgaggttctcaagagaaactttaagcagatgtctaatgttttatgggtggctcctgaggacaaggcgagtttatggtcacaacttcattatgtttcgtgcaataatctggaaatgcaagaagcttatcttgtcaatctcgtaaatgtgttacgagaattgtatttgcacagtccagaggaagctcgccaattgagaaggaaagctctctctcgtattgaatggctgcaaaaagctgatgtgccttccatagcacagattgaagagttccattcgatgcagtggatgatgaatgctcctgattcaaatgataatattgttctactgttgtgcat

SEQ ID NO: 81537 - DNA, 400 bp, Glycine max
  unsure (1)..(400): unsure at all n locations
cgccgtaacctcgattccgcctcaagatttttgttgcccctttaaaaggcggaaggcccattggggtggtgacatttccaaagaccatggggcanattgaaccagacatgaattcaaggtttcagcttttgagtaccactaccaatggtgattttgttcaagggaaagatctcgcaatggttaaagttaatgtagcatgtgctgctgttggcttgacatcaagttacactccaactccattgttggaatctggtttgcaaaaagacagagggttaattgtggagtattttggaaggatgtcttacagtgctcataacgtttatcagccccaagagaaagatttgttggagggaaatttttcctttgatatttaatctcgctctagattggaaaaagtttc

SEQ ID NO: 81538 - DNA, 353 bp, Glycine max
cgtacccttcctcgggcaccgccccctggccggccagcatcgcctacgggtacccgagcatccccgtcccggccggcgtcgcgaccatcaccttcaacaacgacgacatcgccgcgcagcaaagcaccggcagccggggccagggcaagttctacacgctgtacggcagcgggcacagcgcgggcgcgatgacggcgtgggcgtggggcgtgtcgcgcatcatcgacgcgctcgagagcaccgccgcggcgcgcatcgacgccacgcgcgtcggcgtaacggggtgctcgcgcaacggcaagggcgccttcgtggcgggcgcgctggacggtcgcgtcgcgctgacgatcccg

SEQ ID NO: 81539 - DNA, 379 bp, Glycine max
  unsure (1)..(379): unsure at all n locations
atccgcctcaagatttcctattcctagtccaanccaccacctccatccgaatggagtaaaaatacaatcgattctgacaccacattgccttattttaaatcccaccaccaacaacaaagtcataagctgcgacagctaattccagcagcaacatcaacaacagaaaaagaagaggtagaactaggaattcctcttgttgttgttgttgttgtccttgtccctctcttcatctttgatgggttccaaggtctcgaaacaagttgagagacgaaaggcaatccattcagaggaaaaaactctgtctgatctcataaactctatggaagactgccccggctcaaattattatcccctatacagaaaaaattggatgtttgaa

SEQ ID NO: 81540 - DNA, 373 bp, Glycine max
ctcgagcctttttgtttattttctatcgaccttctcggtggaggaattttagtggacaaaactggagattggatcacacttatacaaaattctccaattagtaacttgttgagagttgctgcttggaagaaaggctgtttaatggtcaagattgtgatgtctgggaatgcagcagtcaaaaggagtgattgggcctcattggtacaagtgtttttaacaaacagcaacagtacagagcattttgatgcatgtaagtggacaaaatcagaaccacattcctgggaattgatcttcccaatagaggtatgtggtcctaataatggttttgaaatgtggagttctgagtgggcaaatcaaacttcatggcatttga

SEQ ID NO: 81541 - DNA, 355 bp, Glycine max
  unsure (1)..(355): unsure at all n locations
gcaaatttttattttttcaagagaaactttaagcaggggtctagtgttttgtgggtggctcctgaggacaaggcgagtttatggtcacaacttcattatgtttcgtgtaataatctggaaatgcaagaagcttatcttgtcaatctcgtaaatgtgttacgagaattgtatttgcacagtccagaggaagctcgccaattgagaaggaaagctctctctcgtattgaatggctgcaaaaagctgatgtgcctaccatagcacanattgaagagtttcattcgatgcanaagatgatgaatgctcctgattcaaatgataatattgatctactgttgagcattgatttgttgggtt

SEQ ID NO: 81542 - DNA, 290 bp, Glycine max
  unsure (1)..(290): unsure at all n locations
agcccgnaatccggctcaagctctccttttttgttttgacctactcattgaacagagcgttttgtgcctcttttatgacaccagattccanggttccttctttcttgaatcctaacgtgttgaacagcaccgggccttaaaacatgattgcgtatatgcctgtgaatagctgagtgaataaaatgagaactatgtcattggttatatctacagagtcggcttatacatcatattgtaatgccaagctttacacactaaatggaactgttgttacaccatattttgttctc

SEQ ID NO: 81543 - DNA, 389 bp, Glycine max
  unsure (1)..(389): unsure at all n locations
agagnnaagacggagcagagcacgcgnacanaagctcggaattcggctctagtccacaatttagataaaaaggcggctaagagatttaagaagaattagctaggttatgagccattcactcacataataatccttgacccatttcagatttcgtcttaacgcacataaattcaagttcaaaatctcacctttgttgattttggcgagaattttgataatgtgtaattcaagtagtggctagtgatgctaatttcaatttgagaagaagcaattgttcttctcataatgtagtcaatagctatagcatttattgagatctttgcagaattagcaaaattcgttttttttttctgatgctgatgttgattaaaacccttcttgcttttcat

SEQ ID NO: 81544 - DNA, 281 bp, Glycine max
  unsure (1)..(281): unsure at all n locations
gcgtacgtaagctcggaatccgctcaagctaaacctctacagccttcatggccaanctcattacaggattcaaggccacttgtaacgaatttggctctnttttcaaagccatccttgcatacaccgtgttatccaaagaattcaagattcggagtttcacacgtgatgtgtccaaaccatcatcgcatgccctcgcgaatcaagaattgtattttgctgctgcctacttgatctccaatccattctcttaattactcttttaaattctcacacactttttt

SEQ ID NO: 81545 - DNA, 357 bp, Glycine max
tctgagattccagaacctgtaaaaaagaacgcctcaggtggatcccttgatagaggtgggtgttattatatagtatttacacttttaatatagcttttagtttcataagtaactacttcaatttgtcaatttgagaagcactatctagtctatggactcctttcaaatgtacatggatggatttctagttgacacttctttatatcttgctatgtaacatgaatatgtttacaaaccactttctaaatatgctttctagagatgatggtgctgcaactaatttgtttttggatggcatatattttcctttacacatatgactgatgcaattctatggtgtacagacattgctcttgc

SEQ ID NO: 81546 - DNA, 187 bp, Glycine max
gctcaagaaaaaattttaaaatttttaaaaaaaaaaaaaaaaaagaaaaaagaaaaaatttaaaaaggattaagaattaaaaaaaaaaaaaggggcgccccccccctaataaactcttccccccggaatttaattccagaccggacccttaaggcttacaaattttccctataaaaagtcgttttaa

SEQ ID NO: 81547 - DNA, 362 bp, Glycine max
tctagcatataagcaatgactatgtcatggaatccggacccgtgttctgatgcatggagtttggaatttctgaagcgtaccggatttcattgtgatatcatttgtgtcactggatggactgccaccccaatgcaggatgttcaggttacaattgattggtttatttcctctcaggaatgtgttcccaggacctattgtgttttaaatccacaaaatccttttgtgttaaataggtggatgggaaaactgactttcccccagggcacttcccgaagtgttaagagaatgcctctttctatagggggaggagctggtgcaaagaatgctattctcatgaatatgccaaatgctgttctttcaat

SEQ ID NO: 81548 - DNA, 333 bp, Glycine max
  unsure (1)..(333): unsure at all n locations
acgncgcaagcacgcggacgtaagctcggaattcgcctcgagggagaccttattgactttatagccaacttcaatctagacttttgtatgacctttttaagagcccaagtcccttccacctntccctcgccttccacacccctatcttcaccatcttccatccagtcttttcctccacctattccttcctcaccattcttcactcattctccaccaccagctttcactcccccaacaaccccactcatctttcctaccccttcctaccctccttcttaatcttcaccaccctcatcttctccccctacctctccttctccttcatcttcacca

SEQ ID NO: 81549 - DNA, 412 bp, Glycine max
  unsure (1)..(412): unsure at all n locations
caagcacgcggacgtaagctcggatttcggctcgagaaaattcttcaatnagtaaccagnagagagttgctggttggaagaaaggttgtttaatggtcaagattgtnatgtctgggaatgcagcagtcaaaaggagtgattgggcctcattggtacaagtgtttttaacaaacagcaacagtacagagcattttgatgcatgtaagtggacaaaatcagaaccacattcctgggaattaatcttcccaatagaggtatgtggtcctaataatggttttgaaatgtggagttctgagtgggcaaatcaaacttcatggcatttgagtttccttattgacaatcccaaacagtctacaatttttgatattctctagggaatctctcaagattttgaaattgctggtaatactct

SEQ ID NO: 81550 - DNA, 363 bp, Glycine max
  unsure (1)..(363): unsure at all n locations
cggaatcttctgcattatctggaattcgagttttctgtcgctagttcgtttgtttaattcaatagaggaaattaggcatgaccctcttgttgagtatgctctgcctatctgaaaatttccacacctcttttaattgtcgtaatgatgtgtgaagtgtgtgttatttttaaaaaaaaaaaaaaaaaaaaaaaaaaaataataaaataaataaaaaataataaaaaaaaaaaaaaatattaataaaaattaaaatatattttaaaatatataataaatgatattatntttttttattttttattattaatttatatttttttatttttttttttgggggggcccctcttttggtgtcttttcccc

SEQ ID NO: 81551 - DNA, 364 bp, Glycine max
attgtatttgcacagtccagaggaagctcgccaatggagaaggaaagcgctctctcgtattgaatggctgcaaaaagctgatgtgcctaccatagcacagattgaagagttccattcgatgcagaggatgatgaatgctcctgattcaaatgataatattgatttactgttgagcattgatttgttgggtttacaaggagcaggtaaagcttttccaaacaaaattgtttttgatgataagcttgtgttggctaacacacaagaattctttgatggaaattttccagtggattcttggttaccaatttttgtgaattgtctttatcctgtaagtcaattaccttcagaagctgtcgttgtaaat

SEQ ID NO: 81552 - DNA, 344 bp, Glycine max
  unsure (1)..(344): unsure at all n locations
aaagctcggaattcggctcaagggtcctgtttcacatttttaaaaagattttcctgaaggggaagagcaagtttaaccggaaaagagtgttcccanattgagacaaagaatagatcctcaatacaatgaggttcaggctcagatggaaacaaatttgtttaaattgtctcttgatgatgttgaaactcctaaaggttccatgttggatcttaaaatttctcaatctaaaattgcacttcccaagaacacagttggaggaaccattctgcgtagtgatttattggcaaattttttgacagaaggcaattttagagcaagtgttgatttgcagcgcactcatcgta

SEQ ID NO: 81553 - DNA, 280 bp, Glycine max
  unsure (1)..(280): unsure at all n locations
ggctccctttaacactttagaaacactccttccaaagagaattgtatcccttcaaggacttgcaaactttccnaatcccccatagtacaagccccccactcattaaccaccattttataatcccccactagagaagcctactgtctacaaaccttcatgtaacaacccaccaatttatattccttcatgtaaataatccaccactatacaagcccccacctagaaaacccccaagtacacacccccaattgaaaaacctccactaatcatacccccaatt

SEQ ID NO: 81554 - DNA, 337 bp, Glycine max
ttttgatctttgcagaatcatgttcctatgagcattagagcatatgatcaactttcataccaaatcttcacgggaaatttttggccacggaaaattacttttacacatcaaaggttctcttttgtatgcttaatatatgctcatcttactgtaatctagtataattgctcatttttgttattgtcttaaagagatgcattggagaatggaactaatagtaatgagctgtcattctattatttcttagatagctgacatgcagcatattcagttctatttctcctattttgattatcgatatatcattatcacaccgattcttgattctgttattttt

SEQ ID NO: 81555 - DNA, 120 bp, Glycine max
  unsure (1)..(120): unsure at all n locations
gcacgcggacgaagctcgnaatggccgccgcctagtgatttcgnctttccgggaataaattccggacgggtacatgcaggcttaccaggtttccggatantnagtcnnattagagcttgg

SEQ ID NO: 81556 - DNA, 151 bp, Glycine max
  unsure (1)..(151): unsure at all n locations
acctncnaacccaattgtgcgcttgtaaaattgttactttgaggaagcagcttttgaacgtttaatacatatttatattttattttttaaaatattattctattatttattatttattattgtttatttatttatattttttattttttat

SEQ ID NO: 81557 - DNA, 379 bp, Glycine max
  unsure (1)..(379): unsure at all n locations
ctaggcattttttttcttgttagtggccaaaatcagaaccgcatcccagggaattattcttgccaatgggggtttntggncctaataatggttttgaaatgtggagttctgagtgggcaaatcaaacttcatggcatttgagtttccttattgacaatcccaaacagtctacagtttttgatattctcttgggaatctctcaagattttgaaattgctggtaatactcttatgccagctttttctgttccacaggctactgccagatcttctgaaaatgcggaattctctgcatgatctggaattcgtgttttctttcgcttgttccgttgtttaattcaataaaggaaattaggcatgaccctttttgttgagtattc

SEQ ID NO: 81558 - DNA, 374 bp, Glycine max
  unsure (1)..(374): unsure at all n locations
gcattttgatgcttgtaagtggacaaaatcggaaccacattcctgggaattgatcttcccaatagaggtatgtggtcctaataatggttttgaaatgtggagttctgagtgggcaaatcaaacttcatggcatttgagtttccttattgacaatcccaaacagtctacagtttttgatattctcttgggaatttctcaagattttgaaattgctggtaatactcttatgccagctttttctgttccacaggctactgccagatcttctgaaaatgcggaatcctctgcatgatctggaattntgtgtttctttcgcttgttcgtttgtttaattcaataaaagaaattaggcatgaccctcttgttgagtatgc

SEQ ID NO: 81559 - DNA, 309 bp, Glycine max
ggggaggcacgcgtacgtaagctcggaattcttctcgagctcttgccttattcggctcgaggatgatgaagaggagggaatttataatggcaggaggggaacacatagagatcatcaagatgatagaatggattacggcagaacaggaagagataaatatgacaggcatagagatagatatgagaggcgcaggagagatgaacatgaataagagcattggcgtggaacggagaatggggatagacatggcaataggaagggtttacatcacgtgtcttttgaacttgaattatatccagtttataaagg

SEQ ID NO: 81560 - DNA, 249 bp, Glycine max
  unsure (1)..(249): unsure at all n locations
gcacgcgnacgtaagctcggaattcggctttagagctatactttcttccgcgnncngagctagcgaggatggaatggctattatctgcgatggcaaccaanaggagcagaaacccactcactcttcaccaccgcaaccccaatcctcttcctcttcctcttcctcttcgttcagtgctgcttttgaccggtcaaaccctatcgcttttctggagagagtcttccagttcgtctccgaacacagagactt

SEQ ID NO: 81561 - DNA, 68 bp, Glycine max
aaaaaaatttatttaaaaaaaaaaaaaaaaaaaaaagaggaggaaaaaaaaaaaaaaaggaaaaaaaa

SEQ ID NO: 81562 - DNA, 196 bp, Glycine max
  unsure (1)..(196): unsure at all n locations
ttccccccttccttaacctcggaattcgcctcttgaaaaaattttatttacaaaaannaaaaaaaaaaaaaaagaaggatttaaaaattttttggatgaaaaaaaaaaaaaaatttattaacatctaacatctatttaacttaataatctttttattttattttcttcccattactcatttaaagtcccccccccc

SEQ ID NO: 81563 - DNA, 271 bp, Glycine max
ttttattttctcttgggaatctctcaagattggggaagttgctggtaatactcggatgccagctttttctgttccacaggctactgccagatcttctgaaaatgcggaatcctctgcatgatctggaattcgtgttttctttcgcttgttcgtttgtttaattcaataaaggaaattaggcatgaccctcttgttgagtatgctctgcctatctgaaaatttccacacctcttttaattgtcgtaatgatgtgtgaagtgtgtgttatttt

SEQ ID NO: 81564 - DNA, 122 bp, Glycine max
ctcgagccgaatcggctcgagggaaattaggcatgaccctcttgttgagtatgctctgcctatctgaaaatttccacacctcttttaattgtcgtaatgatgtgtgaagtgtgtgttatttt

SEQ ID NO: 81565 - DNA, 223 bp, Glycine max
  unsure (1)..(223): unsure at all n locations
gcacgcgtacgtaangctcggaatttcggcttcgaggtgaaaacaatagtttaaagtggaaagaaatgtggtgagaaaaagcaaggattttgatcataaggaggcaaccgggctacatccggcaaaccatatagtggaaagcaaagcgcaaagcgctgggaaaatccccactttttgcatttgggtgaagggaaatcccacacctcttcttgacccccctccc

SEQ ID NO: 81566 - DNA, 377 bp, Glycine max
ctcttttggagatgtttcgacgcttccagtgggtattttttagagttgaaaatgagtggaataagatcacgcggtctggtgttcaactcacagaaattccaagagaggaggagaaattgctaggttccaacattcacgatgtatagagaatctcaagccaaccaaattttgccaatatcttcgtatcagcaacaggtctaattcaatttttaagctaatattagttctaatcccaaaagcatttttcttcacgtgttcctggccaaccaacatgagggagttttcttgcacatgcatggatggatgtctgagacttatagatagttgattcccgtgctgaagctgcctcggctcagtcattccttttttaagttgta

SEQ ID NO: 81567 - DNA, 380 bp, Glycine max
ctctagcctaatcggctcgagtctaaattgaaaagcgttctagctagtcataacatcaccattactgatggtattgacaaaactagtgcaactttgcaatttagaaagttagcagattgtgattttctcaagagaaactttaagcagatgtctaatgttttgtgggtggctcctgaggacaaggcgagtttatggtcacaacttcattatgtttcgtgtaataatctggaaatgcaagaagcttatcttgtcaacctcgtaaatgtgttacgagaattgtatttgcacagtccataggaagctcgccaattgagaaggaaagctttctctcgtattgaatggctgcaaaaagctgatgtgcctaccatagcacagattga

SEQ ID NO: 81568 - DNA, 175 bp, Glycine max
gcacgcgtacataatctcggaattcgtctccagctttctgtaatttcgaccctaacaccaaactgggcggtgtacttaaaaaatggggggctacaaaaaacaacacaaaatctcccaactataacaaacttcctctctttaaaatattatacaaacctaacacacacttcttcac

SEQ ID NO: 81569 - DNA, 264 bp, Glycine max
atcttattgctcgtttgcaagggttggattcgggggtgtatagcttagaatcactttggttctatttattttttattttttgacgaaagaggaggtgcagttgtggaagtgtttcaaggttcagtagtgagtggcttgtgatgattttgattatgatttagaagtaaccctaggtatctgtgtatgtttagatatttggtgattgatttgggagtgtgattttgattccctagagttttttgctttgttgtttttgggggggag

SEQ ID NO: 81570 - DNA, 406 bp, Glycine max
  unsure (1)..(406): unsure at all n locations
cgtacgtaagctcggaattcggttggaggctgggttaattaaggtgcgtcccgaaccaactctgtgggctgatgggtgcccatatttgtatcctatggtgcatgatagttcagtgtctacaataccaggtgattttgtcattggtgttaagttgacaaccataaacaatatgtgtgcatatgggctcaatcctggtatttcaggttctcgtcttttgggcaccattcctcagtccatttcacagcaaactgtttggaatcaaatggcaacagtgagaacaccattngaatttgattctagcaagcagagcttttgtcaattttctattgaccttctcggtggaggaattttagtggacaaaactggagattggatcacacttatacaaaattcttcaattagtaac

SEQ ID NO: 81571 - DNA, 180 bp, Glycine max
ttgagctgttggttacatacatgggggagaaaactgttggggagggtctgacatgcgtcaaaaggacatacacaatggtgtaactgagcgatgcgacctaaattttgaaactcaagatacatacatgtcgacataacttaagttctatggaggctggggaagaccaggtgtattgaggca

SEQ ID NO: 81572 - DNA, 279 bp, Glycine max
cggctctagcttcttctcttgcggctagggttttagcgcagcttcttctagatttaaggaagatggctaaggaaaaggttcacatcagtattgtggtcattggccatgtcgactctgggaaatccactaccactggtcacctgatttacaagcttggaggcattgacaagcgtgttattgagaggtttgagaaggaagctgctgagatgaacaagaggtctttcaagtatgcctgggtgctggacaaacttaaggcttatcgtgaaagaggaatcacca

SEQ ID NO: 81573 - DNA, 380 bp, Glycine max
aacttgccaaggtgatgaactggtgatggctggcagccaatttttcataatgctagttttcttgtagcactggtgggaatcttgccagaggacatgttttttcataatattctgcctcccatccccctcaaattttggtgaatcatataataatctgttaggttcctcttcttaagaattccaattttcatgcatcttattaaatcagaatcaataactaatttgtttcaccggatgcattcatttatttgaagaattgtgcaatattgaagttttgttcttctgttggcccaaatgtgaagtggcattgctttgcatttctcattgagactagtggcttttgtttatcagggcgttctcgatctcgctcaattaccaga

SEQ ID NO: 81574 - DNA, 361 bp, Glycine max
aactgactttccctcagggcacttcccgaagtgttaagagaatgcctctttctatagggggaggagctggtgcaaagaatgctattctcatgaatatgccaaatgctgttctttcaatgtggagatattttgttggagatctcgtctttgaagtttctaagatgacttctccctacattaaatgtacagtctctttcttcatagcatttggaaatttggctgatgacaccatcaattttgaggcttttccccacaagctggtgcagtttggagagattcaggaaaaagttgtgttgaaattttcacaagaggaatttcttacagctcggtcaacttatgtgccttccgttacgactctaat

SEQ ID NO: 81575 - DNA, 360 bp, Glycine max
ttatttttttaactatttgagtaaagggtatttaaatataattattaagctgtgtaaatttatctttaatagtatagtatatatttgaggagttatactactattattgacttatagatgagatatttgatattttaaattattttgtatcatatttattatatttgttactgattcaatccaatctgctttagattgaattgaatttaaattttaaaccaatctaattgaatgataaattaagaaaactaaagtaattggactagatgatatttctcttcaaaactgatccaattcagtatgtgagcatccctattatattgctgtttgtttgaaagatgcctttcattttgttatttt

SEQ ID NO: 81576 - DNA, 380 bp, Glycine max
gtgattttctcaagagaaactttaagcagatgtctaatgttttatgggtggctcctgaggacaaggcgagtttatggtcacaacttcattatgtttcgtgcaataatctggaaatgcaagaagcttatcttgtcaatctcgtaaatgtgttacgagaattgtatttgcacagtccagaggaagctcgccaattgagaaggaaagctctctctcgtattgaatggctgcaaaaagctgatgtgcctaccatagcacagattgaagagttccattcgatgcagaggatgatgaatgctcctgattcaaatgataatattgatctactgttgagcattgattttgtgggtttacaaggagcaagtaaagcttttccaaacaag

SEQ ID NO: 81577 - DNA, 277 bp, Glycine max
cgagaattgtatttgcacagtccagaggaagctcgccaattgagaaggaaagctctctctcgtattgaatggctgcaaaaagctgatgtgcctaccatagcacagattgaagagttccattcgatgcagaggatgatgaatgctcctgattcaaatgataatattgatttactgttgagcattgatttgttgggtttacaaggagcaggtaaagcttttccaaacaaaattgtttttgatgataagcttgtgttggctaacacacaaagaattcttt

SEQ ID NO: 81578 - DNA, 144 bp, Glycine max
atggaagttattttaaatagaggcattcctgctgatggtcttgcaaagcgagctcatgaatttgaaaaacatgttgctcatgaaagcctcaaggatcatatttctgctgttgacaagttgtattctactaaagtttataaattt

SEQ ID NO: 81579 - DNA, 157 bp, Glycine max
gttttgttctattggccaattcgaccactctcgggtgagaaagcctccagcctgggcttcaaaaaaccctgcggttacgtcgtttattcttcgaacctaagtcttaatttttcaatttttaattttcacctatctcatttctaatttccaatttttt

SEQ ID NO: 81580 - DNA, 346 bp, Glycine max
attttctcaagagaaactttaagcagatgtctaatgttttgtgggtggctcctgaagacaaggctagtttatggtcacaacttcattatgtttcgtgttataatctggaaatgcaagaagcttatcttgtcaatctcgtaaatgtgttacgagaactgtatttgcacagtccagacgaagctcgccaattgagaaggaaagctctctctcgtattgaatggctgcaaaaagctgatgtgcctaccatagcacagattgaagagttccattcgatgcagaagatgattaatgctcctgattcaaattgatatattgatctactggtgaacattgatttgttgggttt

SEQ ID NO: 81581 - DNA, 152 bp, Glycine max
cttacccaataaatattcaccccttttcttcataaactctagctattattacaaatgaattccaaaaatggtgctgatatttctcccctatttgcatcaatattatttccctcaaaaaagttattccttacaagataaaaaggtgacatcca

SEQ ID NO: 81582 - DNA, 362 bp, Glycine max
gtaaatgtgttacgagaattgtatttgcacagtccagaggaagctcgccaattgagaaggaaagctctctctcgtattgaatggctgcaaaaagctgatgtgcctaccatagcacagattgaagagttccattcgatgcagaggatgatgaatgctcctgattcaaatgataatattgatttactgttgagcattgatttgttgggtttacaaggagcaggtaaagcttttccaaacaaaattgtttttgatgataagcttgtgttggctaacacacaagaattctttgatggaaattttccagtggattcttggttaccaatttttgtgaattgtctttatcctgtaagtcaattaccttc

SEQ ID NO: 81583 - DNA, 270 bp, Glycine max
ttagaattcggcgtcgagttaaattttttttttgtgagtatgtttatgaattacagggggtgggccccttgttgtgcaacggtaccctttcgatacaaaaatttgagattaagtccttgagtgatcattgcattacaataatgtgtgacataaaaggtgtaattcaaggactcttaattttttcaaaaagattggtgccttttgaggaaagagcctcaaatgccctttttgccaaaaagaggttggaaagtttctatggattgaagtttg

SEQ ID NO: 81584 - DNA, 208 bp, Glycine max
ggaaaaagttgtgtttaaattttcacaagaagaatttgttacagcttggtcaactcaggtgcgtcccgcaacgactctgttggctgatgggtgcccatatttgtatgctatggtgcatgatagttcagtgtctacaataccaggtgattttgtcattggtgttaagttgacaaccataaacaatatgtgtgcatatgggctcaatcct

SEQ ID NO: 81585 - DNA, 313 bp, Glycine max
cttaattagtgttcatgaatatgtcaagccttactttagtggttctaaattgaaaagctttctagctagtcataacatcaccattactgatggtattgacaaaactagtgcaactttgcaatttagaaagttagcagattgtgattttctcaagagaaactttaagcagatgtctaatgttttgtgggtggctcctgaggacaaggcgagtttatggtcacaacttcattatgtttcgtgtaataatctggaaatgcaagaagcttatcttgtcaacctcgtaaatgtgttacgagaattgtatttgcacagt

SEQ ID NO: 81586 - DNA, 199 bp, Glycine max
ctcgagccgatttttttcgagctcaaattggttacatctggtactaactagagcttggatgcgtgataatgagcaggttgtgtttgtgtattaccgataaaactatgaataagagtggctaataattaaattgcaaaaaaaaaaaaaaaaaaaaaaaaaaaaaaaaaaaaaaaaaattaaattaaaataaaaaataaat

SEQ ID NO: 81587 - DNA, 393 bp, Glycine max
gcttggtcaactcaggtgcgtcctacaacaactctgttggctgatgggtgtccatatttgtatgctatggtgcatgatagttcagtgtctacaataccaggtgattttgtaattggtgttaagttgacaaccataaacaatatgtgtgcatatgggctcaatcctggtatttcaggttctcgtcttttgggcaccattcctcagtctatttcacagcaaactgtttggaatcaaatggcaacagtgagaacaccattgaattttgattctagcaagcagagcttttgtcaattttctattgaccttctcggtggaggaattttagtggacaaaactggagattggatcacacttatacaaaattctccaattagtaacttgttgagagttgct

SEQ ID NO: 81588 - DNA, 400 bp, Glycine max
tgaaaaattgatgcgtttattgccacacctgctgttggcttggggggcaagaatggcaatttgtgagaaagatgtttggagagttgaatgtggaatcccttctggatttccgctcacagttatttgtaatagcatttctaatgagatgctcattagatatagctctgaaaaattactgcgccaggctaaagctccaagtatgtttttacaatccttcaaaaattttgtttctttgtgtgtgtatggtgatgataacttaattagtgttcatgaatatgtcaagccttactttagtggttctaaattgaaaagctttctagctggtcataatatcaccattactgatggtattgacaaaactagtgcaactttgcaatttagaaagttagcagattgtgat

SEQ ID NO: 81589 - DNA, 396 bp, Glycine max
atcacacttatacaaatttctccaattagtaacttgttgagagtggctgcttggaagaaaggttgtttaatggtcaagattgtgatgtctgggaatgcagcagtcaaaaggagtgattgggcctcattggtacaagtgtttttaacaaacagcaacagtacagagcattttgatgcatgtaagtggacaaaatcagaaccacattcctgggaattaatcttcccaatagaggtatgtggtcctaataatggttttgaaatgtggagttctgagtgggcaaatcaaacttcatggcatttgagtttccttattgacaatcccaaacagtctacagtttttgatattctcttgggaatctctcaagattttgaaattgctggtaatactcttatgcca

SEQ ID NO: 81590 - DNA, 390 bp, Glycine max
agcagattgtgattttttcaagagaaactttaagcagatgtctgggtgttttgtgggtggctcctgaggacaaggcgagtttatggtcacaacttcattatgtttcgtgtaataatctggaaatgcaagaagcttatcttgtcaatctcgtaaatgtgttacgagaattgtatttgcacagtccagaggaagctcgccaattgagaaggaaagctctctctcgtattgaatggctgcaaaaagctgatgtgcctaccatagcacagattgaagagtttcattcgatgcagaggatgatgaatgctcctgattcaaatgataatattgatctactgttgagcattgatttgttgggtttacaaggagcaggtaaagcttttccaaacaaga

SEQ ID NO: 81591 - DNA, 342 bp, Glycine max
agattgcaggaatatgtggttcacttcgaaaagaaagttataataaaggattaattcttcgtgctcaaaaattatgtgctgaacatgttaaaggagctaccataaacattatcgattggagtaaattgcccgtttataatcaggatgatgaagttgatcctccacaatcggtacttgattttagaaaagaactcgctgaccatgacgcgatattaatcgctacttcaggaatataattggagtattccaggtccattaaaaaatgcgttagattgggccgaaggagcaggaataacctttaatgttactactggcgaaaaagaacctagaccaattggtgat

SEQ ID NO: 81592 - DNA, 370 bp, Glycine max
gttacaattgattggtttatttcctctcaggaatgtgttcccaggacctattgtgttttaaatccacaaaatccttttgtgttaaataggtggatgggaaaactgactttccctcagggcacttcccgaagtgttaagagaatgcctctttctatagggggaggagctggtgcaaagaatgctattctcatgaatatgccaaatgctgttctttcaatgtggagatattttgttggagatctcgactttgaagtttctaagatgacttctccctacattaaatgtacagtctttttcttcataacatttggaaatttggctgttgacaccatttatttttgggctttttcccacatactggtgcagtttg

SEQ ID NO: 81593 - DNA, 359 bp, Glycine max
actaaataaggatagtgaggttacaactgaacgcaagagcttcgagcaaagctatgatttaacgaaaagctaaatgtatatcaacacatatatattaaattcatacggtatctacatacatcacatgttcctgacactaaacaaaataaaagcaccgccaccctatgcttacgcgtagacatacatagtgaacggctcagccttaatgtcattgctttctacaggatgggctaaggtacatggggtgggcgacgatttagatctagatgaacgacatcctcacggaaaggctagtaactatgtccaagcgtataatgaggcttttaacgaaagatgacgggctgatggtgatgagggat

SEQ ID NO: 81594 - DNA, 267 bp, Glycine max
aattcgggtcgagctcgagccgaatcggctcgagtgaattttgattctagcgagcagagcttttgtcaattttcgatggaccttctcggtggaggaattttagtggacaaaactggagattggatcacacttatacaaaattctccaattagtaacttgttgagagttgctgcttggaagaaaggttgtttaatggtcaagattgtgatgtctgggaatgcaccagtcaaaaggagtgattgggcctcattggtacaagtgttttta

SEQ ID NO: 81595 - DNA, 283 bp, Glycine max
aaactcctgtttttatttggactgcacaattcaaatctgggaggccattgcatatgatatctgcgggctgcatgaacacccagttctaccgaaagccgtacattttcaacacaattgagaccatgttaacaccccacttctctctgcaacactcttggttctcaaacaacaacactacaaggtccctcaggctttttctctcatccctacatttactccaatcacgacattcactccacttcttatgtacctttaacaaatcaaggacttcctactaatggat

SEQ ID NO: 81596 - DNA, 273 bp, Glycine max
gtttttgatattctcttgggaatctctcaagattttgaaattgctggtaatactcttatgccagctttttctgttccacaggctactgccagatcttctgaaaatgcggaatcctctgcatgatctggaattcgtgttttctttcgcttgttcgtttgtttaattcaataaaggaaattaggcatgaccctcttgttgagtatgctctgcctatctgaaaatttccacacctcttttaattgtcgtaatgatgtgtgaagtgtgtgttatttt

SEQ ID NO: 81597 - DNA, 332 bp, Glycine max
ctcacctttgatttgactaaatcccgcgagttctaaaagtggatccacagggtacagttgatgagccacctgctatgtacagagcattcatagcttgggtgcatttttatttcttgtttggaggtggccaaacttatgtgtggatctcttcttttgtcccctgttcaatttcatgtttgttaataccagtctggttcttttttaaaattattgtgcatgggatgacctcacattctatgtatgtagaatacaggatgctagatgtccaaacttacgttcttgaattatattgtattcatcgatcttttttcacgctcacagttatttgtaat

SEQ ID NO: 81598 - DNA, 395 bp, Glycine max
cttgcacaaaagcaatgactatgtcatttaatccaaacccgtgttctgatgcatggagtttggaatttctgaagcgtactggatttcattgcgatatcatttgtgtcactggatggactgccaccccaatgcaggatgttcaggttacaattgattggtttatttcctctcaggaatgtgttcccaggacctattgtgttttaaatccacaaaatccttttgtgttaaataggtggatgggaaaattgactttcccccagggcacttcccgaagtgttaagagaatgcctctttctatagggggaggagctggtgcaaagaatgctattctcatgaatatgccaaatgctgttctttcaatgtggagatattttgttggagatctcgtctttgaa

SEQ ID NO: 81599 - DNA, 163 bp, Glycine max
aaaaaaaaaaatttattttataaaaacaaaaaaaataaaagaggagaattaacaaaaaaattagggactaaaaaaaaaaacacaaaaaaacaaacaaaaatacataaataaacctaaattcaaacatatcaatactataaaatcaaacctaaaattttcttcc

SEQ ID NO: 81600 - DNA, 288 bp, Glycine max
cttctcactccttttttattaatcaccatcaccacctctgcgacgcgatttaaaataattttgatccttcacatccacttaggaacaattctttaaccaaatccattctatgttctgcccaatttttttctaccatcacttcatatattctacatttaattactctccaaactcacatctataacattatctcttttacttatactacatccaatcttcattcttacacatttacccactctcatttcttatgttcctatatccttttaccatttacaattttcatac

SEQ ID NO: 81601 - DNA, 158 bp, Glycine max
aatctaaaaatgttttttgcttatcctgtcaacccaattagggcgttactcaaactgctttggctccaaccagatacaagctgagcacatgataaataaatctcaataccttatttaagtggtctaaatagactaggagctcactatttctcaacata

SEQ ID NO: 81602 - DNA, 392 bp, Glycine max
gtagacactgaactatcatgcaccatagcaggtgattttgtcattggtgttaagttgacaaccataaacaatatgtgtgcatatgggctcaatcctggtatttcaggttctcgtcttttgggcaccattcctcagtccatttcacagcaaactgtttggaatcaaatggcaacagtgagaacaccattgaattttgattctagcaagcagagcttttgtcaattttctattgaccttctcggtggaggaattttagtggacaaaactggagattggatcacacttatacaaaattctccaattagtaacttgttgagagttgctgcttggaagaaaggttgtttaatggtcaagattgtgatgtctgggaatgcagcagtcaaaaggagtga

SEQ ID NO: 81603 - DNA, 76 bp, Glycine max
cgttcagaccagagctgaacggctctcagtttggatgcgggagcgatctttatggccttggggatcttctagatat

SEQ ID NO: 81604 - DNA, 330 bp, Glycine max
cgcgagcgttcacagtttattttctcacctacaggagattaacaggggggaatttccttaagggggcgatggaagatcttgcatacttggcaaaatcatatacagtgaactgactcctagtctttaaaatatacaaaaatgcatcaaggattcaagaaatttcatcaaaaaaccacaaacttggggaaaaaattgtaacattttattgtcactgaaggtcagtacacattttctaatcacaacatattggaagagactcggaaacgtatattgttaataatggaacggaagattgccgataattaatcaggcttctattttcagctttat

SEQ ID NO: 81605 - DNA, 375 bp, Glycine max
gaattgtatttgcacagtccagaggaagctcgccaattgagaaggaaagctctctctcgtattgaatggctgcaaaaagctgatgtgcctaccatagcacagattgaagagttccattcgatgcagaggatgatgaatgctcctgattcaaatgataatattgatctactgttgagcattgatttgttgggtttacaaggagcaggtaaagcttttccaaacaagattgtttttgatgataagcttgtgttggctaacacacaagaattctttgatggaaattttccagtggattcttggttaccaatttttgtgaattgtctttatcctgtaagtcaattaccttcaaaagcttgtcgtgtaaatgttacatgt

SEQ ID NO: 81606 - DNA, 365 bp, Glycine max
ataaactaatgtctcctgacaaaaagaagaaaacaacttcagacttaaaaagggaagcagaagaaaagcatgctcgtgctatgagaatcagaagtgagttagagaatgagagagtccaaaagcttcaacgtacatcacaaaagttaaatcgtgttaacgaatggcatgctgatcgtcatatgaagttacgagagggcatgtatgcccgccatcaacgcagtgaatctcgtcatgaagcttttctagctcaagtggcgaagagagctggtgatgaaagtagcaaggtaaatgaggttcggtttattacttccttaaatgaagaaaataagaaattgatgttgcgtcagaaacttcacgaatcaaag

SEQ ID NO: 81607 - DNA, 369 bp, Glycine max
ctcgagcctattcggctcgagtcggtgacagcttcatcgaaggcctcaacgacgagaaagaaaaataaaaacataaaaaaatgataatgtaaaaaatggagtatctcaataaaataaacttacatataaaaacataaaagacatatttaaagtaaataaaaaaaaattagttcatagagtcaaaaaaagaattttaattaataatataaggtaaaaaaacaaacaaaaaagaatttaacatcccatcttagaataaaaaaagacaaacaatcaattttattgaataaaatatagtaaaaaaacataataaataaaaaacaaaaaaaaacaaaattaaaataaaaaactagtaaattttaagtagattaa

SEQ ID NO: 81608 - DNA, 106 bp, Glycine max
ctgaggacttggcgagtttatggtcacaacttcattgtgtttcgtgtaataatctgggaatgcaagaagcttatcttgtcaatctcgtaaatgtgttaccgagaat

SEQ ID NO: 81609 - DNA, 64 bp, Glycine max
ctcctctcacttttatttctacatcccctgctctgtttccgtcgatgacctatggcgtttaggg

SEQ ID NO: 81610 - DNA, 346 bp, Glycine max
cttgttgagagttgctgcttggaagaaaggctgtttgatggttaaaattgtgatgtctgggaatgcagcagtcaaaaggagtgattgggcctcattggtacaagtgtttttaacaaacagcaacagtacagagcatttcgatgcatgtaagtggacaaaatcggaaccacattcctgggaattgatcttcccaatagaggtatgtggtcctaataatggttttgaaatgtggagttctgagtgggcaaatcaaacttcatggcacttgagtttccttattgacaatcccaaacagtctacagtttttgatattctcttgggaatttctcaagattttgaaattgct

SEQ ID NO: 81611 - DNA, 370 bp, Glycine max
tgtggaattctgcttgcacaaaagcaatgactatgtcatttaagccaaacccgtgttctgatgcatggagtttggaatttctgaagcgtactggatttcattgcgatatcatttgtgtcactggatggactgccaccccaatgcaggatgttcaggttacaattgattggtttatttcctctcaggaatgtgttcccaggacctattgtgttttaaatccacaaaatccttttgtgttaaataggtggatgggaaaattgacttttccccagggcactttccgaagtgttaagagaatgcctctttctatagggggaggagctggtgcaaagaatgcttttcttatgaatatgccaaatgctgtttttta

SEQ ID NO: 81612 - DNA, 242 bp, Glycine max
aaaggacacacctgctgttggcttgctgttcaaggatggcaatttgtcagaaagatgtctggagagttgaatgtggaatcccttctggatttccgctcacagttatttgcaatagcatttttaatgagatgctcattagatatagctatgaaaaattactgcaccaagctaaagctccaagtatgtttttacaatccttcaaaaattttgagtctctgcgcgcgtatggcgatgataactta

SEQ ID NO: 81613 - DNA, 360 bp, Glycine max
tgtttttacaatccttcaaaaattttgtttctttgtgtgtgtatggtgatgataacttaattagtgttcatgaatatgtcaagccttactttagtggttctaaattgaaaagctttctagctggtcataatatcaccattactgatggtattgacaaaactagtgcaactttgcaatttagaaagttagcagattgtgattttctcaagagaaactttaagcagatgtctaatgttttatgggtggctcctgaggacaaggcgagtttatggtcacaacttcattatgtttcgtgcaataatctggaaatgcaagaagcttatcttgtcaatctcgtaaatgtgttacgagaattgtatt

SEQ ID NO: 81614 - DNA, 291 bp, Glycine max
  unsure (1)..(291): unsure at all n locations
atacaataatatatatttttcgatacgtaacatgttattttccattcagaattacatttgatgcaacagagacgtttcccctgtactacaaaaactacgtggctaattacatccatgtagacgtgctttaaactcagaaagacacttttgtctttcctttttccatacatttttgttctctgttctaatctgaacaaaacattgaaaaaagggttctatatgctaccctagctgaactccattttntatggcagggtggggatgtacattattattctattcatttacacc

SEQ ID NO: 81615 - DNA, 230 bp, Glycine max
aaaaaattttaaaaaaaaaaaaaaaaaaaaaaaaaaaggaaaaaaaaaaaaaaaaaaagggaaaaaaaaaaaaaaaaaaaaaaaaaaaaaaaaaaaaaaaaaaaaaaaaaaaaaagggggggcccccccctagggggctcgcccccccgggaataaattccggcccggtccctgggggggtcccagttttccctataggggggcgttttaaagctgggcgaaataagggc

SEQ ID NO: 81616 - DNA, 156 bp, Glycine max
tgaccatctcggtggtggaatgatagtggacaaaactggagattggatcacacttatacaaaaggctccaattagtaactctgtgagagttgctgcttggaagaaaggctgtgcaatggttcagaatgtgacatctgggaatacaccagttaaaag

SEQ ID NO: 81617 - DNA, 105 bp, Glycine max
attgaataatttgttgggtgtagttccctttttggcagctaaacaccaatggagctgatcatgggtaagtttaattaatcatgcgactgaagcaggaatttgcat

SEQ ID NO: 81618 - DNA, 366 bp, Glycine max
cttaattagtgttcatgaatatgtcaagccttactttagtggttctaaattgaaaagctttctagctggtcataatatcaccattactgatggtattgacaaaactagtgcaactttgcaatttagaaagttagcagattgtgattttctcaagagaaactttaagcagatgtctaatgttttatgggtggctcctgaggacaaggcgagtttatggtcacaacttcattatgtttcgtgcaataatctggaaatgcaagaagcttatcttgtcaatctcgtaaatgtgttacgagaattgtatttgcacagtccagaggaagctcgccaattgagaaggaaagctctctctcgtattgaatggct

SEQ ID NO: 81619 - DNA, 348 bp, Glycine max
aatccttcaaaatttttgtttctttgtgtgtgtatggtgatgataacttaattagtgttcatgaatatgtcaagccttactttagtggttctaaattgaaaagctttctagctggtcataatatcaccattactgatggtattgacaaaactagtgcaactttgcaatttagaaagttagcagattgtgattttctcaagagaaactttaagcagatgtctaatgttttgtgggtggctcctgaggattaggcgagtttatggtcacaacttcattatgtttcgtgttataatctggaaatgcaagaagcttatcttgtcaatttgtaaatgtgttcgagaattgttt

SEQ ID NO: 81620 - DNA, 368 bp, Glycine max
ctcgagccgtttgttagtggaaaaaccttcaaatatgatataattggtgctggttcacattcttcagaagattttcctgaaaaggaagatcaagaaaaacccaaaaagattgatgccagattgagacaaagaatagatcctcaatacaatgaggttcaggctcagatggaaacaaatttgtttaaattgtctcttgatgatgttgaaactcctaaaggttccatgttggatcttaaaatttctcaatctaaaattgcacttcccaagaacacagttggaggaaccattctgcgtagtgatctattggcaaattttttgacagagggcaattttagagcaagtgttgatttgcagcgcactcatcgtat

SEQ ID NO: 81621 - DNA, 139 bp, Glycine max
caaatatttggttgatgagtgtccttttgcatttgtgaactagtatgtagtattttagtcacttaaataaagcgcattactatgtgcaatgagtgtgtttaaatcttaaaaagagagagaggtaaggaggagtgtttac

SEQ ID NO: 81622 - DNA, 366 bp, Glycine max
ctcgagcccaatcggctcgagatttggctgatgacaccatcaattttgaggcttttccccacaagctggtgcagtttggagagattcaggaaaaagttgtattgaaattttcacaagaggaatttcttacagcttggtcaactcaggtgcgtcctgcaacaactctgttagctgatgggtgtccatatttgtatgctatggtgcatgatagttcagtgtctacaataccaggtgattttgttattggtgttaagttgacaaccataaacaatatgtgtgcatatgggctcaatcctggtatttcaggttctcgtcttttgggcaccattcctcagtccatttcacagcaaactgtttggaatcaaa

SEQ ID NO: 81623 - DNA, 345 bp, Glycine max
ggtcataatatcaccattactgatggtattgacaaaactagtgcaactttgcaatttagaaagttagcagattgtgattttctcaagagaaactttaagcagatgtctaatgttttatgggtggctcctgaggacaaggcgagtttatggtcacaacttcattatgtttcgtgcaataatctggaaatgcaagaagcttattttgtcaatctcgtaaatgtgttacgagaattgtatttgcacagtccagatgtagcttgccaatttagaaggaaagctctttctcttattgaatggctgcaaaaagctgattgtccttccatagcacagattgaagagtttcat

SEQ ID NO: 81624 - DNA, 341 bp, Glycine max
  unsure (1)..(341): unsure at all n locations
aaaaaaattttnntttttaaaaaaaaaaaaaaaaaaaagaaaagagagaaatttaaaagagaaaatgggaaaaaaaaaaaaaaaaaaaaaaaaaaaaaaaaaaaaaaaaaaaaaaaaaaaaaaggggggggccccccactagggggctttcccccccggaaaaaaattccggcccggacccttaaggggacccaattttccctattgggggctgtataaaagctgggggaaaaaagggaaaaagaggttcccggggaaaaaattgtatcccttcaaaattccaaaaaaaaaaacagccgaaaaaaaaaaatgtaaaacccggggggcctaatgggggggcc

SEQ ID NO: 81625 - DNA, 359 bp, Glycine max
caaacagcagcagcctcaaccatgttcttccaaccatgtccaccaggaggcatcttctctttacgcgttggctatgtttataaacgagtacgaatcatacatttttccttcaaggaaatgcctgttgtagctcacttctctgacaaaaggggaatcagaaagttgcttctcatagaactccttatttgggaataagctgatggatgggtgcattctatactgaacattaagcagatgcttcttgtgttccaacgataccagcctctcaaacaaactttttccatattcagcttcttgagaaacctaaattttgatcattataatcatattagaaacttacccttaattatgcacacaat

SEQ ID NO: 81626 - DNA, 311 bp, Glycine max
ctcaagggtgatggtcttgccggtgaggtggaaagctctgacaccatcgacaacgtcaaggccaagatccaggacaaggaaggaatccccccggaccagcaacgtctcattttcgcctgaaagcaacttgaggacggccgtacccttgctgactacaacattcagaaggagagtactcttcaccttgttctccgtcttcgtggtggcatgcagatcttcgttaagacactcaccggcaagaccataaccctagaggttgaaagcttcgacaccatcgataacgtcaaggccaagatccaggacaaggaggg

SEQ ID NO: 81627 - DNA, 226 bp, Glycine max
catctgaactggacttccacttattccgccatggcgggaaaggaagctcaagattgatcttggtttggttcttgtaaaaacttcgtcggcattcggaccgcctaagcacgttgggaatttgtaccggcgtcacaaaggataccgatcaaaatgagaatcgtggtcccacatttttcgatcaacgcttgcattggcaacaacagcaaggtccttgagatcagaaatt

SEQ ID NO: 81628 - DNA, 324 bp, Glycine max
ctcgagccttatcggctttagttttgaaaaaaaaaaaccaatgacaggcgtttaatcaatttgagcaggggcattctttgttttcttccattttgggtcccctcaaaagtagtttcaaaagggtatctctttcttcacagatatcatggcaaatcatacccttcgttcaggaaccgtttctgttgaatctatcttcacaagaaagatttaaacttttaaactttcttctattcgtgagacttatttttgtgaagctttgtttccactacttaatcttctattgctatttacttttaactcatacctattcttggttttacttta

SEQ ID NO: 81629 - DNA, 170 bp, Glycine max
ctagtcgtagtattatgtcttttattctctaccttcatctttcttggggcgacaccagatgatggaggcgactgctaatcgaaacgctgtcattgcgccaatcgcggcgttgttgttggtgtgtgcatctttcagcggagtgttaagtacacctcttaatgatggatttt

SEQ ID NO: 81630 - DNA, 133 bp, Glycine max
ctctgttgcaaccatatttgctacaaccatgaccacataggtgtgatcatttaagtttttaggggaccttcttactaaaaagaacattgactcatgttgtgacaccccaatgcatgtacaatccttcagtggc

SEQ ID NO: 81631 - DNA, 351 bp, Glycine max
acttattcagctatcttcatatgttgcataagtttcacataatgcagctatcgccataggttgcatggaaaattatgtgaaacttattcacttttcttgaacggttctgctctggcggtgcttctgttctacaactggatctcaaattctcattatctagtctctcatgtcttaactcctttttcttgttcatcgtaccgtgtctggtctctcacaaaatttgctgattaagatgtacatgtaattacaatactctttcgaggtcaagtaaacgatgaaaagaagcctagtcaagaataaaagccggtgaaacacgataagaacacctttaggtcctttactttataacca

SEQ ID NO: 81632 - DNA, 372 bp, Glycine max
ggaaaaccttgactatctttctctctgcaagcaagcgaccatggcggatggaagcaacggcggagtggtgatgcttcaagccccaccgtattacggttggcctaccctatctaacacggcaataatcgactcattgctcttacattgttgacgactacccagaccccagagtcaaacttgagggtgaccggctcgtggaggatgagatgcgttgcagcaccaataagcccaccgcttatctcaaagattatcctcctgtttccaacttcaattttcagcaaaactacccaatgattgctagagagtccgaaccttttatgagccgttagacctttccgtgctcgtgattgattgcgctacgaattggaaatg

SEQ ID NO: 81633 - DNA, 353 bp, Glycine max
  unsure (1)..(353): unsure at all n locations
agggagcntnnttttttgtgacaacgacttcatcttaacannttcaaanntttttcttgctttttttctttttaaatcgtcaactttattnntttttggtcctctttttggttttactattatttctatagttttggatttcaaatgaagtattggtgtattgttttaaggcttaagttctcatcttatttgatgcattttacatcactatatnatgtatgtctcaaaggtgatcattgaagtattgaaaattagaggccacaaacacaagctcaacttgtcacttgattttcatgtttatgtgcaggttttgaagaagttaatcacatattattgaacttagatggataaat

SEQ ID NO: 81634 - DNA, 346 bp, Glycine max
cacaaagaaacattttttttgtgtgtgtatggtgatgataacttaattagtgttcatgaataggtgaagccttactttagtggttctaaattgaaaagctttctagctggtcataatatcaccattactgatggtattgacaaaactagtgcaactttgcaatttagaaagtttgcagattgtgattttctcaagagaaactttaagcagatgtctaatgttttatgggtggctcctgaggacaaggcgagtttatggtcacaacttcattatgtttcgtgcaataatctggaaatgcaagaagcttatcttgtctatcttcttaatgtgttacgagaattgtatt

SEQ ID NO: 81635 - DNA, 181 bp, Glycine max
catagcttcttttctcccgatggtaccaagttgagggtgtttgttggctgtgctgagggctggaatactattgagtgatactttctatctttgatcagacaatggatgaaacccttcttgtagtagagataccatattgcatcttacttataccattaatatctggaatatcacacttatc

SEQ ID NO: 81636 - DNA, 78 bp, Glycine max
ctcactagcaactatatgctgggcggcttctttatgagccctagctcggggacccatctacacatctgtataagccat

SEQ ID NO: 81637 - DNA, 308 bp, Glycine max
aaaaaaaaaaaatttttttaaaaaaaaaaaaaaaaaaaaagggaaaaattaaaaaaaaaaaaggggggagaaaaaaaaaaaaaaaaaaaaaaaaaaaaaaaaaagggggggccgccgactagggagctcgttaacccggaaataaaaaccggaccggtaccggcagggtaaccaaatttccctaaaaggggtcgaataaaagctgggagtaaaaatgggaaaaggtggttcctgtgaaaaaaggaaattcgtaaacaattccaaaaaaaaaacggtccggaagaaaaaagtgaaaaacctggggggcc

SEQ ID NO: 81638 - DNA, 128 bp, Glycine max
gtaaaattctgattcttttattttcagccacattttaaacggaaagatctgcacgttgaccgggggcaggatcagcttttggtgttgatcatccatattagaccttgaatagtccaagttataatatt

SEQ ID NO: 81639 - DNA, 238 bp, Glycine max
ctcctttcaatatgagtttacttcactcacaagtcccctgaggttgaaaatgattgtgattttaaagtgcatctgttcttttcatcattcgagttgcttgaaaagcttcatgaaaaatggagtacagtggagaaacctccatacccagctatgtattctagtatttatggaggtatcatacttgatccagcattgttggtattccccattgatgatcacatggtttacagatggcatg

SEQ ID NO: 81640 - DNA, 194 bp, Glycine max
cgacgtaagctcgggatttcggctcgagccgaagacgaattcgttgtcatagagtgggaggagggagcaggaagaggctgagcgtgcaatagaaccttgccactccgcggacctgtcgggcctccgcgacctgactctcatgcgcgtccaccttggacctcagcgcctccgaacacctcgcgggctcgaccgag

SEQ ID NO: 81641 - DNA, 65 bp, Glycine max
cgtaagctcttaattcgcctcgagctttttttcatttttgttgtacgcaaatgaaagctcatgaa

SEQ ID NO: 81642 - DNA, 398 bp, Glycine max
gttctaaattgaaaagctttctagctggtcataatatcaccattgctgatggtattgacaaaactagggcaactttgcaatttagaaagttagcagattgtgattttctcaagagaaactttaagcagatgtctaatgttttatgggtggctcctgaggacaaggcgagtttatggtcacaacttcattatgtttcgtgcaataatctggaaatgcaagaagcttatcttgtcaatctcgtaaatgtgttacgagaattgtatttgcacagtccagaggaagctcgccaattgagaaggaaagctctctctcgtattgaatggctgcaaaaagctgatgtgcctaccatagcacagattgaagagttccattctattgcaaggatgataaatgcttcc

SEQ ID NO: 81643 - DNA, 407 bp, Glycine max
cagtttcaaaatgcaatttgggagtgaaatcctttttcaatggggtaggcagatgctgcatacactgacagatgcttcgatcttattgttgttgattgagtgagaacaaaagccccacttaattggtcctcaagccatagccccagtttctagcttcgtagtcttctgctgtcatcttgctccttttagagtttcagggtcttacatagtgtcccacgtctccattaaataactttttccttaacatttagtgcgccaacgactatactagtagtaattaattaagtctacgaatttatatatatatatatagtatgatagcctctaaaaaggaaatggcaggaagggtaacatatgcatgcatggaatacttgttttttaaaacaaatgttgctttaaaaagttag

SEQ ID NO: 81644 - DNA, 286 bp, Glycine max
gtttaatgcatagtagtcaatagtgaatagcagggcagagtggccgcccccaaaaatgctacaatagatagcgttcatcatgctattttaaaccctgaatctgaaaaggaacagagaagaaaaagatgggtcttcataaacgctggagattggctggaaaactcaccaagaaaaagatgggtcgctgcttgaaaatcgcggaccaaggtggggatggcggagtttggccagaaaagatctcttgcagtactgggcttcggtaggcagtgcttattggagcttcaac

SEQ ID NO: 81645 - DNA, 403 bp, Glycine max
gaatcttcttattatatatatctcccaaaacataaaactgggaaccaaaaagattatcctgggggtgtatgacaagaagattcttccatttttctcctttgccatggaagtccggaacaagccctccattgatgattatgtcaatctttggaatgattgggagagttcagtggaacaattgtcatatgacaagtgctataagttctggatgtttatgttgaaacatttcagcacagaaactaagaaactttccaattgcttggtgaagctaccggtaacatcaggcaacattgaaataattttgttagataaaaacgatgttttcattcctgataaccttcatcttgagaagctttttcagcaggagaaagtctttgtctggtttccttagaaccctgcacca

SEQ ID NO: 81646 - DNA, 177 bp, Glycine max
tctattctttgaaacctatagttcaaactctgtcttccctgggttgtatttcgaaatcaacgacgatgagttccacagaggcagcagccacagagaagaaaggtggaagagggaaaccgaagacttcaaagtccgttttccgttccttcaaagctggccttcagtttcccgtcgggc

SEQ ID NO: 81647 - DNA, 394 bp, Glycine max
tgcacgcgtacgtaagctcggaattcggttcgagaaaagcacaatttgtttttgttaaaaccttcaaatatgatataattggtgctggttcacattcttcagaagattttcctgaaaaggaagatcaagaaaaacccaaaaagattgatgccagattgagacagagaatagatcctcaatacaatgaggttcaggctcagatggaaacaaatttgtttaaattgtctcttgatgatgttgaaactcctaaaggttccatgttggatcttaaaatttctcaatctaaaattgcacttcccaaaaacacagttggaggaaccatcctgcgtagtgatctattggcaaattttttgacagagggcaattttagagcaagtgttgatttgcagcgcac

SEQ ID NO: 81648 - DNA, 408 bp, Glycine max
caattagtaacttgttgttagttgctgcttggaagaaaggttgtttaatggtcaagattgtgatgtctgggaatgcagcagtcaaaaggagtgattgggcctcattggtacaagtgtttttaacaaacagcaacagtacagagcattttgatgcatgtaagtggacaaaatcagaaccacattcctgggaattaatcttcccaatagaggtatgtggtcctaataatggttttgaaatgtggagttctgagtgggccaaatcaaacttcatggcatttgagtttccttattgacaatcccaaacagtctacagtttttgatattctcttgggaatctctcaagattttgaaattgctggtaatactcttatgccagctttttctgttccacaggctactgccagatct

SEQ ID NO: 81649 - DNA, 402 bp, Glycine max
gacaccatcaattttgttgcttttccccacaagctggtgcagtttggagagattcaggaaaaagttgtgttgaaattttcacaagaggaatttcttacagcttggtcaactcaggtgcgtcccgcaacgactctgttggctgatgggtgcccatatttgtatgctatggtgcatgatagttcagtgtctacaataccaggtgattttgtcattggtgttaagttgacaaccataaacaatatgtgtgcatatgggctcaatcctggtatttcaggttctcgtcttttgggcaccattcctcagtccatttcacagcaaactgtttggaatcaaatggcaacagtgagaacaccattgaattttgattttagcaagcagagcttttgtaaatttctattgacc

SEQ ID NO: 81650 - DNA, 247 bp, Glycine max
gagaaaaattggatgtcactaaggtgttgattctggacttttaatttttgaagcattaatattcatagaggggggcaggaatgggaggctctctcaatgacataactattctggtttgcgaagagaaagtagtctaaatgtggtaatggaatgcagacctatgctgggcgatcttcacaagaaaagttggagcacctagtgctaccatcaacgctgacctgtatgctgggtacaggggcctcatttc

SEQ ID NO: 81651 - DNA, 472 bp, Glycine max
  unsure (1)..(472): unsure at all n locations
agagctatgaccgtcgcatgcaccgcgtacgtaangctcggaattcggcttcgagccttctcttggactttcacatatgcaatgangcncaaaangaagttgtgtgtttcttcttcatttntctcagcgcgacaacanccacaaaacagttgataagtgatgccagaaggaaggggtagaaggagaagtaataatggctttgaaaaatgggaggcacaaatcctttcaaagacaaaattggtttctttcacaaagagaattgttccttccactctctatgctctgcttcccattgttctgctttgtacatacttcgaccttctcttcctcactccacattccaccaccaccacctaccacctttctctttctcctncttcacctcctccaccttcatcatctttttctttttctacagaaaagaacaaaacttaccaaaacccatgtgactactctaatggtgattgggtac

SEQ ID NO: 81652 - DNA, 393 bp, Glycine max
tctaaattgaaatgctttctagctggtcataatatcaccattactgatggtattgacaaaactagtgcaactttgcaatttagaaagttagcagattgtgattttctcaagagaaactttaagcagatgtctaatgttttatgggtggctcctgaggacaaggcgagtttatggtcacaacttcattatgtttcgtgcaataatctggaaatgccaagaagcttatcttgtcaatctcgtaaatgtgttacgagaattgtatttgcacagtccagaggaagctcgccaattgagaaggaaagctctctctcgtattgaatggctgcaaaaagctgatgtgcctaccatagcacagattgaagagttccattcgatgcagaggatgatgaatgc

SEQ ID NO: 81653 - DNA, 407 bp, Glycine max
acctttgttcactctttttcttttgcggctagggttttagcgcagcttcttctagatttaaggaagatgggtaaggaaaaggttcacatcagtattgtggtcattggccatgtcgactctgggaaatccactaccactggtcacctgatttacaagcttggaggcattgacaagcgtgttattgagaggtttgagaaggaagctgctgagatgaacaagaggtctttcaagtatgcctgggtgctggacaaacttaaggctgagcgtgaaagaggaatcaccattgatattgctttgtggaagtttgaaacaacaaagtattattgcacagttattgatgcgcctggacatagggatttcattaagaatatgattactgggacatcccaagctgactgtgctgttct

SEQ ID NO: 81654 - DNA, 437 bp, Glycine max
tgcacgcgtacgtaagctcggaattcggttcgagctcgagccgtgattggtttatttcctttcaggaatgtgttcccaggacctattgtgttttaaatccacaaaatccttttgtgttaaataggtggatgggaaaattgactttcccccagggcacttcccgaagtgttaagagaatgcctctttctatagggggaggagctggtgcaaagaatgctattctcatgaatatgccaaatgctgttctttcaatgtggagatattttgttggagatctcgtctttgaagtttctaagatgacttctccctacattaaatgtacagtctctttcttcatagcatttggaaatttggctgatgataccatcaattttgaggctttttcccacaagctggtgcagtttggagagattcaaggaaaagttgtattgaaattt

SEQ ID NO: 81655 - DNA, 66 bp, Glycine max
atatttttttttccctttctttccaatggaaaaaaaaaaaaaagcaaaagctctcaaacaacaatt

SEQ ID NO: 81656 - DNA, 372 bp, Glycine max
  unsure (1)..(372): unsure at all n locations
ctaagataaacgatgagtgcatttatgatataatctgatggttatttttctcttgattctgctacaggtttgtaaaattaattgtattgaagaaggggacaattatgatcagtagtatgtgtggtcaagtgtatgtatgatatatatactatgatggttggtttacttccactttgatacatgtttgtaacataagttgtatggaagaagtgagtgaaccatcttcagtataatgtgtgatcagtaataaaggaaatgaagggactgccttgnttaaaaaaaaaaaaaaaaattaatttttttattttaaattattaaaattaattattttattattattttatttttatatatatatattaaataaaaagg

SEQ ID NO: 81657 - DNA, 404 bp, Glycine max
ggggaggagctggtgcaaagaatgctattctcatgaatatgccaaatgctgttctttcaatgtggagatattttgttggagatttcgtctttgaagtttctaagatgacttctccctacattaaatgcacagtctctttcttcatagcatttggaaatttggctgatgacaccatcaattttgaggcttttccccacaagctggtgcagtttggagagattcaggaaaaagttgtgttgaaattttcacaagaggaatttcttacagcttggtcaactcaggtgcgtcctgcaacaactctgttggctgatgggtgtccatatttgtatgctatggtgcatgatagttcagtgtctacaataccaggtgattttgtcattggtgttaagttggcaactataaac

SEQ ID NO: 81658 - DNA, 355 bp, Glycine max
ctatcatgtcattatatatgccactggaccagcaaaataaggtagttcatgctgaagctcgggcggacgacaacaaggcgccgtgtaagacatacataatgagctaaaaatagtcaaaggaacccgttgctctgcataatccacttgatagaaggattataaatagaactggctttattggttttgaaatccatcttgccaacccaaagaaaaataattatttttacctgtttggaataattattatgtaacaatttgttaatccctttaacaaataaatatttttttctcctggcgataaaatttctttattttttcttcaacaattttttaaaaaaataaaatttttctttct

SEQ ID NO: 81659 - DNA, 317 bp, Glycine max
cctcagtccatttcacatcaaactgtttggaatcaaatggcaacagtgagaacaccattgggggttgattctagcaagcagagcttttgtcaattttctatcgaccttctcggtggaggaattttagtggacaaaactggagattggatcacacttatacaaaattctccaattagtaacttgttgagagttgctgcttggaagaaaggctgtttaatggtcaagattgtgatgtctgggaatgcagcagtcaaaaggagtgattgggccttattggtacaagtgtttttaacatacattaacctgtcatatcattt

SEQ ID NO: 81660 - DNA, 406 bp, Glycine max
ggtgattttgtcattggtgttaagttgacaaccataaacgatatgtgtgcatatgggctcggtcctggtatttcaggttctcgtcttttgggcaccattcctcagtccatttcacagcaaactgtttggaatcaaatggcaacagtgagaacaccattgaattttgattctagcaagcagagcttttgtcaattttctattgaccttctcggtggaggaattttagtggacaaaactggagattggatcacacttatacaaaattctccaattagtaacttgttgagagttgctgcttggaagaaaggttgtttaatggtcaagattgtgatgtctgggaatgcagcagtcaaaaggagtgattgggcctcattggtacaagtgtttttaacaaacagcaacagta

SEQ ID NO: 81661 - DNA, 256 bp, Glycine max
caaagctcttttatccttcatgagcaacgctttgattgcggaacctctaaaaatgtattgagggtaggaaacaaccaccacatctccaacaaaccgtccaacccattaaatccattcttcatcccatactttgtctatgtctaatatcatcatttttcctaaactccattcaagtctaattcctttaccaataacatataaatttaccaaattaaccactaaaacatcaaacccaaaattaaatttttcctaacac

SEQ ID NO: 81662 - DNA, 342 bp, Glycine max
gtcactgggtgttctgttcaccccaatgcaggatgttcaggttacaattgattggtttatttggtctcaggaatgtgttcccagaacctattgtgttttaaatccacaaaatccttttgtgttaaataggtggatgggaaaactgactttcccccagggcacttcccgaagtgttaagagaatgcctctttctatagggggaggagctggtgcaaagaatgctattctcatgaatatgccaaatgctgttctttcaatgtggagatattttgttggagatcttgtttttttaggttttaattattatctcttctcttcatttaaatgttctaggtttttttt

SEQ ID NO: 81663 - DNA, 227 bp, Glycine max
ctaaatttggagtggaccacaactttacatattatcctggatatgtttttgtatagcatgtaggattttagttattcacagcagaatatagacaaaaaaattgcaaatgtttacttatttacctcttttagattagtgactggcactacagccatagtgacagaaaattgctgctatacctgtctgccaagttcttgtccaaattgaaacttcaactttatcatagg

SEQ ID NO: 81664 - DNA, 379 bp, Glycine max
ctctctcactcttcattttcagtaagagagagcgacttcacctgggatcccatttcaaaaccgctcgttctccttctccttatttataagactcctctctttctctctcttctttgcctattggttttctctaataccatgtaaagaaaaaaaaaaaatacaatctttcaatcagcaaaatctacagtttcaatctttcggatcttgttggggttgcgtgtggatccctgggatcggaaccctctctcaatcctcattctgggtcggttttctttctggggggctttagatctctttgtcctggcaactcaagtcactcttgcttgcattggtggggtttcagtgttctactttttatggcatttttacctcccttttt

SEQ ID NO: 81665 - DNA, 305 bp, Glycine max
caaataagttgtgtgtaatcaagcttaatcaattttttcatattcctatgtttatttcctacatatattggtagaaaaattatttcaaaaaaaaaaaaaaaaaaaaaaaaaaaaaaaaaaaaaaaaaaaaaaaaaaaaaaaaaaaaaaaaaaaaaaaaaaaaaaaaaataaaaaaaaaaaaaaaaaaaaaaaaaaaaaagggggggcccccaataagatgagcttttcaccccggaaataaaatcgggaccggtcccggtaggggaacaaattttccttataaagggtcttttaaaatcttgcct

SEQ ID NO: 81666 - DNA, 164 bp, Glycine max
gctgttctttcaatgtggagatattttgttggagatctcgtctttgaagtttctaagatgacttctccctacattaaatgtacagtctctttcttcatagcatttggaaatttggctgatgacaccatcaattttgaggcttttctctccaaactgcaccagct

SEQ ID NO: 81667 - DNA, 186 bp, Glycine max
cgatctcctgaaaatcagtaggctctgcatgatctgtaatggggggtctctttccttgtcgtttgttaatttaataatgaaatagtcatgacccttttgttagcatgctcttcctatctgaaaatttctacacctatttcaatagtcttaatgatttgtgaagtgtgttatattttaataaaatta

SEQ ID NO: 81668 - DNA, 349 bp, Glycine max
aaaaaaatttttttaacaaaaaaaatctttaaaaaaaaaaaaaaaaaaaaaaaaaaaggaaggggaaaaaaaaaaaaaaaaaaaaaaaaaaaaaaaaaaaaataaaaaaaaaaaaaggggggggcccccccttagtaagcttttcaacccggaaattaattctggaccggtccctggaggggtaccaattttccttatagggggccgttttaaagcttggcgaaataatggcaatagttttttccttggtaaaatttttttcccttaaaaattccaaaaaaattacaacccggaaacataaagtttaaaacctggggggcctaatgggggggttaactcaaattaattt

SEQ ID NO: 81669 - DNA, 371 bp, Glycine max
gcaagaatcttatcttgtcaatctcgtaaatgtgttacgagggttgtatttgcacagtccagaggaagctcgccaattgagaaggaaagctctctctcgtattgaatggctgcaaaaagctgatgtgcctaccatagcacagattgaagagttccattcgatgcagaggatgatgaatgctcctgattcaaatgataatattgatctactgttgagcattgatttgttgggtttacaaggagcaggtaaagcttttccaaacaagattgtttttgatgataagcttgtgttggctaacacacaagaattctttgatggaaattttccagtggattcttggttaccaatttttgtgaattgtctctatcctg

SEQ ID NO: 81670 - DNA, 296 bp, Glycine max
gttggaagtagattatactaagcgcatgatattaatgatggaatctgttgaagtgaggaggagatggaccctttagtgagctactgagcgtatatacgagcgcaggcaaggatatcatacattaagataccatggcgtatacactcatgagatgtccatagacagtttacatgtacatggagtgaacgtgatcctaaagactcaacccactatacactggacgctccagggatgattcgcaatgagtacactatagactaacatcttgcagatgcagaatacattgatgagacagt

SEQ ID NO: 81671 - DNA, 370 bp, Glycine max
ggcccttaagctcaacacatgaaaggccacctgggagctcttctagtacaagttttcctcataatacttggagaaatgattctacaatttcatctgtgaaccattcatcagatgttttgtatcctcctacttcagttgctactcactgtcccaggaagaccattcgttacccaacatcaactgctcatcctcatcctcattctcgttctccatacgcttcagtttcccccattatcaaaccaccctctgccatagatagtggttgtagaaacttatttaaagtcactgacagagtgaaatttgatgatatgagtgccagagtgcatcatccatgcaccaattccaggaaaagaccctcaactagttttgt

SEQ ID NO: 81672 - DNA, 362 bp, Glycine max
cgattatgctagttttgatggtttgattaccaagcaagttatgagcaagatggccgaaatgataaacagtctttgtggtggtgatgaaaaattgatgcgtgaaaggacacacctgctgttggcttgttgttcaaggatggcaatttgtaagaaagatgtttggagagttgaatgtggaatcccttctggatttccgctcacagttatttgcaatagcatttttaatgagatgctcattagatatagctatgaaaaattactgcgccaggctaaagcttcaagtatgtttttacaatcctttaaaaatttcgtttctttgtgtgtgtatggtgatgataacttaattagtgttcatgaatatg

SEQ ID NO: 81673 - DNA, 368 bp, Glycine max
agcgagcagtttcagacacagagagaggggtttgggattggagggattgacgctgcgtctcttcctcttctctttcgatccatccctcattcctaatcctccaatccaaccacctcagcctcacactcacatatacacatatctgaacgcgtatcgtccctcctatggcttcaaagcgcatcctcaaggagctcaaggacttgcagaaagacccaccaacttcttgcagcgctggtccagtagctgaggacatgttccattggcaagcaacaataatgggtcctgctgatagtccttatgctggaggtgtattcctagtcactattcacttccctccggattatcctttcaagcctcctaaggttgcc

SEQ ID NO: 81674 - DNA, 286 bp, Glycine max
gtctaattatgaaaacagcttaatggaaaaaaaaaggtaaataaaaaaaaaaaaacgggaaataaaaattaaaacaaacaaaaaaacctatgagacatactatttttacttaatttcacaatctataactacatatctttctacctctttgctatcaccatctcctcatttttttacctctatcttttttcttctctctcctttttctttttcatctctgttttattttttgcccctttttctttttccttacattactttttttatttttcattttattttttct

SEQ ID NO: 81675 - DNA, 170 bp, Glycine max
gcggaatcctctgcatgatctggaattcgtgttttctttcgcttgttcgtttgttgaattcaataaaggaaattaggcatgaccctcttgttgagtatgctctgcctatctgaaaatttccacacctcttttaattgtcgtaatgatgtgtgaagtgtgtgttattttaa

SEQ ID NO: 81676 - DNA, 145 bp, Glycine max
gctttaatctctgcatgatctggaattcttgtgaaggtgttcttgctcagtgggtgaggcaataaatgaaatcatgcataaccctcttgttgagtatgctcttcctattctaaaatttccacacctcttttaattttcttaatta

SEQ ID NO: 81677 - DNA, 359 bp, Glycine max
ttccaatatattccattctctctgtgtatttccctacctctcccttcaagatgcagatcttcgtcaagaccctcaccggcaagaccatcacccttgaggtggaaagctctgacaccatcgacaacgtcaaggccaagatccaggacaaggaaggaatccccccggaccagcaacgtctcattttcgccggaaagcaacttgaggacggccgtacccttgctgactacaacattcagaaggagagtactcttcacctcgtcctccgtctccgtggtggcatgcagatcttcgttaagacactcaccggcaagaccataaccctagaggttgaaagctccgacaccatcgataacgtcaag

SEQ ID NO: 81678 - DNA, 370 bp, Glycine max
attcaactctgctaagccggtatgaaagttgaatttccctttaagaatgttgaatacgtggaggacttcattggccctataagagatgtcgagtctctctcatttcttagcattacttttcactattttcgaaaatacaactatattggcataagagaaaacacaattgatagtccaaaaaaaaaaaaaaaaaaaaaaaaaaaaaaaaaaaaaaaaaaaaaaaaaaaaaaaaaaaaaaaaaaaaaaaaaaaaaaaaaaaaaaaaataaaaaaaaaaaaaaaaaaaaaaaagggggggcccccccctttgtggccctttccccccggtatttaattcgggcccggtccctggggggtacccaattttcctt

SEQ ID NO: 81679 - DNA, 267 bp, Glycine max
cttttccagtagctttactggctgttctttttggcgttaagaatgaaattctgagttctaacgccactaaccctatgctgacgcgacttcttgagaactgtaagagtctcaaatatctggttgatgagtgtccttttgcatttgtgaactagtatgtaatattttattcacttaaataaagcgcattactatgtgcaatgagtgtgtttaaattttaaaaaaaaaaaataaaaaataaaaaaaaaaaaaaaaaaaaaaataataaaa

SEQ ID NO: 81680 - DNA, 377 bp, Glycine max
ggttgggggcagcagtcaataggagtgattgggcctaattggtacaagtgtttttaacaaacagcaacagtacagagcattttgatgcatgtaagtggacaaaatcagaaccacattcctgggaattaatcttcccaatagaggtatgtggtcctaataatggttttgaaatgtggagttctgagtgggcaaatcaaacttcatggcatttgagtttccttattgacaatcccaaacagtctacagtttttgatattctcttgggaatctctcaagattttgaaattgctggtaatactcttatgccagctttttctgttccacaggctactgccagatcttctgaaaatgcggaatcctctgcatgatctggaatt

SEQ ID NO: 81681 - DNA, 363 bp, Glycine max
ggcaatgatattctgtgttgcgattatgctagttttgatggtttgattaccaagcaagttatgagcaagatggcagaaatgataaacagtctttgtggtggtgatgaaaaattgatgcgtgaaaggacgcacctgctgttggcttgttgttcaaggatggcaatttgtaagaaagatgtttggagagttgaatgtggaatcccttctggatttccgctcacagttatttgcaatagcatttttaatgagatgctcattagatatagctatgaaaaattactgcgccaggctaaagctccaagtatgtttttacaatccttcaaaaattttgtttctttgtgtgtgtatggtgatgataactta

SEQ ID NO: 81682 - DNA, 135 bp, Glycine max
gtctattttatttggtgttgcaaatatgctagtcaggatggtttgataaccaagcaggttataatcaaaataccataaattataaacagtctatgtggtggttattaataatattatgcgtataaatgactcacc

SEQ ID NO: 81683 - DNA, 363 bp, Glycine max
gctttctagctagtcataatatcaccattactgatggtattgacaaaactagtgcaactttgcaatttagaaagttagcagattgtgattttctcaagagaaactttaagcagatgtctaatgttttgtgggtggctcctgaggacaaggcgagtttatggtcacaacttcattatgtttcgtgtaataatctggaaatgcaagaagcttatcttgtcaatctcgtaaatgtgttacgagaattgtatttgcacagtccagaggaagctcgccaactgagaaggaaagctctctctcgtattgaatggctgcaaaaagctgatgtgcctaccatagcacagattgaagagttccattcgatgc

SEQ ID NO: 81684 - DNA, 369 bp, Glycine max
aagaatgctattctcataaatatgccaaatgctgttctttcaatgtggagatattttgttggagacctcgtctttgaagtttctaagatgacttctccctacattaaatgtacagtctctttcttcatagcatttggaaatttggctgatgacaccattaattttgaggcttttccccacaagctggtgcagtttggagagattcaggaaaaagttgtattgaaattttcacaagaggaatttcttacagcttggtcaactcaggtgcgtcctgcaacaactctgttggctgatgggtgtccatatctgtatgctatggtgcatgatagttcagtgtctacaataccaggtgattttgtcattggtgtt

SEQ ID NO: 81685 - DNA, 369 bp, Glycine max
aagattactgaaagtttcatcacatcaagattcaactctgtgcaggctggattacctgatgatctttctgagaaccccttggacaatgctgaacttcttcaggatcaattagattgcttcccatacctatgtagatttcagtatgaaagcagtagtttattcataataaacataatggagccagtcctgcaaatatacacggaaagagctagattacatgttcctgataacagtgacctcattgtgattgaagataaacttgcttggattgttcatatcattgctgcaattcttaagataaaacaatgtactggttgtagtgtggaatcccaggaagtgcttgatgctgaactttcagctcgagtttta

SEQ ID NO: 81686 - DNA, 250 bp, Glycine max
tgttggagtgcttctcagtggtgagggatggttgttattgttgctgaaagtcagacgtaaacaaaaactaatagaagcataactaatattatgtataagaagaggaagagtttatcttcttacttactaattccgattgatcgcctttcttcatctaatacgcgttctacaactgccttattcttacgatttatcctattatcaaccaacatcttcttaaacctttactattacatctgcgtcttcattt

SEQ ID NO: 81687 - DNA, 61 bp, Glycine max
gttatggattctttaaatgactgattatttgcttaaaggaacttaattctaaataatgtgc

SEQ ID NO: 81688 - DNA, 153 bp, Glycine max
gcgaggcaaacggaatgaagggcccgcattttctcatagccggggcgggcaatacatcaatactatcatgtttttcgcttcatgagcaaccaccccaatcattattgtagaacgctttatccgggataacaaggtagtctcgtttcttgcatg

SEQ ID NO: 81689 - DNA, 370 bp, Glycine max
ggtggctcctgaggacaaggcgagtttatggtcacaacttcattatgtttcgtgtaataatctggaaatgcaagaagcttatcttgttaatctcgtaaatgtgttacgagaattgtatttgcacagtccagaggaagctcgccaattgagaaggaaagctctctctcgtattgaatggctgcaaaaagctgatgtgcctaccatagcacagattgaagagttccattcgatgcagaggatgatgaatgctcctgattcaaatgataatattgatctactgttgagcattgatttgttgggtttacaaggagcaggtaaagcttttccaaacaagattgtttttgatgataagcttgtgttggctaacaca

SEQ ID NO: 81690 - DNA, 261 bp, Glycine max
atctcgttcttaaccattcaaaagttctggcatttgttagattgtggactggactgattatacatatcatcccgatatccaggtacaccatgttggtagtgtagtgtgtagtgggttgtatatgctacgcaaaggagtaatcatagatgagatgaggcattatgttgtggatttaagtatggtggcatggatggacttcctcaccttccttggtgtgtgggaactatttgtgtttttttctactgaatttgtactttgttt

SEQ ID NO: 81691 - DNA, 192 bp, Glycine max
actttattagctagatccccgctcataatatgaccatttcttatgctattggcacggctacttcaactccacaatttaaagagtttacttattgtaattctttctagagaagctcttactatatgtttaacgttttgtgtggaggcttctgcttacactgtgactttatcctcacaaccctattattaaccg

SEQ ID NO: 81692 - DNA, 381 bp, Glycine max
  unsure (1)..(381): unsure at all n locations
tacataaactccaattcacttcaaccttactatctcgctcactctcctncaagtgcgggataaaaaacatttttctcgccactatcctcttataacttcttactatattttattttacaataacttttaaatcaaatttctcatacctttctccacatcatatcttcttcatttatttatactataatactataacaaaattcacttcttatttttccaaactttttttcccctattcttcttcttacaaattaactccttatctctctcttttatcaactatttctctttatatctacatttataacatcatttttatcttacattttttactcataattattctatttactttcttaaaccctacttaatatttttcct

SEQ ID NO: 81693 - DNA, 366 bp, Glycine max
aatttaaatgctttctagctggtcataatatcgccggtactgatggtattgacgaaactagtgcaactttgcaatttagaaagttagcagattgtgattttctcaagagaaactttaagcagatgtctaatgttttgtgggtggctcctgaagacaaggcgagtttatggtcacaacttcattatgtttcgtgtaataatctggaaatgcaagaagcttatcttgtcaatctcgtaaatgtgttacgagaactgtatttgcacagtccagaggaagctcgccaattgagaaggaaagctctctctcgtattgaatggctgcaaaaagctgatgtgcctaccatagcacagattgaagagttccatt

SEQ ID NO: 81694 - DNA, 367 bp, Glycine max
  unsure (1)..(367): unsure at all n locations
attccaatatattccattctctctgtgtattgcctgcctgtcccttaagaggcagatcttcntcaagaccctcaccggcaagaccatcacccttgaggtggaaagctctgacaccatcgacaacgtcaaggccaagatccaggacaaggaaggaatccccccggaccagcaacgtctcattttcgccggaaagcaacttgaggacggccgtacccttgctgactacaacattcagaaggagagtactcttcacctcgtcctccgtctccgtggtggcatgcagatcttcgttaagacactcaccggcaagaccataaccctagaggttgaaagctccgacaccatcgataacgtcaaggccaagatc

SEQ ID NO: 81695 - DNA, 403 bp, Glycine max
  unsure (1)..(403): unsure at all n locations
aaacgggccaggcacgcgtacataagctcnnaattcggctcnagcaatatcttttcacaanatnngatnnnntcagggccgttcaaataacattttcagcaacataataaancccattccttttatacttttataacctgccttgatattaaaaatacctttcaatctctcacattatttaattttttatatataacacttacaacaatttcatatgattaatattattttcatattcatttctctttatatcattctatctcttacttccatgacattattttattttttccatttcttcctacataatcttaaacgtcccttatttaaatagttcttcactatcttaatatttatctcaaacatttttttaattcaataatttaatattttatacattaaa

SEQ ID NO: 81696 - DNA, 391 bp, Glycine max
gaacaaagttaatagtgtcagcggcaacacctcacatttacgatggatctatgggacaaaccctgaccacttccacctatagaggttttactggctcatgtctgtgctgagtgcgttgtatttcttgcatttctaggcttgggctatctgatactcggattgagggtcaggatctacaaacacctgaaaaggatgatatatgccctataggctagctcccaaaaaggaatataaataacgccttgatgacaatgactaatgccactaatcacaacatatattcatgtgccttaacatcatgcttggtaggttggtttgatctcaaaacaatgtgaattctttttgggcgggctgcctactatactctattcgacccgagaattaattgctg

SEQ ID NO: 81697 - DNA, 364 bp, Glycine max
tcactatagcagagccgtgacgtgcactcctcccttacctcagcttggggttcgagtagagtgactcaccatttaaccgcttactgaagcaatcatttcgtgatttcaagaatgtctcaatggcgccctacttctgtgtagccaactgctggagggaaagaaaatgactctatgtgctgaacacagagttcgcatatcatgtggtgttgcactcctagtttattcgctgaacactgtcctctttcttataggactttgtgtcagattgcaacattggctgtttctttatcagctctccgtgtaccttcaaggtcaagccgaggagatttagaattcatgctcccactctcctacatgagcttgg

SEQ ID NO: 81698 - DNA, 390 bp, Glycine max
attaaatgtacagtctctttcttcatagcatttggaaatttggctgatgacaccatcaattttgaggcttttgcccacaagctggtgcagtttggagagattcaagaaaaagttgtgttgaaattttcacaagaggaatttcttacagcttggtcaactcaagtgcgtcccgcaacgactctgttggctgatgggtgcccatatttgtatgctatggtgcatgatagttcagtgtctacaataccaggtgattttgtcattggtgttaagttgacaaccataaacaatatgtgtgcatatgggctcaatcctggtatttcaagttctcgtcttttgggcaccattcctcaatccatttcacagcaaactgtttggaatcaaatggcaaca

SEQ ID NO: 81699 - DNA, 393 bp, Glycine max
gattatcctaagtctttgggaatagtgctgcaatggcttcaagtcaggaggaggtgacccttttgggagctactggaagcccatttgtgtgcagggttcatattgccctcaagttgaagggagttcaatacaaatatgtcgaagaaaatttgaggaacaagagtgaactgcttctcaaatccaacccagttcacaagaaggttccagtgtttattcacaatgagaagcccatagcagagtctcttgtgattgttgaatacattgatgagacatggaagaacaaccccatcttgccttctgatccttaccaaagagccttggctcgtttctggtccaaattcattgatgataaggtttttggcgctgcatggaaatccgttttcacagctgatg

SEQ ID NO: 81700 - DNA, 100 bp, Glycine max
ttgtggttttagatatgacatatatcactggaaaccattatggcaatgggattccctgctggcgacatgagctctgggtttttcgctatgtggaaggatt

SEQ ID NO: 81701 - DNA, 394 bp, Glycine max
atttgcaatagcatttttaatgagatgctcattagatatagctatgaaaaattactgcgccaggctaaagctccaagtatgtttttacaatccttcaaaaattttgtttctttgtgtgtgtatggagatgataacttaattagtgttcatgaatatgtcaagccttactttagtggttctaaattgaaaagctttctagctagtcataacatcaccattactgatggtattgacaaaactagtgcaactttgcaatttagaaagttagcagattgtgattttctcaagagaaactttaagcagatgtctaatgttttgtgggtggctcctgaggacaaggcgagtttatggtcacaacttcattatgtttcgtgtaataatctggaaatgcaag

SEQ ID NO: 81702 - DNA, 391 bp, Glycine max
tcaacccatactccatggaatggactggtttggccaatagattactgagtaagggcaacgatattctgtgttgcgattatgctagttttgatggtttgattaccaagcaagttatgagcaagatggcagaaatgataaacagtctttgtggtggtgatgaaaaattgatgcgtgaaaggacacacctgctgttggcttgttgttcaagaatggcaatttgtaagaaagatgtttggagagttgaatgtggaatcccttctggatttccgctcacagttatttgtaatagcatttttaatgagatgctcattagatatagctatgaaaaattactgcgccaggctaaagctccaagtatgtttttacaatccttcaaaaattttgtttcttt

SEQ ID NO: 81703 - DNA, 231 bp, Glycine max
tccttagctttggattcgggtcgagggatttcttacttcaggacctgctgggttaatttttttgggaaaatttacagggcaaaactgaagctccgaaaaggtttaccctccgcatggatgattcctcaaagatttcaccctttcaaccaaaaggtcttattggctggggaggaaaaaaccgaattttttccgtggaggtgggccaccgacctaaagagattatcaggtaaa

SEQ ID NO: 81704 - DNA, 394 bp, Glycine max
tcaagattggtgtgtggagaataggcaacatggggtggagaggattccaacaccaatgataccaattagcccaaatgaggttgctgagcttctgatgcaagtgaaggcctcagcaaggggtttggaccaatatggttgccttaaattggtgcagaaattgaagaggtggggtggtgagagtgagaggaacaagaggtgcatagtggacaatggagcacctgtggcattggcttcatcatttgatgcatttgccaatgattctgttgagagaaatgtggtggttcttgaggagattttgtcagcactcaattggatgtttccacttcaattggaggcacacaagtctttggggtctttggcttctctaagatgcatgagttggttcttgaagcac

SEQ ID NO: 81705 - DNA, 92 bp, Glycine max
gcatgaccctcttgttgagtatgctctgcctatttgaaaatttccacacctcttttaattatcgtaatgatgtgtgaagtgtgtgttatttt

SEQ ID NO: 81706 - DNA, 392 bp, Glycine max
gagagaacaccattgtattttgattctagcaagcagagcttttggcaattttctattgaccttctgggcggaggaattttagtggacaaaactggagattggatcacacttatacaaaattctccaattagtaacttgttgagagttgctgcttggaagaaaggttgcttaatggtcaagattgtgatgtctgggaatgcagcagtcaaaaggatgtgattgggcctcattggtacaagtgtttttaacaaacagcaacagtacagagcattttgatgcatgtaagtggacaaaatcagaaccacattcctgggaattaatcttcccaatagagagatgtggtcctaataatggttttgaaaagtggagttctgagtgggcaaatcaaactt

SEQ ID NO: 81707 - DNA, 388 bp, Glycine max
gagggagttctggacaccctcactttataactagacactgatatatacaacacggtcatatagacgagctatgctaatagaacatttgaagggttagatgactgctgcgtgattgtacctcctcacagaagtatgtttgataaacccatcattagccttgtataatgttaaaaaactaaattttgaaacctcagctttgtgatagagtggaatcctgtctgatttctaaatattgcattgagataggttcaacttagagtttcttgaaagaatcaatctcttcctacctttatcgaaagttttttagctttaatttcattagatttggaagactatgaacatctgcttgatctcactttatgcttaactacaaaactttcggtctaaa

SEQ ID NO: 81708 - DNA, 396 bp, Glycine max
ggtttttcatcaccttctggtaaccagttggaacctgaaactgatttagatctgttctcaaaatctcaaattggtgaacaggatgcagaattcccactcagagaggagaaaaactttgcctctgaaaaacctcaatttcagcagatgcagaaatatcaattggagcaagaaagcactaatgctacttctgactgcgtatcagaaatccatgcagatgagccatcatcattttattccttgccacagtcatctagccaggagaataatgctgcaaaacgtgtcatggatccattgaagcctcttcttcctaacctctttcccaaggcaactgaaaataaacttgatgagatgccacccatgcctcctctaccgcctatgcaatggagaatgggcaag

SEQ ID NO: 81709 - DNA, 393 bp, Glycine max
gggtggtttacttgagtgctcggtggatacatgatccggcgtaagtcagaaggaaaatatggagcttctccaagggttgaccatcatgcgggacgataccttaagaatctgacgtcctgaacaagaggctctcatcgtcacgggagaagaagaccgaatatttcccatgtacaccgccctcttactattagagataatcagttacaaggctcgactgcactagcttaacgaggcatgccatgtgcactaaatggaaacgccagtacaattccacaacacatgcctaaatcctttacaggagcattttcgagtattacatcaattacgggcacaacttgtacacatgcgatacgagtatggcttcatacaagcgaataccataaccatacttcg

SEQ ID NO: 81710 - DNA, 390 bp, Glycine max
tgctgttctttcaatgtggagatattttgttggagatctcgtctttgaagtttctaagatgacttctccctacattaaatgtacagtctctttcttcatagcatttggaaatttggctgatgacaccatcaattttgaggcttttccccacaagctggtgcagtttggagagattcaggaaaaagttgtattgaaattttcacatgaggaatttcttacagcttggtcaactcaagtgcgtcctgcaacaactctgttagctgatgggtgtccatatttgtatgctatggtgcatgatagttcagtgtctacaataccaggtgattttgttattggtgttaagttgacaaccataaacaatatgtgtgcatatgggctcaatcctggtat

SEQ ID NO: 81711 - DNA, 393 bp, Glycine max
gaggcttttccccacatgctggtgcagtttggagagattcaagaaaaagttgtgttgaaattttcacaagaggaatttcttacagcttggtcaactcaagtgcgtcccgcaacgactctgttggctgatgggtgcccatatttgtatgctatggtgcatgatagttcagtgtctacaataccaggtgattttgtcattggtgttaagttgacaaccataaacaatatgtgtgcatatgggctcaatcctggtatttcaggttctcgtcttttgggcaccattcctcagtccattttacagcaaactgtttggaatcaaatggcaacagtgagaacaccattgaattttgattctagcaagcagagcttttgtcaattttctattgaccttctc

SEQ ID NO: 81712 - DNA, 391 bp, Glycine max
ctcgagccgctcgagccgctcgagccgattcggctcgagctcacccgcctcgttctgtacctgcaacccccaagacttgccgcatctgccgctacgcctccttttcttccccagccgaccgtcttcttactccgccgccttgctcctcgtcgctccctacgcatctccttgtgcacgccagctccttaacgcgaccgtcggccgccagcagccgcagtcatgcctcagcagcgctacgagcgggtgtccgcacacgatgaagacgaccatgtctcgtccgccgacaatcacgctgccccgggcccgcaatacccgattccctcctcgccacccccatccttcagatcgcgcgcttcttcgcccacgcagcaacgtctgctcaacgaacatg

SEQ ID NO: 81713 - DNA, 395 bp, Glycine max
gtgatgataacttaattagtgttcatgaatatgtcaagccttactttagtggttctaaattgaaaagctttctagctagtcataacatcaccattactgatggtattgacaaaactagtgcaactttgcaatttagaaagttagcagattgtgattttctcaagagaaactttaagcagatgtctaatgttttgtgggtggctcctgaggacaaggcgagtttatggtcacaacttcattatgtttcgtgtaataatctggaaatgcaagaagcttatcttgtcaacctcgtaaatgtgttacgagaattgtatttgcacagtccagaggaagctcgccaattgagaaggaaagctctctctcgtattgaatggctgcaaaaagctgatgtgcct

SEQ ID NO: 81714 - DNA, 253 bp, Glycine max
atgaatacagaccttttttttttcaactattttaaaataaaaaaggtctgtattcattcattgggggaggggggtgttttttccactatcagtattcagtctttttctattttttttttgttttaatattaatttattggtctttcttctcttttttattttttctttctttttattattacttttccattttctataattttttctttttattccttttttttattttattttttattattgcattatattt

SEQ ID NO: 81715 - DNA, 372 bp, Glycine max
ggaatgtgttcccaggacctattgagttttaaatccacaaaatccttttgtgttaaataggtggatgggaaaactgactttccctcagggcacttcccgaagtgttaagagaatgcctctttctatagggggaggagctggtgcaaagaatgctattctcatgaatatgccaaatgctgttctttcaatgtggagatattttgttggagatctcgtctttgaagtttctaagatgacttcttcctacattaaatgtacagactctttcttcatagcatttggaaatttggctgttgacaccatcaattttgaggcttctccccacaatctggtgctttttggagagattcaggaaaatgtttagttaaaatt

SEQ ID NO: 81716 - DNA, 396 bp, Glycine max
gcgagtttatggtcacaacttcattatgtttcgtgcaataatctggaaatgcaagaagcttatcttgtcaatctcgtaaatgtgttacgagaattgtatttgcacagtccagaggaagctcgccaattgagaaggaaagctctctctcgtattgaatggctgcaaaaagctgatgtgcctaccatagcacagattgaagagttccattcgatgcagaggatgatgaatgctcctgattcaaatgataatattgatctactgttgagcattgatttgttgggtttacaaggagcaggtaaagcttttccaaacaagattgtttttgatgataagcttgtgttggctaacacacaagaattctttgatggaaattttccagtggattcttggttacca

SEQ ID NO: 81717 - DNA, 379 bp, Glycine max
ccgagcgagggaactttgcattattttgactagagctaggagcaagcggcagaagttttttattcggatggagcataaccggtcatcttgtcacttgcaggtgatgtatgtactgatgtggagagcgacccatactctaatgccccaggtgttttgcgtaagcgttatggtccttaggcctacgtcatgagaggtggcgtcctcctttacatgttccggagcgtgagtaccccattttgggcgtgcaagatcttatgtattgatgcagacacagtcatcacgaactttttcaatctaaatatgtggaccctgttgagtgagtatgacactttccgcggacactttgtgcagttcatatggttgacgcggtatccaacta

SEQ ID NO: 81718 - DNA, 393 bp, Glycine max
cgtttcctctacaaaagtctcaatttgttagtggaaaaaccttcaaatatgatataattggtgctggttcacattcttcagatattttcctgaaaaggaagatcaagaaaaacccaaaaagattgatgccagattgagacaaagaatagatcctcaatacaatgaggttcaagctcagatggaaacaaatttgtttaaattgtctcttgatgatgttgaaactcctaaaggttccatgttggatcttaaaatttctcaatctaaaattgcacttcccaagaacacagttggaggaaccattctgcgtagtgatttattggcaaattttttgacagagggcaattttagagcaagtgttgatttgcagcgcactcatcgtattagaggaatgat

SEQ ID NO: 81719 - DNA, 390 bp, Glycine max
ttgttagtggaaaaaccttcaaatatgatataattggtgctggttcacattcttcaggagattttgctgaaaaggaagatcaagaaaaacccaaaaagattgataccagattgagacaaagaatagatcctcaatacaatgaggttcaggctcagatggaaacaaatttgtttaaattgtctcttgatgatgttgaaactcctaaaggttctatgttggatcttaaaatttctcaatctaaaattgcacttcccaagaacacagttggaggaaccattctgcgtagtgatctattggcaaattttttgacagagggcaattttagagcaagtgttgatttgcagcgcactcatcgtattaaaggaatgattaaaatggtggccacagttg

SEQ ID NO: 81720 - DNA, 395 bp, Glycine max
  unsure (1)..(395): unsure at all n locations
ggtggctcctgaggacatggcgagtttatggtcacaacttcattatgtttcgtgtaataatctggggatgcaagaagcttatcttgtcaatctcgtaaatgtgttacgggaattgtatttgcacagtccagaggaagctcgccaattgagaaggaaagctctctctcgtattgaatggttgcaaaaagctgatgtgcctaccatagcacagattgaagagttccattcgatgcaaaggatgatgaatgctcctgattcaaatgataatattgatctactgttgagcattgatttgttgggtttacaaggagcaggtaaagcttttccaaacaagattgtttttgatgataagcttgagttggctaacacacaagaantctttgatggaaattttc

SEQ ID NO: 81721 - DNA, 379 bp, Glycine max
ctatagagttttaaatccacataatccttttgtgttaaataggtggatgggaaaactgactttcccggagggcacttcccgaagtgttaagagaatgcctctttctatagggggaggagctggtgcaaagaatgctattctcatgaatatgccaaatgctgttctttcaatgtggagatattttgtaggagatctcgtctttgaagttcctaagatgacttctccctacattaaatgtacagtctctttcttcatagcatttggaaatttggctgatgacaccatcaattttgaggcttttccccacaagctggtgcagtttggagagattcaggaaaaagttgtgttgaaattttcacaagaggaatttcttacagct

SEQ ID NO: 81722 - DNA, 393 bp, Glycine max
aaaattactgcgccaggctaaagctccaagtatgtttttacaatgcttcaaaaattttgtttctttgagtgtgtatggtgatgataacttaattagtgttcatgaatatgtcaagccttactttagtggttctaaattgaaaagctttctagctagtcataacatcaccattactgatggtattgacaaaactagtgcaactttgcaatttagaaagttagcagattgtgattttctcaagagaaactttaagcagatgtctaatgttttgtgggtggctcctgaggacaaggcgagtttatggtcacaacttcattatgtttcgtgtaataatctggaaatgcaagaagcttatcttgtcaatctcgtaaatgtgttacgagaattgtattt

SEQ ID NO: 81723 - DNA, 395 bp, Glycine max
aaacagcaacagtacagagcattttgatgcatgtaagtggacaaaatcagaaccacattcctgggaattgatcttcccaatagaggtatgtggtcctaataatggttttgaaatgtggagttctgagtgggcaaatcaaacttcatggcatttgagtttccttattgacaatcccaaacagtctacagtttttgatattctcttgggaatctctcaagattttgaaattgctggtaatactcttatgccagctttttctgttccacaggctactgccagatcttctgaaaatgcggaatcctctgcatgatctggaatttgtgttttctttcgcttgttcgtgtgtttaattcaataaaggaaattaggcatgaccctcttgttgagtatgctct

SEQ ID NO: 81724 - DNA, 367 bp, Glycine max
tctctttaaaaaaatgtaatatggactttgctgtttacttatctagcggtatgaataagatggaatgtggaagtcgcagccgtttgtttgaatagaacgtaaagacgttattgagtttgttttcattttgaagttataattctaccacacatttagcttgcaattgattaccaaaaaataataaaaaacactaaataaaaaataaaaaaaaaaaaaaaaaaaaaaaaaaaaataaaaaatataaaaaaaaaaaaaaaaaaacataatgggggggccgcccctttttgggcttgtccccccggatatttattccggaccggtccctgaaggcgtcccacgtttccctttttgggggggttttaaagct

SEQ ID NO: 81725 - DNA, 345 bp, Glycine max
gtctttgaagtttctaagatgacttctccctacattaaatgtacagtctctttcttcatagcatttggaaatttggctgatgataccatcaattttgaggcttttccccacaagctggtgcagtttggagagattcaggaaaaagttgcattgaaattgtcacaagaggaatttcttacagcttggtcaactcaggtgcgtcctgcaacaactctgttggctgatgggtgaccatatttggatgcaatggtgcatgatagttcagtgtctacaataccaattgcatttctgttccttggtgcgtaccaaattttcctatagtttgtcgcataagagctttatgct

SEQ ID NO: 81726 - DNA, 337 bp, Glycine max
  unsure (1)..(337): unsure at all n locations
aggnnggacgatgcacgcgtacgtacgtttggtattcagctcgagcgagaggattctttgtttttttaaagagctctgcaatccttgggggggacataaaaaaactaccaggagttaaatggaagggagcttgcaatgataataaaaaaaaacacttaagggaccgccctgttattgagatgaccgacctccgtataatatccgaccggatcctggatagagaaccagcctaggaatggagaggtcttgttttactatgggcaataaacggtcggacatattagattttagcatttatttaaatttgaatgtttggtggatcataagatgcgcgtgt

SEQ ID NO: 81727 - DNA, 398 bp, Glycine max
ctcgagccgaaaagaacttttcattcattttcatgtcttttctttctttcatgctgtagtcttttaagcatttgatttgatttttaaataaattgctgagcttttccacagctttataaccgctaccctaatcttcatgtttactcatatgggccactcccatgtctggatttagttgtggcaaatgcatgttcagaatttgttacaagcattatatttggaaatgaattttcatcgcgcctttcaactgtgcggctaagggcagctgcaatcacatcactatcacaagatcctaaagcagatagtgccatgattttcaaacttgcccataggtttctagatgtaagcaaatatcagagaaataagtccaaggcagaggatgaacctgagtatcattc

SEQ ID NO: 81728 - DNA, 400 bp, Glycine max
gcgatatcatttgtgtcactggatggactgccaccccaatgcaggatgttcaggttacaattggttggtttatttcctttcaggaatgtgttcccaggacctattgtgttttaaatccacaaaatccttttgtgttaaataggtggatgggaaaattgactttcccccagggcacttcccgaagtgttaagagaatgcctctttctatagggggaggagctggtgcaaagaatgctattctcatgaatatgccaaatgctgttctttcaatgtggagatattttgttggagatctcgtctttgaagtttctaagatgacttctccctacattaaatgtacagtctctttctttatagcatttggaaatttggctgatgataccattaattttgaggcttt

SEQ ID NO: 81729 - DNA, 404 bp, Glycine max
atgaaaacgaatgtctttgtgtactgagtggctacaaaatggggggcatggcaatgccatgcgtacgatatattccctctccgaatgaacactggctatggtacccgtactcacaaggtgaaatgcgcaagttggaggcttgctgtggaagcacacaacatctttggctttgagaccattccagaagagtgcgatgaagcaacaaaggaatacatccatggcgaacaatatagatcagactccaaaacagttaaccaacaagcttacttttatgccagagacctcgaagtccatcccaaggacacatttgtgttcagtatagatggcaccgtactctctaatattccatactacaaaaaacatggatatggggcggagaaaattaactcgaccttgtatgatga

SEQ ID NO: 81730 - DNA, 399 bp, Glycine max
tttcaatgtggagatattttgttggagatctcgtctttgaagggggtaagatgacttctccctacattaaatgtacagtctctttcttcatagcatttggaaatttggctgatgacaccatcaattttgaggcttttccccacaagctggtacagtttggagagattcaggaaaaagttgtattgaaatttcacaagaggaatttcttacagcttggtcaacccaggtgcgtcctgcaacaactctgttggctgatgggtgtccatatttgtatgctatggtgcatgatagttcagtgtctacaataccaggtgattttgtcattggtgttaagttgacaaccataaacaatatgtgtgcatatgggctcaatcctggtatttcaggttctcgtctttt

SEQ ID NO: 81731 - DNA, 401 bp, Glycine max
ctcgagccgctcgagccgctcaggtgcgtcctgcaacaactctgttagctgatgggtgtccatatttgtatgctatggtgcatgatagttcagtgtctacaataccaggtgattttgttattggtgttaagttgacaaccataaacaatatgtgtgcatatgggctcaatcctggtatttcaggttctcgtcttttgggcaccattcctcagtccatttcacagcaaactgtttggaatcaaatggcaacagtgagaacaccattgaattttgattctagcaagcagagcttttgtcaattttctattgaccttctcggtggaggaattttagtggacaaaactggagattggatcacacttatacaaaattctccaattagtaacttgttgagagttgct

SEQ ID NO: 81732 - DNA, 272 bp, Glycine max
gtgttggcaagaaagaagtttgatgcagaaaccatgcttttgtcgacgcacttcttgtactatgtgaagcgcaacgatggcggatggattgcacttgcagcatccatcagttgttgagaagatatcgcgcacagacttattcgatgggtagggttgggactactcgcttaagaaactattacgcagctgcttgttacttggatggaagctagcaatgttcaggtttgttgtcagtcatagcacatacgccggatgagaaaggagtgggagga

SEQ ID NO: 81733 - DNA, 328 bp, Glycine max
  unsure (1)..(328): unsure at all n locations
gggtatgtaaaaatttaggtgaattagattttggaagtacagactgttgactaactatgttctcacattgacattgagatttaaattcatgtcctcatgagatatgagtttgatcttcctggttggaccaacctttgttagcctcccgagagacttgatggttaagagcattgatctctctcttgcattattgatactagaaatgatgtggggtattgctaatttgttgccgtggcatatactatgaagataatgtggggtattgttaatttgttcttattcatttgaagttttgtttgaatttnttattttgattttgatatggtgg

SEQ ID NO: 81734 - DNA, 185 bp, Glycine max
ctcaaacctaactcttttttccacaacattaccatattccggggggtttttttccaaaccttcaccattacactcctattccaaactacaatatgacttcctctcccaaacttatcacttactctcacaaccaattacctaaaatcgcattcacctatctttatcactatcaatattcaatattc

SEQ ID NO: 81735 - DNA, 405 bp, Glycine max
gccttactttagtggttctaaattgaaaagctttctagctcgtcataatatcaccattactgatggtattgacaaaactagtgcaactttgcaatttagaaagttagcagattgtgattttctcaagagaaactttaagcagatgtctaatgttttatgggtggctcctgaggacaaggcgagtttatggtcacaacttcattatgtttcgtgcaataatctggaaatgcaagaagcttatcttgtcaatctcgtaaatgtgttacgagaattgtatttgcacagtccagaggaagctcgccaattgagaaggaaagctctctctcgtattgaatggctgcaaaaagctgatgtgcctaccatagcacagattgaagagttccattcgatgcagaggatgatgaa

SEQ ID NO: 81736 - DNA, 400 bp, Glycine max
gcgacgttgacgctatggacatgtcggataacgactcgactcctagcgcatctcgccgtaactcgctcgaccgtgatggtctccgcaaggacgtccacaagctcgccatccagtcgcctccaccgcttgatccttcgcttcgctctcctggcgagcagtctgaagccgcttccgagcaccagtcagagctgggtgtttcggagcaggacaacgaggcctgggttcagaacatgcgcatgatcgaggagctgcgcgcgttcatcaaggtcaagctcgagcgcggtgactttgaggacggcgcagactcaacagaagtcaaggaggagagctcagaagagcgccgtggttctgcaggccctagcatgtcggaagaggagcgcagtttatatcccgttctacg

SEQ ID NO: 81737 - DNA, 314 bp, Glycine max
agttcaaacactctcatcacattatgcttcaccttacaatcggggactcaatcggtctaaactagataaaatgaccttaaattacaacatctacctcgacgtgtctgaggtgctaacgctgatactattattcttactgaccgtcacagagctcgtggaggatcagccattacaatcttaagtcaacagctgaccactcttgaaggggcgaatcaacgtcaatttaaattgtaacggtacctgtacccctatccaacggtacattaaagtggacttcatagactcgataagcagcgcgtcaagctcgcattttc

SEQ ID NO: 81738 - DNA, 403 bp, Glycine max
ccatatttgtatgcaatggtgcatgatagttcagtgtctacaataccaggtgattttgtcattggtgtcaagttgacaaccataaacaatatgtgtgcatatgggctcaatcctggtatttcaggttctcgtcttttgggcaccattcctcagtccatttcacagcaaactgtttggaatcaaatggcaacagtgagaacaccattgaattttgattctagcaagcagagcttttgtcagttttctattgaccttctcggtggaggaatcttagtggacaaaactggagattggatcacacttatacaaaattctccaattagtaacttgttgagagttgctgcttggaagaaaggctgtttaatggtcaagattgtgatgtctgggaatgcagcagtcaaaa

SEQ ID NO: 81739 - DNA, 93 bp, Glycine max
gtgaggatcttgcttctcttggaaaaggactattaagaggttggggctgaaagagcggaagatgatgaggaaagagaggactattcataaatg

SEQ ID NO: 81740 - DNA, 269 bp, Glycine max
gattatgggtgccaccttgtggcatacaacacaagatggaggaccaaaatggtagtggtaagtcgagccaaaggctcttcagggtgaatccttaccttgctatattgttccttcagattggctactcaaggatggatatcatcactatggcttctttcaagcatggtatgagtgattggatactctcaatgtaccgccatgtacatgctgctattataatacaacatttcgcacttgtgcttgtaagcaataatagaccctatatgact

SEQ ID NO: 81741 - DNA, 428 bp, Glycine max
gacgtgcactgcacgcgtacctaagcattgggattcgggtcgagaagctgtaagaaattcctcttgtgcgtcctgcaacaactctgttggctgatgggtgtccatatttgtatgctatggtgcatgatagttcagtgtctacaataccaggtgattttgtcattggtgttaagttgacaaccataaacaatatgtgtgcatatgggcttaatcctggtatttcaggttctcgtcttttgggcaccattcctcagtccatttcacagcaaactgtttggaatcaaatggcaacagtgagaacaccattgaattttgattctagcaagcagagcttttgtcaattttctatcgaccttctcggtggaggaattttagtggacaaaactggagattggatcacacttatacaaaattctccaattagtaac

SEQ ID NO: 81742 - DNA, 399 bp, Glycine max
cacttatacaaaattctccaattagtaacttgttgagagttgctgcttggaagaaaggttgtttaatggtcaagattgtgatgtctgggaatgcagcaggcaaaaggagtgattgggcctcattggtacaagtgtttttaacaaacagcaacagtacagagcattttgatgcatgtaagtggacaaaatcagaaccacattcctgggaattaatcttcccaatagaggtatgtggtcctaataatggttttgaaatgtggagttctgagtgggcaaatcaaacttcatggcatttgagtttccttattgacaatcccaaacagtctacagtttttgatattctcttgggaatctctcaagattttgaaattgctggtaatactcttatgccagcttttt

SEQ ID NO: 81743 - DNA, 133 bp, Glycine max
ctttcattttataccattcttcttatttctttttaccaatcactacttattcaatccaaggatggcttccgccggcgatcttttcaggcatggtttgccggaagttggtggtgccgggaagttacacgtgctt

SEQ ID NO: 81744 - DNA, 351 bp, Glycine max
ataaaaaaaaaaaaaaatatttaaaaagaaataaaaaaaaaaaagagatggaaaaaataataacaaaaaaaatataaacaataaaaaatacaaaaaaataaaataatataaaataaaaataaaaaaaaaaccaaaagggggcgccccccattatagtcttctgctccccggaattaaattccgacccggatctttatgggaacccagttttcctttaatggggatatttaaaagctgcggaaaataaaggcataaatttttcctttgataaaattttttcccgttaaaaattcaaaaaaaaattccacccggaagcataaagtaaaaaccctgggttcccaaagaggcggc

SEQ ID NO: 81745 - DNA, 87 bp, Glycine max
gagataaaaaatcaacttattggttattatttccttattgaatgtgtgttttgattagttttttttataaaaaaaatcatttcttga

SEQ ID NO: 81746 - DNA, 407 bp, Glycine max
tgttcacgggctaacactgaaaggcaaaatggatgaaaattggttccagctgttggccccatttatcagtcagtggaataatcgagctgagtttagggtcgacgtttatgctcgacaagagggcctattgagttttaactcggattacatggtgtggtataggcgcaaaacaaaaatgtttatcaacccaaacaatgcaaacacggttacattgggtgaagttaccgagacattgcagtatatggtgtcaccacaagggcaaaacacatggacagttgatgatctcgtgtcatacgtggaaaagttagcgattttatcccaagagcaagagaggatcactgagcctgtggcacatggtccagcatcagagcgtcgatttcccccacaacagtttcacatgcttcagt

SEQ ID NO: 81747 - DNA, 403 bp, Glycine max
gaaccacattcctgggaattaatcttcccaatagaggtatgtggtcctaataatggttttgaaatgtggagttctgagtgggcaaatcaaacttcatggcatttgagtttccttattgacaatcccaaacagtctacagtttttgatattctcttgggaatctctcaagattttgaaattgctggtaatactcttatgccagctttttctgttccacaggctactgccagatcttctgaaaatgcggaatcctctgcatgatctggaattcgtgttttctttcgcttgttcgcttgtttaattcaataaaggaaattaggcatgaccctcttgttgagtatgctctgcctatctgaaaatttccacacctcttttaattgtcgtaatgatgtgtgaagtgtgt

SEQ ID NO: 81748 - DNA, 402 bp, Glycine max
gaaagatcttgcaatggttaaagttaatgtagcatgtgctgctgttggcttgacatcaagttacactccaactccattgttggaatctggtttgcaaaaagacagagggttaattgtggagtattttggaaggatgtcttacgttgctcataacgttaatcagccccaagagaaagatttgttggagggaaatttttcctttgatattaaatctcgctctagattgcaaaaagtttcctctacaaaagcacaatttgttagtggaaaaaccttcaaatatgatataattggtgctggttcacattcttcacaagattttcctgaaaaggaagatcaagaaaaacccaaaaagattgatgccagattgagacaaagaatagatcctcaatacaatgaggttca

SEQ ID NO: 81749 - DNA, 399 bp, Glycine max
cgtcaatcctcacgacagctctgctctgctctgcttcttttgttgtcgtatttttcttctgaaaccctaaattttgtctgctctaaactttgggatctttcacacttgaaaaaaactgcttcttgtgcccgacccagcacaattctcatactatagatctttgaatcaaatataatttctgatcattttttttgtttctctttttcccccatttgatcccttctcaggttctggattctcagtgtttgcggagcgcagcatcatcttttagggaagaatggatcatcaagggcatagccagaacccatctattggggttgttggtagtggagctcaattagcatatggttctaacccatatcagccaggccaaataactgggccactcgtgtctgttgt

SEQ ID NO: 81750 - DNA, 251 bp, Glycine max
ctgaaaggctgtctgcgtctgcccttgcttccttgttaaagcagcggttatgttcgtatgccgtgaatgcagtgaccgacatccaggagggggctagttttaacataagttactgcgctacagccaaagctccattgatggatggaaagagcttggacgatgatggttataatcctctcgcttagaagagggaagatgtcatacgaattcttgctaccactgtacaggtgagagttcaggatatctctggc

SEQ ID NO: 81751 - DNA, 330 bp, Glycine max
ctctctcgtattgaatggctgcaaaaagctgatgtgcctaccatagcacagattgaagagttccattcgatgcagaggatgatgaatgctcctgattcaaatgataatattgatctactgttgagcattgatttgttgggtttacaaggagcaggtaaagcttttccaaacaagattgtttttgatgataagcttgtgttggctaacacacaagaattctttgatggaaattttccagtggattcttggttaccaatttttgtgaattgtctttatcctgtaagtcaattaccttcagaagctgtcgttgtaaatgttacatgtggtagt

SEQ ID NO: 81752 - DNA, 397 bp, Glycine max
tggaagaaaggctgtttaatggtcaagattgtgatgtctgggggtgcagtattcaaaaggagtgattgggcctcattggtacaagtgtttttaacaaacagcaacagtacagagcattttgatgcatgtaagtggacaaaatcagaaccacattcctgggaattgatctcccaatagaggtatgtggtcctaataatggttttgaaatgtggagttctgagtgggcaaatcaaacttcatggcatttgagtttccttattgacaatcccaaacagtctacagtttttgatattctcttgggaatctcttaagattttgaaattgctggtaatactcttatgccagttttttctgttccacaggcttcttgcctaatttttgaatatgcggaattctt

SEQ ID NO: 81753 - DNA, 319 bp, Glycine max
aaaaaagatgatcttttttttaaaacgacaaggtgcaagagcggggccttcacctacaataggccctccttctcctcccccctcttgccctagcctcgaacccgtcaatcgccaaaagacatttccgatactgttgctagagttcactaaaaatgggagtcaccattccatgtaatacttttccttcagaggcaaagaacccaaataccatgcttaaatttacaccttcaaagaccctacctctcctataacccacccatcttttttaaaaaacagcttccgcctcaaagagaataaacgccaaactctcctttcccct

SEQ ID NO: 81754 - DNA, 399 bp, Glycine max
gtttctaagatgacttctccctacattaaatgtacagtctctttcttcatagcatttggaaatttggctgatgacaccatcaattttgaggcttttccccacaagctggtgcagtttggagagattcaggaaaaagttgtgttgaaattttcacaagaggaatttcttacagcttggtcaactcaggtgcgtcccgcaacgactctgttggctgatgggtgcccatatttgtatgctatggtgcatgatagttcagtgtctacaataccaggtgattttgtcattggtgttaagttgacaaccataaacaatatgtgtgcatatgggctcaatcctggtatttcaggttctcgtcttttgggcaccattcctcagtccatttcacagcaaactgtttgg

SEQ ID NO: 81755 - DNA, 396 bp, Glycine max
ctttcttcatagcatttggaaatttggctgatgacaccatcaattttgaggcctttccccacaagctggtgcagtttggagagattcaggaaaaagttgtattgaaattttcacaagaggaatttcttacagcttggtcaactcaggtgcgtcctgcaacaactctgttggctgatgggtgtccatatttgtatgctatggtgcatgatagttcagtgtctacaataccaggtgattttgtcattggtgttaagttgacaaccataaacaatatgtgtgcatatgggctcaatcctggtatttcaggttctcgtcttttgggcaccattcctcagtccatttcacagcaaactgtttggaatcaaatggcaacagtgagaacaccattgaattttg

SEQ ID NO: 81756 - DNA, 251 bp, Glycine max
catgcctaatttcctttattgaattaaacatgaccctcttgttgagtatgctctgcctaatttcctttattgaattaaacaaacgaacaagcgaaagaaaattaggcagagcatactcaacaagaggggcatgcctaattatcttaagggaatcaaacactcgtgcgctcggggccggcgtacattcgcgtgctcgttacctcggggcttaatacctgaccgtatcctgtgtgcgttccaagtttgcctat

SEQ ID NO: 81757 - DNA, 399 bp, Glycine max
ttgacaaccataaacaatatgtgtgcatatgggctcaatcctggtatttcaggttctcgtcttttgggcaccattcctcagtccatttcacagcaaactgtttggaatcaaatggcaacagtgagaacaccattgaattttgattctagcaagcagagcttttgtcaattttctattgaccttctcggtggaggaattttagtggacaaaactggagattggatcacacttatacaaaattctccaattagtaacttgttgagagttgctgcttggaagaaaggctgtttaatggtcaagattgtgatgtctgggaatgcagcagtcaaaaggagtgattgggcctcattggtacaagtgtttttaacaaacagcaacagtacagagcattttgatgca

SEQ ID NO: 81758 - DNA, 399 bp, Glycine max
acaatttgttagtggaaaaaccttcaaatatgatataattggtgctggttcacattcttcaggagattttcctgaaaaggaagatcaagaaaaacccaaaaagattgataccagattgagacaaagaatagatcctcaatacaatgaggttcaggctcagatggaaacaaatttgtttaaattgtctcttgatgatgttgaaactcctaaaggttctatgttggatcttaaaatttctcaatctaaaattgcacttcccaagaacacagttggaggaaccattctgcgtagtgatctattggcaaattttttgacagagggcaattttagagcaagtgttgatttgcagcgcactcatcgtattaaaggaatgattaaaatggtggccacagttggtat

SEQ ID NO: 81759 - DNA, 124 bp, Glycine max
aaactgtaagagtctcaaatatctggttgatgagtgtccttttgcatttgtgaactagtatgtaatattttattcacttaaataaagcgcattactatgtgcaatgagtgtgtttaaatataaa

SEQ ID NO: 81760 - DNA, 353 bp, Glycine max
ttgattaccaagcaagttttgagcaagatggcagaaatgatagacgggctttgtggtggtgatgaaaaattgatgcgtgaaaggacgcacctgctgttggcttgttgttcaaggatggcaatttgtaagaaagatgtttggagagttgaatgtggaatcccttctggatttccgctcacagttatttgcaatagcatttttaatgagatgctcattagatatagctatgaaaaattactgcgccaggctaaagctccaagtatgtttttacaatccttcaaaaattttgtttctttgtgtgtgtatggtgatgataacttaaatagtgttcatgaatatgtcaagccttactt

SEQ ID NO: 81761 - DNA, 402 bp, Glycine max
ctcgagccggttacactccaactccattgttggaatctggtttgcaaaaagacagagggttaattgtggagtattttggaaggatgtcttacgttgctcataacgctaatcagccccaagagaaagatttattggagggaaatttttcctttgatattaaatctcgctctagattggaaaaggtttcctctacaaaagcacaatttgttagtggaaaaaccttcaaatatgatataattggtgctggttcacattcttcagaagattttcctgaaaaggaagatcaggaaaaacccaaaaagattgatgccagattgagacaaagaatagatcctcaatacaatgaggttcaggctcagatggaaacaaatttgtttaaattgtctcttgatgatgttgaaa

SEQ ID NO: 81762 - DNA, 129 bp, Glycine max
cgcttgttcgtttgtttaattcaataaaggaaattaggcatgaccctcttgttgagtatgctctgcctatttgaaaatttccacacctcttttaattgtcgtaatgatgtgtgaagtgtgtgttatttt

SEQ ID NO: 81763 - DNA, 287 bp, Glycine max
catatagattgattcttgattgagacaattaatatatcttacatacaatcaggacaaagctcagacggggacaaattcaacttaaatcgactgttgatgatttctgaaactactaaagggtctatgttgtatcttaaaacgcttcaaattaaaaaagaactcatgaacatcacatactaccggaaccatttttcactctgagatattggcaaatgaaatacccaaggtgactagcttagcaagctttgatatgcaggacactgctcatgttgctggcatgattaatg

SEQ ID NO: 81764 - DNA, 394 bp, Glycine max
gtgagaacaccattgaattttgattctagcaagcagagcttttgtcaattttctattgaccttctcggtggaggaattttagtggacaaaactggagattggatcacacttatacaaaattctccaattagtaacttgttgagagttgctgcttggaagaaaggttgtttaatggtcaagattgtgatgtctgggaatgcagcagtcaaaaggagtgattgggcctcattggtacaagtgtttttaacaaacagcaacagtacagagcattttgatgcatgtaagtggacaaaatcagaaccacattcctgggaattaatcttcccaatagaggtatgtggtcctaataatggttttgaaatgtggagttctgagtgggcaaatcaaacttcat

SEQ ID NO: 81765 - DNA, 451 bp, Glycine max
agcttgacgtcccatgcacgcgtacgtacgtaagcacggcattcggctcgagctcgagccgattcggttcgagcgagaattgtatttgcacagggcagaggaagctcgccaattgagaaggaaagctctctctcgtattgaatggctgcaaaaagctgatgtgcctaccatagcacagattgaagagttccattcgatgcagaggatgatgaatgctcctgattcaaatgataatattgatttactgttgagcattgatttgttgggtttacaaggagcaggtaaagcttttccaaacaaaattgtttttgatgataagcttgtgttggctaacacacaagaattctttgatggaaattttccagtggattcttggttaccaatttttgtgaattgtctttatcctgtaagtcaattaccttcagaagctgtcgttgtaaatgttacatgt

SEQ ID NO: 81766 - DNA, 279 bp, Glycine max
gaaagattttatccaattgaaattttaaaaatgactgggataaacttaagaattcaattattgaaattgaataagtaaacaatttaattggattggtcgaatggtatcaaaaaaatggagtactaactcccatttcttatttattattgaattaaccgatcaacttgctttgttatcgaacatttctttttgatttcaaaaattttccggaaaaaatttgaatctatttttatatgcgaatcaaacctactacttctggtccctgaggttctgcgcttg

SEQ ID NO: 81767 - DNA, 298 bp, Glycine max
tgacaatcccaaacagtctacagtttttgatattctcttgggaatctctcaagattttgaaattgctggtaatactcttatgccagctttttctgttccacaggctactgccagatcttctgaaaatgcggaatcctctgcatgatctggaattcgtgttttctttcgcttgttcgtttgtttaattcaataaaggaaattaggcatgaccctcttgttgagtatgctctgcctatctgaaaatttccacacctcttttaattgtcgtaatgatgtgtgaagtgtgtgttattttaaa

SEQ ID NO: 81768 - DNA, 314 bp, Glycine max
ctcttgggaatctctcaagattttgaaattgctggtaatactctgatgccagctttttctgttccacaggctactgccagatcttctgaaaatgcggaatcctctgcatgatctggaatttatgttttctttcgcttgttcgttcgtttaattcaataaaggaaattgggcatgaccctcttgttgagtatgctctgcctatttgaaaatttccacacctcttttaattgtcgtaatgatgtgtgaagtgtgcgttattttaaagaaaaaagaagatatcaagaagatggttcaagaggctgaaaagttcaaat

SEQ ID NO: 81769 - DNA, 233 bp, Glycine max
  unsure (1)..(233): unsure at all n locations
ctttttctctctttctttctttttgcggngcttcacaagccagggctagacttgtctcttttttctacaatctaccactactatcaatggccgtacaaggagacgggcctactatcggtattaatctccataccacctactcctgcattggattgtagcaccacgaccgcatctacataatctccaattaccattgaagccgtaccacaccctattaacccattttcacttat

SEQ ID NO: 81770 - DNA, 320 bp, Glycine max
gctcgccaactgagaaggaaagctctctctcgtattgaatggctgcaaaaagctgatgtgcctaccatagcacagattgaagagttccattcgatgcagaggatgatgaatgctcctgattcaaatgataatattgatctactgttgagcattgatttgttgggtttacaaggagcaggtaaagcttttccaaacaagattgcttttgatgacaagcttgtgttggctaacacacaagaattctttgatggaaattttccagtggattcttggttaccaatttttgtgaattgtctttatcctgtaagtcaattaccttc

SEQ ID NO: 81771 - DNA, 389 bp, Glycine max
  unsure (1)..(389): unsure at all n locations
tataattggtgctggttcacattcttcaggagattttcctgaaaaggaagatcaagaaaaacccaaaaagattgataccagattgagacaaagaatagatcctcaatacaatgaggttcaggctcagatggaaacaaatttgtttaaattgtctcttgatgatgttgaaactcctaaaggttctatgttggatcttaaaatttctcaatctaaaattgcacttcccaagaacacagttggaggaaccattctgcgtagtgatctattggcaaattttttgacagagggcaattttagagcaagtgttgatttgcagcgcactcatcgtattaaaggaatgattaaaatggtggccacagttggtattcctgagaatacangtatagcat

SEQ ID NO: 81772 - DNA, 303 bp, Glycine max
atcaaaacaacaaaattttctttctcaaaaaaccttatacaaaatgcggctcggttctttatcacaaaaatcttcaaaattaactaccactcatttaaaccaccatctccttaaattgaacaaaaaataatttacttggtcggcccccacttttttaatcaccccccctgcaattatttttccaaccccaccctgactgtccccccattttccttattaggggccatttaaaaccttgcctaaacacagtgctaacgcctcccctcacaaaaaagttcaacccttcacaattccacaaaaatt

SEQ ID NO: 81773 - DNA, 401 bp, Glycine max
  unsure (1)..(401): unsure at all n locations
gagaatcccccagtgtacaagcctcccactgagaaaccaccagtttatgagcccccagttgagaagcctcctgtttacaaacctccagttgaaaaccccccaatttataagcctccagtagagaagccaccagtgtacaagcccccagttgagaaacccccagtgtacaagcccccagttgaaaaaccaccagtgtacaagcccccagttgagaaaccaccagtgtacaagcccccagttgaaaaacccccagtttacaagcccccagtngaaaaacccccagtgtacaagccctcagttgaaaaaccaccagtgtacaagcccccagttgagaagcctccagtttacaagccctcagttgagaagccaccagtttacaagcccncagttgagaagccacc

SEQ ID NO: 81774 - DNA, 389 bp, Glycine max
aaaaaaaaaataaaaaataaaaaaaaaaaaaaaaaaaaaaaaaaggaaaaaaaaaaaaaaaaaaaaaaaaaaaaaaaaaaaaaaaaaaaaaaaaaaaaaaaaaaaaaaaaaaaaaaaaaaaaaaaaaaaaaaaaaaataaaaaaaaaaaataaaaaaaaggggggcccccccttttttttggtttcaaccccctatttttttttacgaacaactctctacagacaccccttttcccatttaatggggtatttaaaaatttgcgaaaaataaggaaaatatttttttcctggataaaaaattttcccccactaaaattccaaaaaaatacaatccgtaagctatagagttactcctcgggggcccctataaggtggccaccatcattttt

SEQ ID NO: 81775 - DNA, 402 bp, Glycine max
gaatttcttacagcttggtcaactcaggtgcgtcccgcaacgactctgttggctgatgggtgcccatatttgtatgctatggtgcatgatagttcagtgtctacaataccaggtgattttgtcattggtgttaagttgacaaccataaacaatatgtgtgcatatgggctcaatcctggtatttcaggttctcgtcttttgggcaccattcctcagtccatttcacagcaaactgtttggaatcaaatggcaacagtgagaacaccattgaattttgattctagcaagcagagcttttgtcaattttctattgaccttctcggtggaggaattttagtggacaaaactggagattggatcacacttatacaaaattctccaattagtaacttgttgagagtt

SEQ ID NO: 81776 - DNA, 120 bp, Glycine max
  unsure (1)..(120): unsure at all n locations
ctcacacctcatcgnttctctctctagatctctggttcttctttttctccaaccttcgtttcaccaccacacttacattactttgtcgaaatggctccaccaattgagaccccaaacaag

SEQ ID NO: 81777 - DNA, 246 bp, Glycine max
ttgagtttccttattgacaatcccaaacagtctacagtttttgatattctcttgggaatctctcaagattttgaaattgcggaatcctctgcatgatctggaattcgtgttttctttcgcttgttcgtttgtttaattcaataaaggaaattaggcatgaccctcttgttgagtatgctctgcctatctgaaaatttccacacctcttttaattgtcgtaatgatgtgtgaagtgtgtgttatttt

SEQ ID NO: 81778 - DNA, 395 bp, Glycine max
ctcgagccgaatcggctcgagcggctcgaggattggaaaaagtttcctctacaaaagcacaatttgttagtggaaaaaccttcaaatatgatataattggtgctggttcacattcttcaggagattttcctgaaaaggaagatcaagaaaaacccaaaaagattgataccagattgagacaaagaatagatcctcaatacaatgaggttcaggctcagatggaaacaaatttgtttaaattgtctcttgatgatgttgaaactcctaaaggttctatgttggatcttaaaatttctcaatctaaaattgcacttcccaagaacacagttggaggaaccattctgcgtagtgatctattggcaaattttttgacagagggcaattttagagcaagt

SEQ ID NO: 81779 - DNA, 81 bp, Glycine max
aaaaaaaaaaataaaataaaaaaaaaaaaaaaaaaaaaaaaaaaaaaaaaaaaaaaaaaaaaaaattaaaaaaaaaaacca

SEQ ID NO: 81780 - DNA, 185 bp, Glycine max
cttaattagtgttcatgaatatgtcaagccttactttaatggttctaaattgaaaagctttctaactggtcataatatcaccattactggtgggattggcaaaactagtgcaacttttcaatttaaaaaggtagcagattgggattttctcaagagaaactttaagcagatgtctaatgttttat

SEQ ID NO: 81781 - DNA, 194 bp, Glycine max
gtcgagctgaatgagcctcgagacctattgaagagatacctgtatctagaatcagttaatgccgcgaacaggaacttgattttagtcgagatgctgcaacatgacacatgctatgaacgattctggagcttcactatttgaaagcgtatatgagagggtgaaacacattatattcattccataacgtgaggagc

SEQ ID NO: 81782 - DNA, 396 bp, Glycine max
ccaaatgctgttctttcaatgtggagatattttgttggagatctcgtctttgaagtttctaagatgacttctccctacattaaatgtacagtctctttcttcatagcatttggaaatttggctgatgacaccatcaattttgaggcttttccccacaagctggtgcagtttggagagattcaggaaaaagttgtgttgaaattttcacaagaggaatttcttacagcttggtcaactcaggtgcgtcccgcaacgactctgttggctgatgggtgcccatatttgtatgctatggtgcatgatagttcagtgtctacaataccaggtgattttgtcattggtgttaagttgacaaccataaacaatatgtgtgcatatgggctcaatcctggtatt

SEQ ID NO: 81783 - DNA, 65 bp, Glycine max
ggaatttgatggtttcttttgcacaagttattaatttgatcaaagtttttttcgatgttatcaaa

SEQ ID NO: 81784 - DNA, 366 bp, Glycine max
  unsure (1)..(366): unsure at all n locations
aaaaagttgtttccgatcacaacctcaatcgtattaagctgttgttgggcctcgtcgncaatgtcgggagttgaaaggtttttgttttcttttctcttctttttctttttttttcttttctttttctttctcttttctgttgcttttatttccttccttttttctgctttttttttctttttttttctcattttttatcttttttctgttttaaatgtattcttctttttttttttttctcttttttcttttcctttttccttttttttttttttccatctttcttcttcttcttttaatttttttgtcttttttctccttttttttttctttcctttttttatttttttttttttttttttttta

SEQ ID NO: 81785 - DNA, 219 bp, Glycine max
acgctcacgcaaccaaaattaaatccagatcaataaccatcatctcatttttttctattccctatcaaaacctctcttggtttttatataaatagtggtgcgcccatcccaactttttctcttccacaatctactttcatatctttttaaatttcctaatttcttttcttcatacttaattatttctttctttttcttcttctttttcttaacttatat

SEQ ID NO: 81786 - DNA, 328 bp, Glycine max
gacactatataagagctatgactgcacgactgcacgcgtacttaagactcggaatccagggtacgagcatccacactgctttccacacttacgctcatttcaagactatcgcatgattatgcaaacactgggggtacgatcatcccagctaatttataatggcaacaggctactgtcagatcttctcaaaacgcggaatcctctgcgtgatctggaatgcgtgttcccttccgctggttctatcgttcaatacaagaaaggaaattaggcatgaccctctcggggagtatgctctgcctatctgaaaatttccacacctcttttaatt

SEQ ID NO: 81787 - DNA, 159 bp, Glycine max
tggtgatgataacttaattagtgttcatgaatatgtcaagccttactttagtggttctatattgaaaagctttctagctggtcataatatcaccactactgatgggattgacaaaactagtgcaacttttcaatttaaaaaggtagcagattgtgattt

SEQ ID NO: 81788 - DNA, 278 bp, Glycine max
cgctccgcaccagtttcaccgcacgaatatcttgttgtttggagcgatccgagaaaaactctgtagacatgttggtttaccaggacctccttacaggtgatgagcttctctctgactccttccgttacaaggaaattgagaatggaatgctgtgggaagttgaggggaagtgggttgttaaaggagcagttgatgtagacattggtgcaaacccttctgctgagggtggaggagaagatgagggagttgatgatgcagctgttaaggttgttgacatt

SEQ ID NO: 81789 - DNA, 390 bp, Glycine max
gcaaaatgtaatttccttttcacttatgagatcaattattctattgagaaaggtaccaatacatgaagtgaacattctccacgtgctttatattcttgaaatgcaataaatgtagcaccttaaaacattgtttttggcaaattataattcccaatatactaattaccatacagagtgtacgaggtgaataacccaataaaccaccattacccattatccgtgattatagcaattttcttcttcttttgcttcttgtgtatatttctgctttgcccgccaaatttcctatctgaatttttcaaccgagttaacttaattgaggattggacccaaatgaccaagtcaaatttattagcaaaaaacaaaatttctaagttaagacgtgtaact

SEQ ID NO: 81790 - DNA, 349 bp, Glycine max
tataattggtgctggttcacattcttcaggagattttcctgaaaaggaagatcaagaaaaacccaaaaagattgataccagattgagacaaagaatagatcctcaatacaatgaggttcaggctcagatggaaacaaatttgtttaaattgtctcttgatgatgttgaaactcctaaaggttctatgttggatcttaaaatttctcaatctaaaattgcacttcccaagaacacagttggaggaaccattctgcgtagtgatctattggcaaattttttgacagagggcaattttagagcaagtgttgatttgcagcgcactcatcgtattaaaggaatgattaaaatg

SEQ ID NO: 81791 - DNA, 440 bp, Glycine max
aaaaaaacaaaaaaaaatataacacactaaaatatataaaaaaaaaactgggatcaatatcacaagaggctgggaagtgaagaaaacaacaaaaaaaccaaaaacacctaaataaaacaaaaaaaaaaattacttggggccccccccatttacatactcaccacacctccaattattttaccccacaccccttgatgtttcccaatttttccttaattaggcccctttaaaacctgggctaaaacacggtacaagtgtttccaggagaaaaatatttcccccctaaaattccccacaaaattccatgcccgaagccaaaagggaaaaacccgggggccccaaaaagggaggctacccaacattaatgggtgggccccacctcccccctttcaaaacggaaaaccttttggcccccttttttaaattaaccccccaacccc

SEQ ID NO: 81792 - DNA, 343 bp, Glycine max
gagaatcccccagtgtacaagcctcccactgagaaaccaccagtttatgagccgccagttgagaagcctggtgtttacaaacctccagttgaaaaccccccaatttataagcctccagtagagaagccaccagtgtacaagcccccagttgagaaacccccagtgtacaagcccccagttgaaaaaccaccagtgtacaagcccccagttgagaaaccaccagtgtacaagcccccagttgaaaaacccccagtttacaagcccccagttgaaaaacccccagtgtacaagcccccagttgaaaaaccaccagtgtacaagcccccagttgagaagcccccag

SEQ ID NO: 81793 - DNA, 353 bp, Glycine max
aaaaaaaaaaaaaaaaaaaaaaaaaaaaaaaaaaaaaaaaaaaagaaaaaagaaaaaaaaaaaaggggggggggggaaaaaaaaaaaaaaaaaaaaaaaaaaaaaaaaaaaaaaaaaaaaaaaaaaaaaaaaaaaaaaaaaaaaaaaaaaaaaaaaagggggggcccccccctattagtttttctccccccccaataaaaattctcgcccaaccctggggggacaaaatatttttttaattaagggtcttttaaaaatgttgccataaaatggaaatattttttttctggaaaaaattattatcctccaaaaaaaccgcaaaaaataactttctaaataaaaatttgtataat

SEQ ID NO: 81794 - DNA, 476 bp, Glycine max
gaatttcttacagcttggtcaactcaggtgcgtcccgcaacgactctggtggctgatgggtgccgatatgggtatgctatggtgcatgatagttcagtgtctacaataccaggtgattttgtcattggtgttaagttgacaaccataaacaatatgtgtgcatatgggctcaatcctggtatttcaggttctcgtcttttgggcaccattcctcagtccatttcacagcaaactgtttggaatcaaatggcaacagtgagaacaccattgaattttgattctagcaagcagagcttttgtcaattttctattgaccttctcggtggaggaattttagtggacaaaactggagattggatcacacttatacaaaattctccaattagtaacttggtgagagttgctgcttggaagaaaggttgtttaatggtcaagattgtgatgtctgggaatgcagcagtcaaaaggagtgattg

SEQ ID NO: 81795 - DNA, 391 bp, Glycine max
aaattccagcattcttcgtctctgatccatggcttacgttgagcgaggtgttgtcaaatcaaagcgagtcggtatggcgacttaaaacaatcactgattttttctgggccattgttaacttcataggcgtgtttttcgcaactatgttctctatggaaaagtcagatgcgtacagaaaacgttctgagggtaatgaaattggatagccttactcctagagtaggttctggcattactgtgttccaccagtatctaaccacccatacatgttcctatgagcttcaacaccattacacccttcttacacttcccaaccactttatcactgtccttcaccagcttctaccaacaagtcttacatatatgccgcacctccccctccttaccacta

SEQ ID NO: 81796 - DNA, 302 bp, Glycine max
ctcgagccgaatcggctcgagcggctcgaggattggaaaaagtttcctgtacaaaagcacaattgggtagtggaaaaaccttcaaatatgatataattggtgctggttcacattcttcaggagattttcctgaaaaggaagatcaagaaaaacccaaaaagattgataccagattgagacaaagaatagatcctcaatacaatgaggttcaggctcagatggaaacaaatttgtttaaattgtctcttgatgatgttgaaactcctaaaggttctatgttggatcttaaaaatttctcaatc

SEQ ID NO: 81797 - DNA, 228 bp, Glycine max
aaaaaaaaaaaaaaaaaataaaattaaaaaaaaaaaaaaaaaaaaaaaggggaagtgaaaaaaaaaaaggaggggaaggataaaaaaaaaaaaaaaaaaaaaaaagggccgccccccttataataaacttttcaacccggaaataaattccggaccagaacctccaagaaacacagatttcctattaagaaaacgaataaaaccttggctaaataatggccaaacttt

SEQ ID NO: 81798 - DNA, 215 bp, Glycine max
ctcgaacttaatgaacctcatgacccactgaatatatatctctatctagaactggtcaaagccgcgaccaggaacgctctaatttccaagagcataccctaatacgctctctctgaacgatactagagcttcactacttaaaggcgtatattagagtcgatttcacaatacattcagtagataacgttagaagctttgggtgaaggttttaagga

SEQ ID NO: 81799 - DNA, 239 bp, Glycine max
gcttgttcctagctataaactagtttatcgaaaaacaaatacaaaatagctggtgatcttattggatgcagacggtattttaacaattccaatccatatcaccttactaccagatcttccttaaactaatgacaacctcctatcattacacctatttgcaactctactccacaattagcaggcacactaaacactcacaaatcatccactcctaaactaccattactacaaactatatt

SEQ ID NO: 81800 - DNA, 391 bp, Glycine max
ccaaatgctgttctttcaatgtggagatattttgttggagatctcgtgtgttggagtttctaagatgacgtggtccgtacattaaatgtacagtctctttcttcatagcatttggaaatttggctgatgacaccatcaattttgaggcttttccccacaagctggtgcagtttggagagattcaggaaaaagttgtgttgaaattttcacaagaggaatttcttacagcttggtcaactcaggtgcgtcccgcaacgactctgttggctgatgggtgcccatatttgtatgctatggtgcatgatagttcagtgtctacaataccaggtgattttgtcattggtgttaattgacaaccataaacaatatgtgtgcatatgggctcaatcct

SEQ ID NO: 81801 - DNA, 72 bp, Glycine max
ggaatttgatggtttcttttgcacaagttattaatttgatcaaagttggtttcgatgttatcaggggaagag

SEQ ID NO: 81802 - DNA, 68 bp, Glycine max
  unsure (1)..(68): unsure at all n locations
tctaccaaaatatccacttttcttttttacacactatctcaaancttaaaaacattgttctttttaaa

SEQ ID NO: 81803 - DNA, 385 bp, Glycine max
  unsure (1)..(385): unsure at all n locations
cttaaaattcgaatcgagctccagcccctctttattttctattttaccgactctcccaaanaattctacatggatattttcgaacgggcgatagcatttaaacttacacaatntttcaattatttcttcctcaaaaatttatacttttctatttatcccctcccttccacattcatattcataccatccaccattaataataaaaattcttacactaataaaccatccatttatacctatatacttcttcataaactactttaatcccttcacccaaaatttaattaacnttatattattaaaaatttttaaaattttaactacttacatatttcatctcataaacccataaaattttaaaattnatctcttttttttttactta

SEQ ID NO: 81804 - DNA, 387 bp, Glycine max
aagcgggtaactgactgtggaagcgtccatctctctctctctttcttagtgcctccttgccagaagttaaaatggcccaagaaactttcctattcacatctgaatcagtgaacgaggggcaccctgacaagctctgtgaccagatctccgatgctgtgctcgatgcatgcttggagcaggaccctgacagcaaggttgcctgtgaaacctgcaccaagaccaacatggtgatggttttcggagagatcacaaccaaggccaacgtggactatgagaagattgtgcgtgacacatgcaggaacattggttttgtctctgatgatgttggtcttgatgctgacaactgcaaggtcctcgtcaacatttgagcaacagagtcctgatatt

SEQ ID NO: 81805 - DNA, 408 bp, Glycine max
ggcagaaatgataaacagtctttgtggtggtgatgaaaaattgatgcgtgaaaggacgcacctgctgttggcttgttgttcaaggatggcaatttgtaagaaagatgtttggagagttgaatgtggaatcccttctggatttccgctcacagttatttgcaatagcatttttaatgagatgctcattagatatagctatgaaaaattactgcgccaggctaaagctccaagtatgtttttacaatccttcaaaaattttgtttctttgtgtgtgtatggtgatgataacttaattagtgttcatgaatatgtcaagccttactttagtggttctaaattgaaaagctttctagctagtcataacatcaccattactgatggtattgacaaaactagtgcaactttgca

SEQ ID NO: 81806 - DNA, 329 bp, Glycine max
atccaacccgttcttgatttggaaggtgattccgggaaggaattgttagggggctgctgaggctgttcatacctatctttggggggtgaattgccactctgataagacgaagaagcaccggttgaggtgagttgtgtgttgttgagctgctctgctcttgtgtgggacatgtgcaggcagtctgacgggctgaggcgatttatgtcgcatgaaatagcagtctgtcctgcatacagaataattgtcaaatacgcaaggtaccatacaccagaatctaattctatctatcatagactgtggtgtgttgattccacctaatatggttaaag

SEQ ID NO: 81807 - DNA, 267 bp, Glycine max
  unsure (1)..(267): unsure at all n locations
cacgcgtacgtaagctcggaattcnctcgagactacacatgttaatttacctgaatatgctggaaagagggcggcttattaaactctttactgctgacctgtacaacaaaattaccccaatttgacctccaccacaaaacataacatattcaaaaaactattctcaacactattgcataatgtaatttcctaacatcttatctccacggcatgttcaaatacaacttaatacacaaaatcaatcattgatcatcttataaatattcc

SEQ ID NO: 81808 - DNA, 311 bp, Glycine max
  unsure (1)..(311): unsure at all n locations
aaaacggaccacgcgtacgtaagctcataattcgtctcgatgatattcaatttttctttttatcacacantgcctcacctgagcagctgtaatcaaaattcattcttactccatttcaacaattactcaattctttcctacttcttttctctactattctcttattctaaacaaaattactttctcttctgttacacacttctttaattcattattatttccatctcctattctattttctatacactctcctattttttatattacttcttctcactatcaaacctatttcttttctctcttacttcttc

SEQ ID NO: 81809 - DNA, 413 bp, Glycine max
  unsure (1)..(413): unsure at all n locations
ctcgagccgctctgacaccatcgacaacgtcaaggccaagatccaggacaaggaaggaatccccccggaccagcaacgtctcattttcgccggaaagcaacttgaggacggccgtacccttgctgactacaacattcagaaggagagtactcttcacctcgtcctccgtctccgtggtggcatgcagatcttcgttaagacactcaccggcaagaccataaccctagaggttgaaagctccgacaccatcgataacgtcaaggccaagatccaggacaaggagggtatccccccggaccagcaacgtctcatcttcgccggaaagcagctcgaggacggncgcaccctcgccgactacaacattcagaaggaatcaacccttcacctcgtcctccgtctccgtggtggcatgc

SEQ ID NO: 81810 - DNA, 298 bp, Glycine max
attgacaatcccaaacagtctacagtttttgatattctcttgggaatctctcaagattttgaaattgctggtaatactcttatgccagctttttctgttccacaggctactgccagatcttctgaaaatgcggaatcctctgcatgatctggaattcgtgttttctttcgcttgttcgtttgtttaattcaataaaggaaattaggcatgaccctcttgttgagtatgctctgcctatctgaaaatttccacacctcttttaattgtcgtaatgatgtgtgaagtgtgtgttatttta

SEQ ID NO: 81811 - DNA, 405 bp, Glycine max
cagacactttgtgttaacttatagaaaagaaaaattacatagtgattcgatcgacttatgttggcggaagtgaccgatgatagcgtaatttgcaaatcatatagtgatttgttgtgctggtgtgggcactatatttagccatgttaagttgaaacacgactttgtttaagttaatactaatttgttagaaagtgtttgttatttattatttggtaaggtaattggaagctgcattgtttctgtttcttttgttgttgctggtgatgacgtgtcatctttatagtctttgccttttccccacaccacagagtatagacccactgcgattatgatgcctccaatgatgcttcccaagtagaggtgttctcctagaaggaaggagcccaaagctgtaacaatgatcat

SEQ ID NO: 81812 - DNA, 406 bp, Glycine max
cagagcattttgatgcatgtactgttgcaaaatcagaaccacgggcctgggaattgatcttcccaatagaggtatgtggtcctaataatggttttgaaatgtggagttctgagtgggcaaatcaaacttcatggcatttgagtttccttattgacaatcccaaacagtctacagtttttgatattctcttgggaatctctcaagattttgaaattgctggtaatactcttatgccagctttttctgttccacaggctactgccagatcttctgaaaatgcggaatcctctgcatgatctggaatttatgttttctttcgcttgttcgttcgtttaattcaataaaggaaattgggcatgaccctcttgttgagtatgctctgcctatttgaaaattttcacacctc

SEQ ID NO: 81813 - DNA, 196 bp, Glycine max
tattttaatgcttttatttgtagatcggatcacactgatacggggtgcttctattagttactcgtctacagtttctgcttacttgaaacgttgtctaatggacaatattgacatgactgcccatgcagtagtcaaaaggagttattgacccttattggaacaagtttttttaacactcattaacactacaaagcat

SEQ ID NO: 81814 - DNA, 412 bp, Glycine max
gttgtattgaaattttcacaagaggaatttcttacagcttggtcaactcaggtgcgtcctgcaacaactctgttggctgatgggtgtccatatttgtatgcaatggtgcatgatagttcagtgtctacaataccaggtgattttgtcattggtgtcaagttgacaaccataaacaatatgtgtgcatatgggctcaatcctggtatttcaggttctcgtcttttgggcaccattcctcagtccatttcacagcaaactgtttggaatcaaatggcaacagtgagaacaccattgaattttgattctagcaagcagagcttttgtcagttttctattgaccttctcggtggaggaatcttagtggacaaaactggagattggatcacacttatacaaaattctccaattagta

SEQ ID NO: 81815 - DNA, 276 bp, Glycine max
cagtttttgatattcttttgggaatctctcaagattttgaaattgctggtaatactcttatgccagctttttctgttccacaggctactgccagatcttctgaaaatgcggaatcctctgcatgatctggaattcgtgttttctttcgcttgttcgtttgtttaattcaataaaggaaattaggcatgaccctcttgttgagtatgctctgcctatctgaaaatttccacacctcttttaattgtcgtaatgatgtgtgaagtgtgtgttatttta

SEQ ID NO: 81816 - DNA, 412 bp, Glycine max
aactttccctttaacccctttccaattgggcagattttctaaaagcaaaggaatcaaacctctctctcacacactcactcccacacccttccctgcaactgcaacaccaaatcatcatttcagtcacacctaaaatcccaaaatactatcaccaaattttcgtaaccccatcaactcaaattcacaaacccccaatataatgttattagaactccgatgacacccttcaattaactctctcacattcaacagtgtgagagagggcataacctgaaccatcccatggagattcaacaaagcttgaagctcacaatccacaagaaatggccatcatcacccaaaaaaccacctaaagaaacagaaccaataaccaccaccccaactactccaaagctgaaatggaagaaaatct

SEQ ID NO: 81817 - DNA, 411 bp, Glycine max
agcttatcttgtcaatctcgtaaatgtgttacgagaattgtatttgcacagtccagaggaagctcgccaattgagaaggaaagctctctctcgtattgaatggctgcaaaaagctgatgtgcctaccatagcacagattgaagagttccattcgatgcagaggatgatgaatgctcctgattcaaatgataatattgatctactgttgagcattgatttgttgggtttacaaggagcaggtaaagcttttccaaacaagattgtttttgatgataagcttgtgttggctaacacacaagaattctttgatggaaattttccagtggattcttggttaccaatttttgtgaattgtctttatccctgaagtcaattaccttcagaagctgtcgttgtaaatgttacatgtgg

SEQ ID NO: 81818 - DNA, 409 bp, Glycine max
cgagtctggatgcccttgacaactcacgccatcacgactgttccttccggactttctgcccctcgtactcgtcacctccactcatcttacacacgacacttttcttaatcctccctggcgcctgcattttctcctaatgactcccatgcagtagacgtttctcatgagctggccttgacttctctcaacttcattctttgtttctttctcttctaccttgtccttcctttcttcttcgccactttctcttagacctgctgcagggcagctcggcgactaccaactaactttcactcaccaccacaccaactttaatacaactgtccatcactactaataccctttcgacttcgaccatgttattcaataccgccctgttgggcggccttctcctcgctggccatgcctc

SEQ ID NO: 81819 - DNA, 182 bp, Glycine max
catgatattactctaatcatgtctgcttcagagtcagcatgttttcacatgcttctgctaatgatcaaaatccagttatccatcttgtttgaaatgcagaaattcatgattaattttaactgttttatatttttgtttacaaaattaattggtttgggaattaaaatttggtggttggctga

SEQ ID NO: 81820 - DNA, 325 bp, Glycine max
ctcgagccgcatcgtgttacgtttactaacccatccttagctccgcaggcctgtatctagaacatcccaatatatgctactagctcgaataatggttattatcacagtagaacctagcggccaaatctagctatatggattttgagagaacttatgtgacatagcctaacagtccacagtcctggacctgcctatggggaccactcaagagagaggggttgctgggaatactctcatgcctgctattattgatacacaggctactgacaggtcacatgaaaatgctcattacttttggtgaacaactatgtgtgtgaggattcat

SEQ ID NO: 81821 - DNA, 98 bp, Glycine max
cagataccggatccagaacactcggaagctcaacattcagctcgtaagtcaccagctgtttcttaatccaaatttgaggttgggggagatgccaatta

SEQ ID NO: 81822 - DNA, 411 bp, Glycine max
tataacttctttcaccccaatgaacgaaagcccgagacaaaagacgcttgtgctgcatcaaaatgcttaccaatgcctttagcagcacaagggggagctacttaaattcatggaaggcagggcttaaccccttaagggaggaaggaaccattgggaggctgtagccgaacttgcaataattttgggggtggctttggtggggctttaagcattgggggtctaccatgtgagggtcattcgccgggccaccatgagtaaagccaaagccaatggtgctgttcaaccagatgctattgcttgatgtgccttgcctttaattctataatgattacttcaaaatctcaccctagatttagaacaaggcagtgtaatgtaatacccctgaactttaattcttctaatatcttacta

SEQ ID NO: 81823 - DNA, 415 bp, Glycine max
ctctacaaaagctcaatttgttagtggaaaaaccttcaaatatgatataattggtgctggttcacattcttcagaagattttcctgaaaaggaagatcaagaaaaacccaaaaagattgatgccagattgagacaaagaatagatcctcaatacaatgaggttcaggctcagatggaaacaaatttgtttaaattgtctcttgatgatgttgaaactcctaaaggttccatgttggatcttaaaatttctcaatctaaaattgcacttcccaagaacacagttggaggaaccattctgcgtagtgatttattggcaaattttttgacagagggcaattttagagcaagtgttgatttgcagcgcactcatcgtattagaggaatgattaaaatggtggccacagttggtattcct

SEQ ID NO: 81824 - DNA, 411 bp, Glycine max
gttttgtgggtggctcctgaagacaaggcgagtttatggtcacaacttcattatgtttcgtgtaataatctggaaatgcaagaagcttatcttgtcaatctcgtaaatgtgttacgagaattgtatttgcacagtccagaggaagctcgccaattgagaaggaaagctctctctcgtattgaatggctgcaaaaagctgatgtgcctaccatagcacagattgaagagttccattcgatgcagaggatgatgaatgctcctgattcaaatgataatattgatttactgttgagcattgatttgttgggtttacaaggagcaggtaaagcttttccaaacaaaattgtttttgatgataagcttgtgttggctaacacacaagaattctttgatggaaattttccagtggat

SEQ ID NO: 81825 - DNA, 193 bp, Glycine max
cttacacacactgttttttggcagcgcgactcgacttgggcgggaccctttggtgatctgtgagacggtcttgatagccccctctctctctgcttgctgcaaatcaaacgatttttcttcacattgaaaccttgtttgctttaaggacccccttttttctaaaagggaatttgaaatttttcggctttttttt

SEQ ID NO: 81826 - DNA, 413 bp, Glycine max
gttgggggttgttttaatttttttgcccgaaggagaatatttttttttttttaacggaaaaacgggcctacaagtttccatttttaagacccctttggagagattaatggctaatggttcaagatcaactattcattactgatatattgcatgggggttgtatctgtgagtccaaggtgaatatcagatacaaagagagaaccacattgagctgaatttcaagaatttcctaaatcatccatggagcctgttcttcttccaagtctagtaataatgcttggtcttggtctgtgctttgaatcacttcctagtgttagggctcagtctactactacttctcccgggtcatcttcaacaagggaggaagcaaaggctcttgatgcacttctcaacaatttgcttacaaggacttg

SEQ ID NO: 81827 - DNA, 416 bp, Glycine max
gctgcttttattctttttctcttaggagaatatttttctttttggtaggccatatcgtgcctacaagtttccatttctaacacccctttggagagatttattgcttattgttcactatcaactagtcattactgatttatggcgtaggagacgtttgtgtgcttccaacgtgcatagcattattcatagagagagcctcgttgagcttaatttcaagaatgccctaaatcattcatgtagcctgttttcctttctagtcctagtaataaaccattggtgctgttcaaccagatgctaacgcttgatgtgccttgcctttaattctatcatgatttcttgaaaatctcaccctaaatttagaacaaggcagtgtaatgtaatacccctgaacttttattcctctaatatcttactag

SEQ ID NO: 81828 - DNA, 340 bp, Glycine max
cctgctactaacctattttattaacgacaatatttctcttttgggtagagttattcttgcctacaattttccattcttaataccccttttgagagattcattgcttattgttcagtatcaactattcattactgatatattgcattggggtggcatctttgagaccaaggtgtatatcatatacaaagagagaaccacattgagctgaatttcaagaatttcctaaatcatccatggagcctgttcttttatccaagtctagttataatgcttgctctttgtttcttgctttgaattactttcttatttttaaggtctacatttatatttactacttttt

SEQ ID NO: 81829 - DNA, 224 bp, Glycine max
ctgatcatggtgtgtgctacgggaatcataggacactgattgacttagaggttatgtgcttatgaacaatctacggtggattactttggcttacttgactgcagccatatactggtgggacgaccagcgtgaggtgcccatgtggtttagaggtgtatcctggataagaaggcagagatcaaggctagtaacatggactgatctaaaaacagagatactggaca

SEQ ID NO: 81830 - DNA, 394 bp, Glycine max
ctaaattggaagagttaactacaaggtttcaactcaatggatgattcaaatttagacgaatctatccatttgctgctggttgtttaatttttcttctgttttgctatattcatttcgttgaacaattttataatgatgaatatggtttagggtctcttgtgctaatagagcattaaaatcatttccaggaagtgttgaagcatatgaagctctagattcctcagcccctatcttgttattccttttggcaacagatgagatgtaatatatgagtcattgcgatttattgcagacagtttcattgatttttagggagtgcttgagttccagtgtatcaacttgatcttgtcgagtaatcattgtccaatggagtccatacaagaagcatcaagtg

SEQ ID NO: 81831 - DNA, 260 bp, Glycine max
cgagattgcctgcgtaacggccacggctgcgcagagtccactcccttacatctactcccgttgtttacgcgactggtgctcgaataaactttgtactgaaatacgttcacatctcgtaccattttcgagacttgatgaatatcgatgcgcgcctacacgtctcgtcgagcattgaagtattttcctacacggaaaaggtagcgtgtggctacgacacacgtaatcgagagatttacattctaatctgccactgaatcaat

SEQ ID NO: 81832 - DNA, 188 bp, Glycine max
cttgcttccaagatggttctgctagagaagctctgggatgacgttgttgctggccctcaacctgagcgtggccttggcaagctcagaaaactcaccaccctcaaaactattgatgaaggagacagtagcaagctgcagaagacgttgtcgatgccgtcgacaccgacaaccccgatgactcccacgac

SEQ ID NO: 81833 - DNA, 216 bp, Glycine max
gagacaatgggggagagcgagacaggagagcgatggaacggtgcgatgacagatctgacggtgatggacgccaatttctactttctgcagaggctactcttcacgaaagccgtttttgtggacgacgacactttatggacaggcttcgtagtcgactaccaagaccgtgtcatgaagctccttgaccaacgagtccaaaccctggagagagatggt

SEQ ID NO: 81834 - DNA, 407 bp, Glycine max
agcagattgtgattttctcaagagaaactttaagcagatgtctaatgttttgtgggtggctcctgaggacaaggcgagtttatggtcacaacttcattatgtttcgtgtaataatctggaaatgcaagaagcttatcttgtcaacctcgtaaatgtgttacgagaattgtatttgcacagtccagaggaagctcgccaattgagaaggaaagctctctctcgtattgaatggctgcaaaaagctgatgtgcctaccatagcacagattgaagagttccattcgatgcagaggatgatgaatgctcctgattcaaatgataatattgatttactgttgagcattgacttgttgggtttacaaggagcaggtaaagcttttccaaacaaaattgtttttgatgataagc

SEQ ID NO: 81835 - DNA, 310 bp, Glycine max
  unsure (1)..(310): unsure at all n locations
gctgtgactgttagcatagtaggagttgttggcaatatctatagccttgagagtaagtcttagtccacgatttggtttctttttcacaggaatcatgtgctaaaatttagtatacaacatttgttcattggctctgctgcaatgtaattcaaacagcagaggattgggggtgacaggattgttctgtagtatgggataagtatttttgccccagctatgatatatatgatatgagatgcacataaactttcatttgaggaatgatgaattgatgaccgattgattcanannacataaagttgatagttaa

SEQ ID NO: 81836 - DNA, 414 bp, Glycine max
gtgtcacagtgaggcagttgcactgatatgctgatggctcttttcatcttttccctttctttgttccattttgaaaacgaggaagcagactgtctaaagctcatgctggcagatgttgatgtttcttgacttgggacgtatattcttctgggtattatttcagtaggctttgatagagaaatatagaaactattgaatttcgctattgttttgtgtttttaatgtaagggctttttccttgttaattatcaacttgggggcacacgtgccacgtttgctgtaaatgcagtaaggattgaaatagctgtcaatctacattaatattagccacatttttggtttggtattggctgttgaccttatcatgggttcggggcatattaaagtacttaaaattattgctttgagaataaa

SEQ ID NO: 81837 - DNA, 327 bp, Glycine max
ctctcgtattgaatggctgcaaaaagctgatgtgcctaccatagcacagattgaagagttccattcgatgcagaggatgatgaatgctcctgattcaaatgataatattgatctactgttgagcattgatttgttgggtttacaaggagcaggtaaagcttttccaaacaagattgtttttgatgataagcttgtgttggctaacacacaagaattctttgatggaaattttccagtggattcttggttaccaatttttgtgaattgtctttatcctgtaagtcaattaccttcagaagctgtcgttgtaaatgttacatgtggtag

SEQ ID NO: 81838 - DNA, 415 bp, Glycine max
tgtgaccataatctcgccaattgagaaggaaagctctctctcgtattgaatggctgcaaaaagctgatgtgcctaccatagcacagattgaagagttccattcgatgcagaggatgatgaatgctcctgattcaaatgataatattgatctactgttgagcattgatttgttgggtttacaaggagcaggtaaagcttttccaaacaagattgtttttgatgataagcttgtgttggctaacacacaagaattctttgatggaaattttccagtggattcttggttaccaatttttgtgaattgtctctatcctgtaagtcaattaccttcagaagctgtcgttgtaaatgttacatgtggtagtgggaccttggtttacccaccactgcttggattagttctgcagttaacaat

SEQ ID NO: 81839 - DNA, 358 bp, Glycine max
cttctttgctagaatttttgcttgatattgcatcattgtctattttttaggaacttctattttagcactataatgtttggaattttcttttgcataatattttacaggttttatttgaagctaagcaatgggattatctagtggaccaattcaaacaggagttctgcaagttatatggcatgactttagagcccttgctcaatatctatctgcaagctggcctttctgctctcaagacaccgtatcctttttttaaaatgcttgcatacatataattgaaacaccccctccaccctttccaataaatcttaaaaccacttggactttccttatccttttgagggacttaatggaatac

SEQ ID NO: 81840 - DNA, 413 bp, Glycine max
  unsure (1)..(413): unsure at all n locations
ctggatggactgccaccccaatgcaggatgttcaggttacaattgattggtttatttcctctcaggaatgtgttcccaggacctattgtgttttaaatccacaaaatccttttgtgttaaataggtggatgggaaaactgactttccctcagggcacttcccgaagtgttaagagaatgcctctttctatagggggaggagctggtgcaaagaatgctattctcatgaatatgccaaatgctgntctttcaatgtggagatattttgttggagatctcgtctttgaagtttctaagatgacttctccctacattaaatgtacagtctctttcttcatagcatttggaaatttggctgatgacaccatcaattttgaggctttttcccacaagcttgtgcagtttggagagatt

SEQ ID NO: 81841 - DNA, 413 bp, Glycine max
tgagaacatcattgaattttgattctagcaagcagagcttttgtcaattttctatcgaccttctcggtggaggaattttagtggacaaaactggagattggatcacacttatacaaaattctccaattagtaacttgttgagagttgctgcttggaagaaaggctgtttaatggtcaagattgtgatgtctgggaatgcagcagtcaaaaggagtgattgggcctcattggtacaagtgtttttaacaaacagcaacagtacagagcattttgatgcatgtaagtggacaaaatcagaaccacattcctgggaattgatcttcccaatagaggtatgtggtcctaataatggttttgaaatgtggagttctgagtgggcaaatcaaacttcatggcatttgagttttcttatt

SEQ ID NO: 81842 - DNA, 342 bp, Glycine max
gaaagagatagggtaacctaatggagctagttgatagaaggttaggttcagatttcaatgaaaatgaggtaatgatgatgatcaaagtggcgctcctatgcaccaataccacttcaaaccttaagcccaccatgtcatcggtgcttaatatgctagaaaggaaaactatgattcccgaatttggttcagatccctctgagataatggattgaatggaagttgaggccatgcgacaacctttcttttcaaaaggaaaattggaggaggtggacacaagagcaaaatcatagtttatcaattgaggggccttggacgggcttattcttatcggttgcagatcta

SEQ ID NO: 81843 - DNA, 304 bp, Glycine max
ttttgttggagatctcgtctttgaagtttctaagatgacttctccctacattaaatgtacagtctctttcttcatagcatttggaaatttggctgatgacaccatcaattttgaggcttttccccacaagctggtgcaatttggagagattcaggaaaaagttgtattgaaattttcacaagaggaatttcttacagcttggtcaactcaggtgcgtcctacaacaactctgttggctgatgggtgtccatatttgtatgctatggtgcatgatagttcagtgtctacaataccaagtgatttt

SEQ ID NO: 81844 - DNA, 342 bp, Glycine max
catgaatatgtcaagccttactttagtggttctaaattgaaaagctttctagctggtcataatatcaccattactgatggtattgacaaaactagtgcaactttgcaatttagaaagttagcagattgtgattttctcaagagaaactttaagcagatgtctaatgttttatgggtggctcctgaggacaaggcgagtttattgtcacaacttcattatgtttcgtgcaataatctggaaatgcaagaagcttatcttgtcaatctcgtaaatgtgttacgagaattgtatttgcacagtccagaggaaagctcgcaattgagaaggaaagctctctctcgt

SEQ ID NO: 81845 - DNA, 280 bp, Glycine max
gcatgatagttcagtgtctacaataccaggtgattttgtcattggtgttaagttgacaaccataaacaatatgtgtgcatatgggcttaatcctggtatttcaggttctcgtcttttgggcaccattcctcagtccatttcacagcaaactgtttggaatcaaatggcaacagtgagaacaccattgaattttgattctagcaagcagagcttttgtcaattttctatcgaccttctcggtggaggaattttagtggacaaaactggagattggatcaca

SEQ ID NO: 81846 - DNA, 379 bp, Glycine max
taaagactcagtttgaggatccctctcatatgtaatcaccgttttcacgtggctttgcttcgatctataactatgatcataatgaatgtcattcactcaaaacttgtttatcatgttttattttccgcttcccctgactgattcctttttcttttcaatttttttgctttacccttttttttatcgtgggtatccaacaagtgaacttgttcattgggttacttgtgattccatgatctgggaaaagaaaaaaaaaaaaaaaaagggtttttggtttctgtatgggatagggcattttggaatttgattcattttgatggggatgatcaacctttggtggtggcgattacttcaactttgatcgggaaaatctttcctt

SEQ ID NO: 81847 - DNA, 393 bp, Glycine max
cttttgagtaccactaccaatggtgattttgttcaaggaaaagatctcgcaatggttaaagttaatgtagcatgtgctgctgttggcttgacatcaagttacactccaactccattgttggaatctggtttgcaaaaagacagagggttaattgtggagtattttggaaggatgtcttacgttgctcacaacgttaatcagccccaagagaaagatttgttggagggaaatttttcctttgatattaaatctcgctctagattggaaaaagtttcctctacaaaagcacaatttgttagtggaaaaaccttcaaatatgatataattggtgctggttcacattcttcagaagattttcctgaaaaggaagatcaagaaaaacccaaaaagatt

SEQ ID NO: 81848 - DNA, 364 bp, Glycine max
ctaataatggttttgaaatgtggagttctgagtgggcaaatcaaacttcatggcatttgagtttccttattgacaatcccaaacagtctacagtttttgatattctcttgggaatttctcaagattttgagattgctggtaatactcttatgccagctttttctgttccacaggctactgccagatcttctgaaaatgcggaatcctctgcatgatctggaatttgtgttttcttttgcttgttcgtttgcttaattcaataaaggaaattaggcatgaccctcttgttgagtatgctctgcctatttgaaaatttccacacctcttttaattatcgtaatgatgtgtgaagtgtgtgttattt

SEQ ID NO: 81849 - DNA, 324 bp, Glycine max
caatcatagttgtcaagaatttcaataccactctagtagtttggcaaactgcattatcaaaatttaaccgctcaataaaatttgaaactacttacattgaaggaggattgaatctgaagagaaaagtgtaacacgatttcttttttacacacacaaaaaaaaaaggagagagagattcacaggttgtggcttttacttacacatcctagtatacatttctatacccgtgctatacaacaacatatcgcactaaagacttttcaagtgcgcctttatatgcatataagaatgttctagatttaagaaaattttatttttttcaca

SEQ ID NO: 81850 - DNA, 188 bp, Glycine max
cagatcttctgaaaatgcggaatcctctgcatgatctggaattcgtgttttctttcgcttgttcgtttgtttaattcaataaaggaaattaggcatgaccctcttgttgagtatgctctgcctatctgaaaatttccacacctcttttaattgtcgtaatgatgtgtgaagtgtgtgttattttaaaa

SEQ ID NO: 81851 - DNA, 393 bp, Glycine max
tcttgaaaccctttcttagagtgtttaaagaccttgaatgcacgcaattgtatcctgtaaagatgttaacagtgtgcagttttgtgctggtttaatatcttttactttatcaactatattgaagttttgaagagcataattgcaacagttgtcaggtgatataaatgaggaagtggatagtcataaccggatgctggatcgtatggtgcgtactgcttattgcatttattgaaaacatttgcattttctctgctatatcgcattatttttttataatctgttggtattttatatagggaaacgatatggattcttcgagaggagtcctctcaggcactatggataaattcaaaatggtatgtggactttaaatcctgaatgcactaatatata

SEQ ID NO: 81852 - DNA, 331 bp, Glycine max
tgcaaaaagctgatgtgcctaccatagcacagattgaagagttccattcgatgcagaggatgatgaatgctcctgattcaaatgataatattgatctactgttgagcattgatttgttgggtttacaaggagcaggtaaagcttttccaaacaagattgtttttgatgataagcttgtgttggctaacacacaagaattctttgatggaaattttccagtggattcttggttaccaatttttgtgaattgtctctatcctgtaagtcaattaccttcagaagctgtcgttgtaaatgttacatgtggtagtggacgttgtggttttcccac

SEQ ID NO: 81853 - DNA, 244 bp, Glycine max
gccgtagcattgttttttttagtaagcttgttaatataactatatatctgggcatatatttgcgtagtgctcacggagtttgatgaaaaaaaaaaaaaaaaaaaaaaaaaaaaaaaaaaaaaaaaaaaaaaaaaaaaaaaaaaaaatttaataaataaaaaaataaagataaaaaattatacttatggggtgctaacaaaaaaaaaaaattttttctgagaaaaaaaatggaagggggggcccc

SEQ ID NO: 81854 - DNA, 217 bp, Glycine max
aaaaaaaaaaaaaaaaaaaaaaaggggaaaataaaaaagggaggacgccaactaaaataaaaaaataacccggtaattaattcctgacccacacctgcaggaaggaccagatttccctttcgcgagtgaaattagagcttgacttaatggggggcgtcacctgtttcctgggtgatatcgagttactgtttcactcccccactactgtgggccctga

SEQ ID NO: 81855 - DNA, 421 bp, Glycine max
gaagtttctaagatgacttctccctacattaaatgtacagtctctttcttcatagcatttggaaatttggctgatgacaccatcaattttgaggcttttccccacaagctggtgcagtttggggagattcaggaaaaagctgtattgaaattttcacaagaggaatttcttacagcttggtcaactcaagtgcgtcctgcaacaactctgttagctgatgggtgtccatatttgtatgctatggtgcatgatagttcagtgtctacaataccaggtgattttgttattggtgttaagttgacaaccataaacaatatgtgtgcatatgggctcaatcctggtatttcaagttctcgttttttgagcaccattcctcagtccatttcacagcaaactgtgtggaatcaaatggcaacagtga

SEQ ID NO: 81856 - DNA, 417 bp, Glycine max
atgtggaatcccttctggatttccgctcacagttatttgcaatagcatttttaatgagatgctcattagatatagctatgaaaaattactgcgccaggctaaagctccaagtatgtttttacaatccttcaaaaattttgtttctttgtgtgtgtatggagatgataacttaattagtgttcatgaatatgtcaagccttactttagtggttctaaattgaaaagctttctagctggtcataatatcaccattactgatggtattgacaaaactagtgcaactttgcaatttagaaagttagcagattgtgattttctcaagagaaactttaagcagatgtctaatgttttatgggtggctcctgaggacaaggcgagtttatggtcacaacttcattatgtttcgtgcaataatct

SEQ ID NO: 81857 - DNA, 243 bp, Glycine max
atctatttggagttgacggcgatggataccaattgacataaagctatcatttattaacacatgatgtggctgaacttaaacgatcagatgttactgagagtgtccaccaaaccgaaaggtcgtgggcattacctatacgccagctgcatcttcaatgattgctgggtgagggtgcatcgctcgatgcacggggaactgctggaggaggtcttggacctatttggcctctcctagatgtggggc

SEQ ID NO: 81858 - DNA, 418 bp, Glycine max
caagtttagagagagaggaagagaaagagagagagaattggagaaacaaacgctcactcactcactcactcctttgtttgttcttttctcccttggcttcctcatccatcaacgctatcattagcaattaagaaaccaagacatggggtttctcttcttcttcttcttctcctccttctttttcttctctccaaccacttccaagatgcgatgctgatctggagtgttgctgtttttcccttgagatcgattctcttgtgttggtggtgatcaagaacaagaaagtgtggttaattttgctttctttgaaaaaatccaatggaagaagatcatcaagaagtgaaacacgtgtgcaagttctgctgcaagagcttcccttgtggaagatccttgagtggccacatgaagtcacatgtca

SEQ ID NO: 81859 - DNA, 418 bp, Glycine max
attgaattttgattctagcaagcagagcttttgtcagttttctattgaccttctcggtggaggaatcttagtggacaaaactggagattggatcacacttatacaaaattctccaattagtaacttattgagagttgctgcttggaagaaaggctgtttaatggtcaagattgtgatgtctgggaatgcagcagtcaaaaggagtgattgggcctcattggtacaagtgtttttaacaaacagcaacagtacagagcattttgatgcatgtaagtggacaaaatcagaaccacattcctgggaattgatcttcccaatagaggtatgtggtcctaataatggttttgaaatgtggagttctgagtgggcaaatcaaacttcatggcatttgagtttccttattgacatcccaaacagt

SEQ ID NO: 81860 - DNA, 242 bp, Glycine max
cttgggaatctctcaagattttgaaattgctggtaatactcttatgccagctttttctgttccacaggctactgccaggtcttctgaaaatgcggaatcctctgcatgatctggaatttgtgttttctttcattcaataaaggaaattgggcatgaccctcttgttgagtatgctctgcctatttgaaaatttccacacctcttttaattgtcgtaatgatgtgtgaagtgtgtgttatttt

SEQ ID NO: 81861 - DNA, 402 bp, Glycine max
gggcacttcccgaagtgttaagagaatgcctctttctatagggggaggagctggtgcaaagaatgctattctcatgaatatgccaaatgctgttctttcaatgtggagatattttgttggagatctcgtctttgaagtttctaagatgacttctccctacattaaatgtacagtctctttcttcatagcatttggaaatttggctgatgacaccatcaattttgaggcttttccccacaagctggtgcagtttggagagattcaggaaaaagttgtgttgaaattttcacaagaggaatttcttacagcttggtcaactcaggtgcgtcccgcaacgactctgttggctgatgggtgcccatatttgtatgctatggtgcatgatagttcagtgtctacaat

SEQ ID NO: 81862 - DNA, 288 bp, Glycine max
cctgaacgtggggaagtggatcagacgctcctgggtgaatctccactctcagttcaacattgtgattgcttccttcgatagatgcggcggtgggacgatcagcttggcggggatggagatgaagcctgctatgaaactggcggagtctgagcgttcggattctgccactacgtgagcactcaagtcttggagggcaatgatagactcgatgcttgagagactggtcctcgcgttgcaggtgatggaaggggagatgcggtgcgctttccaaccattcccgacataaga

SEQ ID NO: 81863 - DNA, 113 bp, Glycine max
acataaaggaaattaggcatgaccctcttgttgagtatgctctgcctatctgaaaatttccacacctcttttaattgtcgtaatgatgtgtgaagtgtgtgttatttttaaaa

SEQ ID NO: 81864 - DNA, 420 bp, Glycine max
attctctttgcgcagttccctacctctcctttcaagatgcagatcttcgtcaagaccctcaccggaaagaccatcacccttgaggtggaaagctctgacaccatcgacaacgtcaaggccaagatccaggacaaggaaggaattccccccggatcagcaacgtctcatcttcgccggaaagcagctcgaggacggccgtaccctcgccgactacaacatccagaaggagtcaacccttcaccttgtccttcgtctccgtggtggcatgcagatcttcgtcaagactctcactggcaaaaccataaccctagaggtcgaaagctctgacaccattgacaacgtcaaggccaagatccaggacaaggagggaatccccccagaccagcaacgtcttatcttcgccggaaagcaacttgagga

SEQ ID NO: 81865 - DNA, 394 bp, Glycine max
atttggcttatgacaccatcaattttgaggcttttgcccacaagctggtgcagtttggagagattcaagaaaaagttgtattgaaattttcacaagaggaatttcttacagcttggtcaactcaggtgcgtcctgcaacaactctgttagctgatgggtgtccatatttgtatgctatggtgcatgatagttcagtgtctacaataccaggtgattttgttattggtgttaagttgacaaccataaacaatatgtgtgcatatgggctcaatcctggtatttcaggttctcgtcttttgggcaccattccttagtccatttcacagcaaactgtttggaatcaaatggcaacagtgagaacaccattgtattttgattctagcagcagagcttt

SEQ ID NO: 81866 - DNA, 403 bp, Glycine max
caagagaaactttaagcagatgtctaatgttttgtgggtggctcctgaagacaaggcgagtttatggtcacaacttcattatgtttcgtgtaataatctggaaatgcaagaagcttatcttgtcaatctcgtaaatgtgttacgagaactgtatttgcacagtccagaggaagctcgccaattgagaaggaaagctctctctcgtattgaatggctgcaaaaagctgatgtgcctaccatagcacagattgaagagttccattcgatgcagaggatgatgaatgctcctgattcaaatgataatattgatctactgttgagcattgatttgttgggtttacaaggagcaggcaaagcttttccaaacaagattgttttgatgataagctgtgttgcttacaca

SEQ ID NO: 81867 - DNA, 226 bp, Glycine max
ctcgagccgattcggctcgagaaaaaaaaaaaaaaaaaaaaaaaaaaaaaaaaaaaaaaaaaaaaaaaaaaaaaaaaaaaaaaaaaaaaaaaaaaaaaaaaaaaaaaaaaaaaaaaaaaaaaagggggggcccccgccttgtgggctcgtcaccccgggatttatttccggaccggtccctggaggcgtcccagttttccctatagggaggcgttttaaagctggg

SEQ ID NO: 81868 - DNA, 356 bp, Glycine max
cagattgaagagttccattcgatgcagaggatgatgaatgctcctgattcaaatgataatattgatctactgttgagcattgatttgttgggtttacaaggagcaggcaaagcttttccaaacaagatcatttttgatgataagcttgtgttggctaacacacaagaattctttgatggaaattttccagtggattcttggttaccaatttttgtgaattgtctttatcctgtaagtcaattacctccagaagctgtcgttgtaaatgttacatgtggtagtggacgtggtggttttcccaccactgcttggattagttctgcagttaacaatcgctcctcagatatcaacaaaaa

SEQ ID NO: 81869 - DNA, 123 bp, Glycine max
gaactgtaagagtctcaaatatctggttgatgagtgtccttttgcatttgtgaactagtatgtaatattttattcacttaaataaagcgcattactatgtgcaatgagtgtgtttaaatataa

SEQ ID NO: 81870 - DNA, 279 bp, Glycine max
ggcttttccccacaagctggtacagtttggagagattcaggaaaaagttgtattgaaattttcacaagaggaatttcttacagcttggtcaacccaggtgcgtcctgcaacaactctgttggctgatgggtgtccatatttgtatgctatggtgcatgatagttcagtgtctacaataccaggtgattttgtcattggtgttaagttgacaaccataaacaatatgtgtgcatatgggctcaatcctgggatttcaaggtctcgtcttttgggcaccat

SEQ ID NO: 81871 - DNA, 419 bp, Glycine max
  unsure (1)..(419): unsure at all n locations
gtttgttgatcgagataactagaaacagtgtgatgaaaatgaaggtccttgttttcttcgttgctacaattttggtagcatggcaatgccatgcgtacgatatgttccctctccgaatgaacactggctatggtgcccgtactccggaggtgaaatgcgcaagttggaggcttgctgtggaagcacacaacatctttggctttgagaccattcctgaagagtgcgttgaagcaacaaaggaatacatccatggcgaacaatatagatcagactccaaaacagttaaccaacaagcttacttttatgccagagacctcgaagtccatcccaaggacacatttgtgttcagtatagatggcaccgtactctctaatattccatactacaaaaaacatggatatggngtggagaaatttaac

SEQ ID NO: 81872 - DNA, 395 bp, Glycine max
caccattgaattttgattctagcaagcagagcttttgtcaattttctattgaccttctcggtggaggaattttagtggacaaaactggagattggatcacacttatacaaaattctccaattagtaacttgttgagagttgctgcttggaagaaaggctgtttaatggttaagattgtgatgtctgggaatgcagcagtcaaaaggagtgattgggcctcattggtacaagtgtttttaacaaacagcaacagtacagagcattttgatgcatgcaagtggacaaaatcggaaccacattcctgggaattgatcttcccaatagaggtatgtggtcctaacaatggttttgaaatgtggagttctgagtgggcaaatcaaacttcatggcatttg

SEQ ID NO: 81873 - DNA, 376 bp, Glycine max
tgggtgcaacacgtttttgttggtatttttttccatacaattagattggtagaacatgaagggaaagaaatcggttaacattaaatggaagaaaatgagtaatatggggtgattcatttacagagccgccaagagccaaaaagctaccaaatctagcttttattaaaattcgatgaatgtctaaaggaaaccaaaagggtaaaagaaaaacgctaaactatgccttttttttttttttctcttcttttggtttgataaaaaatacagctttggagtaactgttgattccctgcaaaagaggggatggggggttagtgctccttgcggagataaaacaatactcttgagtcctgtcatctgattttcatttcatttg

SEQ ID NO: 81874 - DNA, 149 bp, Glycine max
aaaaattattatttttattgaaaaaaaaaaaaaaaaaaaaaaaaaaaaaaaaaaaataaaaaaaaaaaaaaaaaaaaaaaaagggcgccccccacctattatgccagttccccggaatttaattccggaccgggacctgtgggcgtccc

SEQ ID NO: 81875 - DNA, 418 bp, Glycine max
caaaagcaatgactatgtcatttaatccaaacccgtgttctgatgcatggagtttggaatttttgaagcgtaccggatttcattgtgatatcatttgtgtcactgggtggactgccaccccaatgcaggatgttcaggttacaattgattggtttatttcctctcaggaatgtgttcccagaacctattgtgttttaaatccacaaaatccttttgtgttaaataggtggatgggaaaactgactttcccccagggcacttcccgaagtgttaagagaatgcctctttctatagggggaggagctggtgcaaagaatgctattctcatgaatatgccaaatgctgttctttcaatgtggagatattttgttggagatctcgtctttgaagtttctaagatgacttctccctacattaa

SEQ ID NO: 81876 - DNA, 417 bp, Glycine max
  unsure (1)..(417): unsure at all n locations
tccccacaagctggtgcagtttggaaaagcctcaaaattgatggtgtcatcagccaaatttgaggcttttccccacaagctggtgcagtttggagagattcaggaaaaagttgtgttgaaattttcacaagaggaatttcttacagcttggtcaactcaagtgcgtcccgcaacgactctgttggctgatgggtgcccatatttgtatgctatggtgcatgatagttcagtgtctacaataccaggtgattttgtcattggtgttaagttgacaaccataaacaatatgtgtgcatatgggctcaatcctggtatttcaggttctcgtcttttgggcaccattcctcagtccatttcacagcaaactgtttggaatcaaatggcaacagtgagaacaccatnngaatttgattctag

SEQ ID NO: 81877 - DNA, 61 bp, Glycine max
aaaaaaattaataaaaaaaaaaaaaaaaaaaaaaaaaaaaaaaaaaaaaaaaaaaaaaaaa

SEQ ID NO: 81878 - DNA, 417 bp, Glycine max
cacaaaatccttttgtgttaaataggtggatgggaaaactgactttccctcagggcacttcccgaagtgttaagagaatgcctctttctatagggggaggagctggtgcaaagaatgctattctcatgaatatgccaaatgctgttctttcaatgtggagatattttgttggagatctcgtctttgaagtttctaagatgacttctccctacattaaatgtacagtctctttcttcatagcatttggaaatttggctgatgacaccatcaattgtgaggcttttccccacaagctggtgcagtttggagagattcaggaaaaagttgtgttgaaattttcacaagaggaatttcttacagcttggtcaaactaagtgcgtccccgaacgactctgttggctgatgggtgcccatatt

SEQ ID NO: 81879 - DNA, 401 bp, Glycine max
gctcattagatatagctatgaaaaattactgcgccaggctagagctccaagtatgtttttacaatccttcaaaaattttgtttctttgtgtgtgtatggtgatgataacttaattagtgttcatgaatatgtcaagccttactttagtggttctaaattgaaaagctttctagctggtcataatatcaccattactgatggtattgacaaaactagtgcaactttgcaatttagaaagttagcagattgtgattttctcaagagaaactttaagcagatgtctaatgttttgtgggtggctcctgaggacaaggcgagtttatggtcacaacttcattatgtttcgtgtaaatatctggaaatgcaagaagcttatcttgtcaatctcgtaaatgtgttac

SEQ ID NO: 81880 - DNA, 375 bp, Glycine max
ggtgcatgatagttcagtgtctacaataccaggtgattttgtcattggtgttaagttgacaaccataaacaatatgtgtgcatatgggcttaatcctggtatttcaggttctcgtcttttgggcaccattcctcagtccatttcacagcaaactgtttggaatcaaatggcaacagtgagaacaccattgaattttgattctagcaagcagagcttttgtcaattttctatcgaccttctcggtggaggaattttagtggacaaaactggagattggatcacacttatacaaaattcttcaattagtaacttgttgagagttgctgcttggaagaaaagctgtttaatggtcaagattgtgatgtctgggaatgc

SEQ ID NO: 81881 - DNA, 228 bp, Glycine max
aatatgatataattggtgctggttcacattcttcaggagattttcctgaaaaggaagatcaagaaaaacccaaaaagattgataccagattgagacaaagaatagatcctcaatacaatgaggttcaggctcagatggaaacaaatttgtttaaattgtctcttgatgatgttgaaactcctaaaggttctatgttggatcttaaaatttctcaatctaaaattgcac

SEQ ID NO: 81882 - DNA, 373 bp, Glycine max
ctaacactatagcaagagctatgacggcacacgcacgcgtaccgtaagcatcgggattcgaggtcgaggatattcctctggtgaagctatggaacccaaggcctggaagtttccaaggtcggatttgcatggattggcctaatgggagtgttcatcgatcctgcatcctaagaggcaggcatttatctgatcaaactcccatacaccaaacgggtaacttggatggattatgcagaagattatggatcacgagccactcaaatgatggttctataggttatcagggacttttcttgagatcaaatgcttattgccacaaaatttgacattctcaaaatggagaattgtaatgcaatactgaacgaattccctg

SEQ ID NO: 81883 - DNA, 380 bp, Glycine max
ataatctggaaatgcaagaagcttatcttgtcaatctcgtaaatgtgttacgagaattgtatttgcacagtccagaggaagctcgccaattgagaaggaaagctctctctcgtattgaatggctgcaaaaagctgatgtgcctaccatagcacagattgaagagtttcattcgatgcagaggatgatgaatgctcctgattcaaatgataatattgatctactgttgagcattgatttgttgggtttacaaggagcaggtaaagcttttccaaacaagattgtctttgacgataagccttgcgtggctaacacacaagaattctttgatggaaattttccagcggattcttggttaccaacttttgtgaattggctttat

SEQ ID NO: 81884 - DNA, 397 bp, Glycine max
gttgtgactcgttcttcttcgtcgttatcttcttcttttgttgtttgtgtgtttgttttttctctcacctgaaaatgtcttgctgcggtggtaactgtggttgcggaagcgcctgcaagtgcggcaacggctgcggaggctgcaagatgtacccagacttgagctacaccgagtcaaccaccaccgagaccttggtcatgggagtggcaccagttaaggctcaattcgagagtgctgaaatgggtgttcccgctgagaacgatggctgcaaatgtggagctaactgcacctgcaacccctgcacttgcaagtgaggtgttggagagctaaagcttcaagcagaaatggcccttagaaataatgataaaaactatatgtagtttcaaaacttcaaaaa

SEQ ID NO: 81885 - DNA, 196 bp, Glycine max
ctttcaatgtggagatattttgttggagatctcgtctttgaagtttctaagatgacttctccctacattaaatgtacagtctctttcttcatagcatttggaaatttggctgatgacaccatcaattttgaggcttttccccacaagctggtgcagtttggagagattcaggaaaaagttgtatttgaaatttcac

SEQ ID NO: 81886 - DNA, 416 bp, Glycine max
catgaatatgtcaagccttactttagtggttctaaattgaaaagctttctagctggtcataatatcaccattactgatggtattgacaaaactagtgcaactttgcaatttagaaagttagcagattgtgattttctcaagagaaactttaagcagatgtctaatgttttatgggtggctcctgaggacaaggcgagtttatggtcacaacttcattatgtttcgtgcaataatctggaaatgcaagaagcttatcttgtcaatctcgtaaatgtgttacgagaattgtatttgcacagtccagaggaagctcgccaattgagaaggaaagctctctctcgtattgaatggctgcaaaaagctgatgtgcctaccatagcacagattgaaagagtccattcgatgcagaggatgat

SEQ ID NO: 81887 - DNA, 319 bp, Glycine max
cgaatatcttgttgtttggagcgatccgagaaaaactctgtaaacatgttggtttaccaggacctccttacaggtgatgagcttctctctgactccttccgttacaaggaaattgagaatggaatgctgtgggaagttgaggggaagtgggttgttaaaggagcagttgatgtagacattggtgcaaacccttctgctgagggtggaggagaagatgagggagttgatgatgcagctgttaaggttgttgacattgttgacacatacagacttcaggagcaacccgcattcgataagaagcagtttgttaccttcatga

SEQ ID NO: 81888 - DNA, 299 bp, Glycine max
ctctttgctcaactcaagttgttcactaccgactcctaatgccaagcttcttaacacctttacaacattcacattacaaaaacactcaaaacgatggcgttttaccccaaccctaaccttaacacccgctggaccaccgagcccctcaaccatatggttcttgccatgcaccctttctgccccaaattctaaacccttaccctaattcccaattcaacccttattatacttgtcctaaccctttttttttccgtcgagctttttcttcgtattcttttcaagcttcccgatttttttta

SEQ ID NO: 81889 - DNA, 102 bp, Glycine max
ggaaattaggcatgaccctcttgttgagtatgctctgcctatttgaaaatttccacacctcttttaattgtcgtaatgatgtttgaagtgtgtgttattttt

SEQ ID NO: 81890 - DNA, 341 bp, Glycine max
tgatgcatgtaagtggacaaaatcagaaccacattcctgggaattaatcttcccaatagaggtatgtggtcctaataatggttttgaaatgtggagttctgagtgggcaaatcaaacttcatggcatttgagtttccttattgacaatcccaaacagtctacagtttttgatattctcttgggaatctctcaagattttgaaattgctggtaatactcttatgccagctttttctgttccacaggctactgccagatcttctgaaaatgcggaatcctctgcatgatctggaattcgtgttttctttcgcttgttcgtttgttaattcaataaggaaatta

SEQ ID NO: 81891 - DNA, 195 bp, Glycine max
gatatgtttaactcgactactccttagtgtgtacaagacagactttcgtcgattgacttgtacacagccatcaccatagttcgattttgcatgatgtattatgttattatattctgttacttaagcttgcgacactagttactttcactttagagagtgctagctaaggacacaacgacaggtcaatgtgtgatt

SEQ ID NO: 81892 - DNA, 298 bp, Glycine max
cgacattggaaatcatggaactaagattattatcatcaccacatgggacaatgatgatggccatggtggagctggactttaatatctgatcccgagggggaggctgttggttggatggatgttgctgcatacactccttgtttgccagcagttataaagccatgcttttgttactgagagggggcttcttatattatggatgcaggatatacatattgacggggatatcaagaagattgacacacattctgcctcaaagatagtcaatgagggacacattgctcaccgttatcattat

SEQ ID NO: 81893 - DNA, 367 bp, Glycine max
caacttcatatcatcaccatgaatcactctagcaacaatcagcaagaaaccccttgtgagttcttcttcttaattacaaaccttatgcaaatgcttctatctccaaatgaagatgaattggctatgtttgcatgcccaataataaataatgttctgtgtttttttttctttttaaatatacgttcaaattggtttttgaaaaaatcagaaaataaaactatacactagttttacaatttcattttatcataaattattatttatgataaatttatcgacttatataaaattatttcaaaactcatacaaatcgtgatttacgattgaatgataatgttagcgcattatgttaaatttcttgattttt

SEQ ID NO: 81894 - DNA, 395 bp, Glycine max
gttcaaacatgaaatcaagcccctggtcgagggtcttgcctacgacgacaaatatcagctgaacactcaatctgggactcagtgggacggcttccgtcatatgtcctggatcgaaactgccactttctataacaataccaagggacctgatattatgacgtccgacggtgccaatgcaagccacaagtgcagcatacaccactgggccgagcatggaatcgccggacgcggcgttctcctcgactatagaggctacgcgaagaagaagggcatttcgtatgacccgtacgatcattaccccatcagcttcgaggagctctaccaatgcggcaaagatcagggcatcgacattcgccccgcagcacaaggcggcgacatcaagatcggcgacatgc

SEQ ID NO: 81895 - DNA, 404 bp, Glycine max
atttacaccatctgctctcaagactgtgaattgtggaatcctgcttgcacaaaagcaatgactatgtcatttaatccaaacccgtgttctgatgcatggagtttggaatttctgaagcgtactggatttcattgcgatatcatttgtgtcactggatggactgccaccccaatgcaggatgttcaggttacaattgattggtttatttcctctcaggaatgtgttcccaggacctattgtgttttaaatccacaaaatccttttgtgttaaataggtggatgggaaaattgactttcccccagggcacttcccgaagtgttaagagaatgcctctttctatagggggaggagctggtgcaaagaatgctattctcatgaatatgccaaatgctgttctttcaat

SEQ ID NO: 81896 - DNA, 270 bp, Glycine max
tttgatattctcttgggaatctctcaagattttgaaattgctggtaatactcttatgccagctttttctgttccacaggctactgccagatcttctgaaaatgcggaatcctctgcatgatctggaattcgtgttttctttcgcttgttcgtttgtttaattcaataaaggaaattaggcatgaccctcttgttgagtatgctctgcctatctgaaaatttccacacctcttttaattgtcgtaatgatgtgtgaagtgtgtgttatttt

SEQ ID NO: 81897 - DNA, 281 bp, Glycine max
ctcgggccgaaccaacatgaccgagaccatgtccaccgactggcacctacaccacgagctaccaaagctgcgaatcgacgccgtggtcaaaaccgacgacgacctacgctccgacgccgaagacgaccgaagcgccgccttctgcggcggcacacaagccggggccggaaacgacggggccatgaccgtcgatgtgggcgtcaaagacaacgacgagagttgccgtactccgacgtcggaggagagcaaagttccggcgacgatgacgtgtccggcggcgc

SEQ ID NO: 81898 - DNA, 377 bp, Glycine max
  unsure (1)..(377): unsure at all n locations
caatttcttttttaatgagatgctcattagaggtgggtatgaaaaattactgtgccaggctagagctccaagcatgtttttacaatccttcaaaaattttgtttctttgtgtgtgtatggtgatgataacttaattagtgttcatgaatatgtcaagccttactttagtggttctaaattgaaaagctttctagctggtcataatatcaccattactgatggtattgacaaaactagagcaacttttcaatttanaaagttagcagattgtgattttcttaagagaaactttaagcagatgttttatgttttgtgggtggtttctgaggacaaggtgagtttatggtcacaacttcattatgtttcgtgtaatatct

SEQ ID NO: 81899 - DNA, 409 bp, Glycine max
taataaaaaactgcggactccggggccacgtcttcgcttttccctccggcctgctcttgcctgtcactgccctccgctgtgactccatgtcgggtcccaatctcgtcccacgacacattgagatcctccctgacagcgctgtcgactgcctgggattcccaccatgagcggcacgcgacgcgatgccccgccgcatcacaagcacaaggacagcgtccccgacgcggggctgagaagtctcgatcattataaaagagcgctgccaaaatggagatataacttgcgacaacaggcgctcccgctcattcgctgggagacgccgtatctggctgctctccagagcaagttgcgcacgccggcgctcgacagctacttcgccatcacggccaacctgggcacgcacaccttc

SEQ ID NO: 81900 - DNA, 375 bp, Glycine max
cctaactccttgtaccaagaggttaggttcgcattcagagtacaccagtttgcaggtggctttgattcagagaccatacaagcattccaagaattgaagaagattgttagtgctagtaccaagctataggaaattgatcattactccaaaccaaacttgttaccaaaatggaccacaaatgtgtttcctatattgtcttcctcccataactgcgtgatgtttcacacttcgaaggtggaattgacaagcatgcatatgctcccatatttatgtactttttcaatgcattgcctatgtttgacatgtaggcttatgcttccctgattacgcaactatacctgaagagccaaacccacgatagaggtttttattttt

SEQ ID NO: 81901 - DNA, 396 bp, Glycine max
cgtctttgaagtttctaagatgacttctccctacattaaatgtacagtctctttcttcatagcatttggaaatttggctgatgacaccatcaattttgaggcttttccccacaagctggtgcagtttggagagattcaggaaaaagttgtgttgaaattttcacaagaggaatttcttacagcttggtcaactcaggtgcgtcccgcaacgactctgttggctgatgggtgcccatatttgtatgctatggtgcatgatagttcagtgtctacaataccaggtgattttgtcattggtgttaagttgacaaccataaacaatatgtgtgcatatgggctcaatcctggtatttcaggttctcgtcttttgggcaccattcctcagtccatttcaca

SEQ ID NO: 81902 - DNA, 412 bp, Glycine max
  unsure (1)..(412): unsure at all n locations
aagaagcttatcttgtcaatctcgtaaatgtgttacgagaattgtatttgcacagtccagaggaagctcgccaattgagaaggaaagctctctctcgtattgaatggctgcaaaaagctgatgtgcctaccatagcacagattgaagagtttcattcgatgcagaggatgatgaatgctcctgattcaaatgataatattgatctactgttgagcattgatttgttgggtttacaaggagcaggtaaagcttttccaaacaagattgtttttgatgataagcttgtgttggctaacacacaagaattcnnttgatggaaatttccagtggattcttggttacccaatttttgtgaattgtctttatcctgtaagtcaaatacctncagaagcttgtcgtgtaaatgttacat

SEQ ID NO: 81903 - DNA, 326 bp, Glycine max
aatgaacacaatttaattttaacgcactgccgtaggccaatgatagggcttgccaatggaggatgaaaatgacttaccaatgaagggctaccaacaggaattgatccctggacctttgagtcaaggctgtttgatcctaccagtcgagccacattcattggcttctttaaaggactcattatttagatatttttcagatgctattctgcttagagtgccattttatagaaacttaattatggaatttgtacattatagattaaatttcctttggtttttgtttaaatgcaggtttgaaaaagcttgagtatcttaatattggatgc

SEQ ID NO: 81904 - DNA, 398 bp, Glycine max
gtcatttaatccaaacccgtgttctgatgcatggagtttggaatttctgaagcgtactggatttcattgtgatatcatttgtgtcactggatggactgccaccccaatgcaggatgttcaggttacaattgattggtttatttcctctcaggaatgtgttcccaggacctattgtgttttaaatccacaaaatccttttgtgttaaataggtggatggggaaactgactttcccccagggcacttcccgaagtgttaaaagaatgcctctttctataggaggaggagctggtgcaaagaatgctattctcatgaatatgccaaatgctgttctttcaatgtggagatattttgttggagatctcgtctttgaagtttctaagatgacttctccctaca

SEQ ID NO: 81905 - DNA, 201 bp, Glycine max
atgtgctttcacgtaaaaatggtgaaaaaggcaagaggagatttgtttctggggatggtgaagagatgacattgattctgggaaccagtgttgaagaggcttacaacaagctaatagttgaacttggaaaaaggggtcccacattgggtggcattggatggcccaaggatgaaaaacttccttgtcgcaaaatttttgaca

SEQ ID NO: 81906 - DNA, 235 bp, Glycine max
agaaattgagggaaatttttttttgtgctagttgggggagtaaatgagaaattttgagagatggggtgtgcgtttgggagagaggtctttagggaggagaggagagtggaagtgtgagaggcaaatgctgttgagggttgacgagaggttgttgagaatgagaacattgagaaggagggtggaagagaggagtggtgggcaaggtcaaggtgagagagaaggtgattttttatgc

SEQ ID NO: 81907 - DNA, 226 bp, Glycine max
aactacacttttaccgttatactctggatttaatagtcgcttggatcactgatctcatctcaattctcagatatgtggacaaatggtatgcctaaagtggtggaatgggggagcatggaacaaaaacacatggatgatgatcaagaggaggggaacggtggatatattgaaaaggcgtcagattttattcatgacatagctgagaatattgtgggagcttttgggt

SEQ ID NO: 81908 - DNA, 458 bp, Glycine max
gtgaaaaaaagggtttgggaagagaagaggctcaagagagagaaaatggaggacgcagacgcatacgcagtagggatgaatccgtgggagcaacactcgggtgttatcaagctgcctcgctatgactacaactctccctcttctcttctcttctcttctcttctccgtaactcccattccgattttctcatcacttgtactatcagttcagtaaactcactgacttctcttcattctcattcttcttcttccaaccttccttttcattttttcaattcctctttccatagcgctacaaaagaagcaatctctatccttcataagtttgttgcttatgactcttcaaacaaccctaaagaagaaggcactagttctaagaaaaggaagttatgcacacaagatactgctgacgaatgtttcgaccacaaggatactgagtctgcttctgctaactctgc

SEQ ID NO: 81909 - DNA, 419 bp, Glycine max
caaaatcggaaccacattcctgggaattgatcttcccaatagaggtatgtggtcctaataatggttttgaaatgtggagttctgagtgggcaaatcaaacttcatggcatttgagtttccttattgacaatcccaaacagtctacagtttttgatattctcttgggaatttctcaagattttgagattgctggtaatactcttatgccagctttttctgttccacaggctactgccagatcttctgaaaatgcggaatcctctgcatgatctggaatttgtgttttcttttgcttgttcgtttgtttaattcaataaaggaaattaggcatgaccctcttgttgagtatgctctgcctatttgaaaatttccacacctcttttaattatcgtaatgatgtgtgaagtgtgtgttatttt

SEQ ID NO: 81910 - DNA, 202 bp, Glycine max
ggtgcattccatgcaaaggattatgaatgcttctggttcaaatggtaatattggtctactggtgggcattgatttggtgggtttacaaagggcaaggaaaggtttttcaaacccgaatggtttttgtgataaggctggggtggcttacacacaaaaaattctttgtgggaatttttcaatggattcttggttaccaattttt

SEQ ID NO: 81911 - DNA, 261 bp, Glycine max
cacaacttcattatgttttgtgtaataatctggaaatgcaagaagcttatcttgtcaacctcgtaaatgtgttacgagaattgtatttgcacagtccagaggaagctcgccaattgagaaggaaagctttctctcgtattgaatggctgcaaaaagctgatgtgcctaccatagcacagattgaagagtttcattcgatgcataggatgttgaatgcttctgtatcatatgatattattgatttactgtcgagcatttgat

SEQ ID NO: 81912 - DNA, 63 bp, Glycine max
gctcggggttctttctttccccaatttgtgagtgttactattgaatcgattggattgacatgg

SEQ ID NO: 81913 - DNA, 175 bp, Glycine max
ggtttatagtatttgtttgtacacaagtcgcaactactaaaatgggtgcgatccacatggaagaaaaagatgggctgccggcgactacagagctagcagacccggtgagctatgaacagaccggttccggcagggcgactcagcttgatatatacagagtcggatttgagctcgg

SEQ ID NO: 81914 - DNA, 426 bp, Glycine max
gcagagcttttgtcaattttctattgaccttctcggtggaggaattttagtggacaaaactggagattggatcacacttatacaaaattctccaattagtaacttgttgagagttgctgcttggaagaaaggttgtttaatggtcaagattgtgatgtctgggaatgcagcagtcaaaaggagtgattgggcctcattggtacaagtgtttttaacaaacagcaacagtacagagcattttgatgcatgtaagtggacaaaatcagaaccacattcctgggaattaatcttcccaatagaggtatgtggtcctaataatggttttgaaatgtggagttctgagtgggcaaatcaaacttcatggcatttgagtttgcttattgacaatcccaaacagtctacagtttttgatattctcttgggaat

SEQ ID NO: 81915 - DNA, 437 bp, Glycine max
aaaaaaaaaaaaaaaaaaaaaaaggaataaaaaaaaaaaaaagaaaaaaaaatataaaaaaaaaaaaaaataaaaaaaattagaaaaaaaatataaaaaaaaaaaaaaaaaaaaaaaaataaaaaaaaaaaaaaaaaaaaaaaaggaaaaaaaaaaaaaataaagaaaaaaaaagaaaaaaaagaagaagaaaaaagaaaaaaaaggaaaagaaaaggaagaaaaggagagaaaagagaagaagaaagagaaaaaaggggaaaaaaaaaaaaaaaaaaaaaaaaaaaaagaaaaaaaaaaaaaagagggaaaagaaagagaaaaggaaagaaaaaaaatgagaagaaaaaaaaaaaagggagaaaagagagaaatgaaaagaaagaaaaaagagaaaaagaaaaaaaaaaaaaagagaaaaaaggaaaaaggaaaaa

SEQ ID NO: 81916 - DNA, 105 bp, Glycine max
gcttgtgttggctaactcacaagaattctttgatggaaattttccagtggattcttggttaccaatattcgtgtattgtctatattctgtaagttattattcctt

SEQ ID NO: 81917 - DNA, 418 bp, Glycine max
  unsure (1)..(418): unsure at all n locations
cagacgncgcacgcacgcgnacgnaagcncggaanncggcncgagggnngagaagacgaaatcagaacagcncaaccggcaaacacaacgccaaagcaggaacacagccacaaagcgaaaagagggagacacgcacaaccaagagggacagagaaggagaaggagnggagcgaccgcacgaaaaaaagacaaagggaagccaggacaaagaagaacaggagcgggggagacaagaccaaacaagaagagaggaagcgaggaaacacgagaaacggcaggaaccaaaagggaggacaaaaggggaaacggcagaaacagaggaagagacgaaggaaacaggggaagcagagcaaggcgaaaaacggaagaagacagagggacaacaaacaagagaggaagaaaaaaaaaaaaaaaggga

SEQ ID NO: 81918 - DNA, 191 bp, Glycine max
cgtatgctaacaaccaggctgttaaatggctggagcatcatacttttgcaatagtgaagtccagatatgagttgcacatatccatgtatcatttatctgttgataggtgaaagaatcaactgcacattgctggtttattcttcatgtgattggacgtattgaatccaacatagtgattggtctttttgatc

SEQ ID NO: 81919 - DNA, 342 bp, Glycine max
tcggggaattccaattccacattttcaagaaataaggaggcaaaaatgttcatatatgaattggaattattcgttttcttattaggcctatcctgaagccaaaggaaatgagatcggaattcctcggggaattccaattccacattttcaagaaataaggaggcaaaaatgttcatatatgaattggaattattggcttacttattaagcctatcctgaagccaaacgaaatgagagcggaattcctcggggaattccaattccacattttcaagaaataaggaggcaaaaatgttcatatgtgaattggaatcatttgttttcttatgaggcctatcctga

SEQ ID NO: 81920 - DNA, 116 bp, Glycine max
aaaagcgaagaatttattgatgcccaagtaaatgcacttctatgctctctagatattgacagcagtgtccgtggtaagggacctatgcctgaaagatttcgggagcttgaggatta

SEQ ID NO: 81921 - DNA, 138 bp, Glycine max
ttcttatcattagtctcactctgtcaccggactgcgatattccataatctaatactacatttgtttctacctgactttaagtcttaagtatcaaaccacgacgtttatgggacgcactatgtagatattagcaatgat

SEQ ID NO: 81922 - DNA, 292 bp, Glycine max
gatgaatgctcctgattcaaatgataatattgatttactgttgagcattgatttgttgggtttacaaggagcaggtaaagcttttccaaacaaaattgtttttgatgataagcttgtgttggctaacacacaagaattctttgatggaaattttccagtggattcttggttaccaatttttgtgaattgtctttatcctgtaagtcaattaccttcagaagctgtcgttgtaaatgttacatgtggtagtggacgtggtggtttacccaccactgcttggattagttctgca

SEQ ID NO: 81923 - DNA, 349 bp, Glycine max
tgtatttgcacagtccagaggaagctcgccaattgagaaggaaagctctctctcgtattgaatggctgcaaaaagctgatgtgcctaccatagcacagattgaagagttccattcgatgcagaggatgatgaatgctcctgattcaaatgataatattgatttactgttgagcattgatttgttgggtttacaaggagcaggtaaagcttttccaaacaaaattgtttttgatgaattcttgtgttggctaacacacaagaattctttgatggaaattttccagtggattcttggttaccaatttttgtgaaattgctttatcctgtaagtcaattaccttcagaagct

SEQ ID NO: 81924 - DNA, 107 bp, Glycine max
tggttaccaatttttgtgaattgtctctatcctgtaagtcaattaccttcagaagctgtcgttgtaaatgttacatgtggtagtggacgtggtggtttaccccccac

SEQ ID NO: 81925 - DNA, 400 bp, Glycine max
ggaaaaagttgtgttgaaattttcacaagaggaatttcttacagcttggtcaactcaggtgcgtcccgcaacgactctgttggctgatgggtgcccatatttgtatgctatggtgcatgatagttcagtgtctacaataccaggtgattttgtcattggtgttaagttgacaaccataaacaatatgtgtgcatatgggctcaatcctggtatttcaggttctcgtcttttgggcaccattcctcagtccatttcacagcaaactgtttggaatcaaatggcaacagtgagaacaccattgaattttgattctagcaagcagagcttttgtcaattttctattgaccttctcggtggaggaattttagtggacaaaactggagattggatcacacttata

SEQ ID NO: 81926 - DNA, 248 bp, Glycine max
tcctgattcaaatgataatattgatctactgttgagcattgatttgttgggtttacaaggagcaggtaaagcttttccaaacaagattgtttttgatgataagcttgtgttggctaacacacaagaattctttgatggaaattttccagtggattcttggttaccaatttttgtgaattgtctctatcctgtaagtcaattaccttcagaagctgtcggtgtaaatgttacatgtggtagtggacgtg

SEQ ID NO: 81927 - DNA, 204 bp, Glycine max
cgctctcttatttcatggctaaactccattatgtaaaggctgaaacactctggcttagggcataacaatagctgataacgaacggcatgaaagttactgaaagcttggttatcatggtttattttcagtttcctctgacatgattcttttcattctataattatttttgctttaccttttttttattcgtgggtttccatcaag

SEQ ID NO: 81928 - DNA, 328 bp, Glycine max
ctttttctcttgcggctagggttttagcgcagcttcttctagatttaaggaagatgggtaaggaaaaggttcacatcagtattgtggtcattggccatgtcgactctgggaaatccactaccactggtcacctgatttacaagcttggaggcattgacaagcgtgttattgagaggtttgagaaggaagctgctgagatgaacaagaggtctttcaagtatgcctgggtgctggacaaacttaaggctgagcgtgaaagacgaatcaccattgatattgctttgtggaagtttgaaacaacaaagtattattgcacagttaattgatg

SEQ ID NO: 81929 - DNA, 400 bp, Glycine max
ctctgttggctgatgggtgtccatatctgtatgctatggtgcatgatagttcagtgtctacaataccaggtgattttgtcattggtgttaagttgacaaccataaacaatatgtgtgcatatgggctcaatcctggtatttcaggttctcgtcttttgggcaccattcctcagtctatttcacagcaaactgtttggaatcaaatggcaacagtgagaacaccattgaattttgattctagcaagcagagcttttgtcaattttctattgaccttctcggtggaggaattttagtggacaaaactggagattggatcacacttatacaaaattctccaattagtaacttgttgagagttgctgcttggaagaaaggctgtttaatggttaaagatgtgat

SEQ ID NO: 81930 - DNA, 345 bp, Glycine max
gtgattgttgtgactcgttcttcttcgtcgttatcttcttcttttgttgtttgtgtgtttgttttttctctcacctgaaaatgtcttgctgcggtggtaactgtggttgcggaagcgcctgcaagtgcggcaacggctgcggaggctgcaagatgtacccagacttgagctacaccgagtcaaccaccaccgagaccttggtcatgggagtggcaccagttaaggctcaattcgagagtgctgaaatgggtgttcccgctgagaacgatggctgcaaatgtggagctaactgcacctgcaacccctgcacttgcaagtgaggtgttggagagctaaagcttcaag

SEQ ID NO: 81931 - DNA, 398 bp, Glycine max
ctcgagccgtgcattggcctgctggccaccggcggctacaggagacaccagcgcatgatacatcaacaaccccctccgcgcgaacttttcccctgggagcacttcccgagattaaacggctattacaatggcctgcgcaccctcgtctcctacaaggactatgttcctgagcagacatatgtgaaagctgacgccgaggcccctctcgacacgtacccctcgactacccagaaggccaaggctcacaagggccctgagccgtcgccctccgcccgcccgttcccattcaacccctaccctgccttcagctcggccgagtatctgaaggaatatcatcctgtggaagagtgctatctggacgagggtctgaaaaccccgaccccggacatctacgcgta

SEQ ID NO: 81932 - DNA, 346 bp, Glycine max
ggtttgtgttgggaagttctttggctcatttcttcaaccagtttcctgtggggatcttaggggtgttgctgttgtttgctggggttgaactagccatggcttctagggacataaatactaaggaagattcgtttgttatgcttctttgtactgcggattcgttggtggggtccagagctgctcttggattcttgtgtgggatgattgtttatgggcttcttaagctcatggattggaccaatggtaagccgattaatgctatttgaaagcatgatatgccctgatacagcaagttttgaagcaaaaatattggacttaattataataaggataatactatatatta

SEQ ID NO: 81933 - DNA, 384 bp, Glycine max
ttcctttgaggaagtttctttaagtgcagcacttaatggtgttgagggtttggactatatggaaagaattcctcttgccacatctgagggttttcctcatgtgctttcacgcaaaaatggtgaaaaaggcaaaagaagatttgtttctggggatggtgaagagatgacattgattccgggaaccagtgttgaagaggcttacaacaagctaatagttgaacttgagaaaagtgttcctacattggttggcattgaatgtcccaaggatgagaaacttcctcgtcgcaaaatttttgacaaacctaagacgcgctgcttcactattctccctatggagtttaatcttgtggtccgtcaaaagtttttaaattttgtgaggttcat

SEQ ID NO: 81934 - DNA, 291 bp, Glycine max
ctatttgcatctcataacagagagctgagaaaggaagaaaaaagcgtgtgtcagagatacttaacaatggttgtagaagatacccaaaagtcagtcattacggatgaccaataccttagcaggttcttctgtgacatcaacattttttacgatctactattttcttgaattgtttgattttttttttttttttctttttatttttttttatttttaatatttatattattttatttttttgttcttatattttatttattattttttttttttttcttttgttttttctta

SEQ ID NO: 81935 - DNA, 396 bp, Glycine max
ggcaacagtgagaacaccattgaattttgattctagcaagcagagcttttgtcaattttctattgaccttctcggtggaggaattttagtggacaaaactggagattggatcacacttatacaaaattctccaattagtaacttgttgagagttgctgcttggaagaaaggttgtttaatggtcaagattgtgatgtctgggaatgcagcagtcaaaaggagtgattgggcctcattggtacaagtgtttttaacaaacagcaacagtacagagcattttgatgcatgtaagtggacaaaatcagaaccacattcctgggaaataatctttccaatagaggtatgtggtcctaataatggttttgaaatgtggagttctgagtgggcaaatcaaac

SEQ ID NO: 81936 - DNA, 82 bp, Glycine max
ccttttttgaaaaacaagttcgggttaaaatgctcgtctattggagatattggtctgtaatatatggtgtccgtattttctc

SEQ ID NO: 81937 - DNA, 340 bp, Glycine max
acgaaatattttattttatgatcaaggatcagaatcgttggatcgagttgaggtagatggcactagtctctggaggaagttcaacactgaaccctaacgcctctctatacattcctattgtgttccgtcatgtggatgattgttattctgaatggaggcagctggtgacttcacttacattgttctatgactactgtctaaaactgcattacgttgattgattccttttatggctaggatggttttgattgcattgatgtggtagatttgctttctgattcgttttgatttttatgctggttaatatcttttagaagagttaattattttttttgaatac

SEQ ID NO: 81938 - DNA, 78 bp, Glycine max
gctctgcctatttgaaaatttacacacttcacacatcattacgataattaaaagaggtgtgaagtgtgtgttatttta

SEQ ID NO: 81939 - DNA, 308 bp, Glycine max
aggacgcatgcacgcgcacgtaagctcggaattgggctcgagccaataaatttttgtacttttctccaaaccaggctccagggcgagcgctgaaactgcttgggatactacaacttaggtaaacaatgatcatggagagaatggcggatatggacatagtcaaacgtgcattcaagactttcctgaacaaatttaatcttccaaaaacttttggtgaaaacaaaacttttgtaaaaggaaaggttccttcaaaggtgacagatccaaggtatccaacatttataaccttgataaaggaagatggacag

SEQ ID NO: 81940 - DNA, 425 bp, Glycine max
gaagaagagtttgaagagtacattagagacgtggaaaagcggctcggaagagagattgaaagtggcagaggaaacgcaagatgcctgaggttgtcgcttgacaagattgaaatgtcgcaccgcagcctattctggtatctggtaagtataatcccgggctctacaaatgcgatatttatacaaggcctgcagtgtgtcttcgtggttgactcgatagcgtccgcccgtcttctgtattacaacttcgactatcaccgcactcctcgtcgtcactacttttcagtattcccgattcgcccgcacaatttgttcgctaatactcgttctccatccagtaagattacttactggcaccggccacatacagcgaaaacgaaacttcccatcctattcatccacggcattggcattgggctctatccata

SEQ ID NO: 81941 - DNA, 177 bp, Glycine max
ggacaacagctgaagaaggacaggaaggaccagaaaaagagggatgggagacagatcgagagggaaataagaaacacacgacgcccaaggtgcccgctagacaaaaaaaaatgtctaagcgggacataataggatgaggaaggattgacgggcgatgcagagacaattaaagaagga

SEQ ID NO: 81942 - DNA, 455 bp, Glycine max
ggtggaggaattttagtggacaaaactggagattggatcacacttatacaaaattctccaattagtaacttgttgagagttgctgcttggaagaaaggttgtttaatggtcaagattgtgatgtctgggaatgcagcagtcaaaaggagtgattgggcctcattggtacaagtgtttttaacaaacagcaacagtacagagcattttgatgcatgtaagtggacaaaatcagaaccacattcctgggaattaatcttcccaatagaggtatgtggtcctaataatggttttgaaatgtggagttctgagtgggcaaatcaaacttcatggcatttgagtttccttattgacaatcccaaacagtctacagtttttgatattctcttgggaatctctcaagattttgaaattgctggtaatactcttatgccagctttttctgttccacaggctac

SEQ ID NO: 81943 - DNA, 196 bp, Glycine max
cttccttagcttgggattcggcttgaggaaaggttccaattaatttttggcccttgtccttaacctgggttccaggccaccctgttcctgtttggcttcctccatgggggaattctttgtttttggagaaattgggggttaaggccttagtcaaccagcctttcaggcctttccagaccaatttcaatcagccaaa

SEQ ID NO: 81944 - DNA, 434 bp, Glycine max
attttctcaagagaaactttaagcagatgtctaatgttttgtgggtggctcctgaagacaaggcgagtttatggtcacaacttcattatgtttcgtgtaataatctggaaatgcaagaagcttatcttgtcaatctcgtaaatgtgttacgagaactgtatttgcacagtccagaggaagctcgccaattgagaaggaaagctctctctcgtattgaatggctgcaaaaagctgatgtgcctaccatagcacagattgaagagttccattcgatgcagaggatgatgaatgctcctgattcaaatgataatattgatctactgttgagcattgatttgttgggtttacaaggagcaggcaaagcttttccaaacaagaatgtttttgatgataagcttgtgttggctaacacacaagaattctttgatggaaat

SEQ ID NO: 81945 - DNA, 434 bp, Glycine max
cagaaatgataaacagtctttgtggtggtgatgaaaaattgatgcgtgaaaggacacacctgctgttggcttgttgttcaaggatggcaatttgtaagaaagatgtttggagagttgaatgtggaatcccttctggatttccgctcacagttatttgtaatagcatttttaatgagatgctcattagatatagctatgaaaaattactgcgccaggctaaagctccaagtatgtttttacaatccttcaaaaattttgtttctttgtgtgtgtatggtgatgataacttaattagtgttcatgaatatgtcaagccttactttagtggttctaaattgaaaagctttctagctggtcataatatcaccattactgatggtattgacaaaactagtgcaactttgcaatttagaaagttagcagattgtgatttt

SEQ ID NO: 81946 - DNA, 333 bp, Glycine max
ctcgagccgaatcggctcgagaaacaaatattattattcaatagaaaagaaagatgagtccaacatgggtttttgtgttaggtgttgcagcaatgttggtggttgtgagtggacaatcatcagtgaagcctttggtgaagacagtgtaggggaagaaggtgtgtgacaaagggtgggagtgtataggatgttctgtattttgcttcgttgtgactttttttgtcttctttcatatatatctttttgagatcttttttgttttggttaattctatggttattctttttgttggtttttggttctttcttttttttccccaggtggtttttcttt

SEQ ID NO: 81947 - DNA, 239 bp, Glycine max
  unsure (1)..(239): unsure at all n locations
cagaatgtaacagatatagattatgaaatttgaggtggtgtcatgttgtccaaacttgatgtttgcacgcgcgtgtatgtgcgtgcgtgtgggtatatataagtggcatgtttaatgcaagcattataggaaataatcttggtgatagatcatcaagattgttacctttcttagggttatgagttgtatataggaaaaattttctgatgcttatataaattttccaggattacccanna

SEQ ID NO: 81948 - DNA, 449 bp, Glycine max
gtgtgtgtatggtgatgataacttaattagtgttcatgaatatgtcaagccttactttagtggttctaaattgaaaagctttctagctggtcataatatcaccattactgatggtattgacaaaactagtgcaactttgcaatttagaaagttagcagattgtgattttctcaagagaaactttaagcagatgtctaatgttttgtgggtggctcctgaggacaaggcgagtttatggtcacaacttcattatgtttcgtgtaataatctggaaatgcaagaagcttatcttgtcaatctcgtaaatgtgttacgagaattgtatttgcacagtccagaggaagctcgccaattgagaaggaaagctctctctcgtattgaatggctgcaaaaagctgatgtgcctaccatagcacagattgaagaagtccattcgatgcaaaggatga

SEQ ID NO: 81949 - DNA, 79 bp, Glycine max
gtccgtaagctcggaattcggttcgagcccactctcttcttcttgctattccttcctcgtcatggagtcccgagtgctg

SEQ ID NO: 81950 - DNA, 291 bp, Glycine max
  unsure (1)..(291): unsure at all n locations
ttgatttgttgggtttacaaggagcaggtaaagcttttccaaacaagattgtttttgatgataagcttgtgttggctaacacacaagaattctttgatggaaattttccagtggattcttggttaccaatttttgtgaattgtctctatcctgtaagtcaattaccttcagaagctgtcgttgtaaatgttacatgtggtagtggacgtggtggtttnnntttttttttttttttttttttttttttttttttttttttttttttttttttnttttttttttttttttttt

SEQ ID NO: 81951 - DNA, 59 bp, Glycine max
attttattcacttaaataaagcgcattactatgtgcaatgagtgtgtttaaatataaaa

SEQ ID NO: 81952 - DNA, 329 bp, Glycine max
  unsure (1)..(329): unsure at all n locations
agagtctaaaaaaaagtgtcgtttgtttttatattttgcttaggttttgggtaaaaaaagtaaaaaaagaaagtcttttttttttaaaattctttttgttgttgcaatattgtgtatgattggaaatctttaaattcgggttttccaccccatcaattcaatttaaagatatgccttcttccaaaaaaaaaaaatataattttttaanttttattatttaatttatttattatattaataaaatttttatatatataattaaaataattattattnattttaaaaaattaaatttataaaattattaaaaaaaaatgggggggcccccc

SEQ ID NO: 81953 - DNA, 338 bp, Glycine max
gtttaatggtcaagattgtgatgtctgggaatgcagcagtcaaaaggagtgattgggcctcattggtacaagtgtttttaacaaacagcaacagtacagagcattttgatgcatgtaagtggacaaaatcagaaccacattcctgggaattgatcttcccaatagaagtatgtggtcctaataatggttttgaaatgtggagttctgagtgggcaaatcaaacttcatggcatttgagtttccctattgacaatcccaaacagtctacaggttttgatattctcttgggaatctctcaagattttgaaattgctggtaatactcttatgccagctttt

SEQ ID NO: 81954 - DNA, 120 bp, Glycine max
  unsure (1)..(120): unsure at all n locations
ctcgagccgtttgagtttttgtngctgagnttgcattgggtacagtaccatttgatcacggcattgctctccatattacaactacttacaatattattgtatatcttgcttatccttatt

SEQ ID NO: 81955 - DNA, 420 bp, Glycine max
cctgctcgccgtgcaggactacaacgtgccgttattcgattggctccccgccggtgtcggacaccatccttcgccgtctccggccagctccaacgtccccgactcctccgaggtgctcaacacgccggcgtcgcctaatttttcgtcgatttcctcgtcgtcgaatgaggctacggtcaataacaactccgaacaacagagtgggaaagaattacaagaagaagaaggtggtaatggaggcagaggagataaccaagatcaagacaagactaagaaacagcttaaagcgaagaagaagaagaagaagaaccaaaagaagcaaagagaaccaagattcgcgttcatgacaaagagcgaggttgatcacctagacgatggttataagtggcgcaagtacggcccaaatagctgtgaaaaaca

SEQ ID NO: 81956 - DNA, 484 bp, Glycine max
gtgtgtgtatggtgatgttaacttaattagtgttcatgaatatgtcaagccttactttagtggttctaaattgaaaagctttctagctggtcataatatcaccattactgatggtattgacaaaactagtgcaactttgcaatttagaaagttagcagattgtgattttctcaagagaaactttaagcagatgtctaatgttttgtgggtggctcctgaggacaaggcgagtttatggtcacaacttcattatgtttcgtgtaataatctggaaatgcaagaagcttatcttgtcaatctcgtaaatgtgttacgagaatagtatttgcacagtccagaggaagctcgccaattgagaaggaaagctctctctcgtattgaatggctgcaaaaagctgatgtgcctaccatagcacagattgaagagttccattcgatgcagaagatgatgaatgctcctgattcaaacgataatattgatcta

SEQ ID NO: 81957 - DNA, 417 bp, Glycine max
tgcagattgaaccagacatgaattcaaggtttcagcttttgagtaccactaccaatggtgattttgttcaaggaaaagatctcgcaatggttaaagttaatgtagcatgtgctgctgttggcttgacatcaagttacactccaactccattgttggaatctggtttgcaaaaagacagagggttaattgtggagtattttggaaggatgtcttacgttgctcataatgttaatcagccccaagagaaagatttgttggagggaaatttttcctttgatattaaatctcgctctagattggaaaaagtttcctctacaaaagcacaatttgttagtggaaaaaccttcaaatatgatataattggtgctggttcacattcttcagaagattttcctgaaaaggaagatcaaggaaaac

SEQ ID NO: 81958 - DNA, 401 bp, Glycine max
cgccccgctttttatctttacgccctacagagttaaatcgcagcgcccgcaattactgaaaccctaacgctaccttcttgcagacatagctgagcaacgaaagctttgatcctctgacccaaaacccactacacgcattgggccgcatcggccggaccaagacccagttgggcccgccctacagctgcgacgacccaaccctaaacaaactctataagatcctaacacgatggtcatcgactaatcaaaacatggtagaagaagaagagtaagaagactaagaacctgaaaacgccaaaagcgcagatgaggaataggaagcttgtgaacaacaagaggtgcggtcaccataaaccctagaagagcatcaggatccagaaaccctgtcggctgcaaaccac

SEQ ID NO: 81959 - DNA, 423 bp, Glycine max
gagaaacatggcttccttaagctccttagtgctgctccttgcagctctaattctatcccctcaagttcttgcaaactatgagaatcccccagtgtacaagcctcccactgagaaaccaccagtttataagcccccagttgagaagcctcctgtttacaaacctccagttgaaaaccccccaatttataagcctccagtagagaagccaccagtgtacaagcccccagttgagaaacccccagtgtacaagcccccagttgaaaaaccaccagtgtacatgcccccagttgagaaaccaccagtgtacaagcccccagttgaaaaacccccagtttacaagcccccagttgaaaaacccccagtgtacaagcccccagttgaaaaaccaccagtgtacaagcccccagttgagaagcccccagt

SEQ ID NO: 81960 - DNA, 412 bp, Glycine max
agaaagttagcagattgtgattttctcaagagaaactttaagcagatgtctaatgttttgtgggtggctcctcaagacaaggcgagtttatggtcacaacttcattatgtttcgtgtaataatctggaaatgcaagaagcttatcttgtcaatctcgtaaatgtgttacgagaactgtatttgcacagtccagaggaagctcgccaattgagaaggaaagctctctctcgtattgaatggctgcaaaaagctgatgtgcctaccatagcacagattgaagagttccattcgatgcagaggatgatgaatgctcctgattcaaatgataatattgatctactgttgagcattgatttgttgggtttacaaggagcaggcatagctttttcaaacaagattgtttttgatgata

SEQ ID NO: 81961 - DNA, 412 bp, Glycine max
ttaaaagttctgtttgtctagatagttatttattcaagagttttcataagggaccatgctaaggccctaaaattatttgcttatgaaatcaagttcatttatacacacaacatacataatgttattattgcatgcaaaactcatgtctattaatccaatattatgcttgaattcatatagtatggcagaacgtttttagtttctgagattctgttgatatatattgtcattcatgtgttgattccataaatctaaatgtttaatgctatatttcaccatttttttttgaatttatatagtacaactgttagtggttgtcaacatagtcatacatgaaagaaattgtcaaatcttagctttatgttagcatttacatttcttggcctgatgattctcatctctttgatcactg

SEQ ID NO: 81962 - DNA, 422 bp, Glycine max
agtaactcgttcttcttcttttgttgttctgagtttgagtttgttttttctctcacctgaaaatgtcttgctgcggaggtaactgtggttgcggaagctcctgcaagtgcggcaacggctgcggaggctgcaagatgtacccagacttgagctacactgagtcaaccaccaccgagaccttggtcatgggagtggcacctgttaaggctcaatttgagggtgctgaaatgggtgtgcccgctgagaacgatggctgcaaatgtggaccaaactgctcctgcaacccctgcacttgcaagtgaggtgttgggagagcaagcttcaagcagagatagcccttaattaggaataatgataaactattaatgtgtagctaaaaacttatgttttatgtctgagatggttttcgtgcactctggtgt

SEQ ID NO: 81963 - DNA, 187 bp, Glycine max
gaggattccgcatgatctggaattcgtgttttctttcgcttgttcctttatcgaatcaaacaaacgaacaagcgaaagaaaattaggcatgaccctcttgttgagaatgctctgcctatatgaaaagacccacacctcttttaatagccgaaatgacgtgtgaagtgagggttattttaacataaaa

SEQ ID NO: 81964 - DNA, 245 bp, Glycine max
aaagaatgctattctcatgaatatgccaaatgctgttctttcaatgtggagatattttgttggagatctcgtctttgaagattctaagatgacttctccctacattaaatgtacagtctctttcttcatagcatttggaaatttggctgatgacaccatcaattttgaggcttttccccacaagctggtgcagtttggagagattcaggaaaaaagtgttttgataatttcccaagaggaatttt

SEQ ID NO: 81965 - DNA, 98 bp, Glycine max
aattaggcatgaccctcttgttgagtatgctctgcctatctgaaaatttccacacctcttttaattgtcgtaatgatgtgtgaagtgtgtgttatttt

SEQ ID NO: 81966 - DNA, 197 bp, Glycine max
tgacaatcccaaacagtctacagtttttgatattctcttgggaatctctcaagattttgaaattgctggtaatactcttatgccagctttttctgttccacaggctactgccagatcttctgaaaatgcggaatcctctgcatgatctggaatttatgttttctttcgcttgttcgttcgtttaattcaaataagca

SEQ ID NO: 81967 - DNA, 420 bp, Glycine max
ctttctagctggtcataatatcaccattactgatggtattgacaaaactagtgcaactttgcaatttagaaagttagcagattgtgattttctcaagagaaactttaagcagatgtctaatgttttgtgggtggctcctgaggacaaggcgagtttatggtcacaacttcattatgtttcgtgtaataatctggaaatgcaagaagcttatcttgtcaatctcgtaaatgtgttacgagaattgtatttgcacagtccagaggaagctcgccaattgagaaggaaagctctctctcgtattgaatggctgcaaaaagctgatgtgcctaccatagcacagattgaagagtttcattcgatgcagaggatgatgaatgctcctgattcaaatgataatattgatctactgctgagcattga

SEQ ID NO: 81968 - DNA, 418 bp, Glycine max
gtcatttaatccaaacccgtgttctgatgcatggagtttggaatttctgaagcgtactggatttcattgcgatatcatttgtgtcactggatggactgccaccccaatgcaggatgttcaggttacaattgattggtttatttcctctcaagaatgtgttcccaggacctattgtgttttaaatccacaaaatccttttgtgttaaataggtggatgggaaaattgactttcccccagggcacttcccgaagtgttaagagaatgcctctttctatagggggaggagctggtgcaaagaatgctattctcatgaatatgccaaatgctgttctttcaatgtggagatattttgttggagatctcggctttgaaagttctaagatgacttctccctacattaaatgtacagtctctttc

SEQ ID NO: 81969 - DNA, 336 bp, Glycine max
ggacactgttctcaggaaggagacgcggttcatgtcaaagaagccggcctcaatcataatctcgaagttggaagaagtttgtaagcagcttcgtttgaaagtaaagaagaaagatggaggcttgctcaagttggaaggttccaaagaaggcaggaaagggactttgggtgttgatgctctgatttttgagattacccttcactttctaatatgttgtacttagttagatcaacgcctgacaccttggaattccagtatgtttttttattcaggacattactccacttttttaggactttgatagttcccggcatgtcgtactaccacatttttgat

SEQ ID NO: 81970 - DNA, 418 bp, Glycine max
gaaaactgtctttcccccagggcacttcccgaagtgttaagagaatgcctctttctatagggggaggagctggtgcaaagaatgctattctcatgaatatgccaaatgctgttctttcaatgtggagatattttgttggagatctcgtctttgaagtttctaagatgacttctccctacattaaatgtacagtctctttcttcatagcatttggaaatttggctgatgacaccatcaattttgaggcttttccccacaagctggtgcagtttggagagattcaagaaaaagttgtattgaaattttcacaagaggaatttcttacagcttggtcaactcaagtgcgtcctgcaacaactctgttagctgatgggtgtccatatttgtatgctatggtgcatgatagttcagtgtctac

SEQ ID NO: 81971 - DNA, 218 bp, Glycine max
ttgatttgttgggtttacaaggagcaggtaaagcttttccaaacaagattgtttttgatgataagcttgtgttggctaacacacaagaattctttgatggaaattttccagaggattcttggttaccaatttttgagaattgtctctatcctgtaagtcaattaccttcagaagctgtcgttgtaaatgttacatgtggtagtggacgtggtggttta

SEQ ID NO: 81972 - DNA, 426 bp, Glycine max
tgaaaagctttctagctagtcataacatcaccattactgatggtattgacaaaactagtgcaactttgcaatttagaaagttagcagattgtgattttctcaagagaaactttaagcagatgtctaatgttttgtgggtggctcctgaggacaaggcgagtttatggtcacaacttcattatgtttcgtgtaataatctggaaatgcaagaagcttatcttgtcaacctcgtaaatgtgttacgagaattgtatttgcacagtccagaggaagctcgccaattgagaaggaaagctctctctcgtattgaatggctgcaaaaagctgatgtgcctaccatagcacagattgaagagttccattcgatgcagaggatgatgaatgctcctgattcaaatgataatattgatttacttgtgagcattg

SEQ ID NO: 81973 - DNA, 420 bp, Glycine max
tgccaagcaaaattgctctcttatatatgctttacatgataggatgctttacaagattcattgtctcccctagtttctgcacagcacactggtggtgagaatttaacccttcgtattttgggaggtgagagtatatgatgaagttcaaccatttcatcttaaaaataacaagtaattgctaaacttgaaggttctactgtcagtgagcaatgcgatttatagttattaaggttttagcttgatgattcaatctttgtattttattttgttggatttttcattttaaaaaaaggccacaagtgacaagtatttccaaacacatgcatgcaactcttgatgaaccttggtatgaactttctatggagcttgtatggctttgaaccaatatcgagttattcattttagtgtgagaatatttct

SEQ ID NO: 81974 - DNA, 74 bp, Glycine max
gggttgttcttgtctagcccctagatttctgtttaagggctagagtattctgtgaggcggtgataccagttttg

SEQ ID NO: 81975 - DNA, 337 bp, Glycine max
  unsure (1)..(337): unsure at all n locations
ggagagacaagcnagcaagccagcaggncgacnctagagganccccncggggaannccaannccacannnnncaagaaaaaggaggcaaaaaagggcanacaagaanaggaannannngnnnncnnannaggcccanccagaagccaaaggaaaagagaccggaannccccggggaannccaacnccacacnnncaagaaanaaggaggcaaaaacgggcaaanangaanaggaannannagnnnncnnannaggcccancccgaagccaaaggaaaagagaacggaannccncgggagaacccaannccacanncncaagagaaaaggaggcaaaa

SEQ ID NO: 81976 - DNA, 390 bp, Glycine max
gggaatgcagcagtcaaaaggagtgattgggcctcattggtacaagtgtttttaacaaacagcaacagtacagagcattttgatgcatgtaagtggacaaaatcagaaccacattcctgggaattaatcttcccaatagaggtatgtggtcctaataatggttttgaaatgtggagttctgagtgggcaaatcaaacttcatggcatttgagtttccttattgacaatcccaaacagtctacagtttttgatattctcttgggaatctctcaagattttgaaattgctggtaatactcttatgccagctttttctgttccacaggctactgccagatcttctgaaaatgcggaatcctctgcatgatctggaattcgagttttctttcgc

SEQ ID NO: 81977 - DNA, 221 bp, Glycine max
ctcaggaccagtttttttttgttatcataaagaacttggttaagaacattccttgagctcttaatttgaatttgcctataacaaggaccattacaccttggtctgtgtggcttatttttagaacttaacactagtttttcataaggataatcttaacactgcaatgtttgcttgatctgtaattgtccactccaccactatttttgttttattgacaggtc

SEQ ID NO: 81978 - DNA, 435 bp, Glycine max
cggctcgaggtttaacggctctccgttctacgcgaacagcgcccccgcttctactgtcggatttcgtcggaacaccacttcgcagcagccccctcgtccacccgtaccgctcttctccagtagcaccggaaacgtcagtcgccacaagcaccagaggaacttctcgaccggcaccatgatgcaagacaaggaaatcaacatcgctactttcgagggcgtcacgcccttcgacaccctcaacatggtcgacttcgactgggatacctacaattctgcatcgggcttcacctcgatcaacgactcgatggtcggttccatcggaactgcggccactgtgtcgcccaaggatatcttcaacgatccgctcgcgtcggctcctccctcgtctgctttcacaaacctgacgtccccctccatcaacgagtcaccttacat

SEQ ID NO: 81979 - DNA, 410 bp, Glycine max
cgtgcatctgcaaaacccaggccttgctcctcatcagcagaaaataataacaaaatttcaaatcctcctgtatctaatgaagctggagaaactgctgcccgtgaagtagaatagtgtgacagtggtaatgatgataatcatgatgtctccttgagaaggtcttccaataggaaaagaagggttgtctttgatttctcagatgaagatgaagatgaagatgatgttgtcagtttagcatcacctgatttcccaaataaacaatcatctctagattctacaccaaatgacaaaaaaacatcagagaaaaccactctgaattttgattcacaggaagaaaataaatcaacggttaaaggagagagagcaacagacccaaaagctcgcctaccactgagagaaaatgtattagc

SEQ ID NO: 81980 - DNA, 283 bp, Glycine max
cgcacacagagacagatttatttttcactatgacacggataacgggtctgttttttaagcctactcagattaggcaaataattatttctaattaaaattgcctcatataagggtacttgagttaattataaaatatttttagaaagaaaatttgactatttattaaaaaaaaaaatgagaattttaaaaagtcatcctttttttaaaaagtgtaatatattatgtgattgactcaccttaaccctctaattttatgtatttttgaaatctttcgttctttatt

SEQ ID NO: 81981 - DNA, 287 bp, Glycine max
ggcaatccattttatcttatttctcaaggttggaatgacttatgaaatatgacctcgatttccagtagtttcactgtccatacataaaaataaagaaatatgtactttgcttgaattttgtatcttttccaccaaatcatgcaagctataagttatgttcaagaaaaagtcttcgcttcaaaaaatatatatatattttttaaaatgggctgccgttgactagtgagtttgtcgaccctggaattaatttcggtccggatcctgtaggtgaactatgtttaacctat

SEQ ID NO: 81982 - DNA, 409 bp, Glycine max
ttccaatatattccattctctctgtgtatttccctacctctcccttcaagatgcagatcttcgtcaagaccctcaccggcaagaccatcacccttgaggtggaaagctctgacaccatcgacaacgtcaaggccaagatccaggacaaggaaggaatccccccggaccagcaacgtctcattttcgccggaaagcaacttgaggacggccgtacccttgctgactacaacattcagaaggagagtactcttcacctcgtcctccgtctccgtggtggcatgcagatcttcgttaagacactcaccggcaagaccataaccctagaggttgaaagctccgacaccatcgataacgtcaaggccaagatccaggacaaggagggtatccccccggaccagcaacgtcttat

SEQ ID NO: 81983 - DNA, 416 bp, Glycine max
ctcctgaggacaaggcgagtttatggtcacaacttcattatgtttcgtgtaataatctggaaatgcaagaagcttatcttgtcaatctcgtaaatgtgttacgagaattgtatttgcacagtccagaggaagctcgccaattgagaaggaaagctctctctcgtattgaatggctgcaaaaagctgatgtgcctaccatagcacagattgaagagtttcattcgatgcagaggatgatgaatgctcctgattcaaatgataatattgatctactgttgagcattgatttgttgggtttacaaggagcaggtaaagcttttccaaacaagattgtttttgatgataagcttgtgttggctaacacacaagaattctttgatggaaattttccagtggattcttggttaccaattttt

SEQ ID NO: 81984 - DNA, 431 bp, Glycine max
agttgacaaccataaacaatatgtgtgcatatgggctcaatcctggtatttcaggttctcgtcttttgggcaccattcctcagtctatttcacagcaaactgtttggaatcaaatggcaacagtgagaacaccattgaattttgattctagcaagcagagcttttgtcaattttctattgaccttctcggtggaggaattttagtggacaaaactggagattggatcacacttatacaaaattctccaattagtaacttgttgagagttgctgcttggaagaaaggctgtttaatggttaaaattgtgatgtctgggaatgcagcagtcaaaaggagtgattgggcctcattggtacaagtgtttttaacaaacagcaacagtacagagcatttcgatgcatgtaaggggacaaaatcggtaccacatttc

SEQ ID NO: 81985 - DNA, 426 bp, Glycine max
ctcgagccgattcggctcgagctcctccctcctccggcgttgctttcacgtcgcttcgctggccgaaaatatggcaatcaggatgggaggcaacagggtccctgttcgcactccatttagagatgggggagctccaattctgagaatctgtgactgctcccttttgagcagcggctcccccatctcaagcaatcatctcagcagcctttagatggattttttgttttgcaatctcgttctttttgcatatcacttaccggcgttcatcaccactctacgcccttgatttaagtgcgcacccgagaatgatacctttcgtttttgttttaatccatctggaggtaaggggcaggaaccaagacggcgcatccacatgatggaatggccgtcgagttcttctaacgccccccttttttggttttcaca

SEQ ID NO: 81986 - DNA, 433 bp, Glycine max
attgttgcagaattggtgtactaaacatattctcatgtcattagtccttatatttatttagtgttaatttatgtgttattgcttcttttcattttttattgcttgtgtttatggattgatcacccatatatacatgttttatagtttaaaatggcattgtgaaatactttttaattaattaagaagtggtttatcttgacttgttaaggaattaggaattaagttaatcaacttaagctctttcatgtgagaaatcatgattagatacaaagatcatgaccagatgggtcagccatgagtagactcagcaagtttctgattttggaagattggttgttatcatgaccaaaaatagttcacaatgggatttgaagtgagggttatcatattatcattgtgcaattatgttgcgagacaaggagacttattgagt

SEQ ID NO: 81987 - DNA, 388 bp, Glycine max
attcccaatagaggtatgtggtcctaataatggttttgaaatgtggagttctgagtgggcaaatcaaacttcatggcatttgagtttccttattgacaatcccaaacagtctacagtttttgatattctcttgggaatctctcaagattttgaaattgctggtaatactcttatgccagctttttctgttccacaggctactgccagatcttctgaaaatgcggaatcctctgcatgatctggaattcgtgttttctttcgcttgttcgcttgtttaattcaataaaggaaattaggcatgaccctcttgttgagtatgctctgcctatctgaaaatttccacacctcctttaattgtcgcaatgatgtgtgaagtgtgtgttatttt

SEQ ID NO: 81988 - DNA, 404 bp, Glycine max
acaataccaggtgattttgtcattggtgttaagttgacaaccataaacaatatgtgtgcatatgggctcaatcctggtatctcaggttctcgtcttttgggcaccattcctcagtccatttcacagcaaactgtttggaatcaaatggcaacagtgagaacaccattgaattttgattctagcaagcagagcttttgtcaattttctattgaccttctcggtggaggaattttagtggacaaaactggagattggatcacacttatacaaaattctccaattagtaacttgttgagagttgctgcttggaagaaaggttgtttaatagtcaagattgtgatgtctgggaatgcagcagtcaaaaagagtgattgggccttaatggtacaagtgtttttaacaaa

SEQ ID NO: 81989 - DNA, 424 bp, Glycine max
ctatttggttccgcttcaaaatcttgaaaaccactctctctctctccctctccggccacttaaccaatccctaacggacgcaaccttctctcttcagctcctctgccggaatccgccaatttggttctgatcatcttctcacagaaattctttggcaaacgatgtaaaaacgattactttagaaaccattctaaaagtgcaagtacctatcgagtccttgagtcattaagtggaatgaatggatcaacggagaagccaataaagtatgtcctttgcactgtgcttagctcttgtgcaaaaactctgaattggcatttgggtatacaaatccatgcatacatgattcgatctggatatgaagataatctgttccttagtagtgcacttggtgatttctatgcaaaatgttttgctattctggatg

SEQ ID NO: 81990 - DNA, 84 bp, Glycine max
cataaacatgctacttaatcttattctggttcttggtcatcacctgagggtctgctcattcttccttgcaccttcttctttgaa

SEQ ID NO: 81991 - DNA, 281 bp, Glycine max
ctcttgggaatctctcaagattttgaaattgctggtaatactcttatgccagcttttttctgttccacaggctactgccagatcttctgaaaatgcggaatcctctgcatgatctggaattcgtgttttctttcgcttgttcgtttgtttaattcaataaaggaaattaggcatgaccctcttgttgagtatgctctgcctatctgaaaatttccacacctcttttaattgtcgtaatgatgtgtgaagtgtgtgttattttaaaaaaagataaatcaaaa

SEQ ID NO: 81992 - DNA, 264 bp, Glycine max
tctgtctgcttcttcactttctctcgtttcaatcgaaaccaaaacaaaaacatgggcagaaaattcttcgtcggtggcaactggaaatgcaatgggaccactgaggaggtaaagaagattgttactactttgaatgaggctaaagtccctggagaagatgtcgtagaagttgttgtgagccctccttttgtgttccttcctgttgtaaaaagtttgctgcgccctgatttccatgtttcggcacaaaactgttgggttcgcaaa

SEQ ID NO: 81993 - DNA, 433 bp, Glycine max
ccaaaactctcaaaagctcaaactcaaacggtagtttaaaaaaaaaacaaccgaaacgaaatccactctcaccatgataccgtacctagaacacttcgtgcacggaaatgacacagaatcgatgccaaacgacgacgtttcggctctcgacggagctttccacttcggagccaccgccggagccggcaaggacttcggcgggatgaaatccgctaagcctctggcggttattcgccccgccgtcgccggtgacgtggcgagggcggtgaaggcggcgacgcgcaaggcgaacctcacggtggcggcgcgaggcaacggccactccatcaatggccaggccatggcggagaacggcctcgtcctagacatgcgcgccatggaggaccacttcaccctccttttcctcgacgacgggttcctatacgtggtcgtt

SEQ ID NO: 81994 - DNA, 415 bp, Glycine max
caccattactgatggtattgacaaaactagtgcaactttgcaatttagaaagttagcagattgtgattttctcaagagaaactttaagcagatgtctaatgttttgtgggtggctcctgaggacaaggcgagtttatggtcacaacttcattatgtttcgtgtaataatctggaaatgcaagaagcttatcttgtcaatctcgtaaatgtgttacgagaattgtatttgcacagtccagaggaagctcgccaattgagaaggaaagctctctctcgtattgaatggctgcaaaaagctgatgtgcctaccatagcacagattgaagagtttcattcgatgcagaggatgatgaatgctcctgattcaaatgataatattgatctactgttgagcattgatttgttgggttacaag

SEQ ID NO: 81995 - DNA, 373 bp, Glycine max
  unsure (1)..(373): unsure at all n locations
catatttgtatgctatggtgcatgatagttcagtgtctacaaaatcacctggtattgtntnnttttgntttttttttttattttattatgttttatttttttttattattttattttttttttttttttttttttattaaattaatttatttatatatttttaatatttttgtatatatttatttttttttaattttttttttattaataatttttatattttttttttattattttgtatattttttatttttttatatttttattatatattataattttattttttaatttattttttttttttattttttttaatattaattgttgtattattttttattttttttttatttattaatttatttttttt

SEQ ID NO: 81996 - DNA, 407 bp, Glycine max
aagtttttaaattttgtgaggttcattatgaagaaaagggacaagcttagttgtcaagttggaatcaacccatactccatggaatggactggtttggccaatagattactgagtaagggcaatgatattctgtgttgcgattatgctagttttgatggtttgattaccaagcaagttatgagcaagatggcagaaatgataaacagtctttgtggtggtgatgaaaaattgatgcgtgaaaggacgcacctgctgttggcttgttgttcaaggatggcaatttgtaagaaagatgtttggagagttgaatgtggaatcccttctggatttccgctcacagttatttgcaatagcatttttaatgagatgctcattagatatagctatgaaaaattactgcgccaggc

SEQ ID NO: 81997 - DNA, 97 bp, Glycine max
aagacctggaacttcacctttctacgtacgtgtgctgttaggatgcagtgtgctttgatgatgctttgatgaatatgcagtgtgcttttttaagtct

SEQ ID NO: 81998 - DNA, 348 bp, Glycine max
aaaacataaaaaagataggggacccggaaattatattaagaaccgaaacctgaaaaaaaaaccaaatttcaaatattgggggggggcccccattttggggtttttcgcccccataaatttttcctgggcggaatccttagggcgttccctttttcatttatggggcgggtttaaagcctggggaaaataggggggggggcctttttggggggaaaattttgtttccttagaattgcgccaacttacctgtttcgggaagttaaaactgacaggccgggggccttaatgggggggccaacccccttattgtgggggggtccaattcgcgggtttggggggggaaatctt

SEQ ID NO: 81999 - DNA, 302 bp, Glycine max
gttaagagaatgcctctttctatagggggaggagctggtgcaaagaatgctattctcatgaatatgccaaatgctgttctttcaatgtggagatattttgttggagatctcgtctttgaagtttctaagatgacttctccctacattaaatgtacagtctctttcttcatagcatttggaaatttggctgatgacaccatcaattttgaggctttttcccacaagctggtacagtttggagagattcaggaaaaagttgtatttgaattttcacaagaagaatttcttacagcttggtcaac

SEQ ID NO: 82000 - DNA, 424 bp, Glycine max
agacatagaccttgacgcaccatgcacgcatacctaagactcggaattcgggtcgagccttgaggtattgtgttgtatttgaagggaccactttcattaaatgtgatgtagaaccggatagattattataccccctcaaaaaaaaaaaaaaaaaaaaaaaaaaaaaaaaaaaaaaaaaaaaaaaaaaaaaaaaaaaaaaaaaaaaaaaaaaagggggggccgccaactataaagctcttcaacccggaaaaaaaatacggaccgggacctgcaggggtacaaaattttcttataaaaaggggaataaaaactgggggaaaaaaagggaaaaaatgtttcctgtggaaaaaagatatccgttcaaaaatccaaaaaaaaaacaagccggaagaaaaaaaagaaaaacctggggggcctaaagagg

SEQ ID NO: 82001 - DNA, 261 bp, Glycine max
acgctctcacgcacgcgcacgcaagagtctgaatattgctctagggcgcgggaagagatatatatattttttgagagcacaaacacaccgtattttttccagggagaccagtgtgcacaggccgctgtcaacaaggtgttgtgcacattcgtggggcagttgattatgttgacgcagactgtgagaggggttatgctacatataccttagatccgaaataagcaagacaaaggctgaacttgtagaataaaaagagcaaga

SEQ ID NO: 82002 - DNA, 367 bp, Glycine max
gacaaaactagtgcaactttgcaatttagaaagttagcagattgtgattttctcaagagaaactttaagcagatgtctaatgttttatgggtggctcctgaggacaaggcgagtttatggtcacaacttcattatgtttcgtgcaataatctggaaatgcaagaagcttatcttgtcaatctcgtaaatgtgttacgagaattgtatttgcacagtccagaggaagctcgccaattgagaaggaaagctctctctcgtattgaatggctgcaaaaagctgatgtgcctaccatagcacagattgaagagttccattcgatgcagaagatgatgaatgctcctgattcaaatgataatattgatctac

SEQ ID NO: 82003 - DNA, 396 bp, Glycine max
ggctaaagctccaagtatgtttttacaatccttcaaaaattttgtttctttgtgtgtgtatggtgatgataacttaattagtgttcatgaatatgtcaagccttactttagtggttctaaattgaaaagctttctagctggtcataatatcaccattactgatggtattgacaaaactagtgcaactttgcaatttagaaagttagcagattgcgattttctcaagagaaactttaagcagatgtctaatgttttgtgggtggctcctgaggacaaggcgagtttatggtcacaacttcattatgtttcgtgtaataatctggaaatgcaagaagcttatcttgtcaatctcgtaaatgtgttacgagaattgtatttgcacagtccagaggaagc

SEQ ID NO: 82004 - DNA, 398 bp, Glycine max
caggaaaaagttgtattgaaattttcacaagaggaatttcttacagcttggtcaactcaggtgcgtcctgcaacaactctgttggctgatgggtgtccatatttgtatgctatggtgcatgatagttcagtgtctacaataccaggtgattttgtcattggtgttaagttgacaaccataaacaatatgtgtgcatatgggcttaatcctggtatttcaggttctcgtcttttgggcaccattcctcagtccatttcacagcaaactgtttggaatcaaatggcaacagtgagaacaccattgaattttgattctagcaagcagagcttttgtcaattttctatcgaccttctcggtggaggaattttagtggacaaaactggagattggatcacact

SEQ ID NO: 82005 - DNA, 183 bp, Glycine max
ctagagcctgcttgaatcgagccctataccatggacctgatcgaaccatacattaatcttacgctctagatgaagcatcccactgccagtggtgcttgtgcgcaaggtgaagatcatgcataggcaaagatgatgtagcatgtgctgtgtgggacatcgacgatacaaggtacatctgcaacg

SEQ ID NO: 82006 - DNA, 214 bp, Glycine max
ctcgtgcatatatttatttctaacccaaaacaattaacctgttgagaccattcattaatctaacactttaaattaaacagcccacatccaaacatgcttttgctcaacaaaaagatcatgcataggcaaaaaaaatctagcatgagctgttattgcctattcttcaaaggacacaccaactgccccaaaagaatttttttttttgaaagaaaaa

SEQ ID NO: 82007 - DNA, 306 bp, Glycine max
agtttccttattgacaatcccaaacagtctacagtttttgatattctcttgggaatttctcaagattttgaaattgctggtaatactcttatgccagctttttctgtcccacaggctactgccagatcttctgaaaatgcggaatcctctgcatgatctggaatttgtgttttctctcgcttgttcgtttgtttaattcaataaaggaaattaggcatgaccctcttgttgagtatgctctgcctatttgaaaatttccacacctcttttaattatcgtaatgatgtgtgaagtgtgtgttatttt

SEQ ID NO: 82008 - DNA, 227 bp, Glycine max
gtaatactcttatgccagctttttctgttccacaggctactgccagatcgtctgaaaatgcggaatcctctgcatgatctggaatttgtgttttctttcgcttgttcgtttgtttaattcaataaaggaaactaggcatgaccctcttgttgagtatgctctgcctatttgaaaatttccacacctcttttaattgtcgtaatgatgtgtgaagtgtgtgttatttt

SEQ ID NO: 82009 - DNA, 281 bp, Glycine max
tggagatctcgtctttgaagtttctaagatgacttctccctacattaaatgtacagtctctttcttcatagcatttggaaatttggctgatgacaccatcaattttgaggcttttccccacaagctggtgcagtttggagagattcaggaaaaagttgtattgaaattttcacaagaggaatttcttacagcttggtcaactcaggtgcgtcctgcaacaactctgttggctgatgggtgtccatatttgtatgctatggggcatgatagttcaatgtcta

SEQ ID NO: 82010 - DNA, 281 bp, Glycine max
ctctactcctttttttttatcacaaatacactcatcaagggcaggttttctcaactttctcctacatcactatatctacctattattattattttattcctcacaatatccaccatacttcatttttctatacaattaatctttctttttcctttttcaactttctttctttctttacatatcattttcttatctattcaaatcttttagttaatcttttttcttatcttacatattattatactatacatttatctctcatatcaaataaactttttatt

SEQ ID NO: 82011 - DNA, 402 bp, Glycine max
gtgtctacaataccaggtgattttgttattggtgttaagttgacaaccataaacaatatgtgtgcatatgggctcaatcctggtatttcaggttctcgtcttttgggcaccattcctcagtccatttcacagcaaactgtttggaatcaaatggcaacagtgagaacaccattgaattttgattctagcaagcagagcttttgtcaattttctattgaccttctcggtggaggaattttagtggacaaaactggagattggatcacacttatacaaaattctccaattagtaacttgttgagagttgctgcttggaagaaaggctgtttaatggtcaagattgtgatgtctgggaatgcagcagtcaaaaggagtgattgggcctcattggtacaagtgttt

SEQ ID NO: 82012 - DNA, 398 bp, Glycine max
gtcatttaatccaaacccgtgttctgatgcatggagtttggaatttctgaagcgtaccggatttcattgtgatatcatttgtgtcactggatggactgccaccccaatgcaggatgttcaggttacaattgattggtttatttcctctcaggaatgtgttcccaggacctattgtgttttaaatccacaaaatccttttgtgttaaataggtggatgggaaaactgactttccctcagggcacttcccgaagtgttaagagaatgcctctttctatagggggaggagctggtgcaaagaatgctattctcatgaatatgccaaatgctgttctttcaatgtggagatattttgttggagatctcgtctttgaagtttctaagatgacttcttcctaca

SEQ ID NO: 82013 - DNA, 182 bp, Glycine max
ggcatcgatagtgaatacgtgttatatcacaggggctatgcgcgggatacattgactcactgccgctactgtgtgtactacggttaagatagtgattgttggatgaacttctagggattcaacggatacttgattcaatacaaccgaggcatgcataatgtctatgctttgcacaatctaat

SEQ ID NO: 82014 - DNA, 211 bp, Glycine max
aaaaaaaaaaaaaaaaaaaaaaaaaaaaaaaaaaaaaaagggaagggaaaaaaaaaaaaataaaaaaaaaaaaaaaaaaaaaaaaaaaaaaaaaaaaaaaaaaacggggcggcccccaactattgagcttttctacccggaaattaattccgaaccgttacctgaagggttcccatttttccttatagggagtcgttttaaagcttggcga

SEQ ID NO: 82015 - DNA, 397 bp, Glycine max
agagattcaggaaaaagttgtgttgaaattttcacaagaggaatttcttacagcttggtcaactcaggtgcgtcccgcaacgactctgttggctgatgggtgcccatatttgtatgctatggtgcatgatagttcagtgtctacaataccaggtgattttgtcattggtgttaagttgacaaccataaacaatatgtgtgcatatgggctcaatcctggtatttcaggttctcgtcttttgggcaccattcctcagtccatttcacagcaaactgtttggaatcaaatggcaacagtgagaacaccattgaattttgattctagcaagcagcagcttttgtcaattttctattgaccttctcggtggaggaattttagtggacaaaactggagattg

SEQ ID NO: 82016 - DNA, 398 bp, Glycine max
agaaattcaggtaaattttgtgtcgaaattttcacaagaggaaggtcttacagcttggtcaactcacgtgcgtaccgcaacgactctgttggctgatgggtgcccatatttgtatgctatggtgcatgatagttcagtgtctacaataccaggtgattttgtcattggtgttaagtttacaaccataaacaatatgtgtgcatatgggctcaatcctggtatttcaggttctcgtcttttgggcaccattcctcagtccatttcacatcaaactgtttggaatcaaatggcaacagtgagaacaccattgaattttgattctagcaagcagcagcttttgtcaattttctattgaccttctctgtggaggaattttagtggacaaaactggagattgg

SEQ ID NO: 82017 - DNA, 388 bp, Glycine max
cataaacaatatgtgtgcatatgggctcaatcctggtatttcaggttctcgtcttttgggcaccattcctcagtccatttcacagcaaactgtttggaatcaaatggcaacagtgagaacaccattgaattttgattctagcaagcagagcttttgtcaattttctattgaccttctcggtggaggaattttagtggacaaaactggagattggatcacacttatacaaaattctccaattagtaacttgttgagagttgctgcttggaagaaaggctgtttaatggtcaagattgtgatgtctgggaatgcagcagtcaaaaggagtgattgggcctcattggtacaagtgtttttaacaaacagcaacagtacagagcattttgat

SEQ ID NO: 82018 - DNA, 361 bp, Glycine max
  unsure (1)..(361): unsure at all n locations
cacttaaataaagcgcataactatgtgcaatgagtgtgtttaagggtgaaaaaaaaaaaaaaaaaaaanaaaaaaaaaaaaaaaaaaaaaaaaaaaaaaaaaaaaaaaaaaaaaaaaaaaaaaaaaaannanggggaaaaggggcggccgccgacaaaggaacctcgaaaacccggaaaaaaaaaccgaaccgagccctaaaagcaacccaactttccataaagtaaaacggataaaaacacgaacaaataaaggcaaaagctgggccacggggaaaatgggaatccgccaaaaaatccacacaccaaacaagccggaagcaaaaagggtaaagcctagggggccaaagaagtaagctaac

SEQ ID NO: 82019 - DNA, 398 bp, Glycine max
aaaaggagtgattgggcctcattggtacaagtgtttgtaacaaacagcaacagtacagagcattttgatgcatgtaagtggacaaaatcggaaccacattcctgggaattgatcttcccaatagaggtatgtggtcctaataatggttttgaaatgtggagttctgagtgggcaaatcaaacttcatggcatttgagtttccttattgacaatcccaaacagtctacagtttttgatattctcttgggaatttctcaagattttgaaattgctggtaatactcttatgccagctttttctgttccacaggctactgccagatcttctgaaaatgcggaatcctctgcatgatctggaatttgtgttttctttcgcttggtcgtttgtttaattcaata

SEQ ID NO: 82020 - DNA, 169 bp, Glycine max
  unsure (1)..(169): unsure at all n locations
atgtctatagtatcgcagacgcggccccctctttttttattttttttgtaaaaagaaaaaaaataaaaaaaanaaaaanaaaacaaaaaaaaacaaaataaaaataaacaaaaaataaaaataaaaaataaaagaaacaaaaataaaaacataaaaaataacataaaaa

SEQ ID NO: 82021 - DNA, 394 bp, Glycine max
atctggaaatgcaagaagcttatcttgtcaatctcgtaaatgtgttacgagaattgtatttgcacagtccagaggaagctcgccaattgagaaggaaagctctctctcgtattgaatggctgcaaaaagctgatgtgcctaccatagcacagattgaagagttccattcgatgcagaggatgatgaatgctcctgattcaaatgacaatatcgatctactgttgagcattgatttgttgggtttacaaggagcaggtaaagcttttccaaacaagatcgtttttgatgataaacttgtgttggctaacacacaggaattctttgatggaaattttccagtggattcttggttaccaatttttgtgaattgtctttatcctgtaagtcaattacc

SEQ ID NO: 82022 - DNA, 393 bp, Glycine max
  unsure (1)..(393): unsure at all n locations
atctggaaatgctcgatgcttatcttgtcaatctcgaagaggtggacgagaattgtatttgcacagtccanaggaagctcgccaattgagaaggaaagctctctctcgtattgaatggctgcaaaaagctgatgtgcctaccatagcacagattgaagagttccattcgatgcataggatgatgaatgctcctgattcaaatgacaatatcgatctactgttgagcattgatttgttgggtttacaaggagcaggtaaagcttttccaaacaagatcgtttttgattataaacttgtgttggctaacacacaggaattctttgatggaaattttccagtggattcttggttaccaatttttgtgaattgtctttatcctgtaagtcaattacc

SEQ ID NO: 82023 - DNA, 390 bp, Glycine max
ggaaagaggacgaggttccagtcggagtcacagccacagagcgtaattctactcacgaaaatcaaagaattcactcgagctttgctcgcagacctcaccaacggacgctcaccgctcattctcatcgatcgcttcagaagctactgcaccctttccaactccaactgcttttgtgcctccgatttgccgtgcggaaaggaacttctcacgcttcgcaggaaatcccacgcccacagactagctgtcatgttgagagtgatgctgatagttcagaaacttttgcaagagaacaagcatagttccaagagagacatttattacacctatccttctgtatttttggatcagtcggtggttgaccaagcaattaatgatatatgtattcttatg

SEQ ID NO: 82024 - DNA, 397 bp, Glycine max
gtcataatatcaccattactgatggtattgacaaaactagtgcaactttgcaatttagaaagttagcagattgtgattttctcaagagaaactttaagcagatgtctaatgttttatgggtggctcctgaggacaaggcgagtttatggtcacaacttcattatgtttcgtgcaataatctggaaatgcaagaagcttatcttgtcaatctcgtaaatgtgttacgagaattgtatttgcacagtccagaggaagctcgccaattgagaaggaaagctctctctcgtattgaatggctgcaaaaagctgatgtgcctaccatagcacagattgaagagttccattcgatgcagaggatgatgaatgctcctgattcaaatgataatattgatctact

SEQ ID NO: 82025 - DNA, 306 bp, Glycine max
aaaaaaaaaaaattattttaaaaaaaaaaaaaaaaaaagggacgcagtattataaaaaaattaaaaaaaaacggcccccccccaactattaaactcttcaacccctaaattaattccttaccataacctttaatcctaccaactttccctatattaagtcttattatatctttactaaatcattttcataattttttccttttttaaatttttatacttcacaattccacacaatattactattctcaaccataaattttaaatccttgtgtccctaattagttatctaactcacattaaattctt

SEQ ID NO: 82026 - DNA, 330 bp, Glycine max
agttgctccatgatagaagctgcttagatggaccagattcaacatttcagttgaaggtccctgctaccatgcctgtggtcaaggaactctgcggactggacattgtacaaacttacttgaaatggaaaatgggcaacaagtaaaggaactcaactcactttgaatatagatcaatgatttcatttttttcttgggtgaaaaataacttgtgtttagatttcacgtatataagagacacaaaggccaggccaagactgtccagctatattgattttgaatactggtaggacatagttatgtactgtgattaggaaaaattcatatatttta

SEQ ID NO: 82027 - DNA, 62 bp, Glycine max
ttatgaactaaatgaaagaagaggccaagtttgttaagtaatttgcaaagaaacaattgttg

SEQ ID NO: 82028 - DNA, 181 bp, Glycine max
  unsure (1)..(181): unsure at all n locations
catgcacgcgtacgtaagctcggaatncnnctcgagaaaaaaactcactaatttttaaaacaaaacactctctcataggncgatggcttttaaaaactaatatacctaccataacacaaattaaaaaagatccatacaatacaataaaatcataaattctcctcattcaaaccataatatt

SEQ ID NO: 82029 - DNA, 385 bp, Glycine max
  unsure (1)..(385): unsure at all n locations
atgacgtggatggcccccgaccgaaagctcgaaattcggttggggaaaccttaggagggagaaaattccctccactcttgctttctttcggctcttcttcccaaaactctttcaaactcaaacatcacaacaaaaccatgaccaacccattacccacttaacctcaaacaacatgccatcccgacaattatccaccccatcagacacaccccatccgctgccggccacgtcatcaccaccaccaccatcaccactttctgactcctatcctcgccgccaccgtctcaacatgctcccttttcctcctccttctcctcttctgccaccgcaccctcacccgcaaacgcgctaccacctacccttcttttncggccaccacctnccc

SEQ ID NO: 82030 - DNA, 437 bp, Glycine max
gcctaacttaagtggttctaaattgaaaagctttctagctagtcataacatcaccattactgatggtattgacaaaactagtgcaactttgcaatttagaaagttagcagattgtgattttctcaagagaaactttaagcagatgtctaatgttttgtgggtggctcctgaggacaaggcgagtttatggtcacaacttcattatgtttcgtgtaataatctggaaatgcaagaagcttatcttgtcaacctcgtaaatgtgttacgagaattgtatttgcacagtccagaggaagctcgccaattgagaaagaaagctctctctcgtattgaatggctgcaaaaagctgatgtgcctaccatagcacaaaattgagagttccattcgatgcaaaggatgatgaatgctcctgattcaaatgataataatgatttac

SEQ ID NO: 82031 - DNA, 253 bp, Glycine max
agaaaaagttgtttaaaagagagcaggaagaggcgcttcctcaggaagaggaagaggaggaagaagaagaggaggaggaggaggaatctgaatccaaaactgactccaataagaatatactggaatggctattgtgaaacctgtgtttgttcccaaatcccaaagaaataccattgcggaacgtgaaccttttgaggcttaagaacttgcttttgaggataaaaggaaaagggaattggaggaaccgaggatt

SEQ ID NO: 82032 - DNA, 440 bp, Glycine max
gccagtttgatcagtcagtccaacaggtgactgactgaacagattagctgattgattaaaatccatcatgtgcagtcaaaaccaaaatgagcaacaaattaactggatgcagttttcaaaatccatcagtttaaaaaagtccaacagaaaatatttcaaaattcattcaaatacagcattgggacttgacttgtttgtgtgtttctgaccctctacctattcaacattcaaacgttattctgcttgtcaacaggttgagtcactctcttctgagaaggcaagtcttgtattcagaattgaggtatgctttctactgagaatatgatactaattcttgaaattgtgatatacttgattttcaattttcataatcaacttagcaggctgtctcaagattgctggatgagaacatgtcagcatcaagtgcagcaaatatgaat

SEQ ID NO: 82033 - DNA, 407 bp, Glycine max
gcttatcttgtcaatctcgtaaatgtgttacgagaattgtatttgcacagtccagaggaagctcgccaattgagaaggaaagctctctctcgtattgaatggctgcaaaaagctgatgtgcctaccatagcacagattgaagagttccattcgatgcagaggatgatgaatgctcctgattcaaatgataatattgatctactgttgagcattgatttgttgggtttacaaggagcaggtaaagcttttccaaacaagattgtttttgatgataagcttgtgttggctaacacacaagaattctttgatggaaattttccagtggattcttggttaccaatttttgtgaattgtctttatcctgtaagtcaattaccttcagaagctgtcgttgaaatgttacatgt

SEQ ID NO: 82034 - DNA, 381 bp, Glycine max
aagaaatttaaccggaccacagaacaaggacggatagaagaacgggagagaacatggcgttgttcatggacgaaaaagagatttggaagtgtccgaagcatccatcatagagaagacgaagcggagtttgccctacttgtcttcgagaccgtatcggaactctatgccctgactgtgctaacgtgcgcccctgttacctgctacgcaaccagctgctcctgactgttgtcgtcttcctactccttatcgcgtgtgtctggcgccagcgatagcgtctgatgcgtcaggcgcgtacacaacctgatcgagcaagagcctgcgctacgacgatcgcgctgcatggcgataccgattctcaggtcacggtcgcggatctatggc

SEQ ID NO: 82035 - DNA, 206 bp, Glycine max
accgctattatgttaaattgatcactgactgcttgtgctcgaaaaaggaactatctttagcgttatgatctgactcaaatgcattaatacgcggatctacataagtcggctataacacaaagcacaaacatgtgcgccaaaggccaaactacggccagcaaccttaaaaaggtctcctgagactggttcgaccataggctccgcca

SEQ ID NO: 82036 - DNA, 183 bp, Glycine max
agatcttctgaaaatgcggaatcctctgcatgatctggaatttgtgttttctttcgcttgttcgtttgtttaattcaataaaggaaactaggcatgaccctcttgttgagtatgctctgcctatttgaaaatttccacacctcttttaattgtcgtaatgatgtgtgaagtgtgtgttatttt

SEQ ID NO: 82037 - DNA, 145 bp, Glycine max
ctcgagccgaatcggctcgagggcattctgttaattataataacataaaagtaataaaaattcaattgattggttgtccaaacaaaaaaaaaagcttgataatcccaaactaaataaaacttcaatacaaaaaaattaaactaat

SEQ ID NO: 82038 - DNA, 440 bp, Glycine max
cgagaactgtatttgcacagtccagaggaagctcgccaattgagaaggaaagctctctctcgtattgaatggctgcaaaaagctgatgtgcctaccatagcacagattgaagagttccattcgatgcagaggatgatgaatgctcctgattcaaatgataatattgatctactgttgagcattgatttgttgggtttacaaggagcaggcaaagcttttccaaacaagattgtttttgatgataagcttgtgttggctaacacacaagaattctttgatggaaattttccagtggattcttggttaccaatttttgtgaattgtctttatcctgtaagtcaattaccttcagaagctgtcgttgtaaatgtcacatgtggtagtggacactgtggttacccacactgcttggattagttctgcagttaacaatcgctcct

SEQ ID NO: 82039 - DNA, 299 bp, Glycine max
gcatgacgtcgatgcacgcgtacgtatgctcggatttcggctcgagaattggttccctgactgaaacgtatccattctcctagtggatcgggattggaaaaatatacactacctaaaaaaaaaaaaaaaaaaaaaaaaaaaaataaaaataaaaaaataaaaaaaaaaaaaaaaaaatctgaattgagttaaatgagcatgtgcggcggtgcgattattttagactttataaaagaaggaaccgccagatgggcaaagataaattttcaacaacatcatttggtataatattatgaaaa

SEQ ID NO: 82040 - DNA, 397 bp, Glycine max
ctcgatcgcaacttcaacttcagttgtactctttctatatagagaaatgtgtcagcagcagtagtgttgcgttttgtcgttaatccgttagatagtgcatgttgatttaatattatcgattgctgatgaagaatgatgcaaaaaaaaaaaaaaaaaataaaaaaaaaaaaaaaaaaaaataataaaaaaaaaaaaaaaaaaaaataaaaaaaaaaaaaaaaaaaaccccggccgggccaaaatttgggttacctttcgccccaaaacccccatttaaactctccccttttttttttttttaaaaatttttgaaaaggggtttcaaaaaccccccccccccccgggggttttttttgggtccccaggggggcacgcccttttttggggaggccccttt

SEQ ID NO: 82041 - DNA, 286 bp, Glycine max
ctactgttgagcattgatttgttgggtttacaaggagcaggtaaagcttttccaaacaagattgtttttgatgataagcttgtattggctaacacacaagaattctttgatggaaattttccagtggattcttggttaccaatttttgtgaattgtctttatcctgtaagtcaattaccttcagaagctgtcgttgtaaatgttacatgtggtagtggacggtgtggttaacccaccactcgttggattacttcttcagttaacaatggctccttagatattaaca

SEQ ID NO: 82042 - DNA, 262 bp, Glycine max
tactaatcgatcttggatgttgctacatggctgcgagtttcggtatggatggtgatagtaggacttggatactagatctatgaccaaactcacaggtcactggcgcatgcaatctatgacgcactagcatatgctgatgaaaatcatggatcttaagcaagatatattgcctactcttaacacagagcatgccaaagaaaccacacttctagtgaatatccatagggcacaaaatggctacacacaacaatacacgattcac

SEQ ID NO: 82043 - DNA, 447 bp, Glycine max
  unsure (1)..(447): unsure at all n locations
gggatgacgaataattgagatcaataatagatcgattggtatggtggatgattaggttttgcgaagattacgtttattaacaattgggcgtcactagcaggcattggttgtaagtttctgaaaaaagttgtctgattttgtgaattggtttgctatatcctttgtatttacaatttggagaacaaattatcctaaccataaaaaaagtaaataaacattgagaacagaatataacaatgatgattccattcatattatggtcatctataaagcagattggtgcttctgtaccaagattgtgtcggaagatgactaaattactgtgtcctccatgccgttaaaactcatgaaactcttgttcatgcagtgaaattgggggatacacgttatgtattatagattatttccaggtttcattcatatctttaggttntaaaaatatttatg

SEQ ID NO: 82044 - DNA, 86 bp, Glycine max
ccgtattcttttatttttacaacatggacgaggatttgtgcatgggggctgttgaacccatgggcgaggacttttacattttcggc

SEQ ID NO: 82045 - DNA, 318 bp, Glycine max
aatctcgtaaatgtgttacgagaattgtatttgcacagtccagaggaagctcgccaattgagaaggaaagctctctctcgtattgaatggctgcaaaaagctgatgtgcctaccatagcacagattgaagagttccattcgatgcagaggatgatgaatgctcctgattcaaatgataatattgatctactgttgagcattgatttgttgggtttacaaggagcaggtaaagcttttccaaacaagattgtttttgatgataagcttgtgttggctaacacacaagaattctttgatggaaattttccagtggattct

SEQ ID NO: 82046 - DNA, 413 bp, Glycine max
ctcgagccggctatgaaaaattactgcgccaggctaaagctccaagtatgtttttacaatccttcaaaaattttgtttctttgtgtgtgtatggtgatgataacttaattagtgttcatgaatatgtcaagccttactttagtggttctaaattgaaaagctttctagctagtcataacatcaccattactgatggtattgacaaaactagtgcaactttgcaatttagaaagttagcagattgtgattttctcaagagaaactttaagcagatgtctaatgttttgtgggtggctcctgaggacaaggcgagtttatggtcacaacttcattatgtttcgtgtaataatctggaaatgcaagaagcttatcttgtcaacctcgtaaatgtgttacgagaattgtatttgcac

SEQ ID NO: 82047 - DNA, 283 bp, Glycine max
gtcaagccttactttagtggttctaaattgaaaagctttctagctggtcataatatcaccattactgatggtattgacaaaactagtgcaactttgcaatttagaaagttagcagattgtgattttctcaagagaaactttaagcagatgtctaatgttttgtgggtggctcctgaggataaggcgagtttatgggcacaacttcattatgtttcgtgtaataatctggaaatgcaagaagcttatattgtgaatctcgcaaatgtgttacacgaattgtatt

SEQ ID NO: 82048 - DNA, 408 bp, Glycine max
  unsure (1)..(408): unsure at all n locations
atataaaaaagaattgtgctgcttaatcaatgacaaccactttggggtccacttgccagagaaaatacatccatcggtagagaaaagggggttataaatttatattatacaataaaaaaaattcagcatcctttgttcaacgtttctccaagtcttccctgatctagaagttggaactcccgtttgaatctctggattaacctgaactttgttctttgcaacatatgtcatcctatccctaataatattgtgtaatattggatagtagaagcatttcaaaaatgaaaacacctaaaaaaatagctgacaaccaatcgattattgagattctaaaaattaatgcatcaaaagggacagctaagaaggttttgatgatgatgaaagcacataaanattggggggggcccc

SEQ ID NO: 82049 - DNA, 414 bp, Glycine max
attataatataatcaacatctagttcctgtcgcctaattgatgtttatattgtgcgtgaactgtgcatgtgcatagattactgattgggaattgaatttaaacattacaggagtgcctacatcctcttatgtcaaaggaaatatatttatgatctgattgctgaatccatcatgtcaacagaacagggaatttctacaccccatgattggaggttccaaactctcccatgtctggatcagactatgttcatgaccccagcatgtacatattaattgttggagctcttcaatatgcaacatatgttaggcaagaaataagccacagtttaggcatgccagttattatctcagcccctttacaatcattggaatatagtcaggcggattcttggatacttccaaagcatgatcaac

SEQ ID NO: 82050 - DNA, 312 bp, Glycine max
cgaaactggtgctgaccttctccagacccaaacgtccagcacagggacgcttgactctagactatccactatgcatgtaatcctgcagcttgatacattcatgaaatgcatgttcgctcagaccatgacctgcgccttaaaccatggaaaattcagttagctgaatctgaatttatgcatgagtaacggggatctaatgttgattgattgtgttcgaagactggctcgttttattctcgcggttatggttagttggataggctctcatctattagtactgcatcaacagcaaagcgtccacgatgatgacgc

SEQ ID NO: 82051 - DNA, 287 bp, Glycine max
agacgctcgaatttacatagactgaactcgaaagcgcaccagagtgcctccctattgttatttttcaaatacctaatctaccgtcgaacctcctctttcaagaagaaggacgccgaccgaatcgatcagctctcgccgatcacaattcgagggaaagatgcacgaggtgtgggtccatagccgaccagaccgtgatgtaaggccgagtgatcacggtcgtggtcgtgccggagttccaccggctggaggagatcgacgcctgcgcggcccactgcgaggtcaacatt

SEQ ID NO: 82052 - DNA, 236 bp, Glycine max
agatgctgcttcttaacttctccaaactcaaacgtgcaccagaggtacgctttactttaatctattcaatacacatcttaacctctagcttcatccattcattaaatagatcttcgcccagaccatgagctgtgcctgaaaccatggaaaattcagttcgctgaatctggatttatgcatgactaacggggatctaatggtgattgattttggttgaaattttgctgtttttattc

SEQ ID NO: 82053 - DNA, 73 bp, Glycine max
gttcaaggatggcaatttgtaagaaagaagttcggagagtcgaagggggaatcccttctgggtttccgctcac

SEQ ID NO: 82054 - DNA, 368 bp, Glycine max
agtatatagatcatcacttggcttcactaatacatcatagtggtggagccccactacacgcgtgaaaggttcttaggtgatgtcttggaccgcggtggttaggactatctaaggaagaaaacagtggtttataacacgcctcatgctcatgaggtggttatggccaccgattttcaaaatagtactggctcataccagacacgttgcatgcacattccactttcaaaggtacaaggatctgtccgcagctgtaagactggcagctgctttttctttattcgggctgcatgcataaacattatatgatatataacgagttcatcctgaaaggaagaactccatattaacttgagccccttttcaaatat

SEQ ID NO: 82055 - DNA, 365 bp, Glycine max
cttatactgatcaaatagctggtatcctatcacaacacagttgttcagcttaaacattagcgttacagcagcatagattacttcttgggacttgaatgtatacacctctgaagggcctacatcctcttatgtcagaggcaatatactcatgagccgctagctgtatccaacatgacaacatgaacggcaatttctacaccccatgtttggagattccaaactttaccgcgtgtgtatcagtctacattcataagcccagcaggtacttattcatcgttagagctctacactatacaacctatgccaggccagaaatcagcaccaatttaggcatgccatctattatctcagccccttgacaatca

SEQ ID NO: 82056 - DNA, 378 bp, Glycine max
cgaaactggttcttactttctccaaacccaaacgtccaccacaggtacgcttgcctctaaactatccactatgcatctaatcctctagctccatccattcattatatgcatgttcgctcagaccatggactgtgcctgaaaccatggataatccagttagctgactgtggatttatgcatgactaacggggatctaatgctgactgattttgtttgaagtttggctttttttatgctcagagttatggttcgtgggataggcttgcatctattgagatgcctaaactgaatagtgttcgcaaggacgaggcttttcatcttcgcgtcatgagctatcaattcggataaggaaggtggccgcctctgtcaaaaagaaag

SEQ ID NO: 82057 - DNA, 371 bp, Glycine max
ataaactcgttcttacttattccagacccaaactttctgcacaggttcattttaccttaaactttacaatatacatgtaatcctctagctcgatccattcattaaatggatctccgatcagaccatgatctgcgccttaaaccttgttaagatgagttagctgagtctgaatttatgcatgattaacgggaatctaatgttgattgattttgttggtaaccttgttttttttattctcgtggtcctggttagaaggaccggctgacacttacagagatgctaaaactgaatagtgttggcagtgtagaagcttgtcaactacatgtaatgaggtattaatttggatttgtaatctggatgcttctgttaaa

SEQ ID NO: 82058 - DNA, 413 bp, Glycine max
agaagatcgatcgtcactgcactttactgaaacatcatgggaaactagaccctgaacaaggttgagagctgtgagagttgagggccagagatcgaggtgtttatagacattgaccggtcggagacacgatgagctctacctgactccttcttaagaagagggcagccgtatgggaatggctacaaggacgacggtagaccaaggcaagatcatacacggtgtattaaaaaagcttcaccgagctgacagctgctatagctacacaagcttctttttctttattttctttgcatgcataaacattatatatatataacctgatcatcctgaaaggaataactttatattaacttgtcttttttttctaataactatgttataattgaaacataacttatttttatacgagattg

SEQ ID NO: 82059 - DNA, 410 bp, Glycine max
acttaatcgatcatcacttcacttcactaatacatcatggcagacgagacccagaacaagtatgagagctctgaggttgaggtccaggatcgtggtgtttttgactttctcggtaagaaaaaggatgaagaagacaagcctcatcctcaggaggaggtcatcgccaccgagtttcaaaaagtcactgtctcagaccaaggagagaacaagcacagcctcttagaaaagcttcaccgatctgacagcagctctagctctgtaagcttcttttcctttattttctttgcatgcataaacattatatatatataacttgttcatcctgaaaggaataactttatattaacttgtcttttttttttaatatttattttataatttaaacaaaacttaattttatacgagattgt

SEQ ID NO: 82060 - DNA, 384 bp, Glycine max
gtttaatgacttagggcctttggccggaggggctatccaaaaaagatgaaaatgtgtcaatgtgaatctgctgaggcgctatctcattctcatacaaaggctatccttatagttggttatatgagcaacccaatagggaagacttatacatttcagacagcggagacgagcagcctccgacactgaaagccattacactcacgagcgatgacaagtctgtcataatagagctggatccaaaagcacaagcgctggcaggcaagatgttgcaagatgctctcttatactggctactactcgcatgctgacaccagccgttcttgaaaagctccacgaactccgtctacatgcgcaggtcaacatccatctccctgcgcaccgtcg

SEQ ID NO: 82061 - DNA, 272 bp, Glycine max
cttgaaccgaacatgattgcggtatagttatacttaatgggaggggagacccactccatgtttgagagctctataggtgaggtccagcatcgaggtgtgttactccttctcacgacgataacgggtgataaatactagccttatactcacgcaggggtcatcaccaccgtgttgcacgaagtgactgccgcaaaccaaggagagatctagctcatcgtcttagataacctgcaacactctgactgccagctgtctgtgtcggagattctttc

SEQ ID NO: 82062 - DNA, 75 bp, Glycine max
agagctttggccgcccattgcccccgtccgtaagctcggatttcggctcgagcgtttcaagatggggtattgctc

SEQ ID NO: 82063 - DNA, 252 bp, Glycine max
  unsure (1)..(252): unsure at all n locations
cttatactaatctatttactaggnnactaacacatcacagaaagcgagacccaactattacttaacatcactttagattacctcctgcaacttgaatctttacaccaactaaagactttcatccttttataacacaagcattatactcatgaactcgcttagtactatccatcatgtacaaattaatcgctatttccacaccccatatcttgacattctaatccttaaccttataatatcagactacacctc

SEQ ID NO: 82064 - DNA, 412 bp, Glycine max
agattatgccgctagctggcgccatacgctatattttaccacaggtacgcatgacttaaagctcatgaatatacatctgacttctgtagcgacatccagtcattaaatgtatcaggagctaagaccatgccatgagccttaaaccatggattactcaggcagcggagtgggaatttatgcatgaggaacggggatctgaagctgattgattccgttgaaagcctgaggtgaagatcatagacgttacagctggtggcaatggggtcacttacttaaagatgggacaccgattactgtggatgaggctgcggctgttctcctgactgttatgagctttaattttgcagatcagaaatgcggcgtggcggttctccagtaccagcatgagtatactggtatcagctaccacatt

SEQ ID NO: 82065 - DNA, 338 bp, Glycine max
gcttaatcgatcatgatgtcactacacttatacatcatgggagacgagaccctttacatggttgagagctctggaggcgtggtccagcaccgcggtttttgtctctttctcgaaacgtaactggatgtaaaatacaagccttatgcgcaggaagaggtcatcgtcgcggagtttcaataagtgactagtctcagtccaaggagcgatcaagctcatcctcttagataaagcttcaccgatctgacagcaggtctagctctgcaagcttgttttcatttattttcttcgattgcataaacatgagagctatctgacttgatcaccctgaaagggataac

SEQ ID NO: 82066 - DNA, 373 bp, Glycine max
cacaacttcattatgtttcgtgtaataatctggaaatgcaagaagcttatcttgtcaacctcgtaaatgtgttacgagaattgtatttgcacagtccagaggaagctcgccaattgagaaggaaagctctctctcgtattgaatggctgcaaaaagctgatgtgcctaccatagcacagattgaagagttccattcgatgcagaggatgatgaatgctcctgattcaaatgataatattgatttactgttgagcattgatttgttgggtttacaaggagcaggtaaagcttttccaaacaaaattgtttttgatgataagcttgtgttggctaacacacaagaattctttgatggaaattttccagtggattc

SEQ ID NO: 82067 - DNA, 113 bp, Glycine max
gctataattctgcatcgaacatgaatccgtttttggtaccccatcttagagaataatggggtttgatcagctcatgaaccgaattcttcaatacgatccaattttcatagatt

SEQ ID NO: 82068 - DNA, 413 bp, Glycine max
ggaggattcctttgaggaagtttctttaagtgcagcacttaatggtgttgagggtttggactatatggaaagaattcctcttgccacatctgagggttttcctcatgtgctttcacgcaaaaatggtgaaaaaggcaaaagaagatttgtttctggggatggtgaagagatgacattgattccgggaaccagtgttgaagaggcttacaacaagctaatagttgaacttgagaaaagtgttcctacattggttggcattgaatgtcccaaggatgagaaacttcctcgtcgcaaaatttttgacaaacctaagacgcgctgcttcactattctccctatggagtttaatcttgtggtccgtcaaaagtttttaaattttgtgaggttcattatgaagaaaagggacaagctta

SEQ ID NO: 82069 - DNA, 132 bp, Glycine max
agctgaccccggtttatggcgccttatgtttgagccaaccggcggagatccctaggcaagacgggaagtcgacgcggcctaccactccgtcgaccacaacctgaagttcggtgaccccgtcgctgatccagg

SEQ ID NO: 82070 - DNA, 379 bp, Glycine max
actagaaacagtgtgatgaaaatgaaggtccttgttttcttcggtgctacaattttggtagcatggcaatgccatgcgtacgatatgttccctctccgaatgaacactggctatggtgcccgtactccagaggagaaatgcgcaagttggatgcttgctttggaaacacacaacatttttggcttttagaccattcctgaagagtgcgttgaagccacaaaggaatacatccatggcgaacaatatagatcagactccaaaacaggttaccaacaagcttacttttatgccagaagacctgaagtccattccaaggacacatttgtgttcagtatagatggcaccgtactctctaatattccatactacaaaaaacatg

SEQ ID NO: 82071 - DNA, 161 bp, Glycine max
gtaagctcggaattcgtctcgagcgagttgttcccatcttttttttcgtaccaatcaaatcacactgagggatggtgttgagaaactctaaaccccaattttggagagatcgagatcgatcgaacatggatgaggagttcgacgtgatcgtattaggcacg

SEQ ID NO: 82072 - DNA, 413 bp, Glycine max
gttcccaggacttattgagttttaaatccacaaaatccttttgtgttgaataggtggatggggaaactgactttcccccagggcacttcccgaagtgttaagagaatgcctctttctatagggggaggagctggtgcaaagaatgctattctcatgaatatgccaaatgctgttctttcaatgtggagatattttgttggagatctcgtctttgaagtttctaagatgacttctccctacattaaatgtacagtctctttcttcatagcatttggaaatttggctgatgacaccatcaattttgaggcttttccccacaagctggtgcagtttggagagattcaggaaaaagttgtattgaaattttcacaagaggaatttcttacagcttggtcaactcatgtgcgtcctgc

SEQ ID NO: 82073 - DNA, 146 bp, Glycine max
ggtctagagcgcgagcgtgcgctcttattattcttgtcttgagaggtaaccgccctcattggtcataggcctgagggtgaagtcaaggaacaaagtgtgtttctatttctcaattgcagagcggaagttgacaacgagacttttgc

SEQ ID NO: 82074 - DNA, 362 bp, Glycine max
  unsure (1)..(362): unsure at all n locations
aagctcggaattcgnctcgaggcgttttaacctccatttctctgcccgaaagcgccggctgggggatgaatcattcccctctttgtgacggccagctccgcctggccaagaaggcgctctacgtcctcgtagccgacatagctgaacgacgacagcaacgccgtcgccaagggtaccgaacgcacccgctccttcgggcgcctagccatatacaccaacaccacttaatacaagtcactagcgtggagcatggccaagaactggtccgtggctaagcaatacccacgcgatgatgtcgaatctgacggtgccacgaggcgcggagtccttaggattggcgcaacccatgttcatgatgagca

SEQ ID NO: 82075 - DNA, 404 bp, Glycine max
cagtttcatttccaaatagcattccttcagcaggagagagaatctataagctttttgctcatagcctcacaagcacattgcttcatctttttcccactgttagttggtttgtattgatttctgggtcagtgtagctttttttttttttttccttttagcacgagtttggtcaagtttccagtgaatttgttaggtgtgtggggggtatagagattatcgagctgccatggatctggacagtgctgctgcttttgagggctacttggtcctcgtgaagatcaaagctgctgaagatatggagtgcgtgaaccatcactctgacagaatgccatacatgacactcccattgtctgattcacacacacgcaagcagctggttgaatctttgcatgtgagggggattc

SEQ ID NO: 82076 - DNA, 123 bp, Glycine max
atcacaatgaatgtcaattccctccttcataatttgtttaaacggtgtcatttcttttatattttgaaattttgttaactttgttgttgaaattttattctaatgaatttgcatggtttctca

SEQ ID NO: 82077 - DNA, 213 bp, Glycine max
ggctccaggcaagcaagatgtgggaatgcacttacgcgaggtagaatggtccatggagatctgaatgcacagagctgggggttcctgcagcccgagggcgccatttttactagggatgaggaggtgccaacttatgcacaccctggtggttgctaccggaccgggacctgccaacacggcggctacctagattgcggtgcttggggaggaacg

SEQ ID NO: 82078 - DNA, 381 bp, Glycine max
gttgcatagaagtatttaatttataagcagagcttacaaaatatttgaagtgcaatcaagttaagtctaatgctatgaggagtttgtgaacatgttactgaacttcagttccatcatgtttaatctttttccattcagtttaagactaacatacaaattaattttagttaatcttctatttagcccgtttgcttatatataaacacaattgtctccacatcgttggagttttgatctattattgcatctactggatattcaattctgaccaaatctataacaatttctatcacttggagggtggggggcttggtggaggagaaagggtttccggaatggctgcacattccccaactttgggatattaaaacgtgggggggt

SEQ ID NO: 82079 - DNA, 418 bp, Glycine max
gataaaatcagcagaatagaagtaaaaagaaactagatacagagtgaataagaaagaaaacaggcacaagaaataaaaagtagctgagaaaaaataagacgtagagacaatagaaagaaatgaaatgaggtgaagacactgggaattagacacaaatgagtgataaatatcttgaaaagagggtgtaaaggaaagtacggtaagtatcacataaagcaaacgagcaacaaaataaataattaaagataaaaatttttaaccggaattgaataaaagacattaaacaaatagaagaaaaaagacaagaagtgtttaaaactgacgtcaaacgaaaaagatgaacaaggaaaaggtaataaagaaaataaaagggagaagtaaaaatataaaaaagaaatttctaaaaaattaaggatta

SEQ ID NO: 82080 - DNA, 413 bp, Glycine max
  unsure (1)..(413): unsure at all n locations
aaacactccttcaaaatcatatcaccggagaagagtttctaatggttctttattataccttgtatttgtcttatgacccatatgattagtttttccagcgtggcgccgngacattgcattgagatgaggtgaagactctgggagttagacacatatgagtgataaatatctcgcaaagagggtgtaaaggaaagtacggtaagtatcacataaagcaaacgagcaacaaaataaataattaaagataaaaagttttaaccggaattgaataaaagacattaaacacatagaagaaacaagacaagacgtgcctaaaactgacgtcaaacgaaaaagatgaacatggaaacgtcaataaagaaaataaaaggaagaagtaaaaatttaaaaaagaattttctaaaaaattaaga

SEQ ID NO: 82081 - DNA, 116 bp, Glycine max
tctttgtgtctcttatagttgctgttttttgagggtgctgcgtactctcaaagggtggcgatttttaggctcccagaggttttgggtgtgaaaggtgtgttttaatgggccctatt

SEQ ID NO: 82082 - DNA, 380 bp, Glycine max
atttcaggttctcgtcttttgggcaccattcctcagtctatttcacagcaaactgtttggaatcaaatggcaacagtgagaacaccattgaattttgattctagcaagcagagcttttgtcaattttctattgaccttctcggtggaggaattttagtggacaaaactggagattggatcacacttatacaaaattctccaattagtaacttgttgagagttgctgcttggaagaaaggctgtttaatggttaagattgtgatgtctgggaatgcagcagtcaaaaggagtgattgggcctcattggtacaagtgtttttaacaaacagcaacagtacagagcattttgatgcatgtaagtggacaaaatcggaaccaca

SEQ ID NO: 82083 - DNA, 302 bp, Glycine max
gattatcctaagtctttgggaatagtgctgcaatggcttcaagtcaggaggaggtgacccttttgggagctactggaagcccatttgtgtgcagggttcatattgccctcaagttgaagggagttcaatacatatatgtctaataaaatttgaggaacaagagtgaactgcttctcaaatccaacccagttcacaagaaggttccagtgtctattcacaatgtgatgcccatatcagagtcttttgttattgttgaatacattgttttgacattgattaacttcctcttttctctttctttt

SEQ ID NO: 82084 - DNA, 390 bp, Glycine max
gtcgcccatcgtcgatgtcgacagcgccctcgataacatcgacaccattcgcatccccgaaccccacggtacatacttacaaacacgcggagctcgcgcagctcgtcgaatatacaaagctatgggtgtctggccatgggacatcgttcccgaagcacctcctaagatgtgggccatcaatctgctagaggatctcgcccttgtcgcagaccatgttggcagaaatccaggcgatacactgcaagaccttcaatcagagctttggaagtctcttgcgcgcgaccgcaaaccttcttatgctggaaaattgatggcgcaagatgtccacgctgcaaagaagcgattcgttcgaacaatgcctcaatcacccgatgctcaagacgacactgg

SEQ ID NO: 82085 - DNA, 377 bp, Glycine max
gtcacaacttcattatgtttcgtgtaataatctggaaatgcaagaagcttatcttgtcaacctcgtaaatgtgttacgagaattgtatttgcacagtccagaggaagctcgccaattgagaaggaaagctctctctcgtattgaatggctgcaaaaagctgatgtgcctaccatagcacagattgaagagttccattcgatgccgaggatgatgaatgctcctgattcaaatgataatattgatttactgttgagcattgatttgttgggtttacaaggagcaggtaaagcttttccaaacaaaattgtttttgatgataaagcttgtgttggctaacacacaagaattctttgatggaaattttccagtggattct

SEQ ID NO: 82086 - DNA, 338 bp, Glycine max
ctcgagccgaatcggctcgagcggctcgagcaaccttctttctttttctgtgagcctttctttcaggttcttaacttgatcagtgtgcagtgtccaaatcataagggtagttgcaaattgcaatggctaagcatgatgttgagggtggttccttctctgcaaaggactaccatgatcctcctccagcaccgttgattgatgctgaggaactcacacagtggtccttctacagggctttgattgctgagttcattgccacaatgctcttcctttacatcacagtgctcactgtgattggttacaagagccagagtgatgtaaaggcctgggggtgatgt

SEQ ID NO: 82087 - DNA, 348 bp, Glycine max
ctgaaaatggatcttgccaacatagggatggcgacctaataagggctttgaaatgtgcaggcctgagcgcgcaaatcaaactccatggcataccgaattaacttattgacaattccaatcagtctacagccccagatattctactgggaatctgtctacatcttgcaaatgctggtattactcctatgccagattgttgtggtacacacgctactgccagatctcatgaaaatgctggatcctctggaagatcccgaatgcgcggtctcttcacctagctcatgacgcgcaatccaatacaccaaagtacacgtgaccctgccgatgacgatgccctgcccattcgca

SEQ ID NO: 82088 - DNA, 308 bp, Glycine max
aaaaaaaaaaaattaatttaaaaaaaaaaaaaaaaaaaaaggggaaaaaaaaataaaaaaaataaaaaaaaaaaaaaattataaaaaaaaaaggacctccaaaaattttttggtttccctctccctgtttttttttccggcccggtttcttcatgcggaccatcttttcccttttgtggggtcgcctttcagtttgggtttcctcgctccattgtttctttctcttggatattttattccgctcatattttctctgttagctttctcccgttgcttttggtgtaatgcctgtccggttttcttttggg

SEQ ID NO: 82089 - DNA, 387 bp, Glycine max
gtttatcgtgaggagaatatgaagttgtttgttttctttgttgctgcagtagttttggtagcatggccatgccatggcgcaggctaccaaaggttccctctccgaatgaaaactggctatggtgagcgttcttcggaggtaaaatgcgcaagttttaggcttgctgtggaagcacacaacatccgagcctttaaaaccattcctgaagagtgcgttgaaccaacaaaggactacattaatggcgaacaatttagatcagactctaaaacagttaaccaacaagctttcttttatgctagtgaacgcgaagtccatcacaacgacatatttatattcggcatagataacaccgtactctctaatatcccatactatgaaaaacatgga

SEQ ID NO: 82090 - DNA, 378 bp, Glycine max
gtggtgatgaaaaattgatgcgtgaaaggacacatttgctgttggcttgttgttcaaggatggcaatttgtaagaaagatgtttggagagttgaatgtggaatcccttctggatttccgctcacagttatttgcaatagcatttttaatgagatgctcattagatatagctatgaaaaattactgcgccaggctagagctccaagtatgtttttacaatccttcaaaaattttgtttctttgtgtgtgtatggggatgataacttaattagtgttcatgaatatgtcaagccttacttttatggttctaaattgaaaagctttctagctggtcataatatcaccattactgatggtattgacaaaactagtgcaactt

SEQ ID NO: 82091 - DNA, 382 bp, Glycine max
ctagcaagcagagcttttgtcaattttctattgaccttctcggtggaggaattttagtggacaaaactggagattggatcacacttatacaaaattctccaattagtaacttgttgagagttgctgcttggaagaaaggctgtttaatggttaagattgtgatgtctggaaatgcagcagtcaaaaggagtgattgggcctcattggtacaagtctttttaacaaacagcaacagtacagagcattttgatgcttgtaagtggacaaaatcggaaccacattcctgggaattgatcttcccaatagaggtatgtggtcctaataatggttttgaaatgtggagttctgagtgggcaaatcaaacttcatggcatttgagttt

SEQ ID NO: 82092 - DNA, 373 bp, Glycine max
gagatcaaaatcgggatttgattgcagttgcagttctctatctttagtgcttattactaactattattaaggtttctttcttttgttgaaatggtctatagtaattatagttctgccaatgaatctcattgtttaatcctgactatacctttcccgtaacgcaattagcgtcaaatggtgacggggcagaaggtttattttacaaagccccccccctttatcaccatcttcattttctacctaccgcagaaaggcgattttcctgtgaaattatgcctattcctcctgctgcagctacttttaacgatgatgatttacaaaacgtccgggttgatgagacttgtcatctcgtaaatgcagatcagccacaatg

SEQ ID NO: 82093 - DNA, 382 bp, Glycine max
cgagataactagaaacagtgtgatgaaaatgaaggtccttgttttcttcgttgctacaattttggtagcatggcaatgccatgcgtacgatatgttccctctccgaatgaacactggctatggtgcccgtactccggaggtgaaatgcgcaagttggaggcttgctgtggaagcacacaacatctttggctttgagaccattcctgaagagtgcgttgaagcaacaaaggaatacatccattggcgaacaatatagatcagactccaaaacagttaaccaacaagcttacttttatgccagagaccctgaagtccatcccaaggacacatttgtgttcagtatagatggcaccgtactctctaatattccatactacaaaaa

SEQ ID NO: 82094 - DNA, 306 bp, Glycine max
  unsure (1)..(306): unsure at all n locations
tccgaacaccgaaaagttcatggaccaacaggacttcttgtccaggacagcacgtttggtcgttgtatgtcccttctatccagggtagggcataatgtgttccaagagctgaaccttaagtgagaagactggcgtaggatgtatgatagtgaacagaaccctatatatctgtnnatttgtcttcacatattccgaaccacccattttggagggtggcnnaaatccactggattctggttttgatttaatgatacccagtggagaatggccatagaagtattgatgcccataatacagtgctttatc

SEQ ID NO: 82095 - DNA, 253 bp, Glycine max
aatctctcaagattttgaaattgctggtaatactcttatgccagctttttctgttccacaggctactgccagatcttctgaaaatgcggaatcctctgcatgatctggaattcgtgttttctttcgcttgttcgtttgtttaattcaataaaggaaattaggcatgaccctcttgttgagtatgctctgcctatctgaaaatttccacacctcttttaattgtcgtaatgatgtgtgaagtgtgtgttatttt

SEQ ID NO: 82096 - DNA, 384 bp, Glycine max
ctcctctattcccttttcacttttatcttctcaaactgtggagtcattagcatcacctacagcgttttccacttcttcaatgaccaatcattgaatttgaacctcaaatccacaatcaccaagtccatctccacttccttcttgcccctcctcggcaccaccatcgtttctcatgttatcatctttttcgtttctcttttatatgcccttctcttggttcttatcatttgtggtgctatatttttcaatgtaacaacttcatactcttccctttactacttcatcgggttccttattgcacttcctttgctattttttcttatatatttgcaagttaactggaccttggtgcctgtgattgtgatcttggaatcatggttgggg

SEQ ID NO: 82097 - DNA, 96 bp, Glycine max
tctagtgactatttgttctggttggccttgcatacatatgttcgcgtgtcttaggataataatcattaatgataaatggtagttgccacgtgaaaa

SEQ ID NO: 82098 - DNA, 380 bp, Glycine max
gctaaagctccaagtatgtttttacaatctttcaaaattttgtttctttgtgtgtgtatggtgatgataacttaattagtgttcatgaatatgtcaagccttactttagtggttctaaattgaaaagctttctagctggtcataatatcaccattactgatggtattgacaaaactagtgcaactttgcaatttagaaagttagcagattgtgattttctcaagagaaactttaggcagatgtctaatgttttgtgggtggctcctgaggacaaggcgagtttatggtcacaacttcattatgtttcatgtaataatctggaaatgcaagaagcttatcttgtcaatctcgtaaatgtgttacgagaattgtatttgcac

SEQ ID NO: 82099 - DNA, 387 bp, Glycine max
ctagtttatcgtgaggagaatatgaagttgtttgttttctttgttgctgcagtagttttggtagcatggccatgccatggcgcaggctaccaaaggttccctctccgaatgaaaactggctatggtgagcgttcttcggaggtaaaatgcgcaagttttaggcttgctgtggaagcacacaacatccgagcctttaaaaccattcctgaagagtgcgttgaaccaacaaaggactacattaatggcgaacaatttagatcagactctaaaacagttaaccaacaagctttcttttatgctagtgaacgcgaagtccatcacaacgacatatttatattcggcatagataacaccgtactctctaatatcccatactatgaaaaacat

SEQ ID NO: 82100 - DNA, 352 bp, Glycine max
cagaattaaatcatgctctcctgcttgtggggtatggtacagaaaactgagcacttgtaaatttggaaacgggggttactatcccattataaaagtcaccgatcaacaagccaccaaatatgtgtgacaatggcatcggctagctgtgcccattgagcctttggaagtaattaataacaaggccaaaatttcaaggagactatctttgagctattttatctttatataagtattgtaatttctgttccctaaatcatctggttgctgcacgtgttggccccagattgagtatcttgttagtctatctacagtatctatctaaataaaggtgcgatggctctattggcatcat

SEQ ID NO: 82101 - DNA, 364 bp, Glycine max
agagattcaggaaaaagttgtattgaaattttcacaagaggaatttcttacagcttggtcaactcaggtgcgtcctgcaacaactctgttggctgatgggtgtccatatttgtatgcaatggtgcatgatagttcagtgtctacaataccaggtgattttgtcattggtgtcaagttgacaaccataaacaatatgtgtgcatatgggctcaatcctggtatttcaggttctcgtcttttgggcaccattcctcagtccatttcacagcaaactgtttggaatcaaatggcaacagtgagaacaccattgaattttgattctagcaagcagagcttttgtcagttttctattgaccttctcggt

SEQ ID NO: 82102 - DNA, 375 bp, Glycine max
aatcaaattagttcattctctttgcgcagttccctacctctcctttcaagatgcagatcttcgtcaagaccctcaccggaaagaccatcacccttgaggtggaaagctctgacaccatcgacaacgtcaaggccaagatccaggacaaggaaggaattcccccggatcagcaacgtctcatcttcgccggaaagcagctcgaggacggccgtaccctcgccgactacaacatccagaaggagtcaacccttcaaccttgtccttcgtctccgtggtggcatgcagatcttcgtcaagactctcactggcaaaaccataaccctagaggtcgaaagctctgacaccattgacaacgtcaaggccaagatccaggac

SEQ ID NO: 82103 - DNA, 202 bp, Glycine max
gaacactcttctatttgatatacgacttcgggtcagatgtaaacgttctctgtttctttctcacttctctgtttaatttcaagtacaagctggtgaaattttggattaaagctcccactctcctatctggtataggacttcttgggtagacttgtctacttctgttccttcttttactctttatttctcattgatccgcatt

SEQ ID NO: 82104 - DNA, 125 bp, Glycine max
  unsure (1)..(125): unsure at all n locations
cgttgcatgcacgcgtacgtaagctttaaatacttattttnttttttgacccttgtatttattatttttccggtacctgctgggggggcaaggggggtctattgtggggcgggattaaagctcgg

SEQ ID NO: 82105 - DNA, 375 bp, Glycine max
ctgatatttacaccatctgctctcaagactgtgaattgtggaatcctgcttgcacaaaagcaatgactatgtcatttaatccaaacccgtgttctgatgcatggagtttggaatttctgaagcgtactggatttcattgcgatatcatttgtgtcactggatggactgccaccccaatgcaggatgttcaggttacaattgattggtttatttcctctcaggaatgtgttcccaggacctattgtgttttaaatccacaaaatccttttgtgttaaataggtggatgggaaaattgactttcccccagggcacttcccgaagtgttaagagaatgcctctttctatagggggaggagctggtgcaaagaatgcta

SEQ ID NO: 82106 - DNA, 348 bp, Glycine max
gcttgttgttcaaggatggcaatttgtaagaaagatgtttggagagttgaatgtggaatcccttctggatttccgctcacagttatttgcaatagcatttttaatgagatgctcattagatatagctatgaaaaattactgcgccaggctagagctccaagcatgtttttacaatccttcaaaaattttgtttctttgtgtgtgtatggtgatgataacttaattagtgttcatgaatatgtcaagccttactttagtggttctaaattgaaaagctttctagctggtcataatatcaccattactgatggtattgacaaaacctagtgcaactttgcaatttagaaa

SEQ ID NO: 82107 - DNA, 344 bp, Glycine max
caggagttccaaccaagatgctgacggtaaattgttcggcgagaatgacagtgcataaccctgcaaccttcttcggaattcatgtcagctctaaagcagtgaatcttatgtattctgagatgacagttgcaactggtgagctgaagaagcattatctatcgagaaagagtacccgtacagtgtctgtgaacctgcaaggaagcaaggtttctctatatggtgctgatgcaagcttaactggcttggtggacaatggaaaaataccaatgactcttgtctttgaagttggatcgctagggaatattgttgggagggtggtgaggtccaaacatcgaaggcgtgtc

SEQ ID NO: 82108 - DNA, 285 bp, Glycine max
tttagctagctccactaaaaaaaaaaaaaaaaaaaaaaaaaaaaggaaaaaaaaaaaaaaaaaaaaaaaaaaaaaaaaaaaaaaaaaaaaaaaaaaaaaaaaaaaaaaaaaaaaaaggggaaaaagaacaaggaataaaaataagaacagttaataaaaagggaacaaaaaaagtccaatacaaagtgtatataaaaatttaaggctaataataaaaatagtctggactctaggaaaaaccagtttcttgaggaaatttgtttgcaaatactaatgaggaagaaa

SEQ ID NO: 82109 - DNA, 383 bp, Glycine max
tgataacttaattagtgttcatgaatatgtcaagccttactttagtggttctaaattgaaaagctttctagctggtcataatatcaccattactgatggtattgacaaaactagtgcaactttgcaatttagaaagttagcagattgtgattttctcaagagaaactttaagcagatgtctaatgttttatgggtggctcctgaggacaaggcgagtttatggtcacaacttcattatgtttcgtgcaataatctggaaatgcaagaagcttatcttgtcaatctcgtaaatgtgttacgagaattgtatttgcacagtccagaggaagctcgccaattgagaaggaaagctctctctcgtattgaatggctgcaaaaagctg

SEQ ID NO: 82110 - DNA, 384 bp, Glycine max
atttgtgtcactggatggactgccaccccaatgcaggatgttcaggttacaattgattggtttatttcctctcaggaatgtgttcccaggacctattgtgttttaaatccacaaaatccttttgtgttaaataggtggatgggaaaattgactttcccccagggcacttcccgaagtgttaagagaatgcctctttctatagggggaggagctggtgcaaagaatgctattctcatgaatatgccaaatgctgttctttcaatgtggagatattttgttggagatctcgtctttgaagtttctaagatgacttctccctacattaaatgtacagtctctttcttcatagcatttggaaatttggctgatgataccatcaatttt

SEQ ID NO: 82111 - DNA, 388 bp, Glycine max
ctcaagactgtgaattgtggaatcctgcttgcacaaaagcaatgactatgtcatttaatccaaacccgtgttctgatgcatggagtttggaatttctgaagcgtactggatttcattgcgatatcatttgtgtcactggatggactgccaccccaatgcaggatgttcaggttacaattgattggtttatttcctctcaggaatgtgttcccaggacctattgtgttttaaatccacaaaatccttttgtgttaaataggtggatgggaaaattgactttcccccagggcacttcccgaagtgttaagagaatgcctctttctatagggggaggagctggtgcaaagaatgctattctcatgaatatgccaaatgctgttctttcaat

SEQ ID NO: 82112 - DNA, 389 bp, Glycine max
aacgtgagaaacatggcttccttaagctccttagtgctgctccttgcagctctaattctatcccctcaagttcttgcaaactatgagaatcccccagtgtacaagcctcccactgagaaaccaccagtttataagcccccagttgagaagcctcctgtttacaaacctccagttgaaaaccccccaatttataagcctccagtagagaagccaccagtgtacaagcccccagttgagaaacccccagtgtacaagcccccagttgaaaaaccaccagtgtacaagcccccagttgagaaaccaccagtgtacaagcccccagttgaaaaacccccagtttacaagcccccagttgaaaaacccccagtgtacaagcccccagttgaaaa

SEQ ID NO: 82113 - DNA, 394 bp, Glycine max
tccaaatcgacgacctccgtcaccttctagtccatctcagaattctcctcatggcaatcaacctacacaagtgtcttctccaaggttggatgatgagcagaaacaggaggcagatcggcgtgcaaaatttgtatatgagctaatgattgatcatgcaccgccagctattgtaggtcttgttggtcggaaggagtacgagcaatgtgcaagggatttatattttttccttcagtcatccgttatcttgaagcagctggcttttgacatcctggagctgctgctgacatcggcatttccggagcttgataatgtatttaagcagctgcatgaagaaaagcataaatttggtgagttcagaacacagtaaatattacaattttcagacgaggcacgg

SEQ ID NO: 82114 - DNA, 382 bp, Glycine max
tagaaagttagcagattgtgattttctcaagagaaactttaagcagatgtctaatgttttgtgggtggctcctgaagacaaggcgagtttatggtcacaacttcattatgtttcgtgtaataatctggaaatgcaagaagcttatcttgtcaatctcgtaaatgtgttacgagaactgtatttgcacagtccagaggaagctcgccaattgagaaggaaagctctctctcgtattgaatggctgcaaaaagctgatgtgcctaccatagcacagattgaagagttccattcgatgcagaggatgatgaatgctcctgattcaaatgataatattgatctactgttgagcattgatttgttgggtttacaaggagcaggcaaa

SEQ ID NO: 82115 - DNA, 387 bp, Glycine max
tctctctgtgtatttccctacctctcccttcaagatgcagatcttcgtcaagaccctcaccggcaagaccatcacccttgaggtggaaagctctgacaccatcgacaacgtcaaggccaagatccaggacaaggaaggaatccccccggaccagcaacgtctcattttcgccggaaagcaacttgaggacggccgtacccttgctgactacaacattcagaaggagagtactcttcacctcgtcctccgtctccgtggtggcatgcagatcttcgttaagacactcaccggcaagaccataaccctagaggttgaaagctccgacaccatcgataacgtcaaggccaagatccaggacaaggagggtatccccccggaccagcaacg

SEQ ID NO: 82116 - DNA, 323 bp, Glycine max
gtgatgataacttaattagtgttcatgaatatgtcaagccttactttagtggttctaaattgaaaagctttctagctggtcataatatcaccattactgatggtattgacaaaactagtgcaactttgcaatttagaaagttagcagattgtgattttctcaagagaaactttaagcagatgtctaatgttttatgggtggctcctgaggacaaggcgagtttatggtcacaacttcattatgtttcgtgcaataatctggaaatgcaagaagcttatcttgtcaatctcgtaaatgtgttacgagaattgtatttgcacagt

SEQ ID NO: 82117 - DNA, 305 bp, Glycine max
acatgagggatgccctcgtaagctgattggtcgagctgggcctaaagtttaaatttggggtattatgaaaagggcagcttattgtagtgaataacatactcatggaatggactgttgccataatactggtaggcaagattttggtggatatgctagttgatggttgtaccaacaagtatgacagaggcaaagataaagctttggggggatgaaaatgagcggaagccactctgtggctgtgtcaagatgcattgtagaagagttggaagtgatgggatcctttgattcgtcaagtattgcataca

SEQ ID NO: 82118 - DNA, 384 bp, Glycine max
cttttgtgttaaataggtggatgggaaaactgactttccctcagggcacttcccgaagtgttaagagaatgcctctttctatagggggaggagctggtgcaaagaatgctattctcatgaatatgccaaatgctgttctttcaatgtggagatattttgttggagatctcgtctttgaagtttctaagatgacttctccctacattaaatgtacagtctctttcttcatagcatttggaaatttggctgatgacaccatcaattttgaggcttttccccacaagctggtgcagtttggagagattcaggaaaaagttgtgttgaaattttcacaagaggaatttcttacagcttggtcaactcaggtgcgtcccgcaacgactc

SEQ ID NO: 82119 - DNA, 273 bp, Glycine max
gtttttgatattctcttgggaatctctcaagattttgaaattgctggtaatactcttatgccagctttttctgttccacaggctactgccagatcttctgaaaatgcggaatcctctgcatgatctggaatttgtgttttctttctcttgttcgtttgtttaattcaataaaggaaattaggcatgaccctcttgttgagtatgctctgcctatttgaaaatttccacacctcttttaattgtcgtaatgatgtgtgaagtgtgtgttatttt

SEQ ID NO: 82120 - DNA, 378 bp, Glycine max
atcaaatggcaacagtgagaacaccattgaattttgattctagcaagcagagcttttgtcaattttctattgaccttctcggtggaggaattttagtggacaaaactggagattggatcacacttatacaaaattctccaattagtaacttgttgagagttgctgcttggaagaaaggttgtttaatggtcaagattgtgatgtctgggaatgcagcagtcaaaaggagtgattgggcctcattggtacaagtgtttttaacaaacagcaacagtacagagcattttgatgcatgtaagtggacaaaatcagaaccacattcctgggaattaatcttcccaatagaggtatgtggtcctaataatggttttgaaatgt

SEQ ID NO: 82121 - DNA, 372 bp, Glycine max
gaggagctggtgcaaagaatgctattctcatgaatatgccaaatgctgttctttcaatgtggagatattttgttggagatctcgtctttgaagtttctaagatgacttctccctacattaaatgtacagtctctttcttcatagcatttggaaatttggctgatgacaccatcaattttgaggcttttccccacaagctggtgcagtttggagagattcaggaaaaagttgtgttgaaattttcacaagaggaatttcttacagcttggtcaactcaggtgcgtcccgcaacgactctgttggctgatgggtgcccatatttgtatgctatggtgcatgatagttcagtgtctacaataccaggtgattttg

SEQ ID NO: 82122 - DNA, 301 bp, Glycine max
ctcacgaggagccacttatttcttcacactgcacggtgccaagtgcagacccgaggggaaattgctgacgttctccacctaacaagacaaacgcaacaactaccggtcaccttaatacaggttcgactgggtcatctaaagcgatcaggaacgttatctatacttctactactacgaccactactacttcttctggaagtgtgagcatgtacataaataccaggttgtcatggtttagcggtcggcagacttatacatatggacatgatcttacctacctctaatttgaagagcttcactt

SEQ ID NO: 82123 - DNA, 364 bp, Glycine max
gtttgggattgtcaataaggaaactcaaacagtctacagtttttgatattctcttgagagattcccaagagaatatcaaaaactgtagactgtttgggatattctcttgggaatctctcaagattttgaaattgctggtaatactcttatgccagctttttctgttccacaggctactgccagatcttctgaaaatgcggaatcctctgcatgatctggaattcgtgttttctttcgcttgttcgtttgtttaattcaataaaggaaattaggcatgaccctctcgttgagtatgctctgcctatctgaaaatttccacacctcttttaattgtcgtaatgatgtgtgaagtgtgtgttatttt

SEQ ID NO: 82124 - DNA, 390 bp, Glycine max
gtcatttaatccaaacccgtgttctgatgcatggagtttggaatttctgaagcgtaccggatttcattgtgatatcatttgtgtcactggatggactgccaccccaatgcaggatgttcaggttacaattgattggtttatttcctctcaggaatgtgttcccaggacctattgtgttttaaatccacaaaatccttttgtgttaaataggtggatgggaaaactgactttccctcagggcacttcccgaagtgttaagagaatgcctctttctatagggggaggagctggtgcaaagaatgctattctcatgaatatgccaaatgctgttctttcaatgtggagatattttggttgagatctcgtctttgaagtttctaagatgacttc

SEQ ID NO: 82125 - DNA, 385 bp, Glycine max
tgcatgctctagctgtaagttttgccaaagttgacttatcaaagagattatttattgagtctgacctattacccactgagttgtgtgtggaggagttggcagtgagcagcaatgaagagcacaaggaactgaaaactaaagaggacagtgaactagccaataggatgtctaaagaattagatttagatgatctagctgcagatcagcttacatcatctaggtccagtagcatgtgccatgctgtttctacattccccttgtgcaacaatgtgtttcacattcctgtaaactatgtcaatgctgaagctcagcaaactagctgttctagtaaaaataaagcatttgttccatgttcagatgctagtctacattctactgaagatgc

SEQ ID NO: 82126 - DNA, 56 bp, Glycine max
caaggatgtatgttgtttagtttggaataataatatgggatgaattactactgcca

SEQ ID NO: 82127 - DNA, 215 bp, Glycine max
aaaaaaaaaaaaaaaaattaaaaaaaataaaaaaaaaaaaaaaaaggaaaaaaaggaaaaaaaaaaaaaaaaaaaaaaaaaaaaaaaaaaaaaaaaaaaaaaaaaaaaaaagggggcggccccctccttttgacctcttccccccggtatttatttccggcccggtccctgaaggcttcccagttttccctttagtgagtcgttttaaagcttgg

SEQ ID NO: 82128 - DNA, 384 bp, Glycine max
gggaaaactgactttccctcagggcacttcccgaagtgttaagagaatgcctctttctatagggggaggagctggtgcaaagaatgctattctcatgaatatgccaaatgctgttctttcaatgtggagatattttgttggagatctcgtctttgaagtttctaagatgacttctccctacattaaatgtacagtctctttcttcatagcatttggaaatttggctgatgacaccatcaattttgaggcttttccccacaagctggtgcagtttggagagattcaggaaaaagttgtgttgaaattttcacaagaggaatttcttacagcttggtcaactcaggtgcgtcccgcaacgactctgttggctgatgggtgcccata

SEQ ID NO: 82129 - DNA, 169 bp, Glycine max
tgtggtttttttttctttttttttttttttttttttttttttttttttttttttttttttttggcataaaaaaatgaatttttatttttggttccaatttaaaaaaatgccagacaaagaggacaacaaacaatttccaacaagcaacacttttttttatttaacttgg

SEQ ID NO: 82130 - DNA, 76 bp, Glycine max
ctcgagccgaatcggctcgaggttctttcagaacatatatattttatatgatgaaacaaaaaaaaatgttctctca

SEQ ID NO: 82131 - DNA, 381 bp, Glycine max
cttgtgacaaaattcctagtgtcttgactacaactgatgagagattggtaggcacagaacatgagggatatgatccttttcttggtggaattcaaaaatatgccactcccatgatgcccctagatgaagaaattctttctaaggttgcacaagatatggttgaggaatggtttgattgtgttgatgaggaggattcctttgaggaagtttctttaagtgcagcacttaatggtgttgagggtttggactatatggaaagaattcctcttgccacatctgagggttttcctcatgtgctttcacgcaaaaatggcgaaaaaggcaaaaggagatttgtctctggggatggtgaagagatgacattgattccaggaaccagtg

SEQ ID NO: 82132 - DNA, 343 bp, Glycine max
ctcatgttgcgccacttgcttattctttgtgcaaggggcgaggcggggcttcgatgggaaattgctgctcaaattcaactaacacccttacccgaacaactaatggtcacctcagtacacaatcaacttcatcatcttacgcgatcatcaccattagctatacttctactactacgacatctactacttcttctgtactcacgagcatctccataaatagcacgatctcagagtcaagcggtggtaaatcttatccaaatgaacagatcttacctacctctaatttgatgatctccacttttgccgagtcgtaagctgccactagtaatttaagagctgatac

SEQ ID NO: 82133 - DNA, 220 bp, Glycine max
ggcgttgcgtgtaaagggaatgcctatgcaattattgtcatgttgcataatgtgagatgcgtcttttatgtttatgaaacatgacaataattgcataggcgttgcgtgtaaagggaatgggtcctccaaaactgaacgaaaattcatggagtatattcaccttcattttggtgtagttctagtcacggatgaatcggatcacatgctgctattctatctc

SEQ ID NO: 82134 - DNA, 367 bp, Glycine max
gggctcaatcctggtatttcaggttctcgtcttttgggtaccatgcctcagtctatttcacagcaaactgtttggaatcaaatggcaacagtgagaacaccattgaattttgattctagcaagcagagcttttgtcaattttctattgaccttctcggtggaggaattttagtggacaaaactggagattggatcacacttatacaaaattctccaattagtaacttgttgagagttgctgcttggaagaaaggctgtttaatggttaaaattgtgatgtctggaaatgcagcagtcaaaaagagtgattgggcctcattggtacaagtctttttaacaaacagcaacagtacagagcattttgatg

SEQ ID NO: 82135 - DNA, 386 bp, Glycine max
accttctcggtggaggaattttagtggacaaaactggagattggatcacacttatacaaaattctccaattagtaacttgttgagagttgctgcttggaagaaaggttgtttaatggtcaagattgtgatgtctgggaatgcagcagtcaaaaggagtgattgggcctcattggtacaagtgtttttaacaaacagcaacagtacagagcattttgatgcatgtaagtggacaaaatcagaaccacattcctgggaattaatcttcccaatagaggtatgtggtcctaataatggttttgaaatgtggagttctgagtgggcaaatcaaacttcatggcatttgagtttccttattgacaatcccaaacagtctacagtttttgat

SEQ ID NO: 82136 - DNA, 92 bp, Glycine max
gcatgaccctcttgttgagtatgctctgcctatctgaaaatttccacacctcttttaattgtcgtaatgatgtgtgaagtgtgtgttatttt

SEQ ID NO: 82137 - DNA, 593 bp, Glycine max
  unsure (1)..(593): unsure at all n locations
gcttgacgtccatgccgcgacgtagctcggattcgctcgaggaatatgtcaagccttactttagtggttctnaaatgaaaagctttctagctagtcataatatcaccattactgatggtattgacaaaactagtgcaactttgcaatttagaaagttagcagattgtgattttctcaagagaaactttaagcagatgtctaatgttttgggggtggctcctgaggacaaggcgagtttatggtcacaacttcattatgtttcgtgtaataatctggaaatgcaagaagcttatcttgtcaatctcgtaaatgtgttacgagaattgtatttgcacagtccagaggaagctcgccaactgagaaggaaagctctctctcgtattgaatggctgcaaaaagctgatgtgcctaccatagcacagattgaagagttccattcgatgcagaggatgatgaatgctcctgattcaaatgataatattgatctactgttgagcattgatttgttgggtttacaaggagcaggtaaagcttttccaaacaagattgcttttgatgacaagcttgtgttggctaacacacaagaattcttt

SEQ ID NO: 82138 - DNA, 498 bp, Glycine max
cacaaaagcaatgactatgtcatttaatccaaacccgtgttctgatgcatggagtttggaatttctgaagcgtaccggatttcattgtgatatcatttgtgtcactggatggactgccaccccaatgcaggatgttcaggttacaattgattggtttatttcctctcaggaatgtgttcccaggacctattgtgttttaaatccacaaaatccttttgtgttaaataggtggatgggaaaactgactttccctcagggcacttcccgaagtgttaagagaatgcctctttctatagggggaggagctggtgcaaagaatgctattctcatgaatatgccaaatgctgttctttcaatgtggagatattttggtggagatctcgtctttgaagtttctaagatgacttctccctacattaaatgtacagtctctttcttcatagcatttggaaatttggctgatgacaccatcaattttgaggcttttccccacaagct

SEQ ID NO: 82139 - DNA, 472 bp, Glycine max
aatcccttctggatttccgctcacagttatttgcaatagcatttttaatgagatgctcattagatatagctatgaaaaattactgcgccaggctaaagctccaagtatgtttttacaatccttcaaaaattttgtttctttgtgtgtgtatggtgatgataacttaattagtgttcatgaatatgtcaagccttactttagtggttctaaattgaaaagctttctagctggtcataatatcaccattactgatggtattgacaaaactagtgcaactttgcaatttagaaagttagcagattgtgattttctcaagagaaactttaagcagatgtctaatgttttatgggtggctcctgaggacaaggcgagtttatggtcacaacttcattatgtttcgtgcaataatctggaaatgcaagaagcttatcttgtcaatctcgtaaatgtgttacgagaattgtatttgcac

SEQ ID NO: 82140 - DNA, 484 bp, Glycine max
gaaatatcattggaaaacaaggttcctttgctttttgggttattgaattttacactgatgatatgattcaattaggcacgtgtagttatgttatgctttctaacaaattcactttgcattcttattgtgctggacatgtttgcttccagggcacttttacgaggtatttactacttattactcgaccaaaatattgtcaaatagtatcaattaagtcttgttatccatcacttcctcttcatcaggttcttaaagtagatcactctcatgaaggaagaggaaaagccacaatcaagaacttcgtgacattgaccagggaaacaaggtaacacaaagaatgggtaccgatgacggatgtgaaagggtctacgttcaggaaaagactttcatgtttatgtgcatggatagtgatggaactgttgtattgatggaccttgacacattgaatcaaattgaagtttccaaggactggttcaacaaggat

SEQ ID NO: 82141 - DNA, 171 bp, Glycine max
gacactacctacagcaatcattgctgaagacgctaacaacatggtggtagacgtactggagaacagcgcccctacattgcttgcacttgaaggatgcaaggaggctgacatgtctctgcccgtagtttatgacaaacctaagacgcgctgtgatactatgctgaatatggg

SEQ ID NO: 82142 - DNA, 421 bp, Glycine max
ctccttccataccatatattgacatctgtacacacatttcgaccgggcggaataaatcactcaaaaggccaccgttaagctcatgatattgcatataaaaagaaactattgtttccgggatacaaagtgcaccaaggggagtgttttaagaaattggcttgcgttttaagcaagtttgttatacatgaattgaatggaaccaaacctttgggaaaggttcaaaattgggaactcctaagccttccactgataaggaaccaccaccaacctcagccttaaaagcctaggaggggcccaaaaggcgatactattaccaccaaatttggtacctacaacaacaacaacaagtttaaacctggacattactgcaaaattggcaggaggcatgggactaaaggtggaactctacccaatgttcctg

SEQ ID NO: 82143 - DNA, 526 bp, Glycine max
  unsure (1)..(526): unsure at all n locations
cttttcttgggggccttcgccgccccaaccggggatgtcctaagcggtgtctccggcgtctccggcctcacccaggccggcagcctgaccaagacctactcttccactgagaagacgaccaccatcatcaagaacgagaccgtctacagcgtcgtcagcactctgtacaccaacgtccagcagtacaccagctccatcaacaagaccgtcgaggccgtccccgcccagccgtctgaggaggacaagaagaaggccctgatcgagatcaaggccgacatcaagtcgatcgcctctctcatcgtcgacgcctccgtcaagattggcaagattgaggtctccgccgacgttgacgtctccgccattatctccctcgtcgtcaagctcgtcttcgagatcgtcgccaccctccagcacgtcgtcgccatcctcggtggcaccatcaccgtcctcctcggctccgtcctcaccctcctcgtcaacgccatctatgccctactcgtcgccctccaggacatnctcggtgacg

SEQ ID NO: 82144 - DNA, 67 bp, Glycine max
agaaaatgaaatagatgatatataatattatgcaaaataaaaaatggggaaaaaaaaaaatgaaaaa

SEQ ID NO: 82145 - DNA, 316 bp, Glycine max
atattgttcctataggtgactgttttgcagattttttcgccgagaagtgaacaccagccaaacaacactccatgagccacaccggtacaagaagggaacatacagatggaggttttaacatgtggcagcgactctttagctcacacggacagcaagaagcaccatctgataagctaaatttagcttacatccaagatatcaccgttttcccataaaaacaaatgtgtttattcctacaatttggcaagattggcaggaaactgtaaaataatgtgggaagatacaatgtgctgttcgctgaatgaaattatgatca

SEQ ID NO: 82146 - DNA, 441 bp, Glycine max
attcacttaaataaagcgcattactatgtgcaatgagtgtgtttaaaaaaaaaaaaaaaaaaaaaaaaaaaaaaaaaaaaaaaaaaaaaaaaaaaaaaaaaaaaaaaaaaaaaaaaaaaaaaaaaaaaaaaaaaaaaaaaaaaaaaaaaaaaaaaaaaaaaaaaaaaaaaaaaaaaaaaaaaaaaaagggggggcgccccttttagaaaaattgtaaacccgaaaaaaaattcatggcggatatttagggggaaaaaaattttctataaaaggggaaaattaaaaattggggaaaaaaaaggaaaaaattttttttagggaaaaaatttatatcttaaaaaatccaaaaaaaaaaattacccgaaaggaaaaagttaaaaccctggggggctaaaaaaggaggataaaaaaaaaaaattgggtagggttaattgccgtttt

SEQ ID NO: 82147 - DNA, 417 bp, Glycine max
aaaggatgatgaatgctcctgattcaaatgataatattgatctactgttgagcattgatttgttgggtttacaaggagcaggtaaagcttttccaaacaagattgtttttgatgataagcttgtgttggctaacacacaagaattctttgatggaaattttccagtggattcttggttaccaatttttgtgaattgtctttatcctgtaagtcaattaccttcagaagctgtcgttgtaaatgttacatgtggtagtgggcggtcgggttacccaccactgcttggattacatctgcagataacaatcgctccttagatatcaacaaaaggattcgcacagcacttgggaaagggaagaaaattgtttttcttactagagctgatactttttcacaccccttactggctgtgctttt

SEQ ID NO: 82148 - DNA, 494 bp, Glycine max
gtctgcatcatcaaaaggtactagtgttaaccttaaccaacttgaccaagagaaactgaagagcaaggttgatgtgtccgacgacatgaacaaggtggtctcaagggagcaacagcagttgctggttcttagagggaagaatggtgattacttggttcacaatttgaagagttgcaaggattctagaagggcgtttctggtatgggaaccctattgcattgtccccttctgaatcagtgacaaacattaacaacgacaacaacaactaatgcaaaatccattgctcagaacactatttattactccatcatcattttatctctacctgggtcaactctctcagggatctcgttagtgtagtcaaataaacgaagaagggactgggagaaacggatagggagagaagaaaatactttaacttgtatttgtcagatccaaaatatgacttgaacacgtttggatactattactacttaaaaaaaaaataagagggc

SEQ ID NO: 82149 - DNA, 553 bp, Glycine max
agggggaggagctggtgcaaagaatgctattctcatgaatatgccaaatgctgttctttcaatgtggagatattttgttggagatctcgtctttgaagtttctaagatgacttctccctacattaaatgtacagtctctttcttcatagcatttggaaatttggctgatgacaccatcaattttgaggcttttccccacaagctggtgcagtttggagagattcaggaaaaagttgtgttgaaattttcacaagaggaatttcttacagcttggtcaactcaggtgcgtcccgcaacgactctgttggctgatgggtgcccatatttgtatgctatggtgcatgatagttcagtgtctacaataccaggtgattttgtcattggtgttaagttgacaaccataaacaatatgtgtgcatatgggctcaatcctggtatttcaggttctcgtcttttgggcaccattcctcagtccatttcacagcaaactgtttggaatcaaatggcaacagtgagaacaccattgaattttgattctagcaagcagagcttt

SEQ ID NO: 82150 - DNA, 166 bp, Glycine max
tgcacccgtccgtaagctcggaattcggttcgggggaaggggaccacggcttaatgggtggctcctgaggtcaaggcgaggttttggtcacatcttctttatgtctcttgcaataatcagagaatgcaagaagcctatctcagaaatcccggaaatgtgtaacgag

SEQ ID NO: 82151 - DNA, 384 bp, Glycine max
caattttgtggcttttttttacaagctggtgcagtttggagagattcaggataaagttgtattgaaattttcacaagaggaatttcttacagcttggtcaactcaggtgcgtcctgcaacaactctgttggctgatgggtgtccatatttgtatgctatggtgcatgatagttcagtgtctacaataccaggtgattttgtcattggtgttaagttgacaaccataaacaatatgtgtgcatatgggctcaatcctggtatttcaggttctcgtcttttgggcaccattcctcagtctatttcacagcaaactgtttggaatcaaatggcaacagtgagaacaccattgaattttgattctagcaagcagagcttttgtcaatt

SEQ ID NO: 82152 - DNA, 166 bp, Glycine max
tgaaattctgagttctaacgccactaaccctatgctgacgcgacttcttgagaactgtaagagtctcaaatatctggttgatgagtgtccttttgcatttgtgaactagtatgtaatattttattcacttaaataaagcgcattactatgtgcaatgagtgtgttt

SEQ ID NO: 82153 - DNA, 371 bp, Glycine max
agcttatcttgtcaatctcataaatgtgttacgagaggtgtattggcacagtccagaggaagctccccaattgagaaggaaagctctctctcgtattgaatggctgcaaaaagctgatgtgcctaccatagcacagattgaagagttccattcgatgcagaggatgatgaatgctcctgattcaaatgataatattgatctactgttgagcattgatttgttgggtttacaaggagcaggtaaagcttttccaaacaagattgtttttgatgataagcttgtgttggctaacacacaagaattctttgatggaaattttccagtggattcttggttaccaatttttgggaattgtctttttcctgtaagtc

SEQ ID NO: 82154 - DNA, 211 bp, Glycine max
  unsure (1)..(211): unsure at all n locations
tccgtagcctcggaattcggttcgagggaaaaggcggaatcctttgcatgacctggaattcgggttttctttcgcttgttcgtttgtttaattcaataaaggaaattaggcatgaccctcttgttgagtatgctctgcctatctgaaaatttccacacctcttttaattgtcgtaatgatgtgtgaagtgtgtgttattttaaaaaanaaa

SEQ ID NO: 82155 - DNA, 380 bp, Glycine max
ttcaggttctcgtcttttgggcaccattcctcagtctatttcacagcaaactgtttggaatcaaatggcaacagtgagaacaccattgaattttgattctagcaagcagagcttttgtcaattttctattgaccttctcggtggaggaattttagtggacaaaactggagattggatcacacttatacaaaattctccaattagtaacttgttgagagttgctgcttggaagaaaggctgtttaatggttaaaattgtgatgtctgggaatgcagcagtcaaaaggagtgattgggcctcattggtacaagtgtttttaacaaacagcaacagtacagagcatttcgatgcatgtaagtggacaaaatcggaaccacatt

SEQ ID NO: 82156 - DNA, 360 bp, Glycine max
gcaaactgtttggaatcaaatggcaacagtgagaacaccattgaattttgattctagcaagcagagcttttgtcaattttctattgaccttctcggtggaggaattttagtggacaaaactggagattggatcacacttatacaaaattctccaattagtaacttgttgagagttgccgcttggaagaaaggctgtttaatggttaagattgtgatgtctgggaatgcagcagtcaaaaggagtgattgggcctcattggtacaggtgtttttaacaaacagcaacagtacagagcattttgatgcatgtaagtggacaaaatcggaaccacattcctggggaattgatcttcccaatag

SEQ ID NO: 82157 - DNA, 211 bp, Glycine max
cccccttccttagcctcggatttcgcttcgagaaactattacatcctttgggaggtctgttctggtctggtggcattatattatgggttaataaatcatgggtgttcccataatgtaaccctttttatgtgtctctttatgtgttagccctatgttacttatatcatatgtacgactgtgatataaataaaagatttttattctcttataa

SEQ ID NO: 82158 - DNA, 386 bp, Glycine max
  unsure (1)..(386): unsure at all n locations
ctggatggactgccaccccaatgcaggatgttcaggttacaattgattggtttatttcctctcaggaatgtgttcccaggacctattgtgttttaaatccacaaaatccttttgtgttaaataggtggatgggaaaactgactttccctcagggcacttcccgaagtgttaagagaatgcctctttctatagggggaggagctggtgcaaagaatgctattctcatgaatatgccaaatgctgttctttcaatgtggagatattttgttggagatctcgtctttgaagtttctaagatgacttctccctacattaaatgtacagtctctttcttcatagcatttggaaatttggctgatgacaccatcaattntgaggcttttccc

SEQ ID NO: 82159 - DNA, 65 bp, Glycine max
ctcgagccgtttttttttttttttttttttttttgggttgtttggggtttttttgtttttttttt

SEQ ID NO: 82160 - DNA, 158 bp, Glycine max
ttggtttaaagatttttattaccaccttcaaaaggccgtcccacctgtttccgaaggaggggaggtccgtttaaccctttttttcggccgggaccggtcttttattttcgccaggcatttttttgtggccgccgatgggtttaagtcccgggatccgg

SEQ ID NO: 82161 - DNA, 249 bp, Glycine max
gtgattgggcctcattggtacaagtgtttttaacaaacagcaacagtacagagcattttgatgcatgtaagtggacaaaatcagaaccacattcctgggaattgatcttcccaatagaagtatgtggtcctaataatggttttgaaatgtggagttctgagtgggcaaatcaaacttcatggcatttgagtttccttattgacaatcccaaacagtctacaggttttgatattctcttgggaatctctc

SEQ ID NO: 82162 - DNA, 391 bp, Glycine max
gcaacagtgagaacaccattgaattttgattctagcaagcagagcttttgtcaattttctattgaccttctcggtggaggaattttagtggacaaaactggagattggatcacacttatacaaaattctccaattagtaacttgttgagagttgctgcttggaagaaaggctgtttaatggttaagattgtgatgtctggaaatgcagcagtcaaaaggagtgattgggcctcattggtacaagtctttttaacaaacagcaacagtacagagcattttgatgcttgtaagtggacaaaatcggaaccacattcctgggaattgatcttcccaatagaggtatgtggtcctaataatggttttgaaatgtggagttctgagtgggcaaatc

SEQ ID NO: 82163 - DNA, 155 bp, Glycine max
tagggccttggttaaggggacctattccgagacccttgcaggacttattaaagggctgccaaagttattttggggacctactccatgtttggccttgttgggaacctaccagaggaattaaagaagggggcttcctttggggaaggggtgggggc

SEQ ID NO: 82164 - DNA, 372 bp, Glycine max
aaaggacgcacctgctgttggcttgttgttcaaggatggcaatttgtaagaaagatgtttggagagttgaatgtggaatcccttctggatttccgctcacagttatttgcaatagcatttttaatgagatgctcattagatatagctatgaaaaattactgcgccaggctaaagctccaagtatgtttttacaatccttcaaaaattttgtttctttgtgtgtgtatggtgatgataacttaattagtgttcatgaatatgtcaagccttactttagtggttctaaattgaaaagctttctagctagtcataacatcaccattactgatggtattgacaaaactagtgcaactttgcaatttaaaaagttag

SEQ ID NO: 82165 - DNA, 169 bp, Glycine max
ccacacctccttatacactcttcttctctatctaacaacaccccacaaaaattaaaaattaaaaaaattaggggtttcaatttggggaaataaaaatagggggaaacattctagagagagtgtgttgaaaatatgggtgtcgatgatattacgctgtgcatcatcatcg

SEQ ID NO: 82166 - DNA, 388 bp, Glycine max
atcgagataactagaaacagtgtgatgaaaatgaaggtccttgttgtcttcggtgctacaattttggtagcatggcaatgccatgcgtacgatatgttccctctccgaatgaacactggctatggtgcccgtactccggaggtgaaatgcgcaagttggaggcttgctgtggaagcacacaacatctttggctttgagaccattcctgaagagtgcgttgaagcaacaaaggaatacatccatggcgaacaatatagatcagactccaaaacagttaaccaacaagcttacttttatgccagaaaccctcaagtccatcccaaggacacatttgtgttcagtatagatggcaccgtactctctaatattccatactacaaaaaacatg

SEQ ID NO: 82167 - DNA, 386 bp, Glycine max
atttggtggaaacattgaagcaacatgcttacaaaaatacggataatttcaaatcaattcatgagacatcattgagctgctcaaaaccattgacatttctaggagtagggcaatctgatgctacagagcaaagtctgcaacggttcaatatctctacagaacaagaaggtcatcaaggaacatgggttggtaatggtcaaccatatgcctcaacttcatatacagatgaaagcgtacatagttaccaaatctatgctgatccagtgccagacataacagacatgccactgaacaatccttatggtagcaattcaatgaaggattttttctctggattgtgcattgaaggggataggtgggtcccttatggataatatttgcatctt

SEQ ID NO: 82168 - DNA, 381 bp, Glycine max
gtaacttattgagagttgctgcttggaagaaaggctgtttaatgggcaagattgtgatgtactgggaatgcagcagtcaaaaggagtgattgggcctcattggtacaagtgtttttaacaaacagcaacagtacagagcattttgatgcatgtaagtggacaaaatcagaaccacattcctgggaattgatcttcccaatagaggtatgtggtcctaataatggttttgaaatgtggagttctgagtgggcaaatcaaacttcatggcatttgagtttccttattgacaatcccaaacagtctacagtttttgatattctcttgggaatctctcaagattttgaaattgctggtaatactcttatgccagctttttctgtt

SEQ ID NO: 82169 - DNA, 382 bp, Glycine max
gagaaactttaagcagatgtctaatgttttatgggtggctcctgaggacaaggcgagtttatggtcacaacttcattatgtttcgtgcaataatctggaaatgcaagaagcttatcttgtcaatctcgtaaatgtgttacgagaattgtatttgcacagtccagaggaagctcgccaattgagaaggaaagctctctctcgtattgaatggctgcaaaaagctgatgtgcctaccatagcacagattgaagagttccattcgatgcagaggatgatgaatgctcctgattcaaatgataatattgatctactgttgagcattgatttgttgggtttacaaggagcaggtaaagcttttccaaacaagattgtttttgatgat

SEQ ID NO: 82170 - DNA, 380 bp, Glycine max
gaatatgtcaagccttactttagtggttctaaattgaaaagctgtctagctagtcataacatcaccattactgatggtattgacaaaactagtgcaactttgcaatttagaaagttagcagattgtgattttctcaagagaaactttaagcagatgtctaatgttttgtgggtggctcctgaggacaaggcgagtttatggtcacaacttcattatgtttcgtgtaataatctggaaatgcaagaagcttatcttgtcaacctcgtaaatgtgttacgagaattgtatttgcacagtccagaggaagctcgccaattgagaaggaaagctctctctcgtattgaatggctgcaaaaagctgatgtgcctaccatagcaca

SEQ ID NO: 82171 - DNA, 143 bp, Glycine max
gggtggtccctctattgatggggaaaatattcttggaggaaggagcaacccatctggatctaagccaagaagggttccacccaacctaaggaaagggtcaaaattggctggcctcttgtattcccggggaaggagggggaaaa

SEQ ID NO: 82172 - DNA, 362 bp, Glycine max
gtgcaaagaatgctattctcatgaatatgccaaatgctgttctttcaatgtggagatattttgttggagatctcgtctttgaagtttctaagatgacttctccctacattaaatgtacagtctctttcttcatagcatttggaaatttggctgatgacaccatcaattttgaggcttttccccacaagctggtgcagtttggagagattcaggaaaaagctgtgttgaaattttcacaagaggaatttcttacagcttggtcaactcaggtgcgtcccgcaacgactctgttggctgatgggtgcccatatttgtatgctatggtgcatgatagttcagtgtctacaataccaggtgatttt

SEQ ID NO: 82173 - DNA, 391 bp, Glycine max
ggatgggaaaactgactttcccccagggcacttcccgaagtgttaagagaatgcctctttctatagggggaggagctggtgcaaagaatgctattctcatgaatatgccaaatgctgttctttcaatgtggagatattttgttggagatctcgtctttgaagtttctaagatgacttctccctacattaaatgtacagtctctttcttcatagcatttggaaatttggctgatgacaccatcaattttgaggcttttccccacaagctggtgcagtttggagagattcaggaaaaagttgtattgaaattttcacaagaggaatttcttacagcttggtcaactcaagtgcgtcctgcaacaactctgttggctgatggggtccatatttg

SEQ ID NO: 82174 - DNA, 380 bp, Glycine max
ctcgagccgctcgagccgctggagattggatcacacttatacaaaattctccaattagtaacttgttgagagttgctgcttggaagaaaggctgtttaatggttaagattgtgatgtctggaaatgcagcagtcaaaaggagtgattgggcctcattggtacaagtctttttaacaaacagcaacagtacagagcattttgatgcttgtaagtggacaaaatcggaaccacattcctgggaattgatcttcccaatagaggtatgtggtcctaataatggttttgaaatgtggagttctgagtgggcaaatcaaacttcatggcatttgagtttccttattgacaatcccaaacagtctacagtttttgatattctcttg

SEQ ID NO: 82175 - DNA, 336 bp, Glycine max
atcgcgtctacgtgttcttttcctctgttttaattgttcgtcatgccttcttactctttatagatattataattctccatgtacttcattcatgttcgcaccactttcatgtaccaatgaataagaatttctttttgcataggatgtaaaaaatatttcttaataaaattgtccttgttacaattaaaaatacacgaagttgatttccgaccacacctgaacccaacaaaaaccatacaaccaccgaaacaacaatctcaaccagacactccaaccactaccgactacttaagtccaacgtcgacgggtctccccctcatttaggtcctcctcacc

SEQ ID NO: 82176 - DNA, 384 bp, Glycine max
caagcatgtttttacaatccttcaaaaattttgtttctttgtgtgtgtatggtgatgataacttaattagtgttcatgaatatgtcaagccttactttagtggttctaaattgaaaagctttctagctggtcataatatcaccattactgatggtattgacaaaactagtgcaactttgcaatttagaaagttagcagattgtgattttctcaagagaaactttaagcagatgtctaatgttttgtgggtggctcctgaggacaaggcgagtttatggtcacaacttcattatgtttcgtgtaataatctggaaatgcaagaagcttatcttgtcaatctcgtaaatgtgttacgagaattgtatttgcacagtccagaggaag

SEQ ID NO: 82177 - DNA, 375 bp, Glycine max
ctcgagccgcaggtgcgtcctgcaacaactctgttagctgatgggtgtccatatttgtatgctatggtgcatgatagttcagtgtctacaataccaggtgattttgttattggtgttaagttgacaaccataaacaatatgtgtgcatatgggctcaatcctggtatttcaggttctcgtcttttgggcaccattcctcagtccatttcacagcaaactgtttggaatcaaatggcaacagtgagaacaccattgaattttgattctagcaagcagagcttttgtcaattttctattgaccttctcggtggaggaattttagtggacaaaactggagattggatcacacttatacaaaattctccaattagtaac

SEQ ID NO: 82178 - DNA, 356 bp, Glycine max
gcaatttgtaagaaagatatttggagagttgaatgtggaatcccttctggatttccgctcacagttatttgcaatagcatttttaatgagatgctcattagatatagctatgaaaaattactgcgccaggctaaagctccaagtatgtttttacaatccttcaaaaattttgtttctttgtgtgtgtatggtgatgataacttaattagtgttcatgaatatgtcaagccttactttagtggttctaaattgaaaagctttctagctggtcataatatcaccattactgatggtattgacaaaactagtgcaactttgcaatttagaaagttagcagattgtgattttctcaagag

SEQ ID NO: 82179 - DNA, 418 bp, Glycine max
ctcgagccgcaaggtttcagcttttgagtaccactaccaatggtgattttgttcaagggaaagatctcgcaatggttaaagttaatgtagcatgtgctgctgttggcttgacatcaagttacactccaactccattgttggaatctggtttgcaaaaagacagagggttaattgtggagtattttggaaggatgtcttacgttgctcataacgttaatcagccccaagagaaagatttgttagagggaaatttttcctttgatattaaatctcgctctagattggaaaaagtttcctctacaaaagcacaatttgttagtggaaaaaccttcaaatatgatataattggtgctggttcacattcttcaggagattttcctgaaaaggaagatcaagaaaaacccaaaaagattgatac

SEQ ID NO: 82180 - DNA, 261 bp, Glycine max
gcttcctctcttctctattctaattctatgggacactcttttttaaaacctattccttcaattcccaaacaatggcgaaccttttttaattcaccggccggtttttctttttctttttctttgggttcactcggaccgaattcacttgccttaattggtttcccttccgcgtgaactttcgagagcggttggccccttggcggcacgcccttgtgtttttgcgccttaacttcttcagaggccccgagacccgggggttcc

SEQ ID NO: 82181 - DNA, 160 bp, Glycine max
accacccatcctgaaccaattgggatgtttggaccagacaagtacagcgtttgggaaatgacaatctgcctcgcgaatgtacgaattatagtggctagaccactagactggatttcactgatacgggagcctccatttagtcgctttgtggtagtcgttg

SEQ ID NO: 82182 - DNA, 345 bp, Glycine max
  unsure (1)..(345): unsure at all n locations
ctcttgggaatctctcaagattttgatattctcttgggaatctctcaagattttgaaattgctggtaatactcttatgccagctttttctgttccacaggctactgccagatcttctgaaaatgcggaatcctctgcatgatctggaattcgtgttttctttcgcttgttcgtttgtttaattcaataaaggaaattaggcatgaccctcttgttgagtatgctctgcctatctgaaaatttccacacctcttttaattgtcgtaatgatgtgtgaagtgtgtgttattttaaaaaaaaaaaaaaaaaaaaaaaaaaaaaaaaaaaaaaaaaaaaaaaaannaaa

SEQ ID NO: 82183 - DNA, 380 bp, Glycine max
gacaaaactagtgcaactttgcaatttagaaagttagcagattgtgattttctcaagagaaactttaagcagatgtctaatgttttatgggtggctcctgaggacaaggcgagtttatggtcacaacttcattatgtttcgtgcaataatctggaaatgcaagaagcttatcttgtcaatctcgtaaatgtgttacgagaattgtatttgcacagtccagaggaagctcgccaattgagaaggaaagctctctctcgtattgaatggctgcaaaaagctgatgtgcctaccatagcacagattgaagagttccattcgatgcagaggatgatgaatgctcctgattcaaatgataatattgatctactgttgagcattga

SEQ ID NO: 82184 - DNA, 337 bp, Glycine max
atggcaacagcgggaacaccattgaattttgattctagcacgcggggcttttgtcaattttctatcgaccttctcgctggaggaattttagtggacaaaactggagattggatcacacttatacaaaattctccaattagtaacttggtgagagttgctgcttggaagaaaggctgtttaatggtcaagattgtgatgtctgggaatgcaccagtcaaaaggagtgattggaccttattggtacaagtgtttttaacaaacagcagcagtacagaggattttgatgcatgtaagtggacaaaatcagaaccacattcttgggaattgatcttcccaa

SEQ ID NO: 82185 - DNA, 332 bp, Glycine max
ttcaggaaaaagttgtattgaaattttcacaagaggaatttcttacagcttggtcaactcaggtgcgtcctacaacaactctgttggctgatgggtgtccatatttgtatgctatggtgcatgatagttcagtgtctacaataccaggtgattttgtcattggtgttaagttgacaaccataaacaatatgtgtgcatatgggctcaatcctggtatttcaggttctcgtcttttgggtaccattcctcagtctatttcacagcaaactgtttgtaatcaaatggcaacagtgagaacaccattgaattttgattctagcaagcagagcttt

SEQ ID NO: 82186 - DNA, 471 bp, Glycine max
atggcaacagtgagaacaccattgaattttgattctagcaagcagagcttttgtcaattttctatcgaccttctcggtggaggaattttagtggacaaaactggagattggatcacacttatacaaaattctccaattagtaacttgttgagagttgctgcttggaagaaaggctgtttaatggtcaagattgtgatgtctgggaatgcagcagtcaaaaggagtgattgggcctcattggtacaagtgtttttaacaaacagcaacagtacagagcattttgatgcatgtaagtggacaaaatcagaaccacattcctgggaattgatcttcccaatagaggtatgggtcctaataatggttttgaaatgtggagttctgagtgggcaaatcaaacttcatggcatttgagtttccttattgacaatcccaaacagtctacagtttttgatattctcttgggaatctctc

SEQ ID NO: 82187 - DNA, 412 bp, Glycine max
cagaaatgataaacagtctttgtggtggtgatgaaaaattgatgcgtgaaaggacacacctgctgttggcttgttgttcaaggatggcaatttgcaagaaagatgtttggagagttgaatgtggaatcccttctggatttccgctcacagttatttgcaatagcatttttaatgagatgctcattagatatagctatgaaaaattactgcgccaggctagagctccaagtatgtttttacaatccttcaaaaattttgtttctttgtgtgtgtatggtgatgataacttaattagtgttcatgaatatgtcaagccttactttagtggttctaaattgaaaagctttctagctggtcataatatcaccattactgatggtattgacaaaactagtgcaactttgcaatttaa

SEQ ID NO: 82188 - DNA, 469 bp, Glycine max
atttgcaatagcatttttaatgagatgctcattagatatagctatgaaaaattactgcgccaggctaaagctccaagtatgtttttacaatccttcaaaaattttgtttctttgtgtgtgtatggtgatgataacttaattagtgttcatgaatatgtcaagccttactttagtggttctaaattgaaaagctttctagctggtcataatatcaccattactgatggtattgacaaaactagtgcaactttgcaatttagaaagttagcagattgtgattttctcaagagaaactttaagcagatgtctaatgttttgtggtggctcctgaggacaaggcgagtttatggtcacaacttcattatgtttcgtgtaataatctggaaatgcaagaagcttatcttgtcaatctcgtaaatgtgttacgggaattgtatttgcacagtccagaggaagctcgccaattgag

SEQ ID NO: 82189 - DNA, 134 bp, Glycine max
agctgagctgtgacgtgccctgcacgcgtacgtcagattgtcgctcgagtacagcgcccacgggactgtcttaacccacaaatataactcatattggggcttgcaaaaaaaaaaaaaaaatacttttatttttt

SEQ ID NO: 82190 - DNA, 343 bp, Glycine max
cacaaaacaaagaatcattcagctggagtcctaggttgtgtgttgctgtaaattttactttcaatttggggaattaactcccccaaattttatattaacttcttttttgtttttccctcttaaatgatataggaattcttttggttcatttgtaattttgtcaactagatattatcaattatttgttagaagatgccaaagaagggctgctagcactttagcagccaaggatgtttgtctggggtaaaagtatttgatgacctctggatgaaatctttgtacaaaaacctacagtaacgttctaggaacacgttctatacatgtatatgacttaaatttctca

SEQ ID NO: 82191 - DNA, 455 bp, Glycine max
gctggtgcagtttggagagattcaggaaaaagttgtattgaaatggtcacaagaggaatttcttacagcttggtcaactcaggtgcgtcctgcaacaactctgttggctgatgggtgtccatatttgtatgcaatggtgcatgatagttcagtgtctacaataccaggtgattttgtcattggtgtcaagttgacaaccataaacaatatgtgtgcatatgggctcaatcctggtatttcaggttctcgtcttttgggcaccattcctcagtccatttcacagcaaactgtttggaatcaaatggcaacagtgagaacaccattgaattttgattctagcaagcagagcttttgtcagttttctattgaccttctcggtggaggaatcttagtggacaaaactggaagatggatcacacttatacaaaattctccaattagtaacttattgagag

SEQ ID NO: 82192 - DNA, 389 bp, Glycine max
  unsure (1)..(389): unsure at all n locations
cccgtccgtaagctcggaattcggttcgagatttataacttttaagtccatgctatcatatcatacaattattctgatattcaaggggacccaccaatctgtgtattgtaaccttattttttgtgagatagcagatggagattccatttcctggttgatgatggctttgcatcaaggagagtctgataaaaaaccatgtctttaccaagaagcaaagtgacatgcttaggaaactcccaatcatagagggaaggactgttaaaaggctgctaacactgagaagctgctgttaaaagtctgatcaaaaccatatctccataacttgtgtttgtatcattattattaactactgttactaattgtgtatacttgtatgaaatttgaacana

SEQ ID NO: 82193 - DNA, 357 bp, Glycine max
gcataacagcgcaatatggtaagggctgggttggtgtcgttcctgtgccgatgggttgtatggatttgtgattcctgcagattcgacggcacacgcattatcaaaatccttactgcgtttctttcgcggccattgccttttttctgcacgtaccttcaagattttttccattacccatctcttaaatctccatccatccaatatcaggaattagacgactatggctcccactataactcaccaatttgctccaattgcttaagcctcaccctgctctaaaggaaccaccgatccccttggtaacttcgctaaagctacttatgatagctcgatcaaaaccaaaggactcctgacacc

SEQ ID NO: 82194 - DNA, 238 bp, Glycine max
acttgagctaaattcatatcatgaatatttcttaaatgccgcgggggaatttatccaatcaacattcatctacaacatacagcacaatttttggtccaaaaaatgaaccggatccaccaaatcctaccttcagcaacgccgttaccatccagcaagacccactacagtgacataaaatgcctactctacaatattcaggaacttctcacttccacaactgaaatgtacgatcactctc

SEQ ID NO: 82195 - DNA, 219 bp, Glycine max
ggcaagcatccagggctacttttgaatttttgtactgacacttacagggtttgacaactccctatcgtcctccccgatcgaggaaatataacgcatagaacagattgccatgcctcacatatccatgggtctgctttacgtcgctacgcgggagtcccagattggaggcacagctgtttgatgctggacattatgcagcccctcctggtatcgcttaca

SEQ ID NO: 82196 - DNA, 471 bp, Glycine max
  unsure (1)..(471): unsure at all n locations
gtcaagccttactttagtggttctaaattgaaaagctttctagctggtcataatatcaccattactgatggtattgacaaaactagtgcaactttgcaatttagaaagttagcagattgtgattttctcaagagaaactttaagcagatgtctaatgttttgtgggtggctcctgaggacaaggcgagtttatggtcacaacttcattatgtttcgcgtaataatctggaaatgcaagaagcttatcttgtcaatctcgtaaatgtgttacgagaattgtatttgcacagtccagaggaagctcgccaattgagaaggaaagctctctctcgtattgaatggctgcaaaaagctgatgtgcctaccatagcacagnatgaagagtttcattcgatgcagaggatgatgaatgctcctgattcaaatgataatattgatctactgttgagcattgatttgttgggtttacaa

SEQ ID NO: 82197 - DNA, 91 bp, Glycine max
tatgttttaaaatgatgtattgaactcgtttcagcgaaagtatgttgtttattttaaatatcaatatcgtttcacagttagttagttgttt

SEQ ID NO: 82198 - DNA, 275 bp, Glycine max
gaaaaaggcacaaggagatttgtgaatgttgatggtgaagagatgacgattgtttccaggaaccattgtacgaacacttgtatgaagttcaactgttagctcggtgtaagcctcatgacattatgcaatttcccttggaatctgctgatgaatggttgacatctaaaagatctagatggaaagatcgaagaaagcatcagaagatgtggactctccctgaaatgttgaagtgggccgaaggcatacatgaatatggagcagaccgatgcactgac

SEQ ID NO: 82199 - DNA, 152 bp, Glycine max
agcgggaaaccaagaacaccattgaattttggtcttgacacgcggagcttttgacaagttgctatcgtcctccccgatgcaggaataatagtggccaaaactgtagactggactgcacttatacatgattctcctattcgtaacttagtgac

SEQ ID NO: 82200 - DNA, 260 bp, Glycine max
gttatctatcgattgttcgtttggataattcaataaaggaagtggggcttgaccctattgttgagtatgctctgcctatctgaaaatttccacacctcttctaattgtcggactgatctgatacgtgagtgttcttttcaaaacttagagacagatgcagattggaagcgggcggtcttcaactagtgagctcggcaacccgggaattaattacggaccggtgcgtgaaggcgtcccaactttacctatagtgagtacaa

SEQ ID NO: 82201 - DNA, 223 bp, Glycine max
ggcaaggatccagggccacctttgaatttttggactgagacttgggggggttgacaagttactatggtcctccccgatcgaggaattatatcgcctagaacagttggccggcctgcacttatccaagggacagcttgtcgttgctgcgcgggaaacccagattggaggcctggctgattgactttggatcttaggctgcccctgcctgcccatctccaaaggg

SEQ ID NO: 82202 - DNA, 291 bp, Glycine max
actgttgacccgtggttaacggagaactatgggtatgacacgggggggttgtgacaaatgtctatggccctctgggatggaggaaacagagagtccaaaacgcatggttagcgtgaacttattcaaagatcgccatgacaaatctctgcgccaggctaagattggaagaatggctgtacaatgcttcaaatagtgcggtccctggcggcagcatggcaaaggtgacattgtgcctgatcatgacaagtccttgacacactccagggctgcacagatgataaggatgcatag

SEQ ID NO: 82203 - DNA, 415 bp, Glycine max
  unsure (1)..(415): unsure at all n locations
ccgtccgtaagctcggaattcggttcgaggatggcaatttgtaaaaaagatgtttgaagagttgaatgtggaatcccttctgaatttccgctcacaagtatttgcaatagcatttttaatgagatgctcattagatatagctatgaaaaattactgcgccaggctaaagctccaagtatgtttttacaatccttcaaaaattttgtttctttgtgtgtgtatggtgatgataacttaattagtgttcatgaatatgtcaagccttactttagtggttctaaattgaaaagctttctagctggtcataatatcaccattactgatggtattgacaaaactagtgcaactttgcaatttagaaagttagcaaattgtgattttctcaagaganaacttaagcagatgtctaatgttt

SEQ ID NO: 82204 - DNA, 459 bp, Glycine max
  unsure (1)..(459): unsure at all n locations
cgtcagatcataattggaaccctcacaacaaaactcaagcttcttcttgtctatctctctgctacgttcatgttctgctgaatcatcaccccaccatcatggaacttgttccatactctgacccatcctccaccaccccagcatggcaggacatgttccgatccgcctctgcccgccacccctcctccacccctgcaccccacgcgcctccctcccaatcccacgcgccctccccctcaccccacgcgccgccgaatccgccatccgacgccgacccagatggaaaaaacacattttccggcgatccccaggtgcgcttggccctctacatcgccatggcccatgcgggtctcgccttcgccattntcatcctctacactttctcgaagcttctagaacagtatttgagaccccttcaatgggcagtggtgtgttctattcctcttaggggcattcagc

SEQ ID NO: 82205 - DNA, 189 bp, Glycine max
accgcaaaaccaagaacaccattgaattatgattctaacacggggagcttttgtcaatattctatcgaccttctcggtggaggaattttagcggacaaaactgaagattggactacacttatacaaaattctccaattcgtaacttgcagagagatgctgcttggaagaaaggctgtttaacgctgaag

SEQ ID NO: 82206 - DNA, 310 bp, Glycine max
tgaatatgccaaatgctgttctttcaatgtggagatattttgttggagatctcgtctttgaagtttctaagatgacttctccctacattaaatgtacagtctctttcttcatagcatttggaaatttggctgatgacaccatcaattttgaggcttttccccacaagctggtgcagtttggagagattcaggaaaaagttgtattgaaattttcacaagaggaatttctcacagcttggtcaactcatgtgcgtcctgcaacaactctgttggctgatggacgtccatatttgtatgctatggtgcatga

SEQ ID NO: 82207 - DNA, 472 bp, Glycine max
gaagaaaagggacaagcttagttgtcaagttggaatcaacccatactccatggaatggactggtttggccaatagattactgagtaagggcaacgatattctgtgttgcgattatgctagttttgatggtttgattaccaagcaagttatgagcaagatggcagaaatgataaacagtctttgtggtggtgatgaaaaattgatgcgtgaaaggacacatttgctgttggcttgttgttcaaggatggcaatttgtaagaaagatgtttggagagttgaatgtggaatcccttctggatttccgctcacagttatttgcaatagcatttttaatgagatgctcattagatatagctatgaaaaattactgcgccaggctagagctccaagtatgtttttacaatccttcaaaaattttgtttctttgtgtgtgtatggggatgataacctaattagtgttcatgaatatgtc

SEQ ID NO: 82208 - DNA, 422 bp, Glycine max
  unsure (1)..(422): unsure at all n locations
ggacaaaatcagaaccacattcctgggaattaatcttcccaatagaggtatgtggtcctaataatggttttgaaatgtggagttctgagtgggcaaatcaaacttcatggcatttgagtttccttattgacaatcccaaacagtctacagtttttgatattctcttgggaatctctcaagattttgaaattgctggtaatactcttatgccagctttttctgttccacaggctactgccagatcttctgaaaatgcggaatcctctgcatgatctggaattcgtgttttctttcgcttgttcgtttgtttaattcaataaaggaaattaggcatgaccctcttgttgagtatgctctgcctatctgaaaatntccacacctcttttaattgtncgaatgatgtgtgaagtgtgtgttatttt

SEQ ID NO: 82209 - DNA, 276 bp, Glycine max
gctttctgggccatgttggtgtcgatgaggaggatcatgttcagaggcatccacagtgagttgtagaatagaagcaaaaagagaagttcttggtggcgatttcttagatgggtcttctttgtggtgtgagtggtgtgagttgacgggtgaaaaagtttttttttttaagaagagtattgggttgagtggtttttatatggtgttttttttttttatttttttttttttttattttttttttttttttttttttttttttttttttttttttttttt

SEQ ID NO: 82210 - DNA, 487 bp, Glycine max
ctgtctttgttatgtagaaaaatcatttattttagaatgtagtttgtatgtattatcatgatggtggaaatttgtttggaagattttaagaatcaagatgttttattttggaagagataactttctacactctatagtgactctagttaaccaacaaatatttttatttgttggatttagaacactgggtgtgagttctttttatttaaactatagcagtgttgtgttttaaacttaataaatttaaaagcaattgaaaagtaaagtgaaaaaaaagtaaatgattgaaattgtaaattgaaagcaatagtaaatggcactaaatgtatatgaaagcaaatatgtgcccaaaataatgtatatgcatgaaagcaaataaagtgtgtaaaatgtaaattactgggaaagtaaatcataatttaaagaactgattcaataagatgaaagttctattttctttttaataaaattattagaagaaggaatg

SEQ ID NO: 82211 - DNA, 302 bp, Glycine max
  unsure (1)..(302): unsure at all n locations
tagcttatatactatagtatgcagcactactcattgacattaatataagaagttgaacgttttctgtcnaaaaaaaaaaaaaaaaaaaaaaaaaaaaaaaaaaaaaaaaaaaaaaaaaaaataaataaaaaaaaaaaatataaaaaaaaaataaaaaaaaaaatatataatttaaaaataaaaaataaaaaaaataaaaaatttaaaaaataatttgggggggggcataatatttatattttttatcccgtttattaattttgatcaaggacttcaaaaggtacaaaattttcctattataa

SEQ ID NO: 82212 - DNA, 347 bp, Glycine max
gacaaaactagtgcaactttgcaatttagaaagttagcagattgtgattttctcaagagaaactttaagcagatgtctaatgttttgagggtggctcctgaggacaaggcgagtttatggtcacaacttcattatgtttcgtgtaataatctggaaatgcaagaagcttatcttgtcaatctcgtaaatgtgttacgagaattgtatttgcacagtccagaggaagctcgccaattgagaaagaaagctctctctcgtattgaatggctgcaaaaagctgatgtgcctaccatagcacagattgaagagcttcattcgttgcagaggatgatgaatgctcctgattc

SEQ ID NO: 82213 - DNA, 315 bp, Glycine max
ggctttcacttcgaatctccttcagatctttcagaactgcagccatcttgttagttggggtcttcacgattggatgctagtggtactgttggttgacacttacagctgtacccgcctgtgttctgactctgaggaacatgacttgtgctactattttaacgagtgaccctggtccttaccgtgttttgtttgctggaagagttatctctagaggtggggctgccgcctcattgtgagctcaggacccgggtactaatttcggaccggtgcctggcggcgtaccaactttacctattgtgagtcgtattaaagctt

SEQ ID NO: 82214 - DNA, 69 bp, Glycine max
tcggaggaaaatggccgatcagttatcgaagggagaggaattcgagaaaaaggctgagaagaagctcac

SEQ ID NO: 82215 - DNA, 97 bp, Glycine max
cttaaaacgaccaataatggcgtttgctcacgacttggagttggaatcctcttcttcccctctggtgttctcagtacggaggagtgataccggagct

SEQ ID NO: 82216 - DNA, 133 bp, Glycine max
  unsure (1)..(133): unsure at all n locations
ttttacttcccctatggctcgtcactccttgctcttagccctcctcctcttcgccgccgtggccaccgncgcgatggcggtggccgcgtccgacgccgacgacatcctgatccgtcaggtggtgccagatgtt

SEQ ID NO: 82217 - DNA, 67 bp, Glycine max
  unsure (1)..(67): unsure at all n locations
ttttctggcagaaactaacaataaatatttaagaaccaaacctaaataacagggtnagtgataaaaa

SEQ ID NO: 82218 - DNA, 238 bp, Glycine max
ctcgagcggctcgagctccagccacacaatcgttttcagcacctccaacaccaacagggcgagcatcgccttccataccagggcaggcacccactgtttccactcgaacggctggccctactacaccgcaaacaacattaattcgatcaccctcctaaaccatatcttagacctgatccgatccagagattaaatcgcacctcgcacaggctatgcgaaacttccaacatgccctctg

SEQ ID NO: 82219 - DNA, 181 bp, Glycine max
ctactttctaccgacctaacacgagaggagaggtgagcaagagaggcaggtgtggggtctgcatctattgaatggtagcaaggcacagtgcatgagggtcgttcgcccgatcgagggctcttgccagagtttacgtgtagcatgctgccgctagctcaccaaatgctttctaatgcggcac

SEQ ID NO: 82220 - DNA, 174 bp, Glycine max
cgaagtgttcgccccgcagactgatcccaatggtttgatccagtgtactgttggtcgtaagggctctaaggcaaagttgtgaatacgataactggggctgttcttttgcatatcacagcgagactggcgtttatggttccgaacgtagacatactttatttgataccatttttc

SEQ ID NO: 82221 - DNA, 367 bp, Glycine max
acaatatgtgtgcatatgggctcaatcctggtatttcaggttctcgtcttttgggcaccattcctcagtccatttcacagcaaactgtttggaatcaaatggcaacagtgagaacaccattgaattttgattctagcaagcagagcttttgtcaattttctattgaccttctcggtggaggaattttagtggacaaaactggagattggatcacacttatacaaaattctccaattagtaacttgttgagagttgctgcttggaagaaaggttgtttaatggtcaagattgtgatgtctgggaatgcagcagtcaaaaggagtgattgggcctcattggtacaaagtgttttaacaaacagcaacag

SEQ ID NO: 82222 - DNA, 450 bp, Glycine max
agagaatcccccattgtcaagcctgcttttgagaaacgcaccagccataagcccaggagttgagtagcctactggcgacaggaccctcagttgtaaacccccgcaatggagaagcctccaaccgagaagccaccagtgtacaagcccccagttgagaaaccctcagtgtgcaagcccccagttgaaaaaccaccagtgtacaagcccccaggtgagaaaccaccagtgtacaagcccccagttgaaaaacccccagattacaagcccccagttgaaaaacccccagggtacaagcccccagtagaaaaaccaccagtgtacaagcccccagttgagaagcccccagtttacaagcccccagttgagaagccaccagtttacaagcccccagttgagaagccaccagtatacaagccaccagttgagaagcctccagtgttcaagccacca

SEQ ID NO: 82223 - DNA, 476 bp, Glycine max
gcaatttagaaagttagcagattgtgattttctcaagagaaactttaagcagatgtctaatgttttgtgggtggctcctgaggataaggcgagtttatggtcacaacttcattatgtttcgtgtaataatctggaaatgcaagaagcttatcttgtcaatctcgtaaatgtgttacgagaattgtatttgcacagtccagaggaagctcgccaattgagaaggaaagctctctctcgtattgaatggctgcaaaaagctgatgtgcctaccatagcacaaattgaagagttccattcgatgcaaaggatgatgaatgctcctgattcaaatgataatattgatctactgttgagcattgatttgttgggtttacaaggagcaagtaaagcttttccaaacaagattggtttttgatgataagcttggagtggcttacacacaagaattctttgatgggaattttccagtggattct

SEQ ID NO: 82224 - DNA, 240 bp, Glycine max
aatatgtcaagccttactttagtggttctaaattgaaaagctttctagctggtcataatatcaccattactgatggtattgacaaaactagtgcaactttgcaatttagaaagttagcagattgtgattttctcaagagaaactttaagcagatgtcttatgttttgtgggtggctcctgaggacaaggcgagtttatggtcacaacttcattatgtttcgggtaataatctggaaatgc

SEQ ID NO: 82225 - DNA, 313 bp, Glycine max
caagcatctataatagggggtgttatagtattcatcaaggagctacaccaagttcttcaagctttggagtcccagaaaagaagaaagagtttgagccctagccctggcccgagcccacgaacacttcagccaatgtttcatcaacttgatagcccctccatgattgggaccaattctttcaaggaactaggagcaagctgcatctctcctgttgcggatgttgaagtgaaaatctcgggttcatatgtgatcttgaaagtcatttgccacagaattccaggtcaagttgcaaagatcataactgttttggaga

SEQ ID NO: 82226 - DNA, 428 bp, Glycine max
aactagttacgatgcatgctttactcacgttcattcaaacaattaaacaaagcaagcaacatatgatgttgttcatactaagcataatttacaatcttgtcaatatatcatcatcaaaaccaactgaaacaaagtggacttcttcaaacttcaatatggtcatcatccagcacctctgttctaactttaaggtcaaatttctccttttgaaacacacaaattggtgaaagttgtctcccacaaagagataaatttctttcccacctttcctagcatatataattataaagtacataaaaatcaaaagatatgtaagttatggccaaaatacacgagcaatgtgtccattctgcagttcaagtgaggagagcgctgtccacctattttttcattgtagaaggatatccaatgtgtccattcttcaattc

SEQ ID NO: 82227 - DNA, 126 bp, Glycine max
aattaattagttttttctttgtagtcatgccaagtaattaaaaataaagaaaaggtgaagtcttttctttatttttaaacacagagacatgacacaatgaaatcactatttcttctcgagcacgaa

SEQ ID NO: 82228 - DNA, 431 bp, Glycine max
tgtttttacaatccttcaaaaattttgtttctttgtgtgtgtatggagatgataacttaattagtgttcatgaatatgtcaagccttactttagtggttctaaattgaaaagctttctagctggtcataatatcaccattactgatggtattgacaaaactagtgcaactttgcaatttagaaagttagcagattgtgattttctcaagagaaactttaagcagatgtctaatgttttatgggtggctcctgaggacaaggcgagtttatggtcacaacttcattatgtttcgtgcaataatctggaaatgcaagaagcttatcttgtcaatctcgtaaatgtgttacgagaattgtatttgcacagtccagaggaagctcgccaattgagaaggaaagctctctctcgtattgaatggctgcaaaaagct

SEQ ID NO: 82229 - DNA, 69 bp, Glycine max
ttgggcaagaatttatctcttaagcttaactgatttattggttactaactcatggtctacttttgtgta

SEQ ID NO: 82230 - DNA, 309 bp, Glycine max
gattatcctaagtctttgggaatagtgctgcaatggcttcaagtcaggaggaggtgacccttttgggagctactggaagcccatttgtgtgcagggttcatattgccctcaagttgaagggagttcaatacaaatatgtcgaagaaaatttgaggaacaagagtgaactgcttctcaaatccaacccagttcacaagaaggttccagtgtttattcacaatgagaagcccatagcagagtctcttgtgattgttgaatacattgatgagacatggaagaacaaccccatcttgccttctgatccttacc

SEQ ID NO: 82231 - DNA, 451 bp, Glycine max
cgaaacataatgaagttgtgaccataaactggaaatgcaagaagcttatcttgtcaatctcgtaaatgtgttacgagaattgtatttgcacagtccagaggaagctcgccaattgagaaggaaagctctctctcgtattgaatggctgcaaaaagctgatgtgcctaccatagcacagattgaagagttccattcgatgcagaggatgatgaatgctcctgattcaaatgataatattgatctactgttgagcattgatttgttgggtttacaaggagcaggtaaagcttttccaaacaagattgtttttgatgataagcttgtgttggctaacacacaagaattctttgatggaaattttccagtggattcttggttaccaatttttgagaattgtctctatcctgtaagtcaattaccttcagaagctgtcgttgtaaatgttacatgt

SEQ ID NO: 82232 - DNA, 367 bp, Glycine max
gttcccaggacctattgtgttttaaatccacaaaatccttttgtgttaaataggtggatgggaaaattgactttcccccagggcacttcccgaagtgttaagagaatgcctctttctatagggggaggagctggtgcaaagaatgctattctcatgaatatgccaaatgctgttctttcaatgtggagatattttgttggagatctcgtctttgaagtttctaagatgacttctccctacattaaatgtacagtctctttcttcatagcatttggaaatttggctgatgataccatcaattttgaggcttttccccacaagctggtgcagtttggagagattcaggaaaaaagtgtattggaatttt

SEQ ID NO: 82233 - DNA, 406 bp, Glycine max
  unsure (1)..(406): unsure at all n locations
gagagttgctgcttggaagaaaggctgtttaatggtcaagattgtgatgtctgggaatgcagcagtcaaaaggagtgattgggcctcattggtacaagtgtttttaacaaacagcaacagtacagagcattttgatgcatgtaagtggacaaaatcagaaccacattcctgggaattgatcttcccaatagaggtatgtggtcctaataatggttttgaaatgtggagttctgattgggcaaatcaaacttcatggcatttgagtttccttattgacaatcccaaacagtctacagtttttgatattctcttgggaatctctcaagattttgaaattgctggtaatactcttatgccagctttttctgnnncacaggctactgccagatcttctgaaaatgctgaa

SEQ ID NO: 82234 - DNA, 407 bp, Glycine max
aatttaattttgtatttgtttggctttgattgaaaatcttctctgacagagacttgatatttactctcaaattaggattgatatagataacccttataaacagaagttgaaaacaaacaaacggaggtttgctaaaacatttccactctcccttttgcgttttatctatgttgagccgttagatttaattttaaaattcgtacacaacaacttaaattgcaaaccaaacatgttaatttttaattagatgacattataaaatttcttttaactttcaattcatttactatttgcttatttttataatgaattggtttttgtttaagtattactacataaaaatatttttttgttaatataaagttaatattttggtcccatcaatgataaaatgtttattttataat

SEQ ID NO: 82235 - DNA, 402 bp, Glycine max
acctagtgtctaacactcttactgtcgcttttttcctctcttgtttccttttctcttgtttaaaaatatccccttacacgcgtggcctaatacgtccggtctgactctctggagaagaggtcgtgtaatactttcttaagccccccccctatctacccagctttttgtttattttatacaggaaaaggacggttttttgggggggctcacgcatgtttatacccttgcgccgctgagcgctgcagcgttttctttctatgttcttcgcttcgtccggaggttcttccaaagagcattcgaaaaaagtacccttgttaccactttacgactgctacggcaaaagtttgggaaaggggtcgacttgcgctcgtcttgttgtaaataacgcctgcgcattaatgc

SEQ ID NO: 82236 - DNA, 412 bp, Glycine max
atcaaatggcaacagtgagaacaccattgaattttgattctagcaagcagagcttttgtcaattttctattgaccttctcggtggaggaattttagtggacaaaactggagattggatcacacttatacaaaattctccaattagtaacttgttgagagttgctgcttggaagaaaggctgtttaatggtcaagattgtgatgtctgggaatgcagcagtcaaaaggagtgattgggcctcattggtacaagtgtttttaacaaacagcaacagtacagagcattttgatgcatgtaagtggacaaaatcagaaccattcctgggaattgatcttcccaatagaggtatgtggtcctaataatggttttgaaatgtggagttctgagtgggcaaatcaaacttcatggcatt

SEQ ID NO: 82237 - DNA, 279 bp, Glycine max
cataaacagtataaaatattcaaaataggtcaagaaaagtgacattgatgatgtgcctaatctaagttctcttcttgtcttaaaatttcaaatgtacagtttactacacttagacggcaaggtctgagttgctctgattgattgtctaatgtctaatattattggtgcaacagtcacaattagcatgcaaaaaaaaaaaaaaaaaaaaaaaaaaaaaaaaaaaaaaaaaaaaaaaaaaaaaaaaaaataaaaaaaaaaaaaaaaaaaaaaaaaaaaata

SEQ ID NO: 82238 - DNA, 189 bp, Glycine max
ctctctcaaccgttgttttagacagagacacacacatagacccttatccttcgctgtcttaccgatctctgtgcttttggagctcgcagtagcatttctgcgaccattcgtcctaatggcaactgcccccgcgccgtcttcgccgacggcgaataacggcaccgcgcctgcatcgacgactccggccac

SEQ ID NO: 82239 - DNA, 404 bp, Glycine max
gttttaaattcacaaaatccttttgtgttaaataggtggatggggaaactgactttcccccagggcacttcccgaagtgttaaaagaatgcctctttctataggaggaggagctggtgcaaagaatgctattctcatgaatatgccaaatgctgttctttcaatgtggagatattttgttggagatctcgtctttgaagtttctaagatgacttctccctacattaaatgtacagtctctttcttcatagcatttggaaatttggctgatgacaccatcaattttgaggcttttccccacaagttggtgcagtttggagagattcaggaaaaagttgtattgaaattttcacaagaggaatttcttacagcttggtcaactcacgtgcgtcctacaacaactct

SEQ ID NO: 82240 - DNA, 407 bp, Glycine max
ctggatggactgccaccccaatgcaggatgttcaggttacaattgattggtttatttcctctcaggaatgtgttcccaggacctattgtgttttaaatccacaaaatccttttgtgttaaataggtggatgggaaaactgactttccctcagggcacttcccgaagtgttaagagaatgcctctttctatagggggaggagctggtgcaaagaatgctattctcatgaatatgccaaatgctgttctttcaatgtggagatattttgttggagatctcgtctttgaagtttctaagatgacttctccctacattaaatgtacagtctctttcttcatagcatttggaaatttggctgatgacaccatcaattttgaggcttttccccacaagctggtgcagtttgga

SEQ ID NO: 82241 - DNA, 409 bp, Glycine max
tactgatggtattgacaaaactagtgcaactttgcaatttagaaagttagcagattgtgattttctcaagagaaactttaagcagatgtctaatgttttatgggtggctcctgaggacaaggcgagtttatggtcacaacttcattatgtttcgtgcaataatctggaaatgcaagaagcttatcttgtcaatctcgtaaatgtgttacgagaattgtatttgcacagtccagaggaagctcgccaattgagaaggaaagctctctctcgtattgaatggctgcaaaaagctgatgtgcctaccatagcacagattgaagagttccattcgatgcagaggatgatgaatgctcctgattcaaatgataatattgatctactgttgagcattgatttgttgggtttacaa

SEQ ID NO: 82242 - DNA, 392 bp, Glycine max
aatcaacccatactccatggaatggactggtttggccaatagattactgagtaagggcaatgatattctgtgttgcgattatgctagttttgatggtttgattaccaagcaagttatgagcaagatggcagaaatgataaacagtctttgtggtggtgatgaaaaattgatgcgtgaaaggacgcacctgctgttggcttgttgttcaaggatggcaatttgtaagaaagatgtttggagagttgaatgtggaatcccttctggatttccgctcacagttatttgcaatagcatttttaatgagatgctcattagatatagctatgaaaaattactgcgccaggctaaagctccaagtatgtttttacaatccttcaaaaaattttgttctt

SEQ ID NO: 82243 - DNA, 453 bp, Glycine max
gtcgcttgcacgcgtccgtaagctcggaattcggttcgggagaaaaagataaaaagaaaaaggagaaagacctaattttgtcactgtaattcttcttcttcaaagaaaaccccaatttcgaacgcttcaaattcaattcaggaaaccctagtgattaatttcgttgcgaaacggcgattcaagattatcgtgagccagaagatggtagcggaagcggaaattatctgtcagcagaacattccgatgttggacgtgaagtatcatatttgcgtggctcaagaacacaacgtgaaggttgaggtttcacccaaatcaccttcacctcctgttccgatctttggccaagtatggttttcctcttaacacctcgctttgaatccgttttttttcttccttttgggtttgcgttcaaccggggttggtacttgtttgatttggttgaacgaattagtt

SEQ ID NO: 82244 - DNA, 409 bp, Glycine max
aaatcagaaccacattcctgggaattgatcttcccaatagaggtatgtggtcctaataatggttttgaaatgtggagttctgagtgggcaaatcaaacttcatggcatttgagtttccttattgacaatcccaaacagtctacagtttttgatattctcttgggaatctctcaagattttgaaattgctggtaatactcttatgccagctttttctgttccacaggctactgccagatcttctgaaaatgcggaatcctctgcatgatctggaatttatgttttctttcgcttgttcgttcgtttaattcaataaaggaaattgggcatgaccctcttgttgagtatgctctgcctatttgaaaatttccacacctcttttaattgtcgtaatgacgtgtgaagtgtgt

SEQ ID NO: 82245 - DNA, 171 bp, Glycine max
acaagattgtttttgatgataagcttgtgttggctaacacacaagaattctttgatggaaattttccagtggattcttggttaccaatttttgtgaattgtctctatcctgtaagtcaattaccttcagaagctgtcgttgtaaatgttacatgtggtagtggacgtggtg

SEQ ID NO: 82246 - DNA, 357 bp, Glycine max
aggttcttgttttttgggcaccattcctcagtccatgttacagcaaactggttggaatcaaatggcaacagtgagaacaccattgaattttgattctagcaagcagagcttttgtcaattttctatcgaccttctcggtggaggaattttagtggacataactggagattggatcacacttatacaaaattctccaattagtaacttgttgagagttgctgcttggaagaaaggctgtttaatggtcaagattgcgatgtctgggaatgcagcagtcaaaaggagtgattgggcctcattggtacaagtgtttttaacaaacagcaacagttccgagcattttgatgcatgtaagtg

SEQ ID NO: 82247 - DNA, 417 bp, Glycine max
attgaattttgattctagcaagcagagcttttgtcaattttctattgaccttctcggtggaggaattttagtggacaaaactggagattggatcacacttatacaaaattctccaattagtaacttgttgagagttgctgcttggaagaaaggttgtttaatggtcaagattgtgatgtctgggaatgcagcagtcaaaaggagtgattgggcctcattggtacaagtgtttttaacaaacagcaacagtacagagcattttgatgcatgtaagtggacaaaatcagaaccacattcctgggaattaatcttcccaatagaggtatgtggtcctaataatggttttgaaatgtggagttctgagtgggcaaatcaaacttcatggcatttgagtttccttattgacaatcccaaaca

SEQ ID NO: 82248 - DNA, 373 bp, Glycine max
  unsure (1)..(373): unsure at all n locations
aaaattcacagacaccaaccaaccatgttcactcaaattcttagatagttacttagttagctctttccgccatggaaggtaacaaggacgaagcattacgctgcgttcgcatcgccgaagaagccatcgcgtcgagaaacaaagaccgcgccctcaaattcctcaaaatcgcgcaacgtctcaaccgcgatttgcccctccaatccctgctcgacaagtgcaaccgcctcgattctcacaccgnctncaccgcaggcggcagcggcgcctctctggcgaacggccactctcctcgtcgcgagggcttaaacgtggaaagaaattacacggacgtgcacctaattaggggaatcaaaggaaagagcgattatta

SEQ ID NO: 82249 - DNA, 388 bp, Glycine max
gatcgagataactagaaacagtgtgatgaaaatgaaggtccttgttttcttcgttgctacaattttggtagcatggcaatgccatgcgtacgatatgttccctctccgaatgaacactggctatggtgcccgtactccggaggtgaaatgcgcaagttggaggcttgctgtggaagcacacaacatctttggctttgagaccattcctgaagagtgcgttgaagcaacaaaggaatacatccatggcgaacaatatagatcagactccaaaacagttaaccaacaagcttacttttatgccagagacctcgaagtccatcccaaggacacatttgtgttcagtatagatggcaccgtactctctaatattccatactacaaaaaacat

SEQ ID NO: 82250 - DNA, 358 bp, Glycine max
gttgaatgtggaatcccttctggatttccgctcacagttatttgcaatagcatttttaatgagatgctcattagatatagctatgaaaaattactgcgccaggctaaagctccaagtatgtttttacaatccttcaaaaattttgtttctttgtgtgtgtatggtgatgataacttaattagtgttcatgaatatgtcaagccttactttagtggttctaaattgaaaagctttctagctggtcataatatcaccattactgatggtattgacaaaactagtgcaactttgcaatttagaaagttagcagattgcgattttctcaagagaaactttaagcagatgtctaatggtttgg

SEQ ID NO: 82251 - DNA, 193 bp, Glycine max
ggagcaggtaaagcttttccaaacaagattgtttttgatgataagcttgtgttggctaacacacaagaattctttgatggaaattttccagtggattcttggttaccaatttttgtgaattgtctttatcctgtaagtcaattacctccagaagctgtcgttgtaaatgttacatgtggtagtggacgtggtg

SEQ ID NO: 82252 - DNA, 399 bp, Glycine max
ctcgtaaatgtgttacgagaattgtatttgcacagtccagaggaagctcgccaattgagaaggaaagctctctctcgtattgaatggctgcaaaaagctgatgtgcctaccatagcacagattgaagagttccattcgatgcagaggatgatgaatgctcctgattcaaatgataatattgatctactgttgagcattgatttgttgggtttacaaggagcaggtaaagcttttccaaacaagattgtttttgatgataagcttgtgttggctaacacacaagaattctttgatggaaattttccagtggattcttggttaccaatttttgtgaattgtctttatcctgtaagtcaattaccttcagaagctgtcgttgtaaatgttacatgtggtagt

SEQ ID NO: 82253 - DNA, 390 bp, Glycine max
ctcgagccgaatcggctcgagcgctccgcaccagtttcaccgcacgaatatcttgttgtttggagcgatccgagaaaaactctgtaaacatgttggtttaccaggacctccttacaggtgatgagcttctctctgactccttccgttacaaggaaattgagaatggaatgctgtgggaagttgaggggaagtgggttgttaaaggagcagttgatgtagacattggtgcaaacccttctgctgagggtggaggagaagatgagggagttgatgatgcagctgttaaggttgttgacattgttgacacattcagactttaagagcaacccgcattcgataagaagcagtttgttaccttcatgaagaggtttatcaagaatttgactccca

SEQ ID NO: 82254 - DNA, 182 bp, Glycine max
ctcatcaaaatacttccatcctttgaggagatatgcttctatgtcaagctagtacaacagagaagcatatctcatcaaaatactaacatcctttgaggaaatatgctaatttggtgaactagctcgacatactggcgcaacttggcaagagacaggaaaaatttgtgtagcaatatccacaa

SEQ ID NO: 82255 - DNA, 323 bp, Glycine max
ccccttccttaacctcggatttgggttcggggttaagttggggaaaccttccttggggccaaccgaacaaagtcaaaacatgtggggtccaacctaaatgacaaaaatgaatggcctaactttaggaatggtatctttggctaccctaatattctaattccaccaatctaggggttaaccttaagtataaacttatattccttttattacgtttgtatccaaaagctgttcgagctactatcagagaaacaccaccatctacagcaagaagagggcgctccccatcacccatctttacaaccttaaaagatcttgaagctttt

SEQ ID NO: 82256 - DNA, 284 bp, Glycine max
ctcgagccttattggctcgagcgctacgtacccataagacttttctgcagaatcgctgtcttgcacaaagcatactgctacttgccgatattaaaccgcccccgcggcaactttaagggaaacatatcgacaaccaactcacatgactgaaagaaaagatgtcataaagcccgatgggaatgtcgaatctgatgcacgtacaatggctaatgattgtgacccatctactaatggcaacgctaggattgacagacagattaagagttgtcaagagcatgggatca

SEQ ID NO: 82257 - DNA, 400 bp, Glycine max
  unsure (1)..(400): unsure at all n locations
ctacaaaagcacaatttgttagtggaaaaaccttcaaatatgatataattggtgctggtgcacattcttcaggagattttcctgaaaaggaagatcaagaaaaacccaaaaagattgataccagattgagacaaagaatagatcctcaatacaatgaggttcaggctcagatggaaacaaatttgtttaaattgtctcttgatgatgttgaaactcctaaaggttctatgttggatcttaaaatttctcaatctaaaattgcacttcccaagaacacagttggaggaaccattctgcgtagtgatctattggcaaattttttgacagagggcaattttagagcatgtgttgattngcaacgcactcatcggattaaaggaatgattaaaatggtgccaca

SEQ ID NO: 82258 - DNA, 72 bp, Glycine max
aaagaagcgaagtgaagttgaagtaagtaaagattaacacagcagtgaatgactaggcaccagattcagatt

SEQ ID NO: 82259 - DNA, 343 bp, Glycine max
cgaacacgcctccgctcggtcacgcaaaccatgcttctggttttctttccctcggagcctccaatcgctgccagcacagatggctgcttgcgaagaatcataaaccactcaaacgggcgtcaatgcgttaagagcagacttcttactacatattggatcaggagccagaccaagtgcacatattgtaccaagagtgtcacatgctaagtcgccctgaagaagatggtaccatgacaatggggactactactctggaaattaataaacagatactctatatggactacacaagctatagggtggacattctgagtgctgataccgcacacttcattcaaggatt

SEQ ID NO: 82260 - DNA, 251 bp, Glycine max
aaaagactggaaggaatgcaattgtgagcctgagtcctaccaagacacccaattagatacaattgcttgatggttttgatgaagaaattgtcttgggtgaattttctttagggagacctccatgaaagggttgcggggtggggagtggggttcagtagtggagagacgcaggcgctgtatcatatcttgtgtcaactgtagccataattcagaataatgtattatgaaataagatttaacttttgtacgcc

SEQ ID NO: 82261 - DNA, 309 bp, Glycine max
cgatgcagaggatgatgaatgctcctgattcaaatgataatattgatctactgttgagcattgatttgttgggtttacaaggagcaggcaaagcttttccaaacaagattgtttttgatgataagcttgtgttggctaacacacaagaattctttgatggaaattttccagtggattcttggttaccaatttttgtgaattgtctttatcctgtaagtcaattaccttcagaagctgtcgttgtaaatgtcacatgtggtagtggacgttgtggtttacccaccactgcttggattagttctgcagtta

SEQ ID NO: 82262 - DNA, 86 bp, Glycine max
gtttaactgggttgagggaaattgtgagtgtaaacattttgatacctatctatctggtttgaaattattataggacttgttgtttt

SEQ ID NO: 82263 - DNA, 142 bp, Glycine max
gcacaactctgcgtcgagtctgtcttggatatttcggcatccacgagttcatatccctttcattgtattttcgtatagctctcgatttctcctctttcctgtatgatcgaccggatccgatcaattgtattcattttattat

SEQ ID NO: 82264 - DNA, 372 bp, Glycine max
  unsure (1)..(372): unsure at all n locations
gtcttgttcttatctttcaaagtatggttggggttcccggaaaatcaaaagcgtgcatcaattgtcgcaagcgtcgatcgcagtgtgatatgaaacgaccctcgtgtggccaatgccaaagatctggtattacatgctccggctatcagaaagagttcatcttcctgaacagcactacgcaagaagcccangacggctccttgtcgctcgagaaggagagctactcagcgggaactagaacaaggaacccaacaactgcgggttccgccgcatcgagggcagccgctacccgtacaactncggtcgttctccacgcaactcttgagcgcagtgcctacgaaaataatgtcattgatgaatttgggcatcata

SEQ ID NO: 82265 - DNA, 404 bp, Glycine max
ggagagttgaatgtggaatcccttctggatttccgctcacagttatttgcaatagcattttcaatgagatgctcattagatatagctatgaaaaattactgcgccaggcaaaagctccaagtatgtttctacaatccttcaaaaattttgtttctttgtgtgtgtatggtgatgataacttaattagtgttcatgaatatgttaagccttactttagtggttctaaattgaaaagctttctagctggtcataatatcaccattactgatggtattgacaaaactagtgcaactttgcaatttagaaagttagcagattgtgattttctcaagagaaactttaagcagatgtctaatgttttgtgggtggctcctgaagacaaggcgagtttatggtcacaactt

SEQ ID NO: 82266 - DNA, 332 bp, Glycine max
ggcaaatcaatacttcatggcatttgagtttccttattgacaatcccaaacagtctacagtttttgatattctcttgggaatctctcaagattttgaaattgctggtaatactcttatgccagctttttctgttccacaggctactgccagatcttctgaaaatgcggaatcctctgcatgatctggaattcgtgttttctttcgcttgttcgtttgtttaattcaataaaggaaattaggcatgaccctcttgttgagtatgctctgcctatctgaaaatttccacacctcttttaattgtcgtaatgatgtgtgaagggtgtgttatttt

SEQ ID NO: 82267 - DNA, 360 bp, Glycine max
  unsure (1)..(360): unsure at all n locations
ttagatatatctatgaaaaattactgcgccaggctaaagctccaagtatgtttttacaatccttcaaaaattttgtttctttgtgtgtgtatggtgatgataacttaattagtgttcatgaatatgtcaagccttactttagtggttctaaattgaaaagctttctagctggtcataatatcaccattactgatggtattgacaaaactagtgcaactttgcaatttagaaagttagcagattgtgattttctcaagagaaactttaagcagatgtctaatgttttatgggtggctcctgaagacaaggcgagtttatggtcacaacttcattatgtntcgtgcaataatcttggaatgc

SEQ ID NO: 82268 - DNA, 398 bp, Glycine max
atttgtgtcactggatggactgccactccaatgcaggatgttcaggttacaattgattggtttatttcctctcaggaatgtgttcccaggacttattgtgttttaaatccacaaaatccttttgtgttgaataggtggatggggaaactgactttcccccagggcacttcccgaagtgttaagagaatgcctctttctatagggggaggagctggtgcaaagaatgctattctcatgaatatgccaaatgctgttctttcaatgtggagatattttgttggagatctcgtctttgaagtttctaagatgacttctccctacattaaatgtacagtctctttcttcatagcatttggaaatttggctgatgacaccatcaattttgaggcttttcccca

SEQ ID NO: 82269 - DNA, 319 bp, Glycine max
atttgcaatatcatttttaatgagatgctcattagatatagctatgaaaaattactgcgccaggctaaagctccaagtatgtttttacaatccttcaaaaattttgtttctttgtgtgtgtatggtgatgataacttaattagtgttcatgaatatgtcaagccttactttagtggttctaaattgaaaagctttctagctagtcataacatcaccattactgatggtattgacaaaactagtgcaactttgcaatttagaaagttagcagattgtgattttctcaagaagaaactttaagcaaatgtctaaaatgttt

SEQ ID NO: 82270 - DNA, 88 bp, Glycine max
cacaaaaaaaaaaaaaacacaaacggtcaaatataaaacagggggccggcccaaaaaaaaaacactccaccaacttttttcaaataaa

SEQ ID NO: 82271 - DNA, 251 bp, Glycine max
  unsure (1)..(251): unsure at all n locations
gaagagtagacgcgcagcacgcgacgaagccggaancggccgagggcaagatgataaatggcgaaaaaggcaaaaggagggggggcgcaggggaaggggaagagacgaccaccaaaacaggaaccaggggtgaagaggcccacaacaagcaaataggcgaacgggagaaaagcgggccgacacaggaaggcaacgaaggaaccaaggatgagaaaccgccaggacgcaaaaaaaaggacaaacccaagacg

SEQ ID NO: 82272 - DNA, 277 bp, Glycine max
  unsure (1)..(277): unsure at all n locations
ccagacatgacattcaaggannncagcttttgagtaccactaccaatggtgattttgttcaagggaaagatctcgcaatggttaaagttaatgtagcatgtgctgctgttggcttgacatcaagttacacttcaacttcattgttggaatctggtttgcaaaatgacagagggttaattgtggagtattttggaaggatgtcttacgttgctcataacgatttatagccccaagagaaagatttgtttggagggaaattattctcttgatattaaaa

SEQ ID NO: 82273 - DNA, 300 bp, Glycine max
attcgatgcagaggagttgaatgctcctgattcaaatgataatattgatctactgttgagcattgatttgttgggtttacaaggagcaggtaaagcttttccaaacaagattgtttttgatgataagcttgtgttggctaacacacaagaattctttgatggaaattttccagtggattcttggttaccaatttttgtgaattgtctctatcctgtaagtcaattaccttcagaagctgtcgttgtaaatgttacatgtggtagtggacgtggtggttacctatcactgcttgtattatc

SEQ ID NO: 82274 - DNA, 365 bp, Glycine max
  unsure (1)..(365): unsure at all n locations
aatagctttaataatantgctgtacatagtaatatatgtgaatttaattcgttttgcttaatttgatgattaaagttgaattgtaatacctatctatctaatttgagaaattacaattacaaaatattccctttaacaaatcaacttaaaatgaatagcaggtgataattataatcaacctaaccattaaaactcgcatggatatttactaaaaatatattctttctattctcccattgcagaccatgtttggactcacagtttggtgttattttatcaggtgatgattcctgaggcatttgccattgtcttggcaccaaatgatacctcaaggagctgtggattatttcgtctgaccaaacctg

SEQ ID NO: 82275 - DNA, 198 bp, Glycine max
cctcaggccattttaaggtaactgtccggaagcaaagggcaacagtgagaacaccatggaatttacgactctaccacgcagagcttttggcaactctctatcgaccttctaggtggaggaattccagtggacaaaactgcacgattggatcacactaatacaaaattcttcaattagaaacttggagagagcagctgc

SEQ ID NO: 82276 - DNA, 419 bp, Glycine max
ggaaaattgacttttccctgtgcacttcccgaagtgttaagagaatgcctctttctatagggggaggagctggtgcaaagaatgctattctcatgaatatgccaaatgctgttctttcaatgtggagatattttgttggagatctcgtctttgaagtttctaagatgacttctccctacattaaatgtacagtctctttcttcatagcatttggaaatttggctgatgataccatcaattttgaggcttttccccacaagctggtgcagtttggagagattcaggaaaaagttgtattgaaattttcacaagaggaatttcttacagcttggtcaactcaggtgcgtcctgcaacaactctgttggctgatgggtgtccatatttgtatgcaatggggcatgatagttcagtgtctaca

SEQ ID NO: 82277 - DNA, 413 bp, Glycine max
ggcaacagttatttttatcattgaattttgattctagcaagcagagcttttgtcaattttctattgaccttctcggtggaggaattttagtggacaaaactggagattggatcacacttatacaaaattctccaattagtaacttgttgagagttgctgcttggaagaaaggctgtttaatggttaagattgtgatgtctgggaatgcagcagtcaaaaggagtgattgggcctcattggtacaagtgtttttaacaaacagcaacagtacagagcattttgatgcatgtaagtggacaaaatcggaaccacattcctgggaattgatcttcccaatagaggtatgtggtcctaataatggttttgaaatgtggagttctgagtggcaaatcaaacttcatggcattgagttt

SEQ ID NO: 82278 - DNA, 136 bp, Glycine max
  unsure (1)..(136): unsure at all n locations
cgcgacgaagccggaaacggccggggagcgtattaaccggaacaaaagcaacgcgcgggtcaagagagggaggcgccccacacacgngtacgatnactaaagggaaagaaaaccacgcccagagcaaggacacaga

SEQ ID NO: 82279 - DNA, 409 bp, Glycine max
  unsure (1)..(409): unsure at all n locations
ggcagctgagggttcattcatgggagagaagacgtttgtggtgagcttgacatgtagcaaaaggacagacacaatggtaaaactgtgtgcggtgttcgaatctttaaagctgaaagtcattacggccaatatcacttctttttcaggcacgcttctgaagacagtcttcatccaggttagtcttccattttgcccttcttaaattaataagtaaataaataaattgttaattgtttaatatttgtgtttaaagattaaattagtttttttaaaaataatactcatcggctagaattttgggggccacatactaggaaacctatggaccactttaataaaagtgggaaacccatttatgggataatgngcattttagggtcaatgatgagaattaaggaccttatggcag

SEQ ID NO: 82280 - DNA, 361 bp, Glycine max
  unsure (1)..(361): unsure at all n locations
gtgcctaccatagcacatangatgagttccattcgatgcagaggatgatgaatgctcctgattcaaatgataatattgatctactgttgagcattgatttgttgggtttacaaggagcaggtaaagcttttccaaacaagattgtttttgatgataagcttgtgttggctaacacacaagaattctttgatggaaattttccagtggattcttggttaccaatttttgtgaattgtctctatcctgtaagtcaattaccttcagaagctgtcgttgtaaatgttacatgtggtagtggacgtggtggtatattcattattttttttttattttattttattttaattgatttttttttatt

SEQ ID NO: 82281 - DNA, 373 bp, Glycine max
  unsure (1)..(373): unsure at all n locations
tgcacagnccagagtaagttcgtcaatngagaaggaaagctctctctcgtattgaatggctgcaaaaagctgatgtgcctaccatagcacagattgaagagttccattcgatgcagaggatgatgaatgctcctgattcaaatgataatattgatctactgttgagcattgatttgttgggtttacaaggagcaggtaaagcttttccaaacaagattgtttttgatgataagcttgtgttggctaacacacaagaattctttgatggaaattttccagtggattcttggttaccaattnttgtgaattgtctctatcctgtaagtcaattaccttcagaagctgtcgttgtaaatgttacatgtggtagtgg

SEQ ID NO: 82282 - DNA, 367 bp, Glycine max
  unsure (1)..(367): unsure at all n locations
agagttngacaacgcatgcacgcgtacttaagctcggaattctgctcgaggnaccgatttttagtaatttttcncacnncaaacncaacggggggagtccttttcatgtggagctgtacccccctaaattccttccatttttattaatcaaatacattcaatttcagtttcatgtcatttctgaaacctctttctgggtttacttcccttctcttgtttttttcctttctgggatgacaattttcgtttagagattcctggctgtggattttttctcagaaatgcgtaaagatttcttcttatgactgtgttcagcgtcgaattcaagaatgcgattccgagttaggtgaagctgagatgtgattac

SEQ ID NO: 82283 - DNA, 445 bp, Glycine max
  unsure (1)..(445): unsure at all n locations
caacagngagaatatcattgatattttgattctagcaagcagagcttttgtcagttttctattgaccttctcggtggaggaattttagtggacaaaactggagattggatcacacttatacaaaattctccaattagtaacttgttgagagttgctgcttggaagaaaggctgtttaatggtcaagattgtgatgtctgggaatgcagcagtcaaaaggagtgattgggcctcattggtacaagtgtttttaacaaacagcaacagtacagagcattttgatgcatgtaagtggacaaaatcagaaccacattcctgggaattgatcttcccaatagaggtatgtggtcctaataatggttttgaaatgtggagttctgagtgggcaaatcaaaccttatggcatttgagtttccttattgacaatcccaaacagtctacagttt

SEQ ID NO: 82284 - DNA, 394 bp, Glycine max
  unsure (1)..(394): unsure at all n locations
gtgagttngangtgacgatgtataactagaaacagngtgatgaaaatgaaggtctttgttttcttcgttgctacaattttggnagcatggcaatgccatgcgtacgatatgttccctctccgaatgaacactggctatggtgcccgtactccggaggtgaaatgcgcaagttggaggcttgctgtggaagcacacaacatctttggctttgagaccattcctgaagagtgcgttgaagcaacaaaggaatacatccatggcgaacaatatagatcagactccaaaacagttaaccaacaagcttacttttatgccagagacctcgaagtccatcccaaggacacatttgtgttcagtatagatggcacccgtactctttaatatcccatcctac

SEQ ID NO: 82285 - DNA, 416 bp, Glycine max
ccgtgacatgcgcttgtttgtcgctgtcggtgtcatcaagtccgtcgtcaagtccgataaggccggcgtaagttttcgagttcgctgttcaaaattgtgtcctgctaaccagttcgtctgcgcaaaaggctggaaaaattaccaaggctgctcagaaggtaaagttgctatcaattgtcccagaggtgagacaacatgttgacaaatattaggcctcaaagaaataagtggttccgcctatggttcctcttgtttctttccctcttcgactcgaaaaattcgtggaggatttggtggtgatggagcatttcttacttttctaacggtttacgaatcatgggaagggaggactgctagatttacttctatcctctcaacaaaaaatagaagtgatgatgttctgacagttaacgacc

SEQ ID NO: 82286 - DNA, 385 bp, Glycine max
  unsure (1)..(385): unsure at all n locations
cgggaatngnattttcacttctcataggaagctcgccaattgagaaggaaagctctctctcgtattgaatggttgcaaaaagctgatgtgcctaccatagcacagattgaagagttccattcgatgcagaggatgatgaatgctcctgattcaaatgataatattgatctactgttgagcattgatttgttgggtttacaaggagcaggtaaagcttttccaaacaagattgttttttgatgataagcttgtgttggctaacacacaagaattctttgatggaaattttccagtggattcttggttaccaatttttgtgaattgtctttaatcctgaagtcaattacctttagaagctgtcgntgtaaatgttacatgtggtagt

SEQ ID NO: 82287 - DNA, 428 bp, Glycine max
  unsure (1)..(428): unsure at all n locations
gaaagatgnangtagagttgaatgtggaatcccttctggatttccgctcacagttatttgcaatagcatttttaatgagatgctcattagatatagctatgaaaaattactgcgccaggctaaagctccaagtatgtttttacaatccttcaaaaattttgtttctttgtgtgtgtatggtgatgataacttaattagtgttcatgaatatgtcaagccttactttagtggttctaaattgaaaagctttctagctagtcataacatcaccattactgatggtattgacaaaactagtgcaactttgcaatttagaaatttagcagattgtgattttctcaagagaaactttaagcagatgtctaatgttttgtgggtggctcctgaggaccaggcgagtttatggtcacaactctattatgtttcgt

SEQ ID NO: 82288 - DNA, 401 bp, Glycine max
  unsure (1)..(401): unsure at all n locations
taagtancttaanatttcaagccttactttagtggttctaaattgaaaagctttctagctggtcataatatcaccattactgatggtattgacaaaactagtgcaactttgcaatttagaaagttagcagattgtgattttctcaagagaaactttaagcagatgtctaatgttttatgggtggctcctgaggacaaggcgagtttatggtcacaacttcattatgtttcgtgcaataatctggaaatgcaagaagcttatcttgtcaatctcgtaaatgtgttacgagaattgtatttgcacagtccagaggaagctcgccaattgagaaggaatgctctctctcgtattgaatggttggaaaaagctgatgtgcctaccatagcacatattgaagagtt

SEQ ID NO: 82289 - DNA, 429 bp, Glycine max
  unsure (1)..(429): unsure at all n locations
gatgaattgagttannntattaatcagatgagggtgactttgaatgggtgcatgatgatttagttgaacagctgaaattggaattgaaaaattcaaggcaaggaggacttgccacaattttagaagaagtggaagaggcgaacgaagaggaagaggtggtggcgtttgaagaggaagaaagagtgtccccaagagtggttgaagatccaaagccaatggaaattgaagagaagcttgaatacaaggatcaaattgatgaaattcatatagtttacaagagctatgcagagaagatgaagaaacttgatatcttgaattaccagaccatgcacgcattaggtcttcttcaactaaaagaccctctaaaattaanttcattaccaaaatccgcattccaaggtgcaaagcctgtaatttcttagaacttgt

SEQ ID NO: 82290 - DNA, 439 bp, Glycine max
gctggtcataatttttcctttactgatggtattgacaaaactagtgcaactttgcaatttagaaagttagcagattgtgattttctcaagagaaactttaagcagatgtctaatgttttatgggtggctcctgaggacaaggcgagtttatggtcacaacttcattatgtttcgtgcaataatctggaaatgcaagaagcttatcttgtcaatctcgtaaatgtgttacgagaattgtatttgcacagtccagaggaagctcgccaattgagaaggaaagctctctctcgtattgaatggctgcaaaaagctgatgtgcctaccatagcacagattgaagagttccattcgatgcagaggatgatgaatgctcctgattcaaatgataatattgatctactgttgagcattgatttgttgggtttacaaggagcaggta

SEQ ID NO: 82291 - DNA, 393 bp, Glycine max
  unsure (1)..(393): unsure at all n locations
gataaacagnctttttggtgntatgaaaaattgatgcgtgaaaggacacacctgctgttggcttgttgttcaagaatggcaatttgtaagaaagatgtttggagagttgaatgtggaatcccttctggatttccgctcacagttatttgtaatagcatttttaatgagatgctcattagatatagctatgaaaaattactgcgccaggctaaagctccaagtatgtttttacaatccttcaaaaattttgtttctttgtgtgtgtatggtgatgataacttaattagtgttcatgaatatgtcaagccttactttagtggttctaaattgaaaagctttctagctggtcataatatcaccattactgatggtattgacaaaactagtgcaact

SEQ ID NO: 82292 - DNA, 307 bp, Glycine max
  unsure (1)..(307): unsure at all n locations
gaagagctaagacgacgcaggcacgcgnacgnaagcncggaanncggcacgagcacgagccgtaaattgggagagcanagcaccaccaccagcgggggcagnagcgggagaggggggacggcacccccaagaccanggggcaaaagcannaagcgacggcgaaccaggaaagggcgacaacaaggaccccgcaaccacccggcccacagggaaancngagaagaggaaagaagaagaaaccccaaaagcnagacagaacaacgcagcaagaaaggcaagagaaggccaaagaaccgacaaaccaaag

SEQ ID NO: 82293 - DNA, 418 bp, Glycine max
  unsure (1)..(418): unsure at all n locations
ctcgagccttttcgtcncgagattgaattntgattctagcaagcagagcttttgtcaattttctattgaccttctcggtggaggaattttagtggacaaaactggagattggatcacacttatacaaaattctccaattagtaacttgttgagagttgctgcttggaagaaaggttgtttaatggtcaagattgtgatgtctgggaatgcagcagtcaaaaggagtgattgggcctcattggtacaagtgtttttaacaaacagcaacagtacagagcattttgatgcatgtaagtggacaaaatcagaaccacattcctgggaattaatcttcccaatagaggtatgtggtcctaataatgggtttgaaatgtggagttctgagtgggcaaaacaaacttaatggcatttgagtttc

SEQ ID NO: 82294 - DNA, 143 bp, Glycine max
  unsure (1)..(143): unsure at all n locations
taagctcggaanncggcncgaggnaaaggaanccaatttaatacactcccccacnncncgaaccccggcagggtctttatgggggggggcacgcccccaacaccngccaaacccccattaccgcagctcctaaatttggaggc

SEQ ID NO: 82295 - DNA, 393 bp, Glycine max
  unsure (1)..(393): unsure at all n locations
cgcanaaccaaaatanatactctctctctctctctctctgtgtgtctctctttgggtctgggtcgccccctctatgtgcgctgatgcgtttctacaaaaacacaacctttgaactgtcttttctacttctttgcttgctccttatttcttccttcgccgaatcctagaatgtcctcgtcggggttccctggcggcggtggtgcgtcggagtttttcgccggggtaggtggtttcggcggcagatccattccggcgaccagcatgaacaacctcaacgccgtcgtctccggcaccaacaacaacctccaccctctctaccgaacccaacaacaacaacagcagctacagcaacagaacctcctcgcaatgttttgagattcctcctcgcagatc

SEQ ID NO: 82296 - DNA, 443 bp, Glycine max
ggcacccatcagccaacagagtcgttgcgggacgcacctgagttgaccaagctgtaagaaattccaggtgattttgtcattggtgttaagttgacaaccataaacaatatgtgtgcatatgggctcaatcctggtatttcaggttctcgtcttttgggcaccattcctcagtccatttcacagcaaactgtttggaatcaaatggcaacagtgagaacaccattgaattttgattctagcaagcagagcttttgtcaattttctattgaccttctcggtggaggaattttagtggacaaaactggagattggatcacacttatacaaaattctccaattagtaacttgttgagagttgctgcttggaagaaaggttgtttaatggtcaagattgtgatgtctgggaatgcagcagtcaaaaggagtgattgggcctcattggt

SEQ ID NO: 82297 - DNA, 432 bp, Glycine max
tctcaacatggccttgagccgctgtttactatccttatcccaaagggtgaaagcaccatcaacaatgagggttcaatatttgcttactcagtctgctatgactggagtaaaggggcagaaaattctaatcctgcaacagcaaagacctacattttcctgcacttgcctcaggaatctgaggtcaggggcaaaccacgcattggtgctactgggagaaagtagagatgatcctgctctgggaaactgttctattatgtatatagttggctagtacttgtataaaggtataagttgatatcaaaatatagaggttgaatgggctggtcgttcttgaaagatttttgttttttgtacgctgtacttgaaagaaattatcaactgattcttggtgaaaaattctatgtccaatgtatatatgtatataaagcatat

SEQ ID NO: 82298 - DNA, 423 bp, Glycine max
cctcaccctaattgtttttcagaccctcccgctcccccaatccgagcgctacaggacacgtggagtgcggaacctgaaacaagatgatatgcactttcgccaaatccattattcataccctccttccagctaatctccacccggccacagtcatactagatccatacttactcgatactttcagaaactaaagccgaatatgctacagaaccttccactaaactaatcaagatacgtgcttataatgcctatcgcgtctcttaaaaattatacagtagaactacatctgcggcatgtccgaaacccttctatactatcttgacgtcatcagtaacctccatttatcaaactgtttcgcatcctgtatattccatggtgcagagcctcttgacaatataatgttttgcccttcatatatgacat

SEQ ID NO: 82299 - DNA, 290 bp, Glycine max
aaacagtctacagtttttgatattatcttgggaatttctcaagattgtggaattgctggtaatactgttatgccagctttttctgtcccacaggctactgccagatcttgtgaaaatgcggaatcctctgcatgatctggaatttgtgttttctctcgcttgttcgtttgtttaattcaataaaggaaattaggcatgaccctcttgttgagtatgctctgcctatttgaaaatttccacacctcttttaattatcgtaatgatgtgtgaagtgtgtgttattttaaaaa

SEQ ID NO: 82300 - DNA, 437 bp, Glycine max
ggaaaaagttgtgttgaaattttcacaagaggaatttcttacaggggggtcaactcaggtgcgtccggcagcgactctgttggctgatgggtgcccatatttgtatgctatggtgcatgatagttcagtgtctacaataccaggtgattttgtcattggtgttaagttgacaaccataaacaatatgtgttcatatgggctcaatcctggtatttcaggttctcgtcttttgggcaccattcctcagtccatttcacagcaaactgtttggaatcaaatggcaacagtgagaacaccattgaattttgattctagcaagcagagcttttgtcaattttctattgaccttctcggtggaggaattttagtggacaaaactggagattggatcacacttatacaaaattctccaattagtaacttgttgagagttgctg

SEQ ID NO: 82301 - DNA, 434 bp, Glycine max
gtcaagccttactttagtggttctaaattgaaaagctttctagctgggggtaatatcaccatgactgatgggattgacaaaactagtgcaactttgcaatttagaaagttagcagattgtgattttctcaagagaaactttaagcagatgtctaatgttttgtgggtggctcctgaggacaaggcgagtttatggtcacaacttcattatgtttcgtgtaataatctggaaatgcaagaagcttatcttgtcaatctcgtaaatgtgttacgagaattgtatttgcacagtccagaggaagctcgccaattgagaaggaaagctctctctcgtattgaatggctgcaaaaagctgatgtgcctaccatagcacagatggaagagtttcattcgatgcagaggatgatgaatgctcctgattcaaatgataatat

SEQ ID NO: 82302 - DNA, 442 bp, Glycine max
ccgacttgccacaccagtccgtaccctgcagaaaatatacagtgatgctgacttggagaacataccgtttgcagattcgacatttggtcgtggtgctgggacagtacctaaccgtccattattagtgatcgaaccatcttataagatcaatggagatgataagaaaagtcgatcggcacggccagctgttgatcaagataacaagacagctacgcgaaccaaagttgacactgagggggataacaaagttgtgacacctaactctgatgcaaatggaaactctaagacagttgtgactcctaaatctgatgcaaatggaaacactaagacagttgtgacacccaaacctgatcctgaagtgggtgaaaacaagccactgaaatcagattcaagcagggagaacgtggaggtgccagaatctccttctaaatccaaagttact

SEQ ID NO: 82303 - DNA, 425 bp, Glycine max
gtaagggcaacgatattctgtgttgcgattatgctagttttgatggtttgattaccaagcaagttatgagcaagatggcagaaatgataaacagtctttgtggtggtgatgaaaaattgatgcgtgaaaggacacacctgctgttggcttgttgttcaaggatggcaatttgtaagaaagatgtttggagagttgaatgtggaatcccttctggatttccgctcacagttatttgtaatagcatttttaatgagatgctcattagatatagctatgaaaaattactgcgccaggctaaagctccaagtatgtttttacaatccttcaaaaattttgtttctttgtgtgtgtatggtgatgataacttaattagtgttcatgaatatgtcaagccttactttagtggttctaaattgaaaagcttt

SEQ ID NO: 82304 - DNA, 382 bp, Glycine max
gtagatattgttaaaactactacatggaatgctaaaattgcgtcaaatgtaatattagtgggggggtgtttcttatcttctttttttctttttcttttatttatatttttttttttttttctctttcttttttgtttttttgttcttgttttttttcttttttttttttttctttttttttttttttttgttttttttttttttcccttctttttttaattctttcttcttttttcttcttttcttttgttttttttttattctttattttttttttactttttgtgtggttggtgttgtttttttctttttttttttctttatttctcttctaattcttatctttccttttttttttatttttttattttttatttttttt

SEQ ID NO: 82305 - DNA, 436 bp, Glycine max
ggaatggactggtttggccaatagattactgagtaagggcaatgatattctgtgttgcgattatgctagttttgatggtttgattaccaagcaagttatgagcaagatggcagaaatgataaacagtctttgtggtggtgatgaaaaattgatgcgtgaaaggacgcacctgctgttggcttgttgttcaaggatggcaatttgtaagaaagatgtttggagagttgaatgtggaatcccttctggatttccgctcacagttatttgcaatagcatttttaatgagatgctcattagatatagctatgaaaaattactgcgccaggctaaagctccaagtatgtttttacaatccttcaaaaattttgtttctttgtgtgtgtatggtgatgataacttaattagtgttcatgaatatgtcaagccttactttagt

SEQ ID NO: 82306 - DNA, 436 bp, Glycine max
gctgttctttcaatgtggagatattttgttggagatctcggcttggaagtttctaagatgactggctgcctacattaaatgtacagtctctttcttcatagcatttggaaatttggctgatgataccatcaattttgaggcttttccccacaagctggtgcagtttggagagattcaggaaaaagttgtattgaaattttcacaagaggaatttcttacagcttggtcaactcaggtgcgtcctgcaacaactctgttggctgatgggtgtccatatttgtatgcaatggtgcatgatagtgcagtgtctacaataccaggtgattttgtcattggtgtcaagttgacaaccataaacaatatgtgtgcatatgggctcaatcctggtatttcaagttcttgtcttttgggcaccattccttattccatttcacag

SEQ ID NO: 82307 - DNA, 430 bp, Glycine max
gtaagggcaacgatattctgtgttgcgattatgctagttttgatggtttgattaccaagcaagttatgagcaagatggcagaaatgataaacagtctttgtggtggtgatgaaaaattgatgcgtgaaaggacacacctgctgttggcttgttgttcaaggatggcaatttgtaagaaagatgtttggagagttgaatgtggaatcccttctggatttccgctcacagttatttgtaatagcatttttaatgagatgctcattagatatagctatgaaaaattactgcgccaggctaaagctccaagtatgtttttacaatccttcaaaaattttgtttctttgtgtgtgtatggtgatgataacttaattagtgttcatgaatatgtcaagccttactttagtggttctaaattgaaaagctttctagc

SEQ ID NO: 82308 - DNA, 211 bp, Glycine max
  unsure (1)..(211): unsure at all n locations
aaccagaaaaggaaagaggcgggggaacaaaagagagcgggaaggggggnncaagaaacacccnnnggcaaanccnggcaaaaaacacccacaggggggccaaaacaaaagccgcggaccccgaaccaanccaagacnncngcaaaccaaacccaagaagnggggccancaaaacagcacaaaacaagcacnacaggcgaccaagcaagaa

SEQ ID NO: 82309 - DNA, 363 bp, Glycine max
gattcaggaaaaagttgtgttgaaattttcacaagaggaaggtgttacagcttggtcagctgagggtgcgtcccgcaacgactctgttggctgatgggtgcccatatttgtatgctatggtgcatgatagttcagtgtctacaataccaggtgattttgtcattggtgttaagttgacaaccataaacaatatgtgtgcatatgggctcaatcctggaatttcaggttctcgtcttttgtgcaccataccttagttcattttacagcaaactgtttggaatcaaatggcaacagggagagcaccattgaattttgattttagcaagcagagcttttgtcaattttttattgaccttctcggtg

SEQ ID NO: 82310 - DNA, 68 bp, Glycine max
tctcttgtaaaatcaaagatacggtttgctttcctttactttatttatatatttctgtttgcttgttc

SEQ ID NO: 82311 - DNA, 275 bp, Glycine max
gtctgcaatcacctcctatattgttgagtgtagtgaggcaatcaatgatggtcacggactcatggtcggtacaagcaccttagtgttcaatattgctttcgggtgtttcattaacactgaagataaattttaagacaacatttgatacccctcgaacaacggtgcagtttattttaatcagtgtgtcatgtccaaaagtttgctagcagatgtgtattagtgtttgatgtgtacaataatacaagatatcattactctttaaaaaaaaaaataat

SEQ ID NO: 82312 - DNA, 206 bp, Glycine max
ctcgatccgatctctttttttaagtttctaagattacttcgcgcctgcattaaatgtacagggggtggcttcatagcatttgtaaatttggctgatgacaccatcaattttgaggctttttcccacaagctggtgcagtttggagagattcatgaaaaagttgtgttgaaattttcacaagaggaattttttacagcttggtcaac

SEQ ID NO: 82313 - DNA, 368 bp, Glycine max
ctcgagccgtttttttttttttttttttttttttttttttggggggttttttttttgtttggtgtgttttttttttttttttttttttttttttttttaaaccaattttaaaaccggagcggcccccaactatagagccctttccccccggaattaatttctgaccggttcctttaggctaaccattttttcttttagaaaattcaattaaaacttggcataattaagaaaaatattttcacccgggaaaaaattttttccccttaaaattccaaacaaaaaacaatccggaaacaaaaaatttaaaacccggggtccctaatgggggaccttacctaaattaattgcgtgtgcctcacttccccttt

SEQ ID NO: 82314 - DNA, 412 bp, Glycine max
ccttccttcaccaaaccttagctagctccactcttcctcaatccggcattcgtcaatggctgcgacggcttccaaatttcttcaaactccctccaaacccaaactccgatcccaatccaatcccaaattctcgccggttgtaacccccgacactccacaaaccctatatccttgcagatccacgcgcgccaagaccctcctcttcgatgctaccaagcctccccacacaccgtgtcgaaatctcgctcacaactccgaagcggaggatacgacgatccatctattgtgtcgatcaggatgccggcgaatataaagccacaaccagcaaaatttcagattaaaataaagctccggtcgtcgatgcgtcaaagaagaagaagaatgggaagaactcaatggaaggttcctttgc

SEQ ID NO: 82315 - DNA, 327 bp, Glycine max
aaaaaaaaaaaatattattttaaaaaaaaaaaaaaaaaaataagaagagataaaaaaaaaaagaggggagaaaaaaaaaaaaaaaaaaaaaaaaaaataataaaaaaataaaaaaaaaaaaaaaaaaaaaaaaaaaaaaatattattaaaatataaataaattggggcttcccttttttttaatcttttccccctttaaataatatactgactcttttttttagtgatctatttttttttttatttaattattattaactttctggttaataatattatatcttttttcttttattattttttttttctttaaaattttttaaaatt

SEQ ID NO: 82316 - DNA, 258 bp, Glycine max
tgaaattttaataaaccgcgatcacaggttgccgcaccttaaaaccggaaacaaaagcaatcgttacttgatttcaagaatttctcaatttcttcctacttctttgtgtacgatttcttaagggaaagaaaatcactctctgtgctggtcacagacttcgtgaatcattttcttttccactcctagtttatttgctgaacactctcctatttgatataggacttcgtgtcagatttaaactttttctgtttctttctc

SEQ ID NO: 82317 - DNA, 345 bp, Glycine max
ccgagtttgcccactgcattcgtatcgagccagcctctcaagctagggttcttcaccgcgctgcaaccttcttctctctcccttcgtcccctccaattggaatgtgattgtgacttcacatgctggtagctgacattttgaaattgtaactgtggtgggagcaatattatattttttgcgacttcatggatatacagacttgtggctggccgatttgtctccttgctatagtaagtgctttgtattaattttcttttgttcgatttcattaattgtgtttctatcttttgtttatcttctctttatttttttgattttatttttttcattattgttctatttttt

SEQ ID NO: 82318 - DNA, 259 bp, Glycine max
tctaaactacagcttgtatgtttattatgcagacagtcttgtgagaatcataacaggaggcggggtgttaacattcgataaaacaggtttcaacatactgccacaattaggcccgccttgttcggattaccactctgtgaaaagtgtccatcccatgacttgtatgaatactgaatgatccaaatttacattatacagggggatgacatcttttttattgcaaagtgcatgcaatgaagcacatcgctccagctcaaat

SEQ ID NO: 82319 - DNA, 322 bp, Glycine max
gaaaaaaaagaagaaggaataaaaaaaaaagggggggaaaagaaaaaaaaaaaaatgaaagtaaaaaaaaaaaataaaaaaaaaaaaaaaaaataaaaaaaaataaaaataaaataaaataaaaaaaaaaaaaaaaaaaaaataagtataaaaaaaaaaaaaaaaaaataaattaaaaaaaaaaaataaaaaattaaaaaaaatataaagaaatagataaaaaaaaaaaaaaaaaaaaaaaaaagttaaaaataaaaataaaataaatataaataagaaaaaaaaaaaaaaaaaagaaataaatatggataaagggataatt

SEQ ID NO: 82320 - DNA, 330 bp, Glycine max
gcaggatttatgttattctgcatttcctctttacactaaggaagtgtttattgtgggaggcgggcgggatgggaaaagcaaaggatgatgactgaaatcctggcattggtggtttaacgcccttccacttatttgttttcaagtccctcaagagtttgtcttggtcctgtgctaatttgttaccactgtaatatcatatgaaagctacaatgaaatatcagtatttgcggagactgaactcattatacgaatacagttgttttggaagaatcgaacatttgttacagtcgccaccatactgtactaacactatattttgtgatttgcgtc

SEQ ID NO: 82321 - DNA, 427 bp, Glycine max
gtgattttctcaagagaaactttaagcagatgtctaatgttttatgggtggctcctgaggacaaggcgagtttatggtcacaacttcattatgtttcgtgcaataatctggaaatgcaagaagcttatcttgtcaatctcgtaaatgtgttacgagaattgtatttgcacagtccagaggaagctcgccaattgagaaggaaagctctctctcgtattgaatggctgcaaaaagctgatgtgcctaccatagcacagattgaagagttccattcgatgcacaggatgatgaatgctcctgattcaaatgataatattgatctactgttgagcattgatttgttgggtttacaaggagcaggtaaagcttttccaaacaagattgtttttgatgataagcttgtgttggctaacacacaagaattctt

SEQ ID NO: 82322 - DNA, 428 bp, Glycine max
gggagtttgattttgatctgttctggtctgaattgggtggtctcaacgagacgattattggttgcaggagaggcatcttgtgtggcgggtacctttttctttaattggtggttgtaaagagcgaggtgtggggtgtttctgtgacacgaaggatgacacttgtcatttgtcaatgtttgcctttaactaacggtgaatttcagtgtgatggccccctttaacactctttttcttcaagcctccattctgccaaagctgatgcttgaactgaactcgtttctaatttaccattcatattggacagacaaagctgattcacttaggagcctcgagagctatgtctacatcttctcgtgttcttcccactccattggaaaacaagtatatgaaacccccagattcttttcagctttcgccagtcagagatc

SEQ ID NO: 82323 - DNA, 256 bp, Glycine max
tcggataatttttgaaatgtctttgcaatgatctggctggcaatatctggtgggctccaaaatgcagtcatacaccaattacatactgagaaatattaaagcagagtacattgatatatgctgacaattcaagatgggtattggtgtgccaagtgaaatacaaacaaatgtggttcatgtgtgaagcaagaagacggattgcttattgtccatatgtgagccagtggcagctaaagtgctgagttcttgcttttct

SEQ ID NO: 82324 - DNA, 69 bp, Glycine max
aaaaaaaaaaaattaattttaaaaaaaaaaaaaaaaaaaaagaagggaaaataaaaaagggggggaggg

SEQ ID NO: 82325 - DNA, 439 bp, Glycine max
  unsure (1)..(439): unsure at all n locations
cagattggtgtttttttcatattgaaagctttacactttcaggctgaaccttcttctgtggcggttgccaactccatcatcatcctcnccctgtcatctccatatcccaatctctcagatcacccatcaccatctcccaacttttctcctttccctccaaaccatccttcaccttcaactttaactttaaattcaaccctttctcaaaaccccattacccaattcaagcttcttcttcatcaatatcatcaccaccaccaccaccaccatcaccaccaccatcaccttttcagtgtgcaaaatccaatcctttcattttttccatattcatctttcttatttttcccttttatcttcccaaacctcttatatacatcctccatttctttcatctacctttctttttcttttctatttatctcctcttttttaacccctt

SEQ ID NO: 82326 - DNA, 274 bp, Glycine max
  unsure (1)..(274): unsure at all n locations
gtaatttttaatgtacttatttcaatgcctctatnaatgtggatgaggaaattaaacagtgtttaggaatcaatatattacttttttatttctattcttttttatttattattacatttttttaaattacatattatctcattattttttttcttttttatttttattcatttactcaatatattattactattctttattcattattatttatatttttatttttcttcatattctttttttattattattactttaattatatcattttata

SEQ ID NO: 82327 - DNA, 429 bp, Glycine max
attttaatgcactgctgagttttcctagaccctagtgtttctttcagagtggaaacataacgactgggcattagcaagttgacgcattagaaagaaaataaaactaagttgtgttattatacttagaaaatgatgctttatttattttagaattaaattttcttatgttttcttcagttagtgctttgcttatcatagtttgttggcttacaggaaaacaatggtagtgtgtttgtataaaatttcttggggattcattcatttggatctgtcttggactaatagtaatattgattgttacagattctgtcaagctagctagctacctataattttggctttctgttcttagctgtgtttgtattggccaggttcagttctcatttcaacttacctaacttgaaaattgtcgtttatattggccttatt

SEQ ID NO: 82328 - DNA, 426 bp, Glycine max
atgataacttaattagtgttcatgaatatgtcaagccttactttagtggttctaaattgaagggctttctagctggtcataatatcaccattactgatggtattgacaaaactagtgcaactttgcaatttagaaagttagcagattgtgattttctcaagagaaactttaagcagatgtctaatgttttgtgggtggctcctgaggacaaggcgagtttatggtcacaacttcattatgtttcgtgtaataatctggaaatgcaagaagcttatcttgtcaatctcgtaaatgtgttacgagaattgtatttgcacagtccagaggaagctcgccaattgagaaggaaagctctctctcgtattgaatggctgcaaaaagctgatgtgcctaccatagcacagattgaagagtttcattcgatgc

SEQ ID NO: 82329 - DNA, 178 bp, Glycine max
ctcgagccgcattttttcttttttcacttcctcctccctcgaacgctctttattgccctgggggggtcaccacctccaccccaacctccttctcctccctccggatccctcctagctccttccctgctttcccttttcccttcctcccaccaccaccttcgtcaaacccttcttcttc

SEQ ID NO: 82330 - DNA, 416 bp, Glycine max
  unsure (1)..(416): unsure at all n locations
gcagtttggagttatttaggaaaaagttgtgttgaaatttgcacaggaggaatttctgtacaggttggtcaactcangtgcgtcccgcaacgactctgttggctgatgggtgcccatatttgtatgctatggtgcatgatagttcagtgtctacaataccaggtgattttgtcattggtgttaagttgacaaccataaacaatatgtgtgcatatgggctcaatcctggtatttcaggttctcgtcttttgggcaccattcctcagtccatttcacagcaaactgtttggaatcaaatggcaacagtgagaacaccattgaattttgattctagcaagcagagcttttgtcaattttctattgaccttctcggtggaggaattttagtggacaaaactggagattggatcacactt

SEQ ID NO: 82331 - DNA, 386 bp, Glycine max
  unsure (1)..(386): unsure at all n locations
tcccaatagaggtatgttttcctaataatggttttgaaatgtggagttctgagtgggcaaatcaaggttcatggcatttgagtttccttattgacaatcccaaacagtctacagtttttgatattctcttgngaatctctcaagattttgaaattgctggtaatactcttatgccagctttttctgttccacaggctactgccagatcttctgaaaatgcggaatcctctgcatgatctggaattcgtgttttctttcgcttgttcgtttgtttaattcaataaaggaaattaggcatgaccctcttgttgagtatgctctgcctatctgaaaatttccacacctcttttaattgtcgtaatgatgtgtgaagtgtgtgttatttt

SEQ ID NO: 82332 - DNA, 435 bp, Glycine max
ctctatcccattttttttattaaaaaaaaaaaaaaaaaaaagatagttatttatataaaaaaagtgggtatgataaaaataataccacttttcttattattttttaaattccttctttaaaattaataaccatccccttctataaaacctgcctcccctcttttttttttcttttttccccccttttttttttccccccccttccttctatccttccctttttttttttttataaatctttttaaactttctctccatttttataattttttttccctttctaaaatttttttccttttaaattcccccccatattttctcctccaatttttaaatttttaacctttatctcctttttccttcctctttttctttttttcctgtccctttctttcccttttttttttttaaaaccccttctccccctcttttttt

SEQ ID NO: 82333 - DNA, 351 bp, Glycine max
gaaatgtggagttctgagtgggcaaatcaaacttcatggggttggagtttccttattggcaggcccaaacagtctacagtttttgatattctcttgggaatttctcaggattttgaaattgctggtaatactcttatgccagctttttctgttccacaggctactgccagatcttctgaaaatgcggaatcctctgcatgatctggaatttgtgttttctttcgcttgttcgtttgtttaattcaataaaggaaattaggcatgaccctcttgttgagtatgctctgcctatttgaaaatttccacacctcttttaattgtcgtaatgatgtgtgaagtgtgtgttatttt

SEQ ID NO: 82334 - DNA, 69 bp, Glycine max
acgtcgcatccacccgtacgtaaactcggaattctgctcgagcaaatgttgtcatttaacacacatgaa

SEQ ID NO: 82335 - DNA, 68 bp, Glycine max
caaaaaatggttacaacttaaaaaaacaaaaaatagttgggaagagaaaaaaaaaggggggggggagg

SEQ ID NO: 82336 - DNA, 149 bp, Glycine max
gttgttttctttcttttcttacatattttttcctatgtgggttggccttccttactatgtgggcctatgtttaggagatggagagagaagtctaaatttgtggcgtgaaaaattttattgattggatttggaaatttgcacttattttg

SEQ ID NO: 82337 - DNA, 169 bp, Glycine max
gcggaatcctctgcatgatctggaattcgtgttttctttcgctggttcggtttgtttaattcaatagaggaaattaggcatgaccctcttgttgagtatgctctgcctatctgaaaatttccacacctcttttaattgtcgtaatgatgtgtgaagtgtgtgttatttt

SEQ ID NO: 82338 - DNA, 359 bp, Glycine max
  unsure (1)..(359): unsure at all n locations
aaaggttgttaaaccaaagtggctaaaaatgtgatttcactttcgtgataggcccagtgagcagatggttgcanaaaaggagcttcacttgggctctatctagatacatacatataaatgnctnattgaggtcactattcttgtggattaagacattaaatcttagttcaatgtatcatgaagggtccacaagaacacaacatagttacttttctcttcagcctttcttccttttctaccttctgcttttcctgaatttgtagataatgtgtgcaaatgttggataaaattcttttggtgaatgcaactgtctcggcacaggtgtatgtgttgtttcaatagaatttttctttgctgct

SEQ ID NO: 82339 - DNA, 438 bp, Glycine max
ctaaattgaaaagctttctagctagtcataacatcaccattactggtggtattgacaaaactggtgcgactttgcaatttagaaagttagcagattgtgattttctcaagagaaactttaagcagatgtctaatgttttgtgggtggctcctgaggacaaggcgagtttatggtcacaacttcattatgtttcgtgtaataatctggaaatgcaagaagcttatcttgtcaatctcgtaaatgtgttacgagaattgtatttgcacagtccagaggaagctcgccaattgagaaggaaagctctctctcgtattgaatggctgcaaaaagctgatgtgcctaccatagcacagattgaagagttccattcgatgcaaaggatgatgaatgctcctgattcaaatgataatattgatttactgttgagcattgatttgg

SEQ ID NO: 82340 - DNA, 343 bp, Glycine max
caacagtagattgtattttattaatacaaaattatccaacaagtaactagcatagaggtggtgctaggaaaaaaggctgaacaatgctcaagattatgatgtccgctaatgccatagtcaataactgtgattgtgcctaataggatcaagtgtgtttaacaaacagcaacacctcatatcactctgaagacccacattaagacaaacatgataaccacatagatcaggacaaatctgaccaatagaggtatgtcgtactcataatgcgagccaaatgggtctttataaactgtcacatcaaaatccatgctaataaacttctcatatactcgaccctatacat

SEQ ID NO: 82341 - DNA, 459 bp, Glycine max
taagctcggaattcggttcgagcacacatatggttaatgggctcaatcctggaattcaaggttctggtggtttgggcaccattcctaggtcgatttcacagcaaactgtttggaatcaaatggcaccagtgagaacaccattgaattttgattctagcaagcagagcttttgtcaattttctattgaccttctcggtggaggaattttagtggacaaaactggagattggatcacacttatacaaaattctccaattagtaacttgttgagagttgctgcttggaagaaaggttgtttaatggtcaagattgtgatgtctgggaatgcagcagtcaaaaggagtgattgggcctcattggtacaagtgtttttaacaaacagcaacagtacagagcattttgatgcatgtaagtggacaaaatcagaaccacattcctgggaattaatcttcccaatag

SEQ ID NO: 82342 - DNA, 430 bp, Glycine max
ctgccccagcctaaagctccatttttgtttttccaatccttcaaaaattgtgtttctttggggggggatggggatgataacttaattagtgttcatgaatatgtcaagccttactttagtggttctaaattgaaaagctttctagctggtcataatatcaccattactgatggtattgacaaaactagtgcaactttgcaatttagaaagttagcagattgtgattttctcaagagaaactttaagcagatgtctaatgttttatgggtggctcctgaggacaaggcgagtttatggtcacaacttcattatgtttcgtgcaataatctggaaatgcaagaagcttatcttgtcaatctcgtaaatgtgttacgagaattgtatttgcacagtccagaggaagctcgccaattgagaaagaaagctctct

SEQ ID NO: 82343 - DNA, 452 bp, Glycine max
aattgcgccgcaccactttctgtcgtgtcttctcactgtcaatttgtgtgtcgttctttttaatctgtatgctattttgtgtctcaccgtcgtcgtggtgggcgcttcgctgtttcataacgatgagaactaagacgtgaaacaatggtggagggtagcgactaggtgctttcgcagtaaaaaattgtgttgtaaatcacaattcgttaatcgtgacctctcttgctcagctggaatctcgaaattgaactatgaaccttcatccgtcaatcgccgcaagcttctctgtggcattcgactattgttgatctctctttccattatgcagctgcctccaatgatttttggatgcaatcatcgtaatgtttttaggaaaatcagtgggactaattccttaccatgaaagataagctcaagtttcggagggtatgtagctaattttatttttattt

SEQ ID NO: 82344 - DNA, 382 bp, Glycine max
gcacaatttgttagtggtaaaaccttcaaatatgatataattggtgctggttcacattcttgagaagattttcctgaaaaggaagatcaggaaaaacccaaaaagattgatgccagattgagacaaagaatagatcctcaatacaatgaggttcaggctcagatggaaacaaatttgtttaaattgtctcttgatgatgttgaaactcctaaaggttccatgttggatcttaaaatttctcaatctaaaattgcacttcccaagaacacagttggaggaactattctgcgtagtgatctattggcaaattttttgacagaaggcaattttagagcaagtgttgatttgcagcgcactcatcgtattaaaagaatgattaaaa

SEQ ID NO: 82345 - DNA, 363 bp, Glycine max
  unsure (1)..(363): unsure at all n locations
caagttttatttcctggacgtttccaggtacactttttcgtttgtttttttttataattttgttactgtgattactgtatttatgtcgagtgcaccaatggaacacatgatggcatttttttgcggccatgattctcatatgaataaaaattgtacgtcgtttttgacgtctcagtttcgcaaaanaaaaaaaaaaaaaaaaaaaaaaaaaaaaaaaaaaaaaaaaaaaaaaaaaaaaataatgttgtacataatatattaattttttttaaaacattttttaaattaggatgtgaattatataaatgataattaaatttatttattntggggggggcctccccttttttggtttttctcccc

SEQ ID NO: 82346 - DNA, 419 bp, Glycine max
agcatttggaaatttggctgatgacaccatcaattttgaggcttttccccacaagctggtgcagtttggagagattcaggaaaaagttgtgttgaaattttcacaagaggaatttcttacagcttggtcaactcaggtgcgtcccgcaacgactctgttggctgatgggtgcccatatttgtatgctatggtgcatgatagttcagtgtctacaataccaggtgattttgtcattggtgttaagttgacaaccataaacaatatgtgtgcatatgggctcaatcctggtatttcaggttctcgtcttttgggcaccattcctcagtccatttcacagcaaactgtttggaatcaaatggcaacagtgagaacaccattgaattttgattctagcaagcagagcttttgtcaattttcta

SEQ ID NO: 82347 - DNA, 454 bp, Glycine max
tatgactgcacacgcacgcgtacttaagctagatgctcattacatatagctatgaaaaattactgcgccaggctaaagctccaagtatgtttttacaatccttcaaaaattttgtttctttgtgtgtgtatggtgatgataacttaattagtgttcatgaatatgtcaagccttactttagtggttctaaattgaaaagctttctagctggtcataatatcaccattactgatggtattgacaaaactagtgcaactttgcaatttagaaagttagcagattgtgattttctcaagagaaactttaagcagatgtctaatgttttgtgggtggctcctgaagacaaggcgagtttatggtcacaacttcattatgtttcgtgtaataatctggaaatgcaagaagcttatcttgtcaatctcgtaaatgtgttacgagaactgtatttgcacag

SEQ ID NO: 82348 - DNA, 269 bp, Glycine max
  unsure (1)..(269): unsure at all n locations
ttaaaaaaaaaaaaaaaaaaaaggggaagttatttataaaaaaggggggggggaaaaaaaaaaaaatataataataaaaaaaaatataatttttttatnttnngggggtttggttttttatcaagttttttatctttgaattaaattttattattgtgaatagagggtgtataatttttccgtttcccccctttttttaattttttccccccttttttattttttcccttttctttttaaatttcaatttttttttttttttcaaattt

SEQ ID NO: 82349 - DNA, 228 bp, Glycine max
gtttagttgatttcaaattcttaaactattcagagcatcactcatagtggccgtttttctgtgcacgttgggatcattctttgctttcttcgcaccatctgcatcgtacgacatagtgtgatctgaatctttctacaaaggcttatccccctacattgccaagtatatcgcaaatcatatgcactaacttttcatcatatttcatgccccattcgttcacctgaaact

SEQ ID NO: 82350 - DNA, 402 bp, Glycine max
cccttgtggttgagcattttatatgttaatgaaaaaagaagaaatgacagtgtaagttaaaacagggatcaataaagatgagcagaatatgaacatgttacgaacactaattcaacactttctccctcaatggtctagtattacagatcgagtatgttgtcaaagacaagataacagaatgactgttattgacatcaaacgcatagatggggtaggtgttggtgttgagatgcttattgcgttgaatatgttctagctgcttacatataaagaatacacgtcgttaatgatgaactatctatggcagttggaatataaataatggatggtaggtaaattgtagtattgggccagatatcaatctgctaactatgaatgtgagtattggaagacaatgtcttg

SEQ ID NO: 82351 - DNA, 213 bp, Glycine max
aaaaaccgaattttaattttatactagttgaaactaataggggggaggcatgggtgcaggggggggagaccattcaaacaaaaaaaaggaggtggtgatttacctcaagcgcaagacgactggaaagctttacggatacaacgaaatcaatcatagtgacaattacaagtgcaagtcaagggacctaacaaatcagtacaaaatgaagaaaaa

SEQ ID NO: 82352 - DNA, 450 bp, Glycine max
gttcttcttcttttgttgttctgtgtttgtgtttgttttttctcgcacctgaaaatgtcttgctgcggtggtaactgtggttgcggaagctcctgcaagtgcggcaacggctgcggaggctgcaagatgtacccagacttgagctacactgagtcaaccaccaccgagaccttggtcatgggagtggcacctgttaaggctcaatttgagggtgctgaaatgggtgtgcccgctgagaacgatggctgcaaatgtggaccaaactgctcctgcaacccctgcacttgcaagtgaggtgttgggagagcaagcttcaagcagagatagcccttaattaggaataatgataaactattaatgtgtagctaaaaacttatgtattatgtctgtgatggttttcgtgcactctggtgttttgtgttaaacaaacatccttagaataaagtggtc

SEQ ID NO: 82353 - DNA, 427 bp, Glycine max
cgatgaaagggcaacctggtgctttggcttgagattgttgattgctaatatggagactggacgagaaacatactttgtctaacactctttacttgagctcgacattatgtttataatgataaagaagattgatggacatctttgcttccttctgcttcttgtacccaaatccttttagtatttagagttgaaaaataatgcattcttagatttaatgagacgatgaaagggcaacctggtgcttttaaactcttgccttgacatgatcaagtgtcgtaccctttatggatccatgtaggcagccttaacttgcatttgcaagaggctgattccggagtcaaacttgtgacccttgatttcatactgaaacaaggctctcctaaatctgagattataaatactcaattttatgttagtttgatcttgg

SEQ ID NO: 82354 - DNA, 446 bp, Glycine max
attttgaggcttttccttacaagctggtgcagtttggagagattgaggaaaaagttgtattgaaagggtcacaagaggaatttcttacagcttggtcaactcaggtgcgtcctgcaacaactctgttggctgatgggtgtccatatttgtatgctatggtgcatgatagttcagtgtctacaataccaggtgattttgtcattggtgttaagttgacaaccataaacaatatgtgtgcatatgggctcaatcctggtatttcaggttctcgtcttttgggcaccattcctcagtctatttcacagcaaactgtttggaatcaaatggcaacagtgagaacaccattgaattttgattctagcaagcagagcttttgtcaattttctattgaccttctcggtggaggaattttagtggacaaaactggagattggatcacacttata

SEQ ID NO: 82355 - DNA, 307 bp, Glycine max
ctccaagaaccacggctccaaggcctccaagcactccgaggagtgcgagtccacccaccggcagtcggactccgagtcctcccactctgaggagtctgaggagtaagcggctcctttgtcgcttctcccgcgacggctccggccgccaggcgagttttcttgtataaaatatgcttccgggggatcggcgacggtcccctagaacacccggttttcgagttcgctgtttggaggtgttggataggactggatcatagacaatttcctttgagtgtagcgatttgaattgaaagattattatgttcaa

SEQ ID NO: 82356 - DNA, 452 bp, Glycine max
cttctccctacattaaatgtacagtctctttcttcatagcatttggaaatttggctgatgacaccatcaattttgaggcttttccccacaagctggtgcagtttggagagattcaggaaaaagttgtgttgaaattttcacaagaggaatttcttacagcttggtcaactcaggtgcgtcccgcaacgactctgttggctgatgggtgcccatatttgtatgctatggtgcatgatagttcagtgtctacaataccaggtgattttgtcattggtgttaagttgacaaccataaacaatatgtgtgcatatgggctcaatcctggtatttcaggttctcgtcttttgggcaccattcctcagtccatttcacagcaaactgtttggaatcaaatggcaacagtgagaacaccattgaattttgattctagcaagcagagcttttgtcaattt

SEQ ID NO: 82357 - DNA, 88 bp, Glycine max
gcatgtcagactaaatggaatcctgtcattgctctgaatgttttttttgtgaacagcttgccaatgaaattacccttcccgtttaaaa

SEQ ID NO: 82358 - DNA, 459 bp, Glycine max
gaggcattctcttaacacttttttaagtgccctgagggaggagctggtgcaaagaatgctattctcatgaatatgccaaatgctgttctttcaatgtggagatattttgttggagatctcgtctttgaagtttctaagatgacttctccctacattaaatgtacagtctctttcttcatagcatttggaaatttggctgatgacaccatcaattttgaggcttttccccacaagctggtgcagtttggagagattcaggaaaaagttgtgttgaaattttcacaagaggaatttcttacagcttggtcaactcaggtgcgtcccgcaacgactctgttggctgatgggtgcccatatttgtatgctatggtgcatgatagttcagtgtctacaataccaggtgattttgtcattggtgttaagttgacaaccataaacaatatgtgtgcatatgggctc

SEQ ID NO: 82359 - DNA, 458 bp, Glycine max
atcaattttgaggcttttccccacaagctggtgcagtttggagagattgaggaaaaagttgtattggaattttcacaagaggaatttcttacagcttggtcaactcaggtgcgtcctgcaacaactctgttggctgatgggtgtccatatttgtatgctatggtgcatgatagttcagtgtctacaataccaggtgattttgtcattggtgttaagttgacaaccataaacaatatgtgtgcatatgggcttaatcctggtatttcaggttctcgtcttttgggcaccattcctcagtccatttcacagcaaactgtttggaatcaaatggcaacagtgagaacaccattgaattttgattctagcaagcagagcttttgtcaattttctatcgaccttctcggtggaggaattttagtggacaaaactggagaatggatcacacttatacaaaattc

SEQ ID NO: 82360 - DNA, 453 bp, Glycine max
aaaaaaaaaaaaaaaaaaaaaaaaaaaaaaaaaaaaaaaaaaaaaaaaaaaaaaaaaaaaaaaaaaaaaaaaaaaaaaaaaaaaaaaaaaaaaaaaaaaaaaaaaaaaaaaaaaaaaaaaaaaaaaataaaaaaaaaaaaaaaaaaaaaaaaaaaaaaaaaaaaaaaaaggggggggcccctctttggtcttttttcccccccgaattttttttgtaccctgacttcttgtgggcaccattttttttttaatggggttaattaaattgtttgggtaaattgggttatcctgttctttttgagaaaaattttttctgttaaaattttcaacaaaataaacttcctgaattttaaaggtataagcctggggggctcatgggggcggcctcattatattatttggttgggctatactcggctttttttttgctgaaaacctctcgggccctttttt

SEQ ID NO: 82361 - DNA, 468 bp, Glycine max
tgataacttaattagtgttcatgaatatgtcaagccttactttagtggttctaaattgaaaagctttctagctagtcataacatcaccattactgatggtattgacaaaactagtgcaactttgcaatttagaaagttagcagattgtgattttctcaagagaaactttaagcagatgtctaatgttttgtgggtggctcctgaggacaaggcgagtttatggtcacaacttcattatgtttcgtgtaataatctggaaatgcaagaagcttatcttgtcaacctcgtaaatgtgttacgagaattgtatttgcacagtccagaggaagctcgccaattgagaaggaaagctctctctcgtattgaatggctgcaaaaagctgatgtgcctaccatagcacagattgaagagttccattcgatgcagaggatgatgaatgctcctgattcaaatgataatattgattt

SEQ ID NO: 82362 - DNA, 456 bp, Glycine max
ctcgagccgaatcggctcgaggtccgcaaccagaattctttcgacagcaaccaggacaggcctactggtccgcataatgtctcctccccgtcgaaccgctggaacgacccgaacgccttcctgtcagtcccgaactcgcgctcgcgaggcaactcgctggactcgcagccggagagcggtcagccttcggtttcgggtacgacggagacatacgtcaacggctctcccacccaaggaaataagcagcagcttggccacgacgagattctgaatgacagggacgcattaaagccagatcctggcaccgaacacacttttgaagtagaggacaacaagttcgctttctcgcctggtcagctgtcaaaagctctataaccctaagagcttgggtgctttccatgcgctgggcgggctggacgggttggtgaaaggtcttaggacagatcgcaggagcgg

SEQ ID NO: 82363 - DNA, 466 bp, Glycine max
aaatttaatataaagcaaatcgtgtgcttgtgttgtgaaattatcattatttaacatgcatgattgtatttatttttggtttattacccagcatttcaacgttcaataaacaaatgtgtatctatcttgtgacctttttattaacaagatctttttttataccagcatttgaaccgggttcattatggaacggacttccatcaactaccatacgaaccaggaatgctagtttttaacaagatttggacaacccgctattttttttgtactttttagattaattattattattatggtagaggcagtttttctatccagatcagctgtccaaccagggaccctgtgaacgggttcccttgatttctgttccagatttgacaattatgttcttatctttttcattttaacaataacaactgaaacatttttatcttggaattggaagtataccatgctaattgtgcac

SEQ ID NO: 82364 - DNA, 218 bp, Glycine max
tgccgcctcgtaagctcggaattcggatcgaggtgtttatgtgtttcaccttggtgcatacatcacattatggaggaccaaaatggtagtgataagtggtgccaatggctaattgaggtgaatccatacctagctatattgtcctttcagtttttcttcttaaggatgtatttcatcactatggtttctctcaagcatggtatgaattattgaatact

SEQ ID NO: 82365 - DNA, 495 bp, Glycine max
aaaattttgtttctttgtgtgtgtatggtgatgataacttaattagtgttcatgaatatgtcaagccttactttagtggttctaaattgaaaagctttctagctagtcataatatcaccattactgatggtattgacaaaactagtgcaactttgcaatttagaaagttagcagattgtgattttctcaagagaaactttaagcagatgcctgatgttttgtgggtggctcctgaggacaaggcgagtttatggtcacaacttcattatgtttcgtgtaataatctggaaatgcaagaagcttatcttgtcaatctcgtaaatgtgttacgagaattgtatttgcacagtccaaaggaagctcgccaactgaagaagaaagctctctctcgtattgaatggctgcaaaaagcttgattgcctaccatatcacagattgaagagttccattccatgcagaggatgatgaatgctttattcaaatgataatattgat

SEQ ID NO: 82366 - DNA, 442 bp, Glycine max
  unsure (1)..(442): unsure at all n locations
gttggttttggtgaagacgatggcatagcgtatctctcagactcgcttggttntgcaaccatggaagacaacgacttctcagaaactgcaaagttcattagccagatcctcatggaagaaaacgttgaacttgaacagagcccattctacgactcactcactctgcaagttactgagaaatccttctacgacgctctcgccggtaacctacttctcagtccccaagctagcaacaccaatttttcagttgaaaattctcgtgagttgaacctcccttccccagattctctttctggttctgctcttcagtttaacccccacgcactctcttaaccaccacctttggttaatgttagtgaaggagtctctgatttggactcttctattgcaagactcttagcacataatattttcaaatgatgttgattctgtttcccacttt

SEQ ID NO: 82367 - DNA, 484 bp, Glycine max
  unsure (1)..(484): unsure at all n locations
agcggcttcacttctcagacggccgtgtttctcttctggacgagacaacttttcacanaagcttttggtgatttcggattctttcggttccgtacgaccttttagttcgggatgatcctcacttcgattggacttttggcccattgtgctggtgtttttgcggcgcaccatcggatcataccccaccagtcttgatgcatttcctttgttcattgccactttcagcggactcaacagttggtcaccgccgaaaaccaaacactacgccaagctgtacagaatggcagcaacccacagcgggcaccattgcccagtctccttacatactttttcatcaacatccgaatcacatgaacttcgtccgcctctaggccataacgactctcctatcgatcgactcagcgccggagtctgcgcagtccatatttttacccatcaacaagatgatctgagttgcatgcatcactacgtgctcgcatcagat

SEQ ID NO: 82368 - DNA, 86 bp, Glycine max
ggtggatgaataagaaagaaaatagcatgagaaggaaggatgatcatccttccttctcttgctattttctttcttattcatccacc

SEQ ID NO: 82369 - DNA, 434 bp, Glycine max
atcctgcttgcacaaaagcaatgactatgtcatttaatccaaacccgtgttctgatgcatggagtttggaatttctgaagcgtactggatttcattgcgatatcatttgtgtcactggatggactgccaccccaatgcaggatgttcaggttacaattgattggtttatttcctctcaggaatgtgttcccaggacctattgtgttttaaatccacaaaatccttttgtgttaaataggtggatgggaaaattgactttcccccaaggcacttcccgaagtgttaagagaatgcctctttctatagggggaggagctggtgcaaagaatgctattctcatgaatatgccaaatgcttgtctttcaatgtggagatattttgttggagatctcgtctttgaagtttctaagatgacttctccctacattaaatgt

SEQ ID NO: 82370 - DNA, 118 bp, Glycine max
tttttatttttcctcaaaattggattcctttttcaatggccggaacccctccggttcctggtcctttttccttttcaagacccggctccctttttcctttttttttcctccggatttg

SEQ ID NO: 82371 - DNA, 153 bp, Glycine max
cactgttacttgagcaaccaatcgtatctgctccaacgatccctttcgggcgggcactagctacttctgggaggtggattccagctcacccacgggcccgttgtcaaggtgaatgtgctctgtgcttgaaatcattactggactattcgttat

SEQ ID NO: 82372 - DNA, 491 bp, Glycine max
tgccgcgtcgtagctcggatcgggttagttgaaaagcagaaacatgctggttctctaagccaagagttcttgctacggcccacatagcaattacactagtttggtgggttcctaatgctgagtggctcattcaaggagggcatcgttgctttaataagcaattggtcgaacaatatgcaagcttcatctccaggaaggtggtttacatgctgatattaatggtgatggagttctagatcatgtgcaggctgtgggaggatatggagctgaacaaactgtggttggcgggtccatggaagtgctacgtccctcgtatgattattgaacgtgtgctgtaccagtactagaacttccctaaaatggatctatttgtcattatacccatttttacttattccagcgtggagtactatatagaagctacatgtctaggttcagatattcgcttttttaggggcagcaacacctattcttatttcttgaagtgacgg

SEQ ID NO: 82373 - DNA, 257 bp, Glycine max
gggaatctctcaagattttgaaattgctggtaatactcttatgccagctttttctgttccacaggctactgccagatcttctgaaaatgcggaatcctctgcatgatctggaattcgtgttttctttcgcttgttcgtttgtttaattcaataaaggaaattaggcatgaccctcttgttgagtatgctctgcctatctgaaaatttccacacctcttttaattgtcgtaatgatgtgtgaagtgtgtgttatttta

SEQ ID NO: 82374 - DNA, 544 bp, Glycine max
  unsure (1)..(544): unsure at all n locations
attttcgcctccctttctttaccttagtggtatatttttatttttgtagccatttcttggtctctatatatcattctatgttttctatgaaagcagatatttgaaaatcgttgcagaaatcatgatcggcctgttggattaagaagcggcaagtgcatccaagcatgtcatcaaagcaactaggatgttgtgtgttactatatatttgattatatatatgatcattatatatatatggcatgagattcattttcttttttgattattatggataagtgaaatataattatttgatgttggcttggctcaatcaaattaaaatttttaaagattttgttaacttttttgatctgattgagccgtgccaatatcatattcatctcttataaatgttcaaactattaactatatatatatataagatatgctatatttgtctttaaattaatcataccaagtaaatttggtgctttgatgtatatatatatatatatatataantaatcataccagnnaaatttggtgcttggatatatatatatat

SEQ ID NO: 82375 - DNA, 214 bp, Glycine max
tgcacgcgtcgtaagccggaaacggctcgggtatatgaagaggacgaacttatttttttccgagacctgatttaatactagcgggaattttatggtaaagtatccacgtgtgtatgatgatctgcgggtttttggcatcgaattgaagttgcattgaacaagagagtatttgctgtggaaaagataaaaataaaaaaaagggggcgccgactag

SEQ ID NO: 82376 - DNA, 238 bp, Glycine max
  unsure (1)..(238): unsure at all n locations
gcgtcagcttgtgacccaagtgggggcatgaaggtggagggatattaacaataacatttagtaattatttttttcatagaataatttatgtaataagcataaaggtaattaatttatacattatttatttagtaattcaaaagnaaaaatattaataaaaaaaattattattatttaatgaaattttatttttttttataatgtattttttttatttgataaattattttttttattt

SEQ ID NO: 82377 - DNA, 372 bp, Glycine max
  unsure (1)..(372): unsure at all n locations
aagagctatgacgntcgcatgcaccgcgtaccgtatagctcggtaattcgtgctcgagtagtactacaggattaagctcttttagtttgatgtgtgatagcactaagttgataaaacatctcataaaagccaggatcgtagattactggtaagaagctaaggagtcaattttaagcgaacgacagtacatgtcacataatcgttgagattagagtttgctctgttctctgctgtatgcataccatatccataatgttacggactgtcaatgtggatcgtgcattcattatgcacgctgaaacaagatgcgattaattctgtgaaaataagtatcatctctctggagtgtaaaggagtacattgttatagggc

SEQ ID NO: 82378 - DNA, 284 bp, Glycine max
gagaaactaaagtcagattatgatcaagttgtagcggacgatactgagcttacgagttgactctgttgaattaagcacacatgaatctactgggtggatcagctggattaacatgaggtattagtgtgccttacaatcaattgatgtatgaagtgcattatatttctatcttgcgtatcacgctcttgtcatatagtacaccactggcttatcatacgcataatttgcgatgtccacctgcatgatgttcccatgaggatgcccgaagcaatcttgagttgaat

SEQ ID NO: 82379 - DNA, 428 bp, Glycine max
atccacacccaacattctcacaagtcacattttaacaccatcccattaattcttgcagaatattgcttagttttgttttatccgaattctgaaacagctcatgaatggcttcttcaagagttgctctgttgatatgcacggtcattttttttgcgattgcccctgtcggcgatcttcaccaatactttgatagtcacttattgcagatgggaccactaatatactcaacaagggatagcttgtcactctgtcactttacaaagactgtggctcggtgttccaatccaagaacgaatacttctttggcaaaaaagacaagcaaatataacttggctttgccaacttttctgtcaccttcacttcttactatgtaagcaaattattatattctaccttactacactttattcttagtcatcattgtgttt

SEQ ID NO: 82380 - DNA, 338 bp, Glycine max
  unsure (1)..(338): unsure at all n locations
ctctctctgcaattctctcatctaatgagccggcactaactctaagtgaccctacatgtnnctctcttctctgcacaccaccacccttccggtgttggcgttcctccttctcagcaccgccatcagcgccgcaccgatcatcggtctagactcattccttacccaccaatcccgaatcgatcctcaggcctcgaacgactccttnnctctccttccttnctccaataaaacccccctcttccactctttcgactttctcaaatcctactatcctttttttccaatcttccttttcctccaacttcttggtgactttcccttcggcacccccttccttc

SEQ ID NO: 82381 - DNA, 473 bp, Glycine max
  unsure (1)..(473): unsure at all n locations
anaaatttgtttctttgtgtgtgtatggtgatgataacttaattagtgttcatgaatatgtcaagccttactttagtggttctaaattgaaaagctttctagctagtcataacatcaccattactgatggtattgacaaaactagtgcaactttgcaatttaaaaagttagcagattgtgattntctcaagagaaactttaagcagatgtctaatgttttgtgggtggctcctgaggacaaggcgagtttatggtcacaacttcattatgtttcgtgtaataatcttggaaatgcaagaagcttatcttgtcaacctcgtaaatgtgttacgagaattgtatttgcacagtccagaggaagctcgccaattgagaaggaaagctctctctcgtattgaatggctgcaaaaagctgatgtgcctaccatagcacagaatgaagagttccattcgatgcagaggatgatgaatgc

SEQ ID NO: 82382 - DNA, 107 bp, Glycine max
ctcacaactcacaatccttcctccttttcctttactgtttcttacatacattcatgccaaaggaggtaagtgattgggtcttaagctgttaaaatagcaaggaaggt

SEQ ID NO: 82383 - DNA, 95 bp, Glycine max
acatgaccctcttgttgagtatgctctgtctatttgaaaatttccacacctcttttaattgtcgtaatgatgtgtgaagtgtgtgttattttaaa

SEQ ID NO: 82384 - DNA, 308 bp, Glycine max
aggaaactctcaagattttgaaattgctggtaatactcttatgccagctttttctgttccacaggctactgccagatcttctgaaaatgcggaatcctctgcatgatctggaattcgtgttttctttcgcttgttcgtttgtttaattcaataaaggaaattaggcatgaccctcttgttgagtatgctctgcctatctgaaaatttccacacctcttttaattgtcgtaatgatgtgtgaagtgtgtgttattttaaaaaaaaaaaaaaaaaaaaaaaaaaatttaaatataaaaaataattatatt

SEQ ID NO: 82385 - DNA, 151 bp, Glycine max
tctacagaggaagttattaagttccatcattgagggatgcagtatcgatgcagtgatgaacatatgcagacctaagcacagtgtcagtcactggtgctgttaatgaaagctacttcatcgagattagagttgcgtgagtgctgatattact

SEQ ID NO: 82386 - DNA, 392 bp, Glycine max
cacgcgcacgcgagctcgaaattcggaatcgagatgtgaggatttagtacgtgttttgagaactgaattccactactatgctaccaaaaccgtaagtacttgttgtacagaaaataagaaatagtcagaattgaagcaaaataataatttttaatttagtaatcaacgtttgcaatgttcgcagactcagtatctaaccagggctaggaagcatcctggtaaggagatactctgcaaacaagcacattctgaaacacaatgtcatcaaattctgtacaacaagtacttacggttttggtagcatagtagtgggatttagtacgtgttttgagaactgaaatttggatattagaacattatgttgggacacaaataatctagcacatgtcctc

SEQ ID NO: 82387 - DNA, 393 bp, Glycine max
  unsure (1)..(393): unsure at all n locations
ctcgagccgctcgagccgattntgaggcttttccccacaagctggtgcagtttggagagattcaggaaaaagttgtattgaaattttcacaagaggaatttcttacagcttggtcaactcaggtgcgtcctgcaacaactctgttggctgatgggtgtccatatntgtatgcaatggtgcatgatagttcagtgtctacaataccaggtgattttgtcattggtgtcaagttgacaaccatanacaatatgtgtgcatatgggctcaatcctggtatttcaaggtcttggtctttggcaacaattcctcagtccatttcacagcanactgtttggaatcaaatggcaacagtgagaacaccattgaattttgattctagcaagcagagctttt

SEQ ID NO: 82388 - DNA, 450 bp, Glycine max
  unsure (1)..(450): unsure at all n locations
attctctctgtgtatttccctacctctcccttcaagatgcagatcttcgtcaagaccctcaccggcaagaccatcacccttgaggtggaaagctctgacaccatcgacaacgtcaaggccaagatccaggacaaggaaggaatccccccggaccagcaacgtctcattttcgccggaaagcaacttgaggacggccgtacccttgctgactacaacattcagaaggagagtactcttcacctcgtcctccgtctccgtggtggcatgcagatcttcgttaagacactcaccggcaagaccataaccctagaggttgaaagctccgacaccatcgataacgtcaaggccaagatccaggacaaggagggtatccccccggaccagcaacgtctcatcttcgccggaaagcagctcgaggacggncgcaccctcgccgactacaacatccag

SEQ ID NO: 82389 - DNA, 515 bp, Glycine max
atgaaaaattgatgcgtgaaaggacgcacctgctgttggcttgttgttcaaggatggcaatttgtaagaaagatgtttggagagttgaatgtggaatcccttctggatttccgctcacagttatttgcaatagcatttttaatgagatgctcattagatatagctatgaaaaattactgcgccaggctaaagctccaagtatgtttttacaatccttcaaaaattttgtttctttgtgtgtgtatggtgatgataacttaattagtgttcatgaatatgtcaagccttactttagtggttctaaattgaaaagctttctagctggtcataatatcaccattactgatggtattgacaaaactagtgcaactttgcaatttagaaagttagcagattgtgattttctcaagagaaactttaagcagatgtctaatgttttatgggtggctcctgaggacaaggcgagtttatggtcacaacttcattatgtttcgtgcaataatctggaaatgcaa

SEQ ID NO: 82390 - DNA, 497 bp, Glycine max
atattcactcaccattttctcttttctcttcctctgagaacaaaaaaggggaagagacacaaaagaagaaagtgtgagtgagggaggcagaatctgaataataataataataataaatagctgcgtgttcaatgagagccacagaaaatcaataatgggagtagtttctgaaggaaacggcgacgttttaccatggctgaaatcgatgccggtggcgccggagtaccggccgagcgccgcggagtttcaagatcctataagttacatattcaagatcgagaaggaagcttccaagtacggaatctgcaaaatcatccctcccttcccaccttcttccaggaagaccgcaatcgccaacctcaaccgctcactcgcggagaccggctccacattcaccacgcgccagcagcagatcggcttctgcccccgcaggcccaggcccgtccagaggcccgtctggcagagcggtgatcgctacaccttcaccgagttcgagt

SEQ ID NO: 82391 - DNA, 315 bp, Glycine max
aaatataatttgatcattccttttaaaaccatatggttggatccctgttcaaattcatcttaattggtaattctagtcactttcatggcccattggaaaattattaccccaatttcaaatatctatgccggtcttggcttggttttctttaaaggtataatggcatattaccacatttcaaaaggtcagtcagtggttttgacagggtactttgcatactggtggtaatggtatgaacagggggctttcctggaaaagaatagatcggagaaatccgggataccatgctttctttttggtcactccactggggga

SEQ ID NO: 82392 - DNA, 327 bp, Glycine max
gcttgttagttcagtgtctacaataccaggggtttttgtcattggtgttaagttgacacccataaacattatgtgtgcatatgggctcaatcctggtatttaaggttctcgtcttttgggcaccattcctaagtccatttcacagcaaactgtttggacttcaaatggcaacaggtgagaacaccattgaattttggtttctagcaggcagagcttttgtcaattttctattgaccttctcggtggaggaattttagtggacaaaactggagattggatcacacttatacaaaattctccaattagtaacttgttgagagttgctgc

SEQ ID NO: 82393 - DNA, 503 bp, Glycine max
gcttatcttgtcaatctcgtaaatgtgttacgagaattgtatttgcacagtccagaggaagctcgccaattgagaaggaaagctctctctcgtattgaatggctgcaaaaagctgatgtgcctaccatagcacagattgaagagttccattcgatgcagaggatgatgaatgctcctgattcaaatgataatattgatctactgttgagcattgatttgttgggtttacaaggagcaggtaaagcttttccaaacaagattgtttttgatgataagcttgtgttggctaacacacaagaattctttgatggaaattttccagtggattcttggttaccaatttttgtgaattgtctttatcctgtaagtcaattaccttcagaagctgtcgttgtaaatgttacatgttgttgtggtgggctcctgtggtccccccactgcttggatagttctgagttaacatcgctctcatatatcaacaatagatcgcacagacttgggaa

SEQ ID NO: 82394 - DNA, 84 bp, Glycine max
tttttccctttcaaccacccaaaatttttggttaattcatacctaatggcatttaatttgagacccaaaaaccttgaccggcca

SEQ ID NO: 82395 - DNA, 310 bp, Glycine max
gcacgcgtacgtaagctcggaattcgcttcgagaaattaccgggccaggcttggggctccagtattgttttaccattcctccaaaaatttggttccttggggggggaatggcgaggatacctaattaggggtccatgattatgccaggcctaccttaaggggttttaaatggaaaggctttcaacctggtcatattatcaccatacctggtgggattggccaaacctggtgcaccttgccatttaaaaaggtaggagaatggggatttcttaagaggaaccttaagccgatggctaatggtttggggggg

SEQ ID NO: 82396 - DNA, 487 bp, Glycine max
agaggcattctcttaacacttcgggaggagctggtgcaaagaatgctattctcatgaatatgccaaatgctgttctttcaatgtggagatattttgttggagatctcgtctttgaagtttctaagatgacttctccctacattaaatgtacagtctctttcttcatagcatttggaaatttggctgatgacaccatcaattttgaggcttttccccacaagctggtgcagtttggagagattcaggaaaaagttgtgttgaaattttcacaagaggaatttcttacagcttggtcaactcaggtgcgtcccgcaacgactctgttggctgatgggtgcccatatttgtatgctatggtgcatgatagttcagtgtctacaataccaggtgattttgtcattggtgttaagttgacaaccataaacaatatgtgtgcatatgggctcaatcctggtatttcaggttctcgtcttttgggcaccattcc

SEQ ID NO: 82397 - DNA, 400 bp, Glycine max
ggctgatgacaccatcaattttgaggcttttccccacaagctggtgcagtttggagagattcaggaaaaagttgtgttgaaattttcacaagaggaatttcttacagcttggtcaactcaggtgcgtcccgcaacgactctgttggctgatgggtgcccatatttgtatgctatggtgcatgatagttcagtgtctacaataccaggtgattttgtcattggtgttaagttgacaaccataaacaatatgtgtgcatatgggctcaatcctggtatttcaggttctcgtcttttgggcaccattcctcagtccatttcacagcaaactgtttggaatcaaatggcaacagtgagaacaccattgtaatttgattctagcaagcagagcttttgtcaattt

SEQ ID NO: 82398 - DNA, 274 bp, Glycine max
cggaggccttacgcaccgcataacggaaattccctctaacacacagattacatagacggcgagtgttgcttcaatgtcaacactcgcactcgattggaaagatgagcctgtcactagagcacaatacgatcagggaaaaaccttcattggtgatgtagatgccactctttgacactcaccatgagataatcgtgcaagagggggacccttaaaagaccatcagagtgcttccaggctgtgactatgagctcatcctccgcactgtcatgaacag

SEQ ID NO: 82399 - DNA, 409 bp, Glycine max
gttggttttggtgaagacgatggcatagcgtatctctcagactcgcttggttttgcaaccatggaagacaacgacttctcagaaactgcaaagttcattagccagatcctcatggaagaaaacgttgaacttgaacagagcccattctacgacttaatcaattttgaaggtaccggaaaattcttcttccaagcttttggcgggtaacctacttctcagtccccaagctagcaacaccaatttttcagttgaaaattctcgtgagttgaacctcccttccccagattctctttctgtttctgctcttcagtttaacccccacgcactctcttaaccaccacctttggttaatgttagtgaaggagtctctgatttggactcttctattgcaagactcttagcacataat

SEQ ID NO: 82400 - DNA, 441 bp, Glycine max
acggcgcgcgcacgcgtgcgtaagctcggaattcgggtcgagctccttcccaattgtggaccactacaaacccaggcgacggggctgggcttatgagaaacgtccgcccccatagctgaaagtagatgccttcaacaacaaaggtccacataaactgtctgatctctttgcctacacctcttgcttgaggtactacactccccagacttttagtgtagcaaggtcgtgatctagcttcagaagatgaaaaatgactgctataggcgaaagggaatgggctcaaatacaaaggaagaccgtcagcacaatctgatttgctcttgctcccatgatcaagtgcaaggcagagtgcttaaggagatcacacccatagccttgcgggagaccgggttttgacatcactccacattttgctcggagatggggtagtatcaactcaaa

SEQ ID NO: 82401 - DNA, 406 bp, Glycine max
tccagagagaagaagaaacttaatcgatcatcacttcacttcactaatacatcatggcagacgagacccagaacaagtatgagagctctgaggttgaggtccaggatcgaggtgtttttgactttctcggtaagaaaaaggatgaagaagacaagcctcatcctcaggaggaggtcatcgccaccgagtttcaaaaagtcactgtctcagaccaaggagagaacaagcacagcctcttagaaaagcttcaccgatctgacagcagctctagctcttcaagtgaggaggaaggagaagatggagagaaaaggaagaagaagaagaaggaaaagaaagggctgaaagagaagatcgaggagaaaatagagggtgatcatcatcatcacaaggatgaggacacaagtgt

SEQ ID NO: 82402 - DNA, 399 bp, Glycine max
tcttgacatctcagattgtgtaagtctgtccagattaccagacgacattggtgagttgaagaagcttgagaagctctacttgaagggttgctcaaaactgagtgaatttccgtactctgtcgttaattttggaaatttagagcatgaaatatatgtgatctgtgacgaagaaatagctgccttgtgggaaaacttccccaccatgcccaagttgaagatagagatatctacaatggagattaacttgaattggcttccaggagttcattcctgaaacttgtttcctgaaattgatagtgacttagaatcatgttgaaattggacaatgatgttcatgtagatgtaatgaataaagtaggaagtttgtgttagtgatttttgagaaattacacatcaatt

SEQ ID NO: 82403 - DNA, 231 bp, Glycine max
ccaaatagttaactacgtaatggcttctcttctctctctctctctctcttcatagtactctatttgtaaagtaatatgcgtgtatagtatagcatctttttctactactactagacatgcaggtcgagttggaaaaatttgttatttgcaaactcttttgtgggggattgacttcacaagctccccaatgatcgaatccctgtgtgaatataattatgccttttggtctaa

SEQ ID NO: 82404 - DNA, 394 bp, Glycine max
caagtgatttatctagtcaatgttggaggttgggttcatctatgacctgatgtgaattagtctgccacaaattttataagacgattgctagagcctagaagtttttttaggtctctttcgatttgtgatgtgaccccttggtcatctgctgtttttgttttcatactactatagcctttcactcatgtctttgttctcaacttatgatttgatggtgcgaaaatacttcagtgttactaggagtactgattttccaagagttgattaagcaataaaagggcagacggactgggggactggaggagtcaggagtgttgttacagtttatggttacatgagaaatactaggaacacactctttgtcactctgttttaaacacaccctcttttattt

SEQ ID NO: 82405 - DNA, 362 bp, Glycine max
cgcacgcgtacgtaagctcggaattcagcccgaggagtaagttcaggaaggcgttggttctttgttggattggggcgtccttgaacctgatttacaaaagcatactcagacgataggatacatcagatttcgtgcgccaactatacaatgaagatcaattgcaaaaagatgatgtgaacttactcaattggagtgggctgccctcccaggggcaggagcaacaccatggccgtgattctataaatatcacttctctcttgccacgcattaaccccaacagttcaatcgcctgtctcactcgccgaccaaggtcagattttaggtctctgccctcgctgaatacgagcttctgtatcataatc

SEQ ID NO: 82406 - DNA, 216 bp, Glycine max
gctcaacttttgcttaaagctctagaaaccttggggaggtaagctgattgctttttgaagaacaacaatgctatccaatatgattgttaggacccattttgcagaattgtttaatgataactttcatgattaaaaattttattttttatggcacaattgtgacttcagtttatcatcaatcaaatagctggacactttggagaaatagccattatt

SEQ ID NO: 82407 - DNA, 249 bp, Glycine max
ctattttttaattttaactctcttcattgtaaggcttttctctaataccccatttttgggtgaaaaaagattggatattggccccagcagtgttgtctgtgatttgaagtatgtctttttttggtttgttgaggttgtggtaggagataggagagagggttggagggacttttcattgttcaagttttttatttgatgctgattaatttatttttttattttgctttattgtgttatttttccattttt

SEQ ID NO: 82408 - DNA, 398 bp, Glycine max
cttgttttttctctcacctgaaaatgtcttgctgcggtggtaactgtggttgcggaagctcctgcaagtgcggcaacggctgcggaggctgcaagatgtacccagacttgagctacactgagtcaaccaccaccgagaccttggtcatgggagtggcacctgttaaggctcaatttgagggtgctgaaatgggtgtgcccgctgagaacgatggctgcaaatgtggaccaaactgctcctgcaacccctgcacttgcaagtgaggtgttgggagagcaagcttcaagcagagatagcccttaattaggaataatgataaactattaatgtgtagctaaaaacttatgtattatgtctgtgatggttttcgagcactctggtgttttgtggtaaacaaa

SEQ ID NO: 82409 - DNA, 380 bp, Glycine max
  unsure (1)..(380): unsure at all n locations
agagcnntgacggcgcgcgcacgcgtgcgtgagctcggaattcagcttgagggtactttcggacccattccacctctacaaacagcccatagtcaaactgagccatggtcacaatcataccaggactcgtgcagtgtctcgggttgttagggcatctacaaagaatccgacaaacctattttttgatggtggaagatcttcaaccaaatcaaatgaatcgtaataatacgtcgctacgtaaaatatgtaatgcacaatcaagacttacaacttgatctggcaaatcacacacacttcatcgcagatttaacctgtgaggtacggagagcactaccacaccaatagctccttgacacattcttttgcgcatagggcacttt

SEQ ID NO: 82410 - DNA, 404 bp, Glycine max
ctcgagccgatcagaaccacattcctgggaattaatcttcccaatagaggtatgtggtcctaataatggttttgaaatgtggagttctgagtgggcaaatcaaacttcatggcatttgagtttccttattgacaatcccaaacagtctacagtttttgatattctcttgggaatctctcaagattttgaaattgctggtaatactcttatgccagctttttctgttccacaggctactgccagatcttctgaaaatgcggaatcctctgcatgatctggaattcgtgttttctttcgcttgttcgtttgtttaattcaataaaggaaattaggcatgaccctcttgttgagtatgctctgcctatctgaaaatttccacacctcttttaattgtcgtaatgatg

SEQ ID NO: 82411 - DNA, 246 bp, Glycine max
gaggagaattggttgtgataggctaaggaagtggcgacggagtagtgaacatggttctcgattgattgattcctattatttgcgtttgcagaagcttgagaattgatatttattggtcgctacctcagaccgactctcagtgtgtcacgctctcctttcaattcctgcataataaagttctctccattctctagttattatctccactcgagaactttcaagcgccgctctccttctcacatactc

SEQ ID NO: 82412 - DNA, 386 bp, Glycine max
aattgtttaaacctaattctcatttcttcatcgttcgattcttctcctcctaaagatgcagatcttcgtgaaaactttgaccggtaagaccatcacccttgaggtggagtcctccgacaccatcgataacgtgaaagctaagattcaagacaaggaagggatcccacctgaccagcagagacttatctttgcgggtaaacagcttgaggatggtcgaacccttgccgactacaacatccaaaaggaatccactctccacctcgtgcttcgcctcaggggtggcatgcaaatctttgtcaagactttgactggcaagaccatcaccctcgaggtcgaatcctcggacaccattgataatgtcaaggccaagatccaggacaaggagg

SEQ ID NO: 82413 - DNA, 288 bp, Glycine max
gtcaagccttactttagtggttctaaattgaaaagctgtctagctggtcataatatcaccattactgatggtattgacaaaactagtgcaactttgcaatttagaaagttagcagattgtgattttctcaagagaaactttaagcaaaagtgttaaggtttatgggtgggttctgagagacaaagcgagagtatatggacacaacttcattatgtttcgtgcaataatctggaaatgcaagaagcttatcttgtcaacctcgtaaatgtgttacgagaattgtttttg

SEQ ID NO: 82414 - DNA, 396 bp, Glycine max
ttggaatcaacccatactccatggaatggactggtttggccaatagattactgagtaagggcaatgatattctgtgttgcgattatgctagttttgatggtttgattaccaagcaagttatgagcaagatggcagaaatgataaacagtctttgtggtggtgatgaaaaattgatgcgtgaaaggacgcacctgctgttggcttgttgttcaaggatggcaatttgtaagaaagatgtttggagagttgaatgtggaatcccttctggatttccgctcacagttatttgcaatagcatttttaatgagatgctcattagatatagctatgaaaaattactgcgccaggctaaagctccaagtatgtttttacaatccttcaaaaattttgtttctt

SEQ ID NO: 82415 - DNA, 455 bp, Glycine max
  unsure (1)..(455): unsure at all n locations
agagnnnngacggcgcatgcaccgcgtacgtaagcntcggaattcgagctcgagcgagttcgagtgtacgaggcacactggctagtgtctaggcatgtgtgtgagattcctaacgaggaactataatntattgggagagcacttgagtttttgcggacaattggtttcgattcatttgggtttggaaaactctgatttcacaattttttttttaccaatttttaatataaaagatatttctaggagcgcaactgtttgtgctcattcttatgcagcatgccaagtcctgatatgagatttctgaggccgattggtgaagaattatatattaaattagaacagattacagctctggatgaattaatgacactgatgagatttcttctttctgtattaattatttctctggatttgatcacgaaacattgaatagaattgtgaaccttgtttctttg

SEQ ID NO: 82416 - DNA, 402 bp, Glycine max
cttaattaggcagctgaataaagacatggagaagcttaagttgtacggaaggaaaaaaagttgccaagctgatgatgttgaggactacctgtctaaaatgcttgaacatgatatttatgatagacatccagacatgaactgcatgtgggatttaggttggaatgatgagacagttgcatttatcgagaaatatgatgttataagggatacagaaaagcatatccttagtcttcttctggatgagatcaccgtagatttttgcatgtgaagaagggggacacggagccaagtttaatttttcatgcatgtgtaatttataaaggtaaggatttgataactgcaagttttcatttagaaattcattctgttttttcggatcaatttagtgtggttcacaaaatc

SEQ ID NO: 82417 - DNA, 399 bp, Glycine max
aaaattttgtttctttgtgtgtgtatggagatgataacttaattagtgttcatgaatatgtcaagccttactttagtggttctaaattgaaaagctttctagctagtcataacatcaccattactgatggtattgacaaaactagtgcaactttgcaatttagaaagttagcagattgtgattttctcaagagaaactttaagcagatgtctaatgttttgtgggtggctcctgaggacaaggcgagtttatggtcacaacttcattatgtttcgtgtaataatctggaaatgcaagaagcttatcttgtcaacctcgtaaatgtgttacgagaattgtatttgcacagtccagaggaagctcgccaattgagaaggaaagctctctctcgtattgaat

SEQ ID NO: 82418 - DNA, 181 bp, Glycine max
tgcacgcgcacgcttgcttaatcttcggatccagctcaagtacttattttgactaattacatggtgatgcttgagttgttctttaagaaaaaaagactttcctttcttttgtttgccatgactaccaagcctaatattgcttcaacatgaccaccaatgataaacatgcattcatcgaact

SEQ ID NO: 82419 - DNA, 349 bp, Glycine max
  unsure (1)..(349): unsure at all n locations
ccagagtggtgggtttaattgattgggatcatgcgtgttatttgatccctaaaaatcaaaaatagtgtcaaaaatttacaataagtggcacatccttcttcaaccaactgaactacgtctttaacattattcgtgttatatgttatgatgcatggtggaaaattaacgattaatgatattattctattctattctatggntagcgatgtggtagggctcaaggattcaactagtgtggtcattattagaagcttgtcaaggtttttttttcttttctttctgaatagaaacctgtcagggtagtgtctaattaatatcggaatttcgttctatatggaaaagtattggg

SEQ ID NO: 82420 - DNA, 177 bp, Glycine max
tatctctctttgtctctatatctgtatttctgaattttgggaatagaaaaaccctaagcatagctaagcggttaggatggggaacacggtgaatctgttgaaccagatcatggaatggaaattcacttctaaatctggtgaacgtttattgcgtaagtgcgagaaggaggagaaatc

SEQ ID NO: 82421 - DNA, 181 bp, Glycine max
agagattcaagaaaaagttgtattgaaattttcacaagaggaatttcttacagctaggtcaactcatgtgcgtcctgcaacaactctgttagctgatgggtgtccatatttgtatgctatggtgcatgatagttcagtgtctacaataccaggtgattttgttattggtgttaagttgaca

SEQ ID NO: 82422 - DNA, 257 bp, Glycine max
aggaaactctcaagattttgaaattgctggtaatactcttatgccagctttttctgttccacaggctactgccagatcttctgaaaatgcggaatcctctgcatgatctggaattcgtgttttctttcgcttgttcgtttgtttaattcaataaaggaaattaggcatgaccctcttgttgagtatgctctgcctatctgaaaatttccacacctcttttaattgtcgtaatgatgtgtgaagagtgtgttattttt

SEQ ID NO: 82423 - DNA, 398 bp, Glycine max
gcagacttaacaacagcacaaagcgggttactgtctgttcaagctaccatctctctctctctttcttagtgcctccttgccagaagttaaaatggcccaagaaactttcctattcacatctgaatcagtgaacgaggggcaccctgacaagctctgtgaccagatctccgatgctgtgctcgatgcatgcttggagcatgaccctgacagcaaggttgcctgtgaaacctgcaccaagaccaacatggtgatggttttcggagagatcacaaccaaggccaacgtggactatgagaagattgtgcgtgacacatgcaggaacattggttttgtctctgatgatgttggtcttgatgctgacaactgcaaggtcctcgtcaacattgatcaacagagtc

SEQ ID NO: 82424 - DNA, 259 bp, Glycine max
tagcaggggtgtggtatatagtaggggatataattactacacaaccctgcatagttggttagggtataatactactggggctttttaacttacttttaaaacttacatggcacacaaaagggcaccatttggtcaatgtaattaactggaatggttttttttaatgtaaactatggataaaaaggtaaatggccagggaaggcctgggccctgaacctgggggggtggggggtggacctggacctggtttgggcccggg

SEQ ID NO: 82425 - DNA, 173 bp, Glycine max
  unsure (1)..(173): unsure at all n locations
agcaacttcccaattcaggctattgatttgagatgcatatgagcgtgntaatgatgtgattagcaacccgaacaaatatgggtttcaaaactcagactcaccctgttgctcctttggaaatattcgaccggctcttacatgtatacctgcatcaaaaactgtgcaaagataga

SEQ ID NO: 82426 - DNA, 363 bp, Glycine max
gcctaggtgaagacaatggacctccacaactctgtactgggtagcctgttagtagatggagattgggtcacagctgcactatgtctagatgaagggtgttgctgagctggaatcacggttttatactgtaatgatctgggacactgtcattttggagaggaatgccaaaagtaccagatattagtctcattagacttcttgagctggcttccaatgtcaagatcatgcataatcatgctctggctattagctgcagggtagcacactctatatttcgtcgatgtactctgtgacaacacatgttcatcatattgtgaatacttagaaagaggcaatagataagaaagtagagtcgatgcttac

SEQ ID NO: 82427 - DNA, 126 bp, Glycine max
cgagactattgcttcgacctctccctgatttatccaaaagcctaagataacatcatctacaacctcattcattactaccactcccaaacaagggatgctcccaccatcatcaacccggtccaacta

SEQ ID NO: 82428 - DNA, 357 bp, Glycine max
caagactcttgcttcgacctctccctatttattccaaaagcctcagataacaacaactgcaacctcattcatcaccaccacttccaaacaagggatgcctccaccatcatcaaccctgtccaactaccctttcatcaaaaccacttttttcaccagcaccagcatggactgttccaacctcaacagcaaagcctaagccaagaccttggctgtctatgacccattacaggaaaaccagtggaacaaaaccctacttctataccattcacccagcaccataatatccctttagaagctttcaccaccaccccttctattatttccaacaccaacactggctccacccctttgcactct

SEQ ID NO: 82429 - DNA, 295 bp, Glycine max
  unsure (1)..(295): unsure at all n locations
ggagaagcattcgaggctggtgaagtgtctaagaagaagaaaaagaaatcaaaaaagaaggacatcgagtaaactatgatgtattgcagctttaactgccgaaatcgattttttcatcttatagttgtggacaatgttaaatttttatttgctttgaactttacctgttgctgcacttgtctagactttatgttgacttgtcatttggcatacaaattttgtcctagcaattttccgcttttnaaaaaaaaaaaaaaaaaaaaaaatattatatttcctcaaaaaaaaaaaaata

SEQ ID NO: 82430 - DNA, 294 bp, Glycine max
  unsure (1)..(294): unsure at all n locations
gctctcagggctgcgttattggtatgagtaacctggagggaaaatggtaatatttcaaaacacactcccatctcttggtgtgggccgcttggaagtacgtggagatgattctcgtgtntacggggacagacaaagagcatggactgagactgcctgagatccattctttaacaaatggctgctgagtttccaagaccaaatctcacaaatgtgatgcatcagtgatagacactgcatagctcttagaacttgcaagatactgtggcagtgatactatcacttcatagcattacg

SEQ ID NO: 82431 - DNA, 179 bp, Glycine max
cacaagtttatatagcgctacaattctctcaccatctcaactcgccatcaggattgaggacggattgcaaacatgctagatcaggttcgacacatctacactcatcgacatacgctgctgaacagctccatatactacttatcgcatctgatatacagagcattgactgagattactgc

SEQ ID NO: 82432 - DNA, 502 bp, Glycine max
ggaaatttggctgatgacaccatcaattttgaggcttttccccacaagctggtgcagtttggagagattcaggaaaaagttgtgttgaaattttcacaagaggaatttcttacagcttggtcaactcaggtgcgtcccgcaacgactctgttggctgatgggtgcccatatttgtatgctatggtgcatgatagttcagtgtctacaataccaggtgattttgtcattggtgttaagttgacaaccataaacaatatgtgtgcatatgggctcaatcctggtatttcaggttctcgtcttttgggcaccattcctcagtccatttcacagcaaactgtttggaatcaaatggcaacagtgagaacaccattgaattttgattctagcaagcagagcttttgtcaattttctattgaccttctcggtggaggaattttagtggacaaaactggagaatggatcacacttatacaaaattctccaattagtaacttgttgagag

SEQ ID NO: 82433 - DNA, 235 bp, Glycine max
cacaacttcataaagtgtaacaattatcacaccacagatctgcacaacattgttcaagacacattcaatcttgggcattagtccctggttttatcaaccaacacaatttcaccgtccaaaacacaaaacactactcatcacatcttattcacatcacattcactttcattactacatcatttttcacttcacaatcttgacaccacacacacacactcccacaacacaacacaat

SEQ ID NO: 82434 - DNA, 529 bp, Glycine max
gccttactttagtggttctaaattgaaaagctttctagctggtcataatatcaccattactgatggtattgacaaaactagtgcaactttgcaatttagaaagttagcagattgtgattttctcaagagaaactttaagcagatgtctaatgttttgtgggtggctcctgaagacaaggcgagtttatggtcacaacttcattatgtttcgtgcaataatctggaaatgcaagaagcttatcttgtcaatctcgtaaatgtgttacgagaattgtatttgcacagtccagaggaagctcgccaattgagaaggaaagctctctctcgtattgaatggctgcaaaaagctgatgtgcctaccatagcacagattgaagagttccattcgatgcagaagatgatgaatgctcctgattcaaatgataatattgatctactgttgagcattgattgttgggtttacaaggagcaggtaaagcttttccaaacaagattgtttttgatgataaagcttgtgtggctaacacac

SEQ ID NO: 82435 - DNA, 232 bp, Glycine max
  unsure (1)..(232): unsure at all n locations
ctaatccctctntcttcctcttcctcagtagtgcgattttcgattctcttctctgcaactatgcctaaccctaaggtcttcttcgacatgaccatcggcggtcaacctgccggccgcatcgtgatggagctctacgccgacgtgactccgagcaccgccgagaactttcgcgcgctctgcaccggcgagaaagggcgccggggcgggagcggcaaaggcccctccactacaa

SEQ ID NO: 82436 - DNA, 389 bp, Glycine max
tggcaacagtgagaacaccattgaattttgattctagcaagcagagcttttgtcaattttctattgaccttctcggtggaggaattttagtggacaaaactggagattggatcacacttatacaaaattctccaattagtaacttgttgagagttgctgcttggaagaaaggttgtttaatggtcaagattgtgatgtctgggaatgcagcagtcaaaaggagtgatggggcctcattggtacaagtgtttttaacaaacagctacagtacagagcattttgatgcatgtaagtggacaaaatcagaaccacattcctgggaattaatcttcccaatagaggtatgtggtcctaataatggttttgaactgtggagttctgagtgggca

SEQ ID NO: 82437 - DNA, 532 bp, Glycine max
ctcgcaatggttaaagttaatgtagcatgtgctgctgttggcttgacatcaagttacactccaactccattgttggaatctggtttgcaaaaagacagagggttaattgtggagtattttggaaggatgtcttacgttgctcataacgttaatcagccccaagagaaagatttgttggagggaaatttttcctttgatattaaatctcgctctagattggaaaaagtttcctctacaaaagcacaatttgttagtggaaaaaccttcaaatatgatataattggtgctggttcacattcttcagaagatttttctgaaaaggaagatcaagaaaaacccaaaaagattgatgccagattgagacagagaatagatcctcaatacaatgaggttcaggctcagatggaaacaaatttgtttaaattgtctcttgatgatgttgaaactcctaaaggttccatgttggatcttaaaatttctcaatctaaaatagcactttcaaaaacacagttggaggaaccattctgcgtag

SEQ ID NO: 82438 - DNA, 486 bp, Glycine max
  unsure (1)..(486): unsure at all n locations
tgtgtgtgtatggtgatgataacttaattagtgttcatgaatatgtcaagccttactttagtggttctaaattgaaaagctttctagctggtcataatatcaccattactgatggtattgacaaaactagtgcaactttgcaatttagaaagttagcagattgtgattttctcaagagaaactttaagcagatgtctaatgttttgtgggtggctcctgaggacaaggcgagtttatggtcacaacttcattatgtttcgtgtaataatctggaaatgcaagaagcttatcttgtcaatctcgtaaatgtgttacgagaattgtatttgcacagtccagaggaagctcgccaattgagaaggaaagctctctctcgtattgaatggctgcaaaaagctgatgtgcctaccatagcacagatngaagagtttcattcgatgcagaggatgatgaatgctcctgattcaaatgataatattgatctac

SEQ ID NO: 82439 - DNA, 199 bp, Glycine max
ataatggattgtccgggttattttggaggaaggctatatttaattaaatgatttggccttcccaaaggtaccatcgaattaagtcttcaaaatgagtatttagccaataaaaggatttaaatgttccatttaagctttactcgctggagtctttcacctggcagagattaaaggaatatttaatttcaggttttttatc

SEQ ID NO: 82440 - DNA, 395 bp, Glycine max
aatgtgttacgagaactgtatttgcacagtctcataggaagctcgccaattgagaaggaaagctctctctcgtattgaatggctgcaaaaagctgatgtgcctaccatagcacagattgaagagttccattcgatgcagaggatgatgaatgctcctgattcaaatgataatattgatctactgttgagcattgatttgttgggtttacaaggagcaggcaaagcttttccaaacaagattgtttttgatgataagcttgtgttggctaacacacaagaattctttgatggaaattttccagtggattcttggttaccaatttttgtgaattgtctttatcctgtaagtcaattaccttcagaagctgtcgttgtaaatgtcacatgtggtagtg

SEQ ID NO: 82441 - DNA, 222 bp, Glycine max
gtacaattctcttaaatgtgatgggatcaatcataaataccaaaaaaacaagattttgtgagtctatggtagagctaaatctttgaacatacatagaaacttagtagtttcagaaagaaacatttcagatcaaaatttaggatgttgcttaggctttggtttattaacatttggtaacagaattgtatttgggctgagtagtggattggaattactatttac

SEQ ID NO: 82442 - DNA, 486 bp, Glycine max
caaaattctccaattagtaacttgttgagagttgctgcttggaagaaaggctgtttaatggtcaagattgtgatgtctgggaatgcagcagtcaaaaggagtgattgggcctcattggtacaagtgtttttaacaaacagcaacagtacagagcattttgatgcatgtaagtggacaaaatcagaaccacattcctgggaattgatcttcccaatagaggtatgtggtcctaataatggttttgaaatgtggagttctgagtgggcaaatcaaacttcatggcatttgagtttccttattgacaatcccaaacagtctacagtttttgatattctcttgggaatctctcaagattttgaaattgctggtaatactcttatgccagctttttctgttccacaggctactgccagatcttctgaaaatgcggaatcctctgcatgacctggaattatgttttctttcgcttgttccgttcgttaattc

SEQ ID NO: 82443 - DNA, 355 bp, Glycine max
cacgcatacacggtatgaacaatttagtgtcactggccatgcagatttggatgagggggatcatttttaagcggatgaagttacatatcaaggcaccagccgcggctatacctggggatgcactactgctagattggtggaatatgagtcgcggatcgacactgggtgaattgatgagaatgatgtagcgacatcacacgttgatactagagcatatcagcctcacacgagagattattagttaccgaacacagcatttgatattacatctcggtctagatagtatatgaagtgcgctacaacatacatcattgctagatgtaaaaactcaacatatgatataaacactgctgat

SEQ ID NO: 82444 - DNA, 411 bp, Glycine max
ctcgagccgaatcggctcgagggcaatttgtaagaaagatgtttggagagttgaatgtggaatcccttctggatttccgctcacagttatttgcaatagcatttttaatgagatgctcattagatatagctatgaaaaattactgcgccaggctaaagctccaagtatgtttttacaatccttcaaaaattttgtttctttgtgtgtgtatggtgatgataacttaattagtgttcatgaatatgtcaagccttattttagtggttctaaattgaaaagctttctagctggtcataatatcaccattactgatggtattgacaaaactagtgcaactttgcaatttagaaagttagcagattgtgattttctcaagagaaactttaagcagatgtccaatgttttgtgggt

SEQ ID NO: 82445 - DNA, 176 bp, Glycine max
tggaaattcttgatccagaattcccaaaccaattttaagggacccacttattagggaaaggattggttgattaaaaattttttttgaccatttttttaattaacccatgtaatattggcttaacttcccttgggtaacattaaatgtacctggtcccttaaggcttaccaagggga

SEQ ID NO: 82446 - DNA, 316 bp, Glycine max
caacgttgtgagtaggaagactcttgagactgtggatgatgacccttctacgaaagccttgcccaaaggggagaccatagttattggaaccaaagatgatgatgtctcagctgttaaaaagagtggatgctgttccacatagtttgtttgagagagatatacaaaagagtcttttggttatgcagtgtaacaggatgtttttgtgaactcattgttttattttgtttagttcttttttggttggtgatgtatacgattgattggcctcagctgccctttgtcgtgaacttctggtcataatacaggttttttattc

SEQ ID NO: 82447 - DNA, 305 bp, Glycine max
ccagtcactaaaaagggctacagacagattgcaacgccagattatgaccatgcaggtcagataactggcgtgagcgagggaggctgccctactacagcggattgaggaacaccttcgcatgatggttcagctgcctacggaaccgaaatgaacaatgctggtgaagctaagagagatgataaccaagaacctgacgagaaggacaactaatatgagggaaatgacatgggatcgggactgcaacaacagaaataagtccaagcgcaaacccacaggcagggctgtgtattataaaggatatggca

SEQ ID NO: 82448 - DNA, 345 bp, Glycine max
aaaaaaatttaactcctataaaaaaaaaaaaaaaaaaaaaaaaagggaaaaaaaaaaaaaaaaaaagggaccaaaaaaaaaaaaaaaaaaaaaaaaaggggcggcccccaacaagggagcccggcaacccggaaataaatcccggaccgggcccggcaggcgaaccaccttccccaaaagggagccgaaaaaaagctgggcgaaaccagggccaaagcgggccccggggggaaaaggtaacccgcccacaaatccacacaacaaacaacccggaagcaaaaaggggaaagcccggggggcccaaagagggagccaacccacaaaaaaggcggggcgcccaccgcc

SEQ ID NO: 82449 - DNA, 405 bp, Glycine max
cttatagatgacttctccctacattaaatgtacagtctctttcttcatagcatttggaaatttggctgatgacaccatcaattttgaggcttttccccacaagctggtgcagtttggagagattcaggaaaaagttgtgttgaaattttcacaagaggaatttcttacagcttggtcaactcaggtgcgtcccgcaacgactctgttggctgatgggtgcccatatttgtatgctatggtgcatgatagttcagtgtctacaataccaggtgattttgtcattggtgttaagttgacaaccataaacaatatgtgtgcatatgggctcaatcctggtatttcaggttctcgtcttttgggcaccattcctcagtccatttcacagcaaactgtttggaatcaaat

SEQ ID NO: 82450 - DNA, 418 bp, Glycine max
aaaaaaatttaaatctaaaaaaaaaaaaaaaaaaaaaaaaaaaaaaaaaaaaaaaaaaaaaaaaaaaaaacaaaaaaaaaaaaaaaaaaaaaaaaaaaaaaaaaaaaaaaaaaaaaaaaaaaaaaaaaaaaaaaaggggggggccccccccaggggggcccgcccccccggaaaaaaatccgggccgggccccggggggggccccagcttccccaaagggggggggaaaaaaggcggggggaaacaagggcaaaagggggccccgggggaaaaagggaacccgcccaaaatcccccacaaaaaccgggccggaggcaaaaagggaaaacccggggggcccaaaggggggggccaccccacaaaaagggggggggccccccggccccttccccagggggaaacccggggggcccgcctg

SEQ ID NO: 82451 - DNA, 356 bp, Glycine max
  unsure (1)..(356): unsure at all n locations
tagaaagttgncctctttgacnnncncaagagaaactntaagcagatgtttaatgttttgtgggtggctcctgaggacaaggcgagtttatggtcacaacttcattatgtttcgtgtaataatctggaaatgcaagaagcttatcttgtcaatctcgtaaatgtgttacgagaattgtatttgcacagtccagaggaagctcgccaattgagaaggaaagctctctctcgtattgaatggctgcaaaaagctgatgtgcctaccatagcacagattgaagagtttcattcgatgcataggatgatgaaagctcctgattcaaatgataatattgatctactggcgagcattgattt

SEQ ID NO: 82452 - DNA, 424 bp, Glycine max
  unsure (1)..(424): unsure at all n locations
gcacgcggacgtaagctcggaanncggctcgagacagaaaggagtcttcggtttcttctgcnnnaggcnnaggnnagggaccttatggtggtggttatggacatcgacatgggcatgggcatggcaacattggtgggcatagctatgtgccagtgtacccggagcagatgcactttcacttgcatgcaccaccaccacaaattttcagtgatgaaaacccgaatgcttgttctgtcatgtgagtgaggttgtttctttccatttaactgggtgatggatggtgataatgatggtgtgcttagagaactagatactagagtctagagtgttactttccattctttatttcttattctttcaaatttgggctcttagaaatccacgggaacttttgagatggttttgtgcttaaggaagaaaagga

SEQ ID NO: 82453 - DNA, 126 bp, Glycine max
  unsure (1)..(126): unsure at all n locations
acgacgcaagcacgcgnacgtaagcncggaaaacggcccgaaacaaaaactaaactccattgaacaagaaaacaaaacaaggaaggggacaagaaaaaaaaggccgccccacccaaacngccaact

SEQ ID NO: 82454 - DNA, 110 bp, Glycine max
  unsure (1)..(110): unsure at all n locations
agaacacnaccaacccagccgccgggcacacggcacaccgagccacgcccacgaccaagacggccncaaaccnagcanaggccgnggaanccagaagggcgcacgaaaag

SEQ ID NO: 82455 - DNA, 366 bp, Glycine max
  unsure (1)..(366): unsure at all n locations
gcacgcgacgtaagctcggaatccggctcgagggaagcgacttggtaatttgaaanagcggaaaaagggggttgtttagagcttatagtgcccctccgagggctcgttgcgcggcagccgtacaccgtcgcgaatatgacaggggggctgcggaagtggtcaggagaaaacccctccaagcggggagtcggagagctgtcagctcgttatccaccataacggtcgctgttagtccaatctttgctggaaggatgaggatttgcttgttggggagccctgcaattgggcacttggacacaataggttggccattaaccatggagattgtggtattgagcttacaagcatgggtgacaatacccacct

SEQ ID NO: 82456 - DNA, 250 bp, Glycine max
  unsure (1)..(250): unsure at all n locations
cgtaagctcggaaaacggcncgagaaaaaaaaaaaacctcaaactcaaaaaaaaaaaaaaaaaaaaaaagggacgggaaaaaaaaaaaaaaggaccgcggccacccgcaaaaccaccaccaaccgtcaacaacgggcggggccccgcaccgcggggcataaacgcgggcgccaaaaacgccgacggcggcccgcggaaccacgaccccccccaaggccgggagaaccgaggcaacgacaccgccagcgaa

SEQ ID NO: 82457 - DNA, 162 bp, Glycine max
  unsure (1)..(162): unsure at all n locations
tgcacgccacgtaagctcggaancggctcggggcgnnccaaagcctgccctcttnttttggccaaacnaccaccaccanggccaggtgtaacaacaaaaaagccccccccccaacaaaacnncaggncccaacaacaacccaacccgngaggangggaaaag

SEQ ID NO: 82458 - DNA, 400 bp, Glycine max
  unsure (1)..(400): unsure at all n locations
ctcgagccgantcttcttgtgattataacnnaannagngnncatgaatatgtcaagccttactttagcggttctaaattgaaaagctttctagctggtcataatatcaccattactgatggtattgacaaaactagtgcaactttgcaatttagaaagttagcagattgtgattttctcaagagaaactttaagcagatgtctaatgttttgtgggtggctcctgaggacaaggcgagtttatggtcacaacttcattatgtttcgtgtaataatctggaaatgcaagaagcttatcttgtcaatcttcgaaaagtgttacgagaattggatttgcaccgtccatatgaagctcgccaattgagaaagaaagccctttcttcgatgaatggctgcaaaag

SEQ ID NO: 82459 - DNA, 256 bp, Glycine max
  unsure (1)..(256): unsure at all n locations
gaagagcangacgacgatgcacgcggacgtaagctcggaatncggcncgagaaaaggatttcccctcccaatnnaannacaaaccaaacaagaaggggaantactggaagggggggcagccccacccaanaaaggcaggctggaaaacaagaaatctaatcctggttggggtggaaacaaaagggaaaaaccaccacaaggaaccgaaaaaaaaaaaaaaagggggggcgcccaccaggggggccgacggcccggg

SEQ ID NO: 82460 - DNA, 394 bp, Glycine max
  unsure (1)..(394): unsure at all n locations
cacgcggacgnaagctcggaanncggcncgagaaaaaaaaaaaaattttacttcaaaaaaaaaaaaaaaaaaaaaaaaaaaaaaggaaaaaaaaaaaaaaaaaaagaaaaaaaaaaaaaaaaaaaaaaaaaaaaaaaaaaaaaaaaaaaaaaaaaaaaagggggggccgccgccaagggggccggccaaccgggaaaaaaaaccgggacggggcccggagggggaccaaagcgcccaaaaaggggggggaaaaaaagcggggggaaaaaagggcaaaagggggccccgggggaaaaagggaacccgccaaaaanccaaaaaaaaaaacaagcgggaagaaaaaagggaaaagccgggggggccaaaggggggggcaaaccaacaaaaagggggg

SEQ ID NO: 82461 - DNA, 416 bp, Glycine max
ggaaagctttagctaattgtagtgatagggcctcattggtacaagtgtttttaacaaacagcaacagtacagagcattttgatgcatgtaagtggacaaaatcagaaccacattcctgggaattgatcttcccaatagaggtatgtggtcctaataatggttttgaaatgtggagttctgagtgggcaaatcaaacttcatggcatttgagtttccttattgacaatcccaaacagtccacagtttttgatattctcttgggaatctctcaagattttgaaattgctggtaatactcttatgccagctttttctgttccacaggctactgccaggtcttctgaaaatgcggaattctctgcatgatctggaatttgtgttttctttcattcaataaaggaaattgggcatgaccct

SEQ ID NO: 82462 - DNA, 55 bp, Glycine max
gaagagcaggacgcacgctgcacgcgtacgtgagttcggatcgagcaacgaacca

SEQ ID NO: 82463 - DNA, 270 bp, Glycine max
  unsure (1)..(270): unsure at all n locations
ggacattttaaattgatctatagccaancagcgnncgggcnctgtttcttttagacccacccttgctcttctcttcccttgcaacttcaactcaacaacccttcccttctcaaactcattcttgcctttctttttgctcatactgtgatatttattgctacttacttatgattcctatccaatcatccatggccgaggaaccccaaaaaccagcctccgatgaagaagtggcgcctgctcctgcggacacaccaccaactacccaatttg

SEQ ID NO: 82464 - DNA, 428 bp, Glycine max
  unsure (1)..(428): unsure at all n locations
cgagaattttanttgctcagtccagaggaagctcgccaattgagaaggaaagctctctctcgtattgaatggctgcaaaaagctgatgtgcctaccatagcacagattgaagagttccattcgatgcagaggatgatgaatgctcctgattcaaatgataatattgatttactgttgagcattgatttgttgggtttacaaggagcaggtaaagcttttccaaacaaaattgtttttgatgataagcttgtgttggctaacacacaagaattctttgatggaaattttccagtggattcttggttaccaatttttgtgaattgtctttatcctgtaagtcaattaccttcagaagctgtcgttgtaaatgttacatgtggtagtggacgtcgtggtttacccaccactgcttggattagttctgcagc

SEQ ID NO: 82465 - DNA, 180 bp, Glycine max
  unsure (1)..(180): unsure at all n locations
cccagcggaagggtggggtggaacccggcncaagggnaaacaacagngggcgcaggcacaagggagcgggaccaccccaaacaggggattcggggcgacggtcggagactctccggcgggtcgcaaaacgccggagcagcacagaaggggaaaacgtaccaacccggggacccagggaaa

SEQ ID NO: 82466 - DNA, 457 bp, Glycine max
  unsure (1)..(457): unsure at all n locations
gacgcgcagccgcgacgtaagcncggaanncggctcgggganngttcngttaatgatggagnngcagangncgagaagcggaagacatagggagagagagagagagagagagagaagaggnggcaancaaagaagctccgaacatgcacaagcaaacgcatacgcatgngnggaagcggancagagacagggaagcngggaaacggcatgcaagccatttcgccaaccgcataaaatggaatcgcatttcgcaactccaattatccaatcacaaagacatcgtctcacctcacaaaggcgccatcaactcccttcagattgattccacggagggaagatatttgctatccgccgcctccgatgcctcggtagcagtctacgacgtccaacgacccaccgtttacgaagccggcggcgtcatttcgaaacacagctctataattgtggttgacaagca

SEQ ID NO: 82467 - DNA, 432 bp, Glycine max
  unsure (1)..(432): unsure at all n locations
gccttttcacctttttctactaccacccactactcttaaggcatagttggtgaaaacaaagaaaaggatgatggtggtgccggtggcttctttctcaacagacacaaacaccatttgttccatttccattttcttctgattccttctctttctacccatctcatctcatttactatattttttttttggtccaccctcatattgaagactccgccttataggggcatctttatttctctttcattcttcttgtgtgtttgtgattattgccctgtcctctgacattgctcattcctttaattcccccacccatttcccacctttctctcactcttccttttcttctcgcaaacaaaactcatgggcgccgntcaagctcaatatcccttcaatgtacttttcctaaacagcaaaaccgggcaagaagcacat

SEQ ID NO: 82468 - DNA, 428 bp, Glycine max
gcaaaatgttgatttgtctaccatagcacagattgaagagttccattcgatgcagaggatgatgaatgctcctgattcaaatgataatattgatcttctgttgagcattgatttgttgggtttacaaggagcaggtaaagcttttccgaacaagattgtttttgatgataagcttgtgttggctaacacacaagaattctttgatggaaattttccagtggattcttggttaccaatttttgtgaattgtctttatcctgtaagtcaattaccttcagaagctgtcgttgtaaatgttacatgtggtagtggacgtcgtggtttacccaccactgcttggattaattctgcaggtaacaatcgcttctcagatattaataaaaagattccaccgcacttgggaaaggtaagaaaattgtttttcttac

SEQ ID NO: 82469 - DNA, 416 bp, Glycine max
taagttcggaattcggttcgaggacaaaggcgcattcggtcatctctataaacaaaaagggagcagaggggcttaattttggaatttcaggggctcgtcttttgggcaccattcctcagtccatttcacagcaaactgtttggaatcaaatggcaacagtgagaacaccattgaattttgattctagcaagcagagcttttgtcaggtttctatcgaccttctcggtggaggaatcttagtggacaaaactggagattggatcacacttatacaaaattctccaattagtaacttgttgagagttgctgcttggaagaaaggctgtttaatggtcaagattgtgaagtctgggaatgcaagaatcaaaaggagtgattgggccctattggtacaagtgtttttaacaaacagcaac

SEQ ID NO: 82470 - DNA, 443 bp, Glycine max
ctcgagcctaattggctcgaggctcctcgtcctgtcttgcattgaggccattgtaacagccacccttgcctcgcctttctctacctctgccaacgcaaatgctagagcgtacggcgggctggaagcggaggactgccagatccgctgccctctgagcacggagccgggccaggtggtcctcccggccctcacgcagtacaagaacgcatccggcgagtgggagaacacgatcgagtgctggcaggtcgacaccgtctcgacggagctgccgggcattgacaacgctttccgcctggactgggagggcggcttcgacgccgcgtaccagtacgtcttctacggccagtccttcatgccagcgcaccccgcgcccgagcccagtctcatcgtcatgagttccggaattggagatttgagggtcccttcccgccgatgcctgcgtg

SEQ ID NO: 82471 - DNA, 313 bp, Glycine max
  unsure (1)..(313): unsure at all n locations
acgccctgcgttcacgtacttctccactatggnnaggttaatcttggtgggtcccgctcaaaacgtnnttttaaattttcggggagcgttcaattatttgaagaacaaggggacaacgggcttagttgtcaacgttcggaattcaaacccatacctccatgcgaatcggactcggtttcggccccaatagattacctgagtaagcggcaatcgatatttctcgtgttcgcgaattattgctacgttttcgatgcgtttcgattacccacagcaacgtttattgagcaacgatcgcgcacgaaatggattaaac

SEQ ID NO: 82472 - DNA, 174 bp, Glycine max
gggggttgaaagaatagggaaaaaccaccccaacggactccaaaagcgggcaagcaaggcgaaagcgcatcaagcactcaaagagcaagggaagcaaccaaagccaagacggacagaaagaaacgccaaaccggaagaacggacatgggagaacaaataggagggacaacgacc

SEQ ID NO: 82473 - DNA, 309 bp, Glycine max
  unsure (1)..(309): unsure at all n locations
aggaggcgcgcggacggaagcncggaacgagggacgagaagagggttggggtgagaaggaaacaaacaagngcaaggaggggctacaagaagaggagggcccgaaccgacccaccgaaggggnggaaaaagnaaaagggaaaaaagaacncaacaaaaacacaanngggggaagcanggngagagcngancnancagcaaaaaagcagacggagggaacaaagacaagaaggagagaaaagcagcgcacacaggaagaacgaggaaggaagaacaaaggagggcagacaacgaccacacagagaagaca

SEQ ID NO: 82474 - DNA, 314 bp, Glycine max
  unsure (1)..(314): unsure at all n locations
cgcgaacgnaagcgcggaanncggctcgagaaaaaaatttgcgtgcccaaaaaaaaaaaaaaaaaaaaggaaaaaaaggaaggaaaaaaggggcccgccccccccaacccgggaaaaaaaaaaaggaccggaaccagcaggcagaaccagaaaaaccaaggggggggcccgaaaaaggggggcgcaaacacgggaaaaagagccggaccgggccaaagggggacccacacacaacccaaaacaagagacaagccggaaggagaaaaagaaaagccaggggggccccaggagagagcgaaatcacagccaaaagg

SEQ ID NO: 82475 - DNA, 430 bp, Glycine max
  unsure (1)..(430): unsure at all n locations
ctcgagccgaatgtcgctttttgctgttggcttgntgttcaaggatggcattttgtaagaaagatgtttggagagttgaatgtggaatcccttctggatttccgctcacagttatttgcaatagcatttttaatgagatgctcattagatatagctatgaaaaattactgcgccaggctaaagctccaagtatgtttttacaatccttcaaaaattttgtttctttgtgtgtgtatggtgatgataacttaattagtgttcatgaatatgtcaagccttactttagtggttctaaattgaaaagctttctagctagtcataacatcaccattactgatggtattgacaaaactagtgcaactttgcaatttagaaagttagcagattgtgattttctcaagagaaactttaagcagatgtctaatgtttt

SEQ ID NO: 82476 - DNA, 246 bp, Glycine max
  unsure (1)..(246): unsure at all n locations
acgaagacngcaacgggcgcagtggaggaagcagaaaggcccccccccccacaggcggaaaccatagctgaggcagaaacaagcagccaaacagaggggagaggcgagacagcaagaaagcacctcccgagctaaaccggacaatgaccggcgcacgaagccgaagcagcaaaaaccacgcgcaagagcgcacccaaaaaacgcaagccggaagcacaacagaaacggcgcccaacgcccgaaaaa

SEQ ID NO: 82477 - DNA, 206 bp, Glycine max
  unsure (1)..(206): unsure at all n locations
gcatggccgagcggttgatttttttanngacacggacncaaggggggactttaacagagaaggaggacccctcaccaccaaagaccaatcacaccaagactgacaatgacagccgtaggcaatagcgtgcccaacgaaacgcccataaggacacacctacgaaaaataactgccgccaggccaaagcaccaaagatgccacacaca

SEQ ID NO: 82478 - DNA, 51 bp, Glycine max
  unsure (1)..(51): unsure at all n locations
gaagagcangacgncgaggcacgcgnacgtaagctcggaanncggctcgag

SEQ ID NO: 82479 - DNA, 135 bp, Glycine max
  unsure (1)..(135): unsure at all n locations
cacgcgaccgaagctcggaanncggctcgagcnnnnccgcnnggtgnattgggttgangacagcaccggaaacgcggccgtttccgtcgccggggcaaccgcccccgcgaccngccancccncaacgccccacag

SEQ ID NO: 82480 - DNA, 61 bp, Glycine max
  unsure (1)..(61): unsure at all n locations
gaaaccganccancaagcaaggcnnagcaaaggggccaangaacanngcnngcacgccacc

SEQ ID NO: 82481 - DNA, 114 bp, Glycine max
  unsure (1)..(114): unsure at all n locations
ctcgagccganntttttttttcttgnngagccgaggaaaaacaggcgaaatgagaaagaaaagaagaccaaccgccgggagaagaagnagnaccaanggacgacaaagcgaaga

SEQ ID NO: 82482 - DNA, 89 bp, Glycine max
  unsure (1)..(89): unsure at all n locations
aaaaaaaaaaaaaaagaaggggcggccttcgacaagggagcccgccgacccgggaanaaannccggaccgggaccggcaggcgaaccag

SEQ ID NO: 82483 - DNA, 106 bp, Glycine max
  unsure (1)..(106): unsure at all n locations
aagagcangacggcgcaggcacgcgnacgnaagctcggaatncggctcgagaaaancagttgagtaatttctnacagcnnggncaacccaggngcgtccngcaaca

SEQ ID NO: 82484 - DNA, 473 bp, Glycine max
  unsure (1)..(473): unsure at all n locations
gaagagctangacgacgcacgcacgcgnacgtaagctcggaatncggcacgagaaaanttttttgttgatcttcaagcgagcgngcnnncggcgnggtccttttaacaacagcgcgagccactctctcttgtcgccacatatttaacgacaattactaaaactgtttttccgtgatggagctggctttgagtttaggagacacgtccaagtcctttacatttctcgacaaggcggtgactttaccccccaacaaggacccacctgggttctgcttggcgccgagtttcgccgagaaaagaagcgattctgagagaggaaccgcttctggttcttcagatccaccggttcagctcgaccttcttcctttctctccggttctcagaccccaacaacatcctccctcttaccttcggatcccttggctcacccaagcatgtggtggagcggcgagggttctggacgtgaacctatt

SEQ ID NO: 82485 - DNA, 407 bp, Glycine max
  unsure (1)..(407): unsure at all n locations
anaccattcaattagttttcaccacacacgcganggcangagcatanatataacacgggggcacggcaaaacagacaacgccaggggccaggcgaacggagccgactacgggccctgcataccgccgacgaaaactgcctaccaccgtactgggcgcagaggatgcctcggctgctgctgcgggtgcctcttcagacgaatcaccaagctgatgctaaccgtgaacatcatcattggcatcggcgagatccttttgtggctcatagtccgacccaacgtggagaaatgccacgtgaccgaggccaccctgacgcagatgaactacacccccaacaacacgctgcactacgaccgcgccctgaacataacgtgaacgaaaccccaacaagaggctcggaatctactac

SEQ ID NO: 82486 - DNA, 172 bp, Glycine max
  unsure (1)..(172): unsure at all n locations
gcgaacgtaagctcggaatncggcacgagaaaaaagtacaggtanttttaaaaaaaagaaagaaaaccgccaggggaattttgaagacggaaccgggccgcacccgccnnnatcctgtaagtcaattacctccagaagctgacgttgaaaatgttatatgtggtagtggacg

SEQ ID NO: 82487 - DNA, 420 bp, Glycine max
  unsure (1)..(420): unsure at all n locations
tatgcacacatnagttttatggtctcaatcccggnatnncaggggctcgtcttttgggcaccattcctcagtccatttcacagcaaactgtttggaatcaaatggcaacagtgagaacaccattgaattttgattctagcaagcagagcttttgtcaattttctattgaccttctcggtggaggaattttagtggacaaaactggagattggatcacacttatacaaaattctccaattagtaacttgttgagagttgctgcttggaagaaaggttgtttaatggtcaagattgtgatgtctgggaatgcagcagtcaaaaggagtgattgggcctcattggtacaagtgtttttaacaaacagcaacagtacagagcattttgatgcatgtaagtggacaaaatcagaaccacattcct

SEQ ID NO: 82488 - DNA, 237 bp, Glycine max
catacacaaacacacggtacttcacaaacccacatacacacacataagcaaaaactctgacggcccggacgcaagggcttaaacacatcactacgtaactcaggagagtgcatatgaacggtggaaggatggaaccacctagtggacaacaccagcaaaagtctagccaggcatgggagaacatgttggcatggacaaaagcccaccaagagagaaaaccaacgccgcagccagaac

SEQ ID NO: 82489 - DNA, 61 bp, Glycine max
  unsure (1)..(61): unsure at all n locations
acgaagctcggaatncggcacgagaaaaaattttaaggttataaaaaaaaaagaaacaaaa

SEQ ID NO: 82490 - DNA, 437 bp, Glycine max
gagacgctttttatagattgctatgaaaaattactgcgccaggctaaagcttcaagtatgtttttacaatccttcaaaaattttgtttctttgtgtgtgtatggtgatgataacttaattagtgttcatgaatatgtcaagccttactttagtggttctaaattgaaaagctttctagctggtcataatatcaccattactgatggtattgacaaaactagtgcaactttgcaatttagaaagttagcagattgtgattttctcaagagaaactttaagcagatgtctaatgttttgtgggtggctcctgaggacaaggcgagtttatggtcacaacttcattatgtttcgtgtaataatctggaaatgcaagaagcttatcttgtcaatctcgtaaatgtgttacgggaattgtatttgcacagtccagaggaagc

SEQ ID NO: 82491 - DNA, 106 bp, Glycine max
  unsure (1)..(106): unsure at all n locations
cgctcacagngaaactgccgccgtttatgtgttggatgtgacacacctatacacanaaaaccgccgttcacaagatgcacacggggcgaggcccatgcgattgtcg

SEQ ID NO: 82492 - DNA, 328 bp, Glycine max
  unsure (1)..(328): unsure at all n locations
gaagagnaagacaacgcgggcacgcggacgtaagcacggaanacggcacgaggaacggaacngtttgatttttngcgcgaacgccnncgcagggaacgtttgttatgcactgaggcccccaccgcaacacggcaggctttggaggcggctcacaactcccttcttgcttccgaggcccgtttggagcgtttggagcggcaggagcagtttcttgacgatcgggagcgcgaaatggtgcgtcggggtttgtcattcttggaggagctggagcttgaagaggcgcatgcggcacagctatcgagtacaggtagtggtgacgtggcaagtt

SEQ ID NO: 82493 - DNA, 220 bp, Glycine max
gaagggcaaaataatggccttgttatgaacttctacaaggaatcatgccctcaggctgaagacatcatcacagaacaagtcaagcttctctacaagcgccacaagaacactgctttctcctggctcaggaacatcttccatgactgtgctgttcagagttgtgatgcttcactgttgctggactccacaagaaggagcttgtctgagaaggaacaaatag

SEQ ID NO: 82494 - DNA, 279 bp, Glycine max
  unsure (1)..(279): unsure at all n locations
acgcgcnggacgccaccgggcgggccaccaacaacaccgggggccgcacctaccagcaggcgacctacgacgtcaacacggggaagcccgcctacgacgtgtgggacgacatgctgggcacgctgtacgacctgcccggcgagggcgagacgtacgccttcgacatggcgctaacgaccgagatggtgctgaccgcagcccggggtacgagttcggcctgaggcgcgcgcccacgctgctgctgatcggngcgcgcgacaataccgctatcgggaagca

SEQ ID NO: 82495 - DNA, 232 bp, Glycine max
  unsure (1)..(232): unsure at all n locations
gatcganctactggngtgnnnttattcgnngggnnnacaaggagcagngaattcttttccaaacaagatcgtttttgatgataagcttgtgttggctaacacacaagaattctttgatggaaattttccagtggattcttggttaccaatttttgtgaattgtctttatcctgtaagtcaattaccttcagaagctgtcgttgtaaatgttacatgtggtagtggacgtggt

SEQ ID NO: 82496 - DNA, 106 bp, Glycine max
  unsure (1)..(106): unsure at all n locations
ggaaaacggctcgaggcgaaaattttnnttttntttcacacacnncacacaacaggacgagaattaatagaggagtggaaatgccctaccaagagcgcgntatttt

SEQ ID NO: 82497 - DNA, 199 bp, Glycine max
  unsure (1)..(199): unsure at all n locations
cgcacgcacgcgtacgtaagcgcggaaaacggcncgagaaaaaaaattttatcaattggaaaaggncaaaaaaaaaaaaggggggggacatttgagaaaaaggggggccccccccaaaaaaaaaaggggcataaacagaaccacaacccaccaacacaaccacgcccggggcccgcaacacccccccgacgacaccgcg

SEQ ID NO: 82498 - DNA, 73 bp, Glycine max
  unsure (1)..(73): unsure at all n locations
cgcccagcaggagagagccaagnccangcaacgcnacccgaggaagaccnaagggaagccggccggccaaaca

SEQ ID NO: 82499 - DNA, 192 bp, Glycine max
  unsure (1)..(192): unsure at all n locations
gtaagctcggaanncggctcgagcggcncgaggagtttgttttatttgnccgaagannacgcaagggaaaggcttgngtaaggcccgaacacgagcagaccgaaacngacancccnggcnngggnnngcncggagagagacncaancgnccncnaanacgaccacgcgcganagaaccnccaacncgagaag

SEQ ID NO: 82500 - DNA, 272 bp, Glycine max
  unsure (1)..(272): unsure at all n locations
gaacaagnttgngtgngtacgaccgnaaaaaacccaacaccaggagaatagtttttaggggggtgtggccctcaaatcaactgaaatgatgtacggaaaaaaattgaacaagatactacatacatgcacaagtgccctaagaacagctactacattcatgtacatgcaatattattgcgtcaaagacatgttcagcaattttatgttacatgaataaaaatgaacaacctttgctgcgggaggtcactctaacctaccctggggaaaggaat

SEQ ID NO: 82501 - DNA, 395 bp, Glycine max
agcaagcagagctttgttttttttctatcgaccttctcggcggaggaattttagtggacaaaactggagattggatcacacttatacaaaattctccaattagtaacttgttgagagttgctgcttggaagaaaggctgtttaatggtcaagattgtgatgtctgggaatgcagcagtcaaaaggagtgattgggcctcattggtacaagtgtttttaacaaacagcaacagtacagagcattttgatgcatgtaagtggacaaaatcagaaccacattcctgggaattgatcttcccaatagaggtatgtggtcctaataatggttttgaaatgtggagttctgagtgggcaaatcaaacttcatggcatttgagtttcctattgacaatccca

SEQ ID NO: 82502 - DNA, 312 bp, Glycine max
acagcaaacgcgggtttatttaaatggcagcagtgagaacaccattgaattttgattctagcaagcagagcttttgtcaattttctattgaccttctcggtggaggaattttagtggacaaaactggagattggatcacacttatacaaaattctccaattagtaacttgttgagagttgctgcttggaagaaaggctgtttaatggtcaagattgtgatgtctgggaatgcagcagtcaaaaggagtgattgggcctcattggtacaagtgtttttaacaaacagcaacagtccagagcattttgatgcat

SEQ ID NO: 82503 - DNA, 200 bp, Glycine max
  unsure (1)..(200): unsure at all n locations
gaagagnnaagacgacgcgcgcacgcggacgtaagcncggaatacggcacgagaacgaantttgnttttntttgcagcgagaccaaaacgncnggcacggcaactaagagggcacgcggcgccccacccacncacnnccaccacccccaganccaacgacaagccncgcncnnncnccnncgaccacgccaaacccaacc

SEQ ID NO: 82504 - DNA, 271 bp, Glycine max
caactttggagggtccaacgttagcagattgtgattttctcaagagaaactttaagcagatgtctaatgttttgtgggtggctcctgaggacaaggcgagtttatggacacaacttcattatgtttcgcgtaataatctggaaatgcaagaagcttatcttgtcaacctcgtaaatgtgttacgagaattgtatttgcacagtccagaggaagctcgccaattgagaaggaaagctctttcttggattgaaaggctgcaaaaagctgatgt

SEQ ID NO: 82505 - DNA, 368 bp, Glycine max
  unsure (1)..(368): unsure at all n locations
gccanactttagtggntctaaatngaaaagcttnctagctgggcataatattaccattactgatgggattgacaaaactagtgcaactttgcaatttagaaagttagcagattgtgattttctcaagagaaactttaagcagatgtctaatgttttgtgggtggctcctgaagacaaggcgagtttatggtcacaacttcattatgtttcgtgtaataatctggaaatgcaagaagcttatcttgtcaatctcgtaaatgtgttacgagaactgtatttgcacagtccagaggaagctcgccaattgagaaggaaagctctctctcgtattgaatggctgcaaaaagctgatgtgcctaccatagcac

SEQ ID NO: 82506 - DNA, 415 bp, Glycine max
  unsure (1)..(415): unsure at all n locations
gaagagctangacgacgcttgcacgcgacgtaagctcggaatacggctcgagctcaactttttgtgnctttcacacacnaacaccaacnccagacgcaactttatggcggcccgtaacgaacaccactaacaacaatcactaaaaaaagaaagaaaatttaccctgatcgcaggatctccgaacaaagctttgatttcacaaaagctaaattgagataaacacctgcatattaaatttttctgctctatacatgcatcacatgtccctcacactaaacaaaagaaaaacaccaccaccctttgcttttgcttttctataagtagtcaacggctcagccttaatttctttgctttttttaggttaaggtacatggtgagggagaagattcagattaagaagatcgacaacgccacg

SEQ ID NO: 82507 - DNA, 379 bp, Glycine max
  unsure (1)..(379): unsure at all n locations
caatagattactgattttgggcaatgatattctgtgttgcgattatgctagttttgatggtttgattaccaagcaagttatgagcaagatggcagaaatgataaacagtctttgtggtggtgatgaaaaattgatgcgtgaaaggacgcacctgctgttggcttgttgttcaaggatggcaatttgtaagaaagatgtttggagagttgaatgtggaatcccttctggatttccgctcacagttatttgcaatagcatttttaatgagatgctcattagatatagctatgaaaaattactgcgccaggctaaagctccaagtatgtttttacaatccttcaaaaattttgtttctttgtgtgtgtatggngatgataac

SEQ ID NO: 82508 - DNA, 441 bp, Glycine max
  unsure (1)..(441): unsure at all n locations
ggtgatgataacnnnttttgtgttcatgaatatgtcaagccttactttagtggttctaaattgaaaagctttctagctggtcataatatcaccattactgatggtattgacaaaactagtgcaactttgcaatttagaaagttagcagattgtgattttctcaagagaaactttaagcagatgtctaatgttttatgggtggctcctgaggacaaggcgagtttatggtcacaacttcattatgtttcgtgcaataatctggaaatgcaagaagcttatcttgtcaatctcgtaaatgtgttacgagaattgtatttgcacagtccagaggaagctcgccaattgagaaggaaagctctctctcgtattgaatggctgcaaaaagctgatgtgcctaccatagcacaaatggaagagttccattccatgcagaggatgatg

SEQ ID NO: 82509 - DNA, 405 bp, Glycine max
  unsure (1)..(405): unsure at all n locations
cctagattcangtttgtttgtcatttttgtcaacttgaccatttaattaaggaaaaaagatttcggcagtttaccaaattctctaattaatatttagttaaaattgtaaatttgatcttccagcttatctttagtaagcatgttgaccgccatgtgttattgaaagaattgaaaaatatccattaaagtactaagcaatttcattgaagtttcatccatcaagccactggaaactcaaaggaagaagccaagaagaactaactcggcgaaaaaaaacccaaataaaaaggagacagacatgagcgattatctcaaagagaaaggaggtcccaggttggttatcatgggagagaccaaacaacttgttacccttttgacacgatttcaagcggcaatgaaaatgat

SEQ ID NO: 82510 - DNA, 403 bp, Glycine max
  unsure (1)..(403): unsure at all n locations
ccggtttganataaatggcaacagtgagaacaccattgaattttgattctagcaagcagagcttttgtcaattttctattgaccttctcggtggaggaattttagtggacaaaactggagattggatcacacttatacaaaattctccaattagtaacttgttgagagttgctgcttggaagaaaggttgtttaatggtcaagattgtgatgtctgggaatgcagcagtcaaaaggagtgattgggcctcattggtacaagtgtttttaacaaacagcaacagtacagagcattttgatgcatgtaagtggacaaaatcagaaccacattcctgggaattaatcttcccaatagaggtatgtggtcctaataatggttttgaaatgtggagttctgagtgggc

SEQ ID NO: 82511 - DNA, 364 bp, Glycine max
agaaagcttttatttgcttccaaaagttgcatacttaaattgatttgcttctttactctcccatttgcttccgaacaagctttttatttatttatttatttgttacaatctcaagagcttaatataatgtttccattttttagtctttaatccattcttttcttcttcctttttgtggtgtttttgtgtatacatattccagatttaagtggtgggtcagctactatggcttcgtctctcttactggcggtggtggttgtgcttgatatggttgcttttgctctcgctgttgctgcaaagcaaagaaggaatactgcctcgttaaataaagacagtgcaggtagaaactactgtcaatatgact

SEQ ID NO: 82512 - DNA, 114 bp, Glycine max
caacgatacaactttttttttcattcgcagaatcaaaatgagtggaagcactgattgacgcagcagcgggagctctcagacattaacaccaggtcgtgcagccggcgttacaaa

SEQ ID NO: 82513 - DNA, 381 bp, Glycine max
  unsure (1)..(381): unsure at all n locations
cacgagccgtanttgntttaggagacaaagaggacgnanccaggcgacattttgcagatgagaccaactctttcagagaggcgacaatggagaatactgtagcaatcaaagccagcttaaggacatttgaaatggtgtcaggctttaaaatcaactttgcaaaaagcagctttggtgcaattggcatgccggaatcgtggaagcaaaacgagcaaattatttgaattgcagtttgctggccattcctttcgtatattcggggattcccattgtggcaaatccaaggagaagtcagttgtgggatccaatcatccataaatgccgagaggaaactaggaacatgggaaacagagacatatatcatttgggggggaaaattac

SEQ ID NO: 82514 - DNA, 354 bp, Glycine max
  unsure (1)..(354): unsure at all n locations
aatccttcaaaatttttgtttctttgtgtgngtatggcgatgataacttaattagtgttcatgaatatgtcaagccttactttagtggttctaaattgaaaagctttctagctggtcataatatcaccattactgatggtattgacaaaactagtgcaactttgcaatttagaaagttagcagattgtgattttctcaagagaaactttaagcagatgtctaatgttttgtgggtggctcctgaggataaggcgagtttatggtcacaacttcattatgtttcgtgtaataatctggaaatgcaagaagcttatcttgtcaatctcgtaaatgtgttacgagaatcgtatttgc

SEQ ID NO: 82515 - DNA, 402 bp, Glycine max
tgacaagcacatccacgcgtacgtaagctcgggattcgagaccaaaacccaagtgttcttttttgtaaccctaaaacgagatcctcctcctcataagaagaaggatcgatgtgggcagcttcttgcctggcgtcatgctgcgcggactgcgcatgcgacgcctgcaggaccgtcgtatcgggaatcagccgccgttccgccaggatcgcctactgcggcctcttcgccttctctctcgtcgtcgcctggatcctccgtgaggtcgccgctcccctcatggaatcccttccctggatcaatcacttcaaacacacacctagccgagaatggtttgaaacggatgcagttctgccggttagcttggggaattttctggttttcactattctaacttgtctgatg

SEQ ID NO: 82516 - DNA, 375 bp, Glycine max
gcattttgatgcatttaattttacaaaatcagaaccacattcctgggaattaatcttcccaatagaggtatgtggtcctaataatggttttgaaatgtggagttctgagtgggcaaatcaaacttcatggcatttgagtttccttattgacaatcccaaacagtctacagtttttgatattctcttgggaatctctcaagattttgaaattgctggtaatactcttatgccagctttttctgttccacaggctactgccagatcttctgaaaatgcggaatcctctgcatgatctggaattcgtgttttctttcgcttgttcgtttgtttaattcaataaaggaaattaggcatgaccctcttgttgagtatgct

SEQ ID NO: 82517 - DNA, 388 bp, Glycine max
caaaacttgtgctttgttgcaatttagaaagttagcagattgtgattttctcaagagaaactttaagcagatgtctaatgttttgtgggtggctcctgaggacaaggcgagtttatggtcacaacttcattatgtttcgtgtaataatctggaaatgcaagaagcttatcttgtcaatctcgtaaatgtgttacgagaattgtatttgcacagtccagaggaagctcgccaattgagaaggaaagctctctctcgtattgaatggctgcaaaaagctgatgtgcctaccatagcacagattgaagagttccattcgatgcagaggatgatgaatgctcctgattcaaatgataatattgatttacttgtgagcattgatttgttgggt

SEQ ID NO: 82518 - DNA, 183 bp, Glycine max
  unsure (1)..(183): unsure at all n locations
cgaaggcatngttgnggttagccccggaccgagaggaggaggccgaccacattagaaagggagagctcgctccccacgccgaccaaccatcgggggagattctcaggaccgggtcagaaaaggagcagcacgccgctaaagctgcgaaggctggcccactgagtgaaaacccatcaagagcac

SEQ ID NO: 82519 - DNA, 134 bp, Glycine max
caattcacaaaaactggcttcatcctgtaagtcaattaccttcagaagctgtcgttgtaaatgttacatgtggtagtggacgtggtggtttacccaccactgcttggattagttctgcagcttacttttctctt

SEQ ID NO: 82520 - DNA, 230 bp, Glycine max
  unsure (1)..(230): unsure at all n locations
caaaaaattttacttactcacaaggaggagggacgnncgacaaaaaatattgtgaattatggcgcgcgcctttctttcttcactggcccaaaaaaaaaaaaaaaaaaaaaaaaaaaaaaaaaaaacaaaaaaaaaaaaaaaataaaaaaaataaaaaaaaaaaataaaacaaaaagcaaaaaccaaaaaaaaaaggggggggccccccacaaggaagctcgcacacccgg

SEQ ID NO: 82521 - DNA, 144 bp, Glycine max
gtacccaatttgtattcgggtgggtcaactcaatgaaggttcaagggggtccctcttcattggtaattatgtaaaatttagtctgaattagttttctaagcaattcaaaccacacaaaaatggtgatgatgtgttttgggtttt

SEQ ID NO: 82522 - DNA, 357 bp, Glycine max
  unsure (1)..(357): unsure at all n locations
gaagagntangaagacggatgcacgcgnacgtaagcncggaaatcggctcgagggacccatctggcctgcggtagcgcgaacgcaaagaaggaccaaggggccattctcaaaaggggagagggcgcccacaccagacggcacnagaccaccaagcaacaacaaccaaacaaaaagggggaggacgccacgcgggaccaaaaaccaagaaaaaggggcgcgcaaagaccagcgagcacgggaacccgccaaggaaaaacagacgaaaacacgcagacgcaccacagaacacgagaacgagaaaaagcaaagcagagcgaaaaccaggaacagaagcacaaccaagaggaaaaggaaac

SEQ ID NO: 82523 - DNA, 229 bp, Glycine max
  unsure (1)..(229): unsure at all n locations
gggcaggacacccctcttgtcctttttattactctngccatttccatatgctggctactaatatatatatattacggccttacgcctctaaggcatcaatctgcagcatagtcatgagctagaacaagaacacgaaaaagaagttcatggatggcactagtggtgagaaaaatgccattgcaattcatgtggggtcagcggagattcattttcaacggtgtgatgatgt

SEQ ID NO: 82524 - DNA, 252 bp, Glycine max
  unsure (1)..(252): unsure at all n locations
ctcgagctgtatcgtccttaggtgctnnaaatccacaaaatccttttgtgttaaataggtggatgggaaaactgactttccctcagggcacttcccgaagtgttaagagaatgcctctttctatagggggaggagctggtgcaaagaatgctattctcatgaatatgccaaatgctgttctttcaatgtggagatattctgtcggagatctcgtcttagaagtttctaagacgacttcttcctacattaaat

SEQ ID NO: 82525 - DNA, 155 bp, Glycine max
caaaaaaaagacggcgccggccccccccaacaccgggcaaccgacaagccgaggacggacggaccgcgaccggcgaagaccaaaaacaggcgaacggcacacccaaggcccaccggcaaagccagcgcacacagcggacccaacagccgcaaacc

SEQ ID NO: 82526 - DNA, 427 bp, Glycine max
  unsure (1)..(427): unsure at all n locations
ctagcaagcagagtctngtcatttttctattgaccttctcggtggaggaattttattggacaaaactggagattggatcacacttatacaaaattctccaattagtaacttgttgagagttgctgcttggaagaaaggttgtttaatggtcaagattgtgatgtctgggaatgcagcagtcaaaaggagtgattgggcctcattggtacaagtgtttttaacaaacagcaacagtacagagcattttgatgcatgtaagtggacaaaatcagaaccacattcctgggaattaatcttcccaatagaggtatgtggtcctaataatggttttgaaatgtggagttctgagtgggcaaatcaaactttatggcatttgagtttccttattgacaattccaaacagtctacagtttttgatattctcttg

SEQ ID NO: 82527 - DNA, 192 bp, Glycine max
  unsure (1)..(192): unsure at all n locations
acgcggacgtaagcgcggaacgcggcccgagcacgagcctaaccttctcgagaaggaggaaggaannncggaagcggaccggatatcacagggaaaccaccccgccccaccggacggacggccaccccaacgcaggacgagcaggaaacaaccgacagggagacacacacgcaggaaagagaccccaggacc

SEQ ID NO: 82528 - DNA, 247 bp, Glycine max
gggcacttttcgatctttaagagaatgcctctttctatagggggaggagctggtgcaaagaatgctatcctcatgaatatgccaaatgctgttctttcaatgtggagatattttgttggagatctcgtctttgaagtttctaagatgacttctccctacattaaatgtacagtctctttcttcatagcatttggaaacttggctgatgacaccatcaattttgaggcttttccccacaagccggtgc

SEQ ID NO: 82529 - DNA, 323 bp, Glycine max
  unsure (1)..(323): unsure at all n locations
cacgcgcacgcaagcccggaagccggcccgagcccgagccgaacttttggtgtccccccaacaaagacggcaacacgcgcgcagaaaccacccaacnaccccagcccacccacaccgaagaacggcgccccgcaaaagcccacagaaaacagcggaagacgcgaagacaagggcccgggggcccgcccagaaaaggagggccacaaaaaaaccggcgaaggacagaagaccggcgcacgcagacaggcacgccgggaagccgcagaccagcaaacaggaggacaacacccacgcccgggcgggacccaaaggcccacggccac

SEQ ID NO: 82530 - DNA, 253 bp, Glycine max
cgcgtcgaagctcggtttcggctcgagctcagccttacctgctttttctggcccacaggctactgccagatcttctttaaatgcggaatcctctgcatgatctggaatttgtgttttctctcgcttgttcgtttgtttaattcaataaaggaaattaggcatgaccctcttgttgagtatgctctgcctatttgaaaatttccacacctcttttaattatcgtaatgatgtgtgaagtgtgtgttattttaaa

SEQ ID NO: 82531 - DNA, 57 bp, Glycine max
  unsure (1)..(57): unsure at all n locations
agagntangacgacgcaagcacgcggacgtaagctcggaagccggcacgaggaggac

SEQ ID NO: 82532 - DNA, 134 bp, Glycine max
  unsure (1)..(134): unsure at all n locations
tataaaacatgccgctgcttaacggnagcgcaccagagggggcnaggttcagttttggggaagtccttccccgcccagcaaggcggtgatgaggaatcggttgagagtactgaggtaggttctgtttcgagcca

SEQ ID NO: 82533 - DNA, 64 bp, Glycine max
aaaaaaaaaaaacctcgacctccgaaaaaaaaaaaaaaaaaacaaggggaagggcagaaacaaa

SEQ ID NO: 82534 - DNA, 315 bp, Glycine max
cacgcgcacgtaagcacggaaaccggctcgagaaaaaaaaaaaacctccgttttttttaaaaaaaaaaacaacaaaaagggaaatgttttatattaaaaaaaaaacaaccggccccccccccactagggagcccgccaacccgagaattaaatccggaccggtacccgcaggcgaaccagctaccccaaaagggagcggaataaaagccgggcgaaaacatggccaaagctgctccctgggagaaaagggaatccgttaaaataaccacacaaaatccaaaccggaagacaaaagtgaaaagccgggggggccaa

SEQ ID NO: 82535 - DNA, 171 bp, Glycine max
  unsure (1)..(171): unsure at all n locations
acnggnatttcggctcnttttcctangaaannaaancacgctctagattgtttttagtttgctccacacccgcacaatccggtagcggaaaaaccttcaaatatgatctaattggtgctggttcacattcttcacgagatttttctgcaatggacgatcacgaaaaaccca

SEQ ID NO: 82536 - DNA, 224 bp, Glycine max
  unsure (1)..(224): unsure at all n locations
ccaaacccncccnnccggaacgtattattttttgtgctgaccagacccgcctccacatgccaaaagcagcacatgctagctctattcctcctccttgcagacgcgatttcacaggtgatgtgtcgcaagctgcacgagacatcgatgcgagaaagacacgaacaatggatgaccgaatatcggaaaagtgtataaggatgctgcagagaacgacaaacgttttc

SEQ ID NO: 82537 - DNA, 245 bp, Glycine max
  unsure (1)..(245): unsure at all n locations
gcacgcggacgtaagcncggaanccggctcgaggagccattttttccttccttcacnncnacacncagcaacngggacgggacactttaatgatgagggcaggcccacccaaaaccctaaccaatctttgcccctctttcccattcccaaccaaaccccaaaaccaatctaccactagccacgctttcccttccactcgcctccgccaccgcgccatttacgcggtggctaacgctgcgcatcct

SEQ ID NO: 82538 - DNA, 216 bp, Glycine max
  unsure (1)..(216): unsure at all n locations
acgcgnacgtaagctcggaacacggctcgagcacggaactcgagctcccaggacaaacaggaagaaaacgagcncagtcgccaggaggagggagccacccacccagggcaccacagaatacccagggaaaccagcggagaagggagccaagaacgaccccgaagaacgccgaacacagacagcacaagccagcaagcagaggcaggcaacaccagg

SEQ ID NO: 82539 - DNA, 363 bp, Glycine max
aaaaaaaaaaaaatttcctttctttaaaaaaaaaaaaaaaaaaaaaggaaaaaaaaaaaaaaaaaaaagggaaaaaccaaaaaaaaaaaaaaaaaaaaaaaaaaaaaaaaaaaaaaaaaaaaaaaaaaaaaaaaaaaaaaaaaaaaagggggggcccccccacaggggcgccgcaccccccgaaaaaaaaaaccgccccccccccaaagggccacccacttccccaaaaagagagccaaaaaaaaccgggggaaaaaaaggacaaagcgggcccccggggaaaaaagggatccccacaaaaacacccaaaaaaaaccacccggaaaaataaaagggaaacccccggggccccccaaagggggg

SEQ ID NO: 82540 - DNA, 452 bp, Glycine max
  unsure (1)..(452): unsure at all n locations
atgcacgcgtcgaagctcggaattcggctcggccggattgagttttnctagctcaatcttccttatacagtgcttcgcaacttggattccatagcacagaagttggtagatgttaccaaggactgcacagtgaagaacttgaagcactataatcactcaggttaattgcaaggggaaaaaatggaatgccaactctagcatacataggatggtggtgttgagaggtgaagcaagtacctgccaatgtaataatggtagtgttgaggtacctctgatgatggtgatgacaccactgagcagattgtgaacttgtgatgcctgtatgcactgccttaattgagtgtgaaagaataaatatatgccagcgattgatatggagatttgggtagtaaaaaacagtgtaacttaaaagcttatactaatggtagtgaactgtggttactagttttact

SEQ ID NO: 82541 - DNA, 328 bp, Glycine max
  unsure (1)..(328): unsure at all n locations
cttcccctnagtactcgagtgagtatagagagagagagagagagagagagagagtgagttagagagagagagagccacacagagagagagagagagagaaacccttacgtgttactctcacttcacaaaagagtaaagaactaaacatggcagagacccttcgtatggttgttgctgctattgggaatgtcgcctcagtgtctctttatgctgcaccaacggttaccttcaaaagggtcataaggaagaaaagcactgaggagttttcatgcatgccttacatcattgccctgcttaacctgactctttttcaacttggtatggattc

SEQ ID NO: 82542 - DNA, 417 bp, Glycine max
gagaaagattgcctagtgaaatttttcctttgatattaaatctcgctctatattggaaaaagtttcctctacaaaagcacaatttgttagtggaaaaaccttcaaatatgatataattggtgctggttcacattcttcagaagattttcctgaaaaggaagatcaagaaaaacccaaaaagattgatgccagattgagacaaagaatagatcctcaatacaatgaggttcaggctcagatggaaacaaatttgtttaaattgtctcttgatgatgttgaaactcctaaaggttccatgttggatcttaaaatttctcaatctaaaattgcacttcccaagaacacagttggaggaaccattctgcgtagtgatctattggcaaattttttgacagaggtcatttttagagcaagtgt

SEQ ID NO: 82543 - DNA, 346 bp, Glycine max
  unsure (1)..(346): unsure at all n locations
gaccancctaaatttttttgngaacagngagngagngagggacttttaacctatgagttggccaacgccaacccacgagcagngataggaatattggggttgccttggacttttccaaaggaagcaaaatcgctctcaaatgggctattgacaatcttctccgcaacggtgacatactctacatcgtccacatcaagcctttcggaggaagtgaattccgaaattttctttagtccaccactggttcacctctgattccgttgtcggagtttcgtgagaaggaggtgatgcattactatgaggtggattctgattctgaggtgcttgactttgtttgacaccgttt

SEQ ID NO: 82544 - DNA, 412 bp, Glycine max
  unsure (1)..(412): unsure at all n locations
anncaggatatagctgtattgaaannnncacaagagganagncttacagcttgttcaactcaggtgcgtcctgcaacaactctgttggctgatgggtgtccatatttgtatgcaatggtgcatgatagttcagtgtctacaataccaggtgattttgtcattggtgtcaagttgacaaccataaacaatatgtgtgcatatgggctcaatcctggtatttcaggttctcgtcttttgggcaccattcctcagtccatttcacagcaaactgtttggaatcaaatggcaacagtgagaacaccattgaattttgattctagcaagcagagcttttgtcagttttctattgaccttctcggtggaggaatcttagtggacaaaactggagattggatccacttatacaaaattc

SEQ ID NO: 82545 - DNA, 226 bp, Glycine max
ctcgagccgttttcttctcgaggtacacccttttttgtgcacaggatttcccgcacctcttgtttttccccctctttctttgttctccttcggttgaatcaatgggtgcagaggttaagatctggaaccccgttgaagtcgcattgcaagctctccatgactattcttttcagatttattcctcgcattttaccattgaccccttcctcgagctttttttaatggc

SEQ ID NO: 82546 - DNA, 347 bp, Glycine max
atggattacaccctcgaacacgctacgactcgggggtggtgggttgcttctcccctcgaacaggcagcatccgcctctgacaagtacccattcgccgaacatccccagccatcagcctcgtccattgtccgttaccgccggcgttgcgcgcctgtgctcctggcttcctcgcctcgtgccagcgatgtcatgtactgcgacggcatccggctccgcatcaacgcaaggaagcagatggtcacggagttcacggaatccccttcgcactacagcttacaccgctttacccagggcgaccgcgaggcgtgcattcgcatgacgacccgaccggatgttcgacgcgaagc

SEQ ID NO: 82547 - DNA, 239 bp, Glycine max
gcgtacataaactcataattcttctctaactctttaatttttcccaaacacacttatacatcgttcgggtttttaataatacagatctctccctcccctttactacttcacactttttcttacctgaactatattaattttatccatatttacacaccctattttttatttttctcattctctttcatatatcttattcgtataaacttatattctacctaacctatttttataattta

SEQ ID NO: 82548 - DNA, 100 bp, Glycine max
cacttacattcaacacatcaattatcaacaacaagcacgtttatattaaccaaaccattacataactaccaaattacaaaattaaaattcttttaacctt

SEQ ID NO: 82549 - DNA, 186 bp, Glycine max
gaattttgattctagcaagcagagcttttgtcaattttggatggaccttctcggtggaggaattttactggacaaaactggagattggatcacacttatacaaaattctccaattagtaacttgttgagagttgctgcttggaagaaaggttgtttaatggtcaagattgtgatgtcagggaatgc

SEQ ID NO: 82550 - DNA, 323 bp, Glycine max
  unsure (1)..(323): unsure at all n locations
aggcacgcgacgcaagctcggaattcgnctcgataaaaaaaatatctatttaaaaaaaccaaaaaaccaaaatggagggttttaatttaaaaaaaaaaaaaaacaaaaaaaaaaaacaaaaaaaaaaatgccccccccccaactaaaaacctcatcaacccaaaaataaattccaacccgaaccctacagccaacccaccttccctaataatgagtcgtataaaacctttcctaaatcatagccaaacccatatcctgtataaaattataatcctttcacatttccacacaacatactacccataacctaaaaattaaaaccc

SEQ ID NO: 82551 - DNA, 305 bp, Glycine max
  unsure (1)..(305): unsure at all n locations
agagcangacggcgcatgcacgcgtacataagctcttaattcttctcgagaaaattataaaaaaaaaaaaaaaaaaaaaaaaaaggggacgagttatttataaaaaaaaaaaaaacaaaaaaaaaaaaaaaaaaaaaaaaaataaaaaataataaaaaaaaaaaaaaaaaaaataaaaaaaaataaaaatggccccccccccccttttattctttctccccctaaatttaaatctttcccctcccctttataaatacccattatttctattattatatttttaaatattctatttaaatattttt

SEQ ID NO: 82552 - DNA, 160 bp, Glycine max
gcactgatttatcaatcgacacagacaaaacagctcgaagttagtgtgatgttttaaagcgatgctttcaacaataaccccagcatacatttttgaacactacaaactgctaagagatgctggtaatgggggggttattgattcatttttttcttttttc

SEQ ID NO: 82553 - DNA, 388 bp, Glycine max
cctctcaggaatgtgttcccaggacctattgtggggtagatccacaaaatccttttgtgttaaataggtggatgggaaaactgactttccctcagggcacttcccgaagtgttaagagaatgcctctttctatagggggaggagctggtgcaaagaatgctattctcatgaatatgccaaatgctgttctttcaatgtggagatattttgttggagatctcgtctttgaagtttctaagatgacttctccctacattaaatgtacagtctctttcttcatagcatttggaaatttggctgatgacaccatcaattttgaggcttttccccacacgctggtgcagtttggagagattcaggaaaaagttgtgttgaaattttcacaaga

SEQ ID NO: 82554 - DNA, 145 bp, Glycine max
cacaaatcgttcttttagtggggctaggaactagtgtagatttatggaacgctataaacagccaaaagcctaagttatgtgactcgctgtcttatgatggagtgcgctttgttcagagtactacatgggtctcttgagcacccat

SEQ ID NO: 82555 - DNA, 388 bp, Glycine max
gttcctagtatccatgatctttaaagagaaagggatacggccgggcatgtacgccgatgacggaatatttatcacgaaaacctccgagaatccactcgtaaaaatagatgaagacgacgacatctatgaggccgggatatttttatcagaaaagttaaagaaagatgggcgcccaagttgtggaaaatgtgaaggaatattagacttcctaggactacaatgaagatacgggacagacgaagtactaatgaacggagtctgaaaacggagagaactcttaacggaaagagaaatctccaacatagtttgaaaaaactatgacccaaacgcccctcgcgactttaactgagacatcaaagagggaagctatatagtgaaaactcaagat

SEQ ID NO: 82556 - DNA, 149 bp, Glycine max
ctcgatcctattcagctcgagaaaaaaaaaacgcgaacgtataatttaaaaaaaacaaaaaacaccaaaaaccaaaatatacaaaaaacaatactatttataaattacaatatcaaaatatctcacctcatttattatcactcactcat

SEQ ID NO: 82557 - DNA, 391 bp, Glycine max
tttttaatgttatgctcattagatatagctatgaaaaatgactgcgccaggctaaagctccaagtatgtttttacaatccttcaaaaattttgtttctttgtgtgtgtatggtgatgataacttaattagtgttcatgaatatgtcaagccttactttagtggttctaaattgaaaagctttctagctggtcataatatcaccattactgatggtattgacaaaactagtgcaactttgcaatttagaaagttagcagattgtgattttctcaagagaaactttaagcagatgtctaatgttttgtgggtggcttctgaagacaaggcgagtttatggtcacaacttcattatgttttgtgtaataatctggaatgcaggaagcttatttt

SEQ ID NO: 82558 - DNA, 171 bp, Glycine max
aaagacgaattgatgttttcctagtcattgaatggcaaagcacgtgtcttgtgacaagttggtttcttaattccataagttattcctcaattttgtattacttggatcaaaagcacggagatttatattatgcaaatttaatgtacaatctttattttaattttaatttta

SEQ ID NO: 82559 - DNA, 315 bp, Glycine max
ggcactcacactactatcatgcgtgagctctcgggggggagaagtgcacaagatctggtcgcattcctgtcacacaagttgatggtaggaagcaattttgattcgtaagcatattgaatacctgttcaacgcatgatttaacacagtaaagtaaaggaatggggttgatttttcagatgttatggaccactgaaagggtaatacctgatccgcacagactattcgatcagctttcattcatagccaatcaatctgagttatctatgattgctactgctactgattgaaattctgatggccactttttgctattca

SEQ ID NO: 82560 - DNA, 260 bp, Glycine max
gccgaaacgtggatgatgcagaccaaccttatgagtggggcgtatttttcgctaactggctatgacgatttcgttgaagaccttagctcgtaagactatcaccttcactgcttaacgctttgataccagttacaacatactgtccaaaacgctagacagggtggctattcttacggatcaacagcgcataatgtttatccgtaacaggtgccagactgtataactatccgcgaatacaacatgcaaaaggagtgcacact

SEQ ID NO: 82561 - DNA, 222 bp, Glycine max
gggaaacattactctttgctcctgctaacgcggtggggggtgttgcatgctgacacaaaggtatttactggtcacgaacgttatactatggacctccaaagtaccataggcgggatagggcctgaccaaaacaagactgtaacaccaaatcctggaaaactttccacttgcacggttggattggatcctaaggtgaacctcttttcttgaaacaagggggcc

SEQ ID NO: 82562 - DNA, 205 bp, Glycine max
gtccaatcattttctgtgttccaatatttctaaatgcgatgggaggattaccaagcaagacattagcactaaaacataaatgattaacaggctcagattcatagatgatagacatattctcaaaaatgtcgactcatgaagttgcgatgtgcaaattagggacagtctgaaaaaaagtgactggacatcgtgtataggatcctaa

SEQ ID NO: 82563 - DNA, 389 bp, Glycine max
  unsure (1)..(389): unsure at all n locations
gaacaccattgaattttgattctagcaagcagagcttgggtcaattttctattgaccttctcggtggaggaattttagtggacaaaactggagattggatcacacttatacaaaattctccaattagtaacttgttgagagttgctgcttggaagaaaggctgtttaatggtcaagattgtgatgtctgggaatgcagcagtcaaaaggagtgattgggcctcattggtacaagtgtttttaacaaacagcaacagtacagagcattttgatgcatgtaagtggacaaaatcagaaccacattcctgggaattgatcttcccaatagaggtatgtggtcctaataatggttntaaatgtggagttctgagtgggcaaatcaaacttcat

SEQ ID NO: 82564 - DNA, 305 bp, Glycine max
gtttccttattgacaatcccaaacagtctacaggttttggtattctcttgggaatctctcaagattttgaaattgctggtaatactcttatgccagctttttctgttccacaggctactgccagatcttctgaaaatgcggaatcctctgcatgatctggaattcgtgttttctttcgcttgttcgtttgtttaattcaataaaggaaattaggcatgaccctcttgttgagtatgctctgcctatctgaaaatttccacacctcttttaattgtcgtaatgatgtgtgaagtgtgtgttatttt

SEQ ID NO: 82565 - DNA, 340 bp, Glycine max
  unsure (1)..(340): unsure at all n locations
agagcgangacggcgcgcgcacgcatacgtaagctccgaatccagagcacaacaacaacatctagcatgagaagaagaacaagagggagagttggagatattggcagttaaagcattctccactacactttgtgacaagtcatttgatgagactccatcctctgatgagctaactacgctggttatagatcctagcaaagatgaactggaaactctgcaagggcatgaatctctggcagggattaaatctaaatgcatatctaaaagggagcattttatgttggcattcatgatgaaggaatgaacattatatacacgttttgagatttatgaatgccat

SEQ ID NO: 82566 - DNA, 214 bp, Glycine max
attacagcattttaagactttgacatgagatattgtattcgaacatgtgcctatgggagcgtttatagggcacaattaccaagtggcaagattgttgccgtgaaaaaactccacggatttgtagcagaggtggcagcttttgatgagagttttataaatgaggttaaagttttgtcataaataaagcattttctttttgtgtagctccatgtat

SEQ ID NO: 82567 - DNA, 374 bp, Glycine max
tacatgagcaatgtttccttggtaagggacacacatgcgggggagtgggaaggatttcttcagcttgatgcgcagaggcgtcaacagcaggcagttcaacagatgccttctggttatcggggttttaaacagcagagctttcctgaatatgatggatccactgccaatcctcctccttatgctggttctaatctaccattggaatcgaggaacaggttcttagacaacatggaaacttatcctaataggcctcatgataattttggtgaatttcataggcgtggagatttcgcaaaagcttacaacaggatattaaaattctatatattaattgagtgggtccagattgatcgagtgggctgtttaatgcactg

SEQ ID NO: 82568 - DNA, 252 bp, Glycine max
  unsure (1)..(252): unsure at all n locations
ggactttagatttcgagcccatgaaacaattttgcgcacggttgaggcccaacaattattggtcgttcntgaaagggactgagggatggaccggggtggtgatggtggtttttttttttttagcttttctttttgtcttatccttttgttccttattgtactggttttttatttccttttaatttttttagtatgtttatcttgatttatttgctcttttttgtttcctctcctttcatatttttttgtctt

SEQ ID NO: 82569 - DNA, 80 bp, Glycine max
  unsure (1)..(80): unsure at all n locations
tcggcacgcgnacgtaagctcgaaattcgccgcgagcatgcaaacttgtgtgttctcatccgtcacctaaatagggtggg

SEQ ID NO: 82570 - DNA, 230 bp, Glycine max
tgcacgcgtacgttagctcggatttcggctcgaggagaaacttttccatttcatatcagatcctgcttcttgggcccgttcctttttctcactgccactcttcaaacttgccttactttcaccaacacccaacaaacaaagttacttcattgcaaactctatattagtctttactttatttggttatttcacctctgaacaaaaccagtgaatgaatgaaacaacctacc

SEQ ID NO: 82571 - DNA, 339 bp, Glycine max
tgccgctacatatggaaattttgaaaatttcatccagggggggagcactgcaactgattactcgtccaaggaaggatcaaacgataacatagatgttaacaatgtcaccatttccaaggaagaggaagcaaaaatcatagatcggacagggcaattaaaagtaggcaaaggtcctgccaagaataagaatgcaaagccaccaagccccagaggcagtcatgtaagttcagttaaaaagaacaaagatggaaaagatgaagaggtagcatttgctgctggaaatggtacttttgctttagacttttacccaagactgctaatttaaaaacagatctttgt

SEQ ID NO: 82572 - DNA, 398 bp, Glycine max
aaaaaaatggggctgaaggtgctttgccttggatgcacagtcatgtgaaggtgcagtcagtgcaaaagaatttttatcatcaggcaataataatgaagaaatggtattaattactagccactttaattactagtgccatttcccctatttgttaaggagtcacaagggcaggctatcatttgcacatgattgacaaaacttgacaaatatgaaacattcaattgaataaattaaaattagagggattatttggtagctcctataatatgagggattggaagtatatgtgttgccaaatatcaactatcttaaaagctttagcttttagatagaggtccatcgatgttgttatatctctagcatttatctgtaattctctggttacaggctagctattt

SEQ ID NO: 82573 - DNA, 150 bp, Glycine max
ggaaaatatcttaggatttgaggtgctggagaagaagcgtgaagtgtatggtatgggggcgcttttaccgaaggcactaaaggaggaaactattggcttcagaatgtctttactttagcctggtttctttcaaaaaatagttcaaagtct

SEQ ID NO: 82574 - DNA, 106 bp, Glycine max
gggtcggatagcataaagcacgcactttcttaagtgaagttacggttttgcccttcttctggtggtgttggagaggtacatgtctgtaggaacatcatcattgata

SEQ ID NO: 82575 - DNA, 93 bp, Glycine max
agaggccctccgacaagcctctaaggcttccattgcaggaggggtacaagattggtggtattggtactgtgccagtgggacgtgtagagactg

SEQ ID NO: 82576 - DNA, 227 bp, Glycine max
ccctttctctctctaaatccctttctctctctacctgagtcaggttccctgattttatcgttttctcgccacaccccagattccgccgcgtgagggtgagccctccgatgtgctgacgtcacgtcaccatgggccagtgctacggcaagaccaatctcgccccggaaaatgacgccaccgcggccaccaccaacaccgagaccaccgcggttgtcgtcggatcaggc

SEQ ID NO: 82577 - DNA, 182 bp, Glycine max
caatctgtgttatggatgatgaatgctcctgattcaaagatggtattgatctactgttgagcattgatttgttgggtttacaaggagcaggtaaagcttttccaaacaagattgtttttgatgataagcttgtgttggctaacacacaagaattttttgatggaaattttccagtgtatttc

SEQ ID NO: 82578 - DNA, 199 bp, Glycine max
cggatttcggttcgagctcaaacctttttttcttcgagagaacaagaacataacggagggtatattttcttggacagaagaacaagcatagaatggttttagtgagaactaatactgtgaagaaattctctcggcaggtgatagatctttactactctttcatgaccctggacttctatactaacatgaatctttttta

SEQ ID NO: 82579 - DNA, 363 bp, Glycine max
ggaacattttttcatgacctcaagcttaaaatttatcgcttctactaacaacggtgaaccattttaagcaaacaagtttttgatggttaaagcatattttatatggcctgctattatactagtcatcaaaaaacacatttatcaatatatgagaattttgtaatgtatatgtcactaaatatcttgatgcctattgtttactgattcttttatattattattatggtttttgttttcatagttaaatttttctttattatttttatattttatgtgggggggggtaatctttttatatattttttttataatctctttttaaaatattctcttattttatttattttgtttaattttttcctt

SEQ ID NO: 82580 - DNA, 362 bp, Glycine max
tgaacgtgaaatcggtgcctatgactcaatatttattagctttggacactacattctaccattcttggcagacaagtttttgtttgggatgacattgtttattgtgcttttgatatacaaatggagaaaaaggcatttgtcaatatatgaaaatattgaaaattatctggaacaaaataacttgatgcctattggatactcatacaaataaattaagaagatggctagaggtttcaaagacaaattgggtgaaggaggctatggctttgtattcaagggaaagttgcttagtgggccttttttggcaattaaaatgctacattaagtatatagtagctggtcaatactttattagttgtaat

SEQ ID NO: 82581 - DNA, 374 bp, Glycine max
acaaaactggagattggatcacacttatacaaaattctccaattagtaacttgttgagagttgctgcttggaagaaaggctgtttaatggtcaagattgtgatgtctgggaatgcagcagtcaaaaggagtgattgggcctcattggtacaagtgtttttaacaaacagcaacagtacagagcattttgatgcatgtaagtggacaaaatcagaaccacattcctgggaattgatcttcccaatagaggtatgtggtcctaataatggttttgaaatgtggagttctgagtgggcaaatcaaacttcatggcatttgagtttccttattgacaatcccaaacagtccacagtttttgatattctcttgggaatc

SEQ ID NO: 82582 - DNA, 174 bp, Glycine max
gctacagttaacctctccaactatagctttgagtgtggaaaaagctgaaaggttttggcacaattttgccatattctagcgtcaagtgagatggattattatacttcattattctatatacaatattttgcactaatgtatatagaataatgaagtataatattgtgcaattta

SEQ ID NO: 82583 - DNA, 389 bp, Glycine max
ggaccacctggccaggaagcagttgcaaatgcagaaataagtgcagctatgttgacagcaagagctggtgctcgggatccatcagcaattccatcaatatgtcgcgtttcagctgcacttcactatcctgcgggcttggagggttcagatgctggtctagcatctgtgctggagtccctggagttctgtttgaaacttcgtggttctgaagctagtgtgttggaagatttattaagggctattaatcttgtctatattagacgggatcttgttcaaagtggtgaagccttgttgaatcatgccaaccttgttcaacaagaatatgaaaagacaacaaaattttgtttgagtaaggctgaagaacaagagaaaactatcatggaagaatg

SEQ ID NO: 82584 - DNA, 108 bp, Glycine max
gcgaaagtttattaggcatgaccctcttgttgagtgtggggtgcctatctgaaaatttccacacctcttttaattgtcgtaatgatgtgtgaagtgtgtgttatttta

SEQ ID NO: 82585 - DNA, 218 bp, Glycine max
aagaacctttctttgccgactcaattgccaccgacggggcggctgtggaaagctagcctacctctcatgcccctttgcctaatcggggtcatgcgcttcaaactggccattctcttgctaactgaaaaggacataggcgctctagcaatgattaccgttgaggaatctcgtgtattatttcttgtgatcccaagtttgtcatctgaacaacttgtacc

SEQ ID NO: 82586 - DNA, 378 bp, Glycine max
ggaatttcttacagcttggtcaacccaggtgcgtcctgcaacaactctgttggctgatgggtgtccatatttgtatgctatggtgcatgatagttcagtgtctacaataccaggtgattttgtcattggtgttaagttgacaaccataaacaatatgtgtgcatatgggctcaatcctggtatttcaggttctcgtcttttgggcaccattcctcagtccatttcacagcaaactgtttggaatcaaatggcaacagtgagaacaccattgaattttgattctagcaagcagagcttttgtcaattttctattgaccttctcggtggaggaattttagtggacaaaactggagattggatcacacttatacaaaattc

SEQ ID NO: 82587 - DNA, 201 bp, Glycine max
  unsure (1)..(201): unsure at all n locations
gcgtacgtaagctcggatttcggctcgagggtatccagctgcagtagaaagatcaaggaaggaaggaagggagatgttttttgttataaggcacaccattcatacnccctgcctattccgtaatcagacacttgtattctgcatctaaagagattacagtcagggagcctctgaacttcccactcattgaggaaatgtcat

SEQ ID NO: 82588 - DNA, 400 bp, Glycine max
ggttaattgtggtttattttggaaggatgtcttacgtggcgcataacgttaatcagccccaagagaaagatttgttagagggaaatttttcctttgatattaaatctcgctctagattggaaaaagtttcctctacaaaagcacaatttgttagtggaaaaaccttcaaatatgatataattggtgctggttcacattcttcaggagattttcctgaaaaggaagatcaagaaaaacccaaaaagattgataccagattgagacaaagaatagatcctcaatacaatgaggttcaagctcagatggaaacaaatttgtttaaattgtcttttgatgatgttgaaactcctaacggttctatgttggatcttaaaatttctcaatctaaaattgcacttcc

SEQ ID NO: 82589 - DNA, 401 bp, Glycine max
tcaattttgaggcttttccccacaagctggtgcaggggggagagattcaggaaaaagttgtgttgaaattttcacaagaggaatttcttacagcttggtcaactcaggtgcgtcccgcaacgactctgttggctgatgggtgcccatatttgtatgctatggtgcatgatagttcagtgtctacaataccaggtgattttgtcattggtgttaagttgacaaccataaacaatatgtgtgcatatgggctcaatcctggtatttcaggttctcgtcttttgggcaccattcctcagtccattttacagcatactggctggaatcaaatggcatacagtgagaacaccattgaattttgattctagcaagcagagcttttgtcaattttccatcgaccttct

SEQ ID NO: 82590 - DNA, 396 bp, Glycine max
cggttttagtagaacgttcccatgttcccaaacctgctcaacaccaacccccgtcccctccaaagctcaaccgtgcggtcaccaccaacctcttgcgcgccgacaccgtcaccaccaaattctaagattacatggggttaatgatgatgcgcatcaaagcactcccttcccagaatcttgtttgattcgtgaagagagacagggagagggagagagaaccaaaacaaagaggggaaagtagatcgcgtgaacaaatgaagaagaatcaagcgttgatttttcatatttgcttctagattttcttgtttggttgggattaatttctaagttttgattttgggtttttaatcattcattttgagatttcattgtgggttgattggttgattgagatta

SEQ ID NO: 82591 - DNA, 334 bp, Glycine max
  unsure (1)..(334): unsure at all n locations
cggagggagggcattctggcgagccgtctctcttaatggatgaggcgaggcgacgaggctctaactctacggcgcccggcggacctanccttcttnncatcccctaccggcaccatnnactggcggttctctggaagaagctctgcatgacccggagcttctgagccgggaagactcctggagcatttcgtgagaatccgcgagagcgaggtggaggcgttcctcaagagaatgatggagatttcaggcaatggaaattacgaggtggtgatgaggaaggagcttataacgcacaactattaacatcattactaggatgattatgtgtaagatg

SEQ ID NO: 82592 - DNA, 145 bp, Glycine max
gctttcgtggtatacttatcataccaatcctgaaaggggagttcgtagtatttttggtgcccctttcataggcgcaaggtccattcacgtggttacattcttcactaccaccacccaaatcgaacacaacatgaatttaacgatt

SEQ ID NO: 82593 - DNA, 361 bp, Glycine max
caaccataaacaatatgtgtgcatatgggctcaatcctggtatttcaggttctcgtcttttgggcaccattcctcagtccatttcacagcaaactgtttggaatcaaatggcaacagtgagaacaccattgaattttgattctagcaagcagagcttttgtcaattttctattgaccttctcggtggaggaattttagtggacaaaactggagattggatcacacttatacaaaattctccaattagtaacttgttgagagttgctgcttggaagaaaggctgtttaatggtcaagattgtgatgtctgggaatgcatcagtcaaaaggagtgattgggtcctattggttcatgtgttttt

SEQ ID NO: 82594 - DNA, 406 bp, Glycine max
ggactcaatttcataccttcgacgacctaccaatatcgggaggttgactcagtaatcaacgactgttaaccagtaacgacaatcaacatggcggtaccaggcgaacaacgccagatcaacaagggcgttccacccgccacggcttgcaaccctcccggcgcggacttcggtaccaacgttctcgagcccaggcaagctggggatctcgttgatccgtcagagaagcatatgcgcaatcagcacttgtcggcttcggatgagaagcctcacttgggcggagaataccccaaatacctgggattcagcggggatcgtttgatctgggcaattaccttttttgccacactcggattctccctcttcgggtatgaccaaggtttgatgagtggtatcattgctttcgatc

SEQ ID NO: 82595 - DNA, 398 bp, Glycine max
caattttgaggcttttccccacaagctggtgcagttgggagagattcaggaaaaagttgtattgaaattttcacaagaggaatttcttacagcttggtcaactcaggtgcgtcctgcaacaactctgttagctgatgggtgtccatatttgtatgctatggtgcatgatagttcagtgtctacaataccaggtgattttgttattggtgttaagttgacaaccataaacaatatgtgtgcatatgggctcaatcctggtatttcaggttctcgtcttttgggcaccattcctcagtccatttcacagcaaactgtttggaatcaaatggcaacagtgagaacaccattgaattttgattctagcaagcaaagcttttgtcaattttctattgaccttc

SEQ ID NO: 82596 - DNA, 327 bp, Glycine max
ggtattttatgttctggtcttaggggcaccatcggtagggccatttaaaaagaaactgtttgcattaaaatgggaacagtgagaacaccattgaattttgattctacgcgagcctagctggagacagaattacattgacctcttcggagaaggaatcttagtgggcaaaactggcagattggatctacacttattcaaaattctcctattagtaacttgtctagaggtgatgtttagaaataaaggctgatttatggtaaagattgggttgattggaagtgcatccattaaaaagattggtatgagtcttattggttcacgtttttt

SEQ ID NO: 82597 - DNA, 62 bp, Glycine max
  unsure (1)..(62): unsure at all n locations
agagnnaagacgnggcaggcacgcgtacataagctcgtaattcagctcgagaaaaatttttt

SEQ ID NO: 82598 - DNA, 163 bp, Glycine max
aagctcggattcggctcgagatttttctgtgtacatagacacttatctgtaccactcaaccgaatttttagaacgagagggagagttagaatattcacaagagagatttagagagggaaattgtccagtgcacactttcttgcttctaattttcaaatttatt

SEQ ID NO: 82599 - DNA, 405 bp, Glycine max
catgattcttgcactcagaaatgtgtgatttctggaaacgcatgtgccattatactgtctattactagtgagctggctgcgaagatatgttttgattctctgcctgctgaatatgtgaataatggtcagcattctcttccaaaggcacatatggagaagatatcaaagttctgcatttaccttcttgacaaagttatgacagacgatgactttgcttgggaagatataatgagtctgaggttcttcattctttttagttcttaaatgtgagtgtcgcgtttacaacttatgtttttctattctccttttgtacttttagttcttttgttacatatccttttttttattttattgtttcttattttttttaatattattactacttcaatctctatcttttttgtc

SEQ ID NO: 82600 - DNA, 139 bp, Glycine max
gtttctttgttacgaatatcccgtcgtttggagcggccggagtgatactctgtatacatgctccatctcctagacctacttacaggtgatgagcttctctctttcttcttacgtgacacggctaatgaggatggagtgt

SEQ ID NO: 82601 - DNA, 326 bp, Glycine max
ctggaaacggatcctggtgggctttcaacggagtctgaggtaccataatattcttctttgcatcaacggaatggagaatcaagcattccgtaaagccggggaagtgctgatcttgaagttctgggccaccatgtacactggttggtggggggaattccaaaggcattgccattagtacttacttacataccattattcatatgggggcattctttttggacatattctttaggatggaaccatggaccctttttaaccactgctataagtctgatgaagctggcccacaccatttacggctatactttgttggcttgtgcttactc

SEQ ID NO: 82602 - DNA, 310 bp, Glycine max
gacaaaactgtgattggatcacacttatacaaaattctcaattagtaactgtgagagttgctgcttgaagaaaggctgttaatggttaagattggatgtctggaatgcactcaaaaggagtgattggcctattggtcaggtttaacacacacagtcaacatttgatgcatgtaaggcaaaatgacccattcggaatgacttcaatgaggttgtggtcctaataaggttgaatggggtctgagtgggcaaataaacttatgcttggtttctatgacatccaacgctacagtttgattctttggaattctag

SEQ ID NO: 82603 - DNA, 384 bp, Glycine max
ctcgatcctttatcgactcgaggtcatttaatccgggcgcgtgttctgatgcatggagtttggaatttctgaagcgtaccggatttcattgtgatatcatttgtgtcactggatggactgccaccccaatgcaggatgttcaggttacaattgattggtttatttcctctcaggaatgtgttcccaggacctattgtgttttaaatccacaaaatccttttgtgttaaataggtggatgggaaaactgactttccctcatggcactttccgaagtgttaagagaatgcctctttctatttggggtggagctggtgcaaagaatgctattctcatgaatatgccaaatgctgttctttcaatgtggagatattttgttggagatc

SEQ ID NO: 82604 - DNA, 420 bp, Glycine max
  unsure (1)..(420): unsure at all n locations
gcgtacgtaagctcggtattcggctcttgacgctttcctttattcacacacacannaaacactggtgggtgttttttaccacacctttttctgcctaggtttactttccagtttccacccaaagcaaccaaccaaccaacaaacaacacaatgtatccaaaggtgaaggtaagacacgacgacaactacgctgaacttggtcttaaagctttcctctctctatatctgaaaccatctgcttcttcagttgatggaccagaaagttgtatcttcggcatccattgtcaaagcaccatagtgatatgtgcctgtaactatttcaagagttcttgttactgagtaagatttttgaactttagtttgggatcatattccttcaagagctacaggttccgggtagggtgtttttcctgatgataa

SEQ ID NO: 82605 - DNA, 393 bp, Glycine max
aaattagttcattctctttgcgcagttccctacctctcctttcaagatgcagatcttcgtcaagaccctcaccggaaagaccatcacccttgaggtggaaagctctgacaccatcgacaacgtcaaggccaagatccaggacaaggaaggaattcccccggatcagcaacgtctcatcttcgccggaaagcagctcgaggacggccgtaccctcgccgactacaacatccagaaggagtcaacccttcaccttgtccttcgtctccgtggtggcatgcagatcttcgtcaagactctcactggcaaaaccataaccctagaggtcgaaagctctgacaccattgacaacgtcaaggccaagatccaggacaaggagggaatccccccagacca

SEQ ID NO: 82606 - DNA, 369 bp, Glycine max
gggaaactgactttcccccagggcacttcccgaagtgttaaaagaatgcctctttctataggaggaggagctggtgcaaagaatgctattctcatgaatatgccaaatgctgttctttcaatgtggagatattttgttggagatctcgtctttgaagtttctaagatgacttctccctacattaaatgtacagtctctttcttcatagcatttggaaatttggctgatgacaccatcaattttgaggcttttccccacaagttggtgcagtttggagagattcaggaaaaagttgtattgaaattttcacaagaggaatttcttacagcttggtcaactcaggtgcgttctacaacaactctgtttgct

SEQ ID NO: 82607 - DNA, 391 bp, Glycine max
aatttctgaagcgtactggatttcattgcgatatcatttgtgtcactggatggactgccaccccaatgcaggatgttcaggttacaattgattggtttatttcctctcaggaatgtgttcccaggacctattgtgttttaaatccacaaaatccttttgtgttaaataggtggatgggaaaattgactttcccccagggcacttcccgaagtgttaagagaatgcctctttctatagggggaggagctggtgcaaagaatgctattctcatgaatatgccaaatgctgttctttcaatgtggagatattttgttggagatctcgtctttgaagtttctaagatgacttctccctacattaaatgtacagtctctttcttcatagcatttgg

SEQ ID NO: 82608 - DNA, 64 bp, Glycine max
attgttttttatcaccaatggcgaattattcctgggggtgttattttttttgcgcttttcctgt

SEQ ID NO: 82609 - DNA, 361 bp, Glycine max
ctcgagccgaatcggctcgagaagaacccttcttttgctccacgtttcttcactctcaaccgttcgactcgttcgatatcaaccgagttgactcagatctctaaggaagttgcagcactgaattctctttttttgcttgtgacgcagagcataattaattgacacattcatcacaccacagcaacacagccctgatttatctttttctgcctttgggtttcaaggcatataattcttcctctactgtattcatgaaatcttggtgctggctttcttttcctcattaactctgtaaagcagtgactttcttctgtagtcagttgggattgctctaggtctcataattcgccaaatttatttt

SEQ ID NO: 82610 - DNA, 393 bp, Glycine max
gattggtttttttcctctcaggaatgtgttcccagggcgcgtattgtgttttaaatccacaaaatccttttgtgttaaataggtggatgggaaaactgactttccctcagggcacttcccgaagtgttaagagaatgcctctttctatagggggaggagctggtgcaaagaatgctattctcatgaatatgccaaatgctgttctttcaatgtggagatattttgttggagatctcgtctttgaagtttctaagatgacttctccctacattaaatgtacagtctctttcttcatagcatttggaaatttggctgatgacaccatcaattttgaggcttttccccacaagctggtgcagtttggagagattcaagaaaaaggtgtgttgaaat

SEQ ID NO: 82611 - DNA, 395 bp, Glycine max
ctctaacaataaagtacaagaaattaagacggtgtcgaatctctcccatgatgttgatcatgtcgatacatctgaagcccgttatcctgttagagatgagatagttactgaaggtaatgtagaatctgcgaaagagaaaaatgatttggaattgtccttgaatccaaatggcttcatcacaggaaaggaccaaaatattgatatctcggaaattcctgatggtgcaggatgttctgaacgtttgaatcaggacataacagaagagaaccagccatcatctccaccgccatctcctcacttttctgtcactaagaaaattgaagagctagaaaatggtacagatgtatctgagcgaccgagtcctgtatctgttcttgatacatcattctcggatg

SEQ ID NO: 82612 - DNA, 376 bp, Glycine max
ctaccgtttttttcgcctccgccgcagcacctcaggtgccccgtctccgaggaatcctcgccaccctcccgcaacacctactcctgggacgagcccttctcgccggcgtctacgaagctcctcctcatgtgcagctacagcgtccatatcttcccccgcccccactacaagttcctctgctacgtcgtctgcgacactctcattatcgtctcctaacgcgccatctcacttgcgtacctcttcactcgcctttagaaaacattcctgaatgtgaagaaccttaacgctcaattaccatactctctactaggtcctctaattccttatctttgttaccaccgactaggatccttataacatttatctattagtattt

SEQ ID NO: 82613 - DNA, 355 bp, Glycine max
ggggttaaaataacacacacttgacacattattacaacaatgaaatgaggtgtggacattgtcatataggcatatgatactctacaagtgggtcatgcctaattacctttattgaattaaacaaacgaacaagcgacagaaaacactaattccacataatgcacaggatctcgaagtcccaaaaaacctggctgtaacctgtggaacaaaataagctggtacacaaaaggctattatcatgaacttgacaaactctgttctcagcatgcggaaatatcctgttggatataccgtctcttgaggttataccacggcttattactacgtggaaagtacatcctctgttctcatagca

SEQ ID NO: 82614 - DNA, 390 bp, Glycine max
gaattttagtggacaaaactggagattggatcacacttatacaaaattctccaattagtaacttgttgagagttgctgcttggaagaaaggctgtttaatggttaagattgtgatgtctgggaatgcagcagtcaaaaggagtgattgggcctcattggtacaagtatttttaacaaacagcaacagtacagagcattttgatgcatgtaagtggacaaaatcggaaccacattcctgggaattgatcttcccaatagaggtatgtggtcccaataatggttttgaaatgtggagttctgagtgggcaaatcaaacttcatggcatttgagtttccttattgacaatcccaaacagtctacagtttttgatattctcttgggaatttctc

SEQ ID NO: 82615 - DNA, 396 bp, Glycine max
gtaaatgtgttacgagaattgtatttgcacagtccagaggaagctcgccaattgagaaggaaagctctctctcgtattgaatggctgcaaaaagctgatgtgcctaccatagcacagattgaagagttccattcgatgcagaggatgatgaatgctcctgattcaaatgataatattgatctactgttgagcattgatttgttgggtttacaaggagcaggtaaagcttttccaaacaagattgtttttgatgataagcttgtgttggctaacacacaagaattctttgatggaaattttccagtggattcttggttaccaatttttgtgaattgtctttatcctgtaagtcaattaccttcaaaagctgtcgttgtaaatgttacatgtggtagt

SEQ ID NO: 82616 - DNA, 258 bp, Glycine max
gacgtggcatcacgcgtacgtaagctcttaattcggctcgtgaaaaaaaattatttttataaaaaaaaaaaaaaaaaaaaaacaaagctattttataaaaataaaaaaaacaaaaacaaaaaatatcaaacaacccaataacatttcaaaccatcaaattataccttcccaactctctttccaaatactattttatcaaatattaattttttattttacactatttttttccttcactactacttttttcccttcatt

SEQ ID NO: 82617 - DNA, 379 bp, Glycine max
tgaaaaattgatgcgtgaaaggacacacctgctgttggcttgttgttcaaggatggcaatttgtaagaaagatgtttggagagttgaatgtggaatcccttctggatttccgctcacagttatttgtaatagcatttttaatgagatgctcattagatatagctatgaaaaattactgcgccaggctaaagctccaagtatgtttttacaatccttcaaaaattttgtttctttgtgtgtgtatggtgatgataacttaattagtgttcatgaatatgtcaagccttactttagtggttctaaattgaaaagctttctagctggtcataatatcaccattactgatggtattgacaaaactagtgcaactttgcaattt

SEQ ID NO: 82618 - DNA, 380 bp, Glycine max
cttaattagtgttcatgaatatgtcaagccttactttagtggttctaaattgaaaagctttctagctggtcataatatcaccattactgatggtattgacaaaactagtgcaactttgcaatttagaaagttagcagattgtgattttctcaagagaaactttaagcagatgtctaatgttttgtgggtggctcctgaagacaaggcgagtttatggtcacaacttcattatgtttcgtgtaataatctggaaatgcaagaagcttatcttgtcaatctcgtaaatgtgttacgagaactgtatttgcacagtccagaagaagctcgccaattgagaaagaaagctctctctcgtattgaatgctgcaaaagctgatgtg

SEQ ID NO: 82619 - DNA, 119 bp, Glycine max
ctttaatctaattggtatagaatagtgttttagaaaggggggtggctagcattttgaataaatatgtgatccaagtccatgaataggcctgattgttatggggggtgtttcatcttttt

SEQ ID NO: 82620 - DNA, 372 bp, Glycine max
catgcacgcgtccgtaagctcggatttcggttcgggctttttggaccttatgcaaattaaaatgttgattcaaggaggaaaaagaataatgtgggcataaaaatttctgctgtgatagcagctgttgcttgtgctttagcaatatctgcaataatcattctcctgatttctaaaagaaatatgaaataccagaagaagatttccaggaaacgaatgtctactaatgtatctatcaaaatagatggcatgaaagcatttacttacaaagaactggctattgctaccaacaaatttaatatctcaactaaagttggccaaggaggttatgggaatgtctataaaggcattttatctgatgaaacttttgtggct

SEQ ID NO: 82621 - DNA, 167 bp, Glycine max
  unsure (1)..(167): unsure at all n locations
agttatangctttattttttnnaacgagatgctcatttggtctgtttattaaaaatactgcgccaggctaaagctccaagtatgtttttacaatccttcaaaaattttgttttcttgtgtgtgattggcgattcttacttacatttgtgtttcttgtaatatttttt

SEQ ID NO: 82622 - DNA, 344 bp, Glycine max
agctatcatgtttgttgtagtatagttagagatgtcacgtctacactcaccctgcatagtttgttcagctataatactacttgagcttctttacctacttttcaaacctacattgcacacaaaatggcaacatcttggtcatgttatctacttgcattgcttctttttatgtcaactattgtatcagagagtagagtggcaaggaaggacttgggcctttaccttggtggtttgttggtttttaaataaatctctttttttttttttcttttcttcttattctttttttctatttattatttatcacttttttttaatttttttctaatttatatattcattat

SEQ ID NO: 82623 - DNA, 415 bp, Glycine max
attttgttgtgttatctcgtctttgaagtttctaagatgacttctccctacattaaatgtacagtctctttcttcatagcatttggaaatttggctgatgacaccatcaattttgaggcttttccccacaagctggtgcagtttggagagattcaggaaaaagttgtattgaaattttcacaagaggaatttcttacagcttggtcaactcaggtgcgtcctgcaacaactctgttggctgatgggtgtccatatttgtatgctatggtgcatgatagttcagtgtctacaataccaggtgattttgtcattggtgttaagttgacaaccataaacaatatgtgtgcatatgggcttaatcctggtatttcaggttctcgtcttttgggcaccattccttagtccatttcacagc

SEQ ID NO: 82624 - DNA, 353 bp, Glycine max
cgccaattgagaaggaaagctctctctcgtattgaatggctgcaaaaagctgatgtgcctaccatagcacagattgaagagttccattcgatgcagaggatgatgaatgctcctgattcaaatgataatattgatctactgttgagcattgatttgttgggtttacaaggagcaggtaaagcttttccaaacaagattgtttttgatgataagcttgtgttggctaacacacaagaattctttgatggaaattttccagtggattcttggttaccaatttttgtgaattgtctttatcctgtaaggtaaattaccttcagaagctgtcgttgtaaatggtacatgtggtagtg

SEQ ID NO: 82625 - DNA, 102 bp, Glycine max
attcggttcaagctcaagccgaaaaaaaaaaaaaaaaaaaaaaaaaaaaggggggggaaaaaaaaaaagaaaagaaaaaaaaaaaaaaaaaaaattgggggg

SEQ ID NO: 82626 - DNA, 250 bp, Glycine max
ggaatcccttctggatttccgctcacagttatttgcaatggcagttttaatgagatgctcattagatatagctatgaaaaattactgcgccaggctaaagctccaagtatgtttttacaatccttcaaaaattttgtttctttgtgtgtgtatggtgatgataacttaattagtgttcatgaatatgtcaagccttactttagtggttctaaattgaaaagctttctagctgggcataaaattaccatta

SEQ ID NO: 82627 - DNA, 125 bp, Glycine max
gatttgtgtgtaagcaaagcaaaattgtaaaatagcatgtatgatttttaaacacatacatggtaatgttaaagctttcaattgcaaaattgtaaaaattatatgtataatcttatagttcctta

SEQ ID NO: 82628 - DNA, 82 bp, Glycine max
ctctgcctatctgaaaatttccacacatcattacgacagttaaaagaggtgtggaaatgatgtgtgaagtgtgtgttatttt

SEQ ID NO: 82629 - DNA, 83 bp, Glycine max
agattctgttatttgtgttgcactacatggatgagattgaagtgtagtttgattatgaatacaacagtctgttatttgatgaa

SEQ ID NO: 82630 - DNA, 104 bp, Glycine max
tttgggttggggcaaaatgggaaccattggggggttttaccatggtacttctgattaaacaactaccaagggttctttatggctattccatagggacccaattg

SEQ ID NO: 82631 - DNA, 415 bp, Glycine max
gatgacttctccctacattaaatgtacagtctctttctgcatagcatttggaaatttggctgatgataccatcaattttgaggcttttccccacaagctggtgcagtttggagagattcaggaaaaagttgtattgaaattttcacaagaggaatttcttacagcttggtcaactcaggtgcgtcctgcaacaactctgttggctgatgggtgtccatatttgtatgcaatggtgcatgatagttcagtgtctacaataccaggtgattttgtcattggtgtcaagttgacaaccataaacaatatgtgtgcatatgggctcaatcctggtatttcaggttctcgtcttttgggcaccattcctcagtccatttcacagcaaactgtttggaatcaaatggcaacagtgagaaca

SEQ ID NO: 82632 - DNA, 325 bp, Glycine max
tcaaacttcatggcatttgagtttccttattgacaatcccaaacagtctacagtttttgatattctcttgggaatctctcaagattttgaaattgctggtaatactcttatgccagctttttctgttccacaggctactgccagatcttctgaaaatgcggaatcctctgcatgatctggaattcgtgttttctttcgcttgttcgtttgtttaattcaataaaggaaattaggcatgaccctcttgttgagtatgctctgcctatctgaaaatttccacacctcttttaattgtcgtaatgatgtgtgaagtgtgtgttatttt

SEQ ID NO: 82633 - DNA, 380 bp, Glycine max
ctcgtctttgaagtttctaagatgacttctccctacattgaatgtacagtctctttcttcatagcatttggaaatttggctgatgacaccatcaattttgaggcttttccccacaagctggtgcagtttggagagattcaggaaaaagttgtgttgaaattttcacaagaggaatttcttacagcttggtcaactcaggtgcgtcccgcaacgactctgttggctgatgggtgcccatatttgtatgctatggtgcatgatagttcagtgtctacaataccaggtgattttgtcattggtgttaagttgacaaccataaacaatatgtgtgcatatgggctcaatcctgggatttcaagttcttcgtcttttgggcacca

SEQ ID NO: 82634 - DNA, 415 bp, Glycine max
gtgatgataacttaattagtgttcatgaatatgtcaagccttactttagtggttctaaattgaaaagctttctagctagtcataacatcaccattactgatggtattgacaaaactagtgcaactttgcaatttagaaagttagcagattgtgattttctcaagagaaactttaagcagatgtctaatgttttgtgggtggctcctgaggacaaggcgagtttatggtcacaacttcattatgtttcgtgtaataatctggaaatgcaagaagcttatcttgtcaacctcgtaaatgtgttacgagaattgtatttgcacagtccagaggaagctcgccaattgagaaggaaagctctctctcgtattgaatggctgcaaaaagctgatgtgcctaccatagcacagattgaaga

SEQ ID NO: 82635 - DNA, 405 bp, Glycine max
  unsure (1)..(405): unsure at all n locations
gtcgcatgcacgcgtccgtaagctcgaaattcggttcgagctcaacccgaatttgttaccaaaatagtaatatatattggtaaataataatttgattggtatttggccattcttttattctatcgaggtcctatgggacttagaggggaaatagagatgtagatctattgataattgctactattttgttacattaagaatgaaagaaatcttttgttaaaaaattaaacagacatnctaagatcccatgaataaagttttttaagtatttgaaaagtcactgcttaatgtgaagcgctttaaccgttatgaaaattccgatgcttgtagacaagttcgagaaattttctccanatgtggcccccccccctttggagtcttttccccccggaaaaaatttgcccc

SEQ ID NO: 82636 - DNA, 406 bp, Glycine max
tgataaacagtctttgtggtggtgatgaaaaattgatgcgtgaaaggacacacctgctgttggcttgttgttcaaggatggcaatttgtaagaaagatgtttggagagttgaatgtggaatcccttctggatttccgctcacagttatttgtaatagcatttttaatgagatgctcattagatatagctatgaaaaattactgcgccaggctaaagctccaagtatgtttttacaatccttcaaaaattttgtttctttgtgtgtgtatggtgatgataacttaattagtgttcatgaatatgtcaagccttactttagtggttctaaattgaaaagctttctagctggtcataatatcaccattactgatggtattgacaaaactagtgcaactttgcaatttag

SEQ ID NO: 82637 - DNA, 410 bp, Glycine max
aaagtttttaaattttgtgaggttcattatgaagaaaagggacaagcttagttgtcaagttggaatcaacccatactccatggaatggactggtttggccaatagattactgagtaagggcaatgatattctgtgttgcgattatgctagttttgatggtttgattaccaagcaagttatgagcaagatggcagaaatgataaacagtctttgtggtggtgatgaaaaattgatgcgtgaaaggacgcacctgctgttggcttgttgttcaaggatggcaatttgtaagaaagatgtttggagagttgaatgtggaatcccttctggatttccgctcacagttatttgcaatagcatttttaatgagatgctcattagatatagctatgaaaaattactgcgccaggcta

SEQ ID NO: 82638 - DNA, 402 bp, Glycine max
gccttactttagtggttctaaattgaaaagctttctagctagtcataacatcaccattactgatggtattgacaaaactagtgcaactttgcaatttagaaagttagcagattgtgattttctcaagagaaactttaagcagatgtctaatgttttgtgggtggctcctgaggacaaggcgagtttatggacacaacttcattatgtttcgtgtgataatctggaaatgcaagaagcttatcttgtcaacctcgtgaatgtgttacgagaattgtatttgcacagtccatatgaagctcgccaattgagacggaacgctctctctcgtattgaatggctgcaaaaagctgatgtgcctaccatagcacagattgaagagttccattcgatgcacaggatgat

SEQ ID NO: 82639 - DNA, 114 bp, Glycine max
ctaatgtacaaaaaaaataagagtataactcctttaaattctttaactgacccaccttgtatactgtatcatcaacgataatggactttaaattgcacaatttgctgataaaaa

SEQ ID NO: 82640 - DNA, 367 bp, Glycine max
gtaacctcgaatttcggttcgggtttaaaaaagttagcaaattgtgattttttaaagagaaactttaagcaaatgtctaatgttttgtgggtggctcctgaggacaaggcgagtttatggtcacaacttcattatgtttcgtgtaataatctggaaatgcaagaagcttatcttgtcaatctcgtaaatgtgttacgagaattgtatttgcacagtccagaggaagctcgccaattgagaaggaaagctctctctcgtattgaatggctgcaaaaagctgatgtgcctaccatagcacagattgaagagttccattcgatgcagaggatgatgaatgctcctgattcaaacgataatattgatctac

SEQ ID NO: 82641 - DNA, 411 bp, Glycine max
attttgttggagatctcgtctttgaagtttctaagatgacttctccctacattaaatgtacagtctctttcttcatagcatttggaaatttggctgatgacaccatcaattttgaggcttttccccacaagctggtgcagtttggagagattcaagaaaaagttgtattgaaattttcacaagaggaatttcttacagcttggtcaactcaagtgcgtcctgcaacaactctgttggctgatgggtgtccatatttgtatgctatggtgcatgataggtcagtgtctacaataccaggtgattttgtcattggtgttaagttgacaaccataaacaatatgtgtgcatatgggcttaatcctggtatttcaagttctcgtcttttgggcaccattcctcagtccatttcac

SEQ ID NO: 82642 - DNA, 422 bp, Glycine max
ctccatgaaaatggctatcaaagttcaagagataacaaaggcactttgataccagatggggtttcagatttgctgagtgtgaaggcaaggattagagcggttgaaaaatcaatggtggaagaaatcaagaagcttgtgaaggaagacaatttaaccactaaagctaatccaggagctctgacaaaggcaacaaatgtggaagtttcaccttatgtggagaattgcaacagaaaagaagacaaggtacccaaggatgagagcacacatgatgtcaactcgtggagaacaaaaactgaaaatgggtcattgatgaaagatattccacttgatcacatctgagacaattcagcctccaaaagttgcaggagagaaaatagtggtactgatgatcagatgcttgaattatgggaaactgccgagca

SEQ ID NO: 82643 - DNA, 424 bp, Glycine max
ctcgagccgattcggctcgagtgttcccaggacctattgtgttttaaatccacaaaatccttttgagttaaataggtggatgggaaaactgactttcccccatggcacttcccgaagtgttaagagaatgcctctttctatagggggaggagctggtgcaaagaatgctattctcatgaatatgccaaatgctgttctttcaatgtggagatattttgttggagatctcgtctttgaagtttctaagatgacttctccctacattaaatgtacagtctctttcttcatagcatttggaaatttggctgatgacaccatcaattttgaggcttttccccacaagctggtgcagtttggagagattcatgaaaaagttgtattgaaattttcacaagaagaatttcttacagcttggtcaactcag

SEQ ID NO: 82644 - DNA, 140 bp, Glycine max
cactaaagaaattggtgtaatagtacaagaggcgacgcgagaaggaaaagccaatattatattattcgtgcagagccaattcagttcacatgtatgaattgccatcattttaagagaggggacgtttatttgccaagaaa

SEQ ID NO: 82645 - DNA, 81 bp, Glycine max
  unsure (1)..(81): unsure at all n locations
cccttttttttttttttnttttttttttttttttttttggtttggttttttttttntttttttttttttttttttcccccc

SEQ ID NO: 82646 - DNA, 403 bp, Glycine max
gccacgcgtccggtgaaagggggaaaaaattaaaatcaaagagccttatgtccgggatcattcacaagaatggggagacccttcatgtgtgaaggcaccagaaggaggaggagcgtataggtgtgcacccttctctagaatacacaagggagcaccctttggtaaacacagttgtgagcacaagggagagcatcatggtaaacacaaatctggagagcaccatggtgagcacacgccatagcacaaagaggggttcctagacaaagtcaaggacaagatccttggggagggcgccccctccgcgggcaagatgaaaaaggatggaaagaaaaaggaaggtgcccttgatcatggccatgacagcaacagcagcattgacagtgattaaactgctgcatcacct

SEQ ID NO: 82647 - DNA, 400 bp, Glycine max
aactgctcttcacatggccatcataggcaacattcacactgatcttgtgcagctcctgatgactgcaccatcaataaatgtgaatatatgtgatgttgatggcatgaccccactagattaccttaggcaacaccccaaatctgcatcatcagatatactaattaaaaaattaatctcagctgggggaatgtttggttgtcaaggccatagttcaagaaaagccatagcatcacacttgagaatgcaaagcattggaagcagtcctgggacatcattcagagtctcagacactgagatatttttgtacactggcattgagaatgtgtcagatgctagtgctgctgatcatggaagtgggggaatgagttcatcttcatcagaacacattccatacgatccg

SEQ ID NO: 82648 - DNA, 304 bp, Glycine max
cacatggtctgatagcacattacactgatcttgtgcagtgcggatactgctaatgaaaaaatgtgaatatatgtgatgttgatggcatgaccccactttattaccttaggcaacaccccaaatttgcgtcatcggatgtactaattaacaactgaatctcggctgggggaatgcttggttgtcatgtgcatatttcgagaaaagccgtaccttaacacgttgagaatgcaaatcattggaggcatttctgggacattgttcatagtctcacactctgatattttttcgacactggcattgtgaa

SEQ ID NO: 82649 - DNA, 98 bp, Glycine max
cccacgcgttcgcccacgcgttcgcccacgcgtccgcccacgcgtccgcccacgcgttcgcccacgcgtccgcccacgcgtccggttctagatcgcga

SEQ ID NO: 82650 - DNA, 381 bp, Glycine max
cccacgcgtccgcccacgcgtccgaaaagctgaactaacacactcgtacactgcttccaattccaccctctcttccattttttttttctttcaactactctgaagggttgtggattgtgatattctttacgaggaagaaaggaaccagaagtcaaagcatgagaagcaatcccacttccaatgccgaggttcttctgtcttttcttccttcctaaacccaatacaaggttgtcacttttattcccaccaactagagaagccaaagcaattcccatgaacaaaaccaacactttcaacaagaatcaagtattttgatttaaactcaaccccttcactcttctatttcttttgttcattcatacattcaaataataaattaaa

SEQ ID NO: 82651 - DNA, 98 bp, Glycine max
cccacgcgttcgttcacgcgtacgcccacgcgtccgtccactcgtccgcccacgcgttcgcccacgcgttcgcccacgcgtccggttctagatcgcga

SEQ ID NO: 82652 - DNA, 171 bp, Glycine max
gaacattacattcccagaaaatgatcttccggagaaagacgcgactgattttcataagctggtgtgtacgtgggtgccaaatgtggaggaccgggcattgcgctaaacaatgattcttctctttggctatagtctgagcatatggatcaacattcactcgcgactgctttg

SEQ ID NO: 82653 - DNA, 152 bp, Glycine max
cttctgtgaatacctttgaacatttcattctcataaaatgatcttccggacaaagacgcgactgtttttcataagctgttgtgtacgtgggttccaaatatgtaatagcgggcatagtgctaaacaatgaatcgccctcttcggatttagtc

SEQ ID NO: 82654 - DNA, 108 bp, Glycine max
cccacgcgtccggatttttttttcctccttattaatattaatttataaagaaaaataaattataggagttgcctataaaataacatggcctgtcagaaggactgatga

SEQ ID NO: 82655 - DNA, 379 bp, Glycine max
cttctgtgttcaaccaatttggtttggcctgccaaagtgcctacatcctaagctgactgctaggtattacggtccctacttggtgctgataaaggttgaggtagtggctttccaacttcaattgccaaaacatgcttgaattcaccctgtcttccttgtgttgcaattgaagcgagctgtgggtcaacaacatctagtggaggcagaactacagcaggagttacagctagatcctattatttacttgccagctaaggtttttgctgagagtgtggtcatgcagaaggatgagcagatacctcaagtcctaattaaattaaatggcaaggaaaaactgaggaagaggcggcatggaagatgtacaagtcattcaggacta

SEQ ID NO: 82656 - DNA, 110 bp, Glycine max
gataagccttccacagcctaacaaaattgaggaccactccctggtcggttcctttctaccttgggccttctttaccttattccttcctttaagcaccggtggttttgtgc

SEQ ID NO: 82657 - DNA, 388 bp, Glycine max
gttttaggcttgctgtggaagcacacaacatccgagcctttaaaaccattcctgaagagtgcgttgaaccaacaaaggactacattaatggcgaacaatttagatcagactctaaaacagttaaccaacaagctttcttttatgctagtgaacgcgaagtccatcacaacgacatatttatattcggcatagataacaccgtactctctaatatcccatactatgaaaaacatggatatggggtggaggaatttaatgaaaccttatatgatgaatgggttaacaagggcgacgcaccggcattgccagagactcttaaaaattacaacaagctgttgtctcttggcttcaagattgtattcttgtcaggaagatatcttgacaaaat

SEQ ID NO: 82658 - DNA, 52 bp, Glycine max
agactgcgcatattcaccaaagattaccataaaaggtgcagatgtgcgcctg

SEQ ID NO: 82659 - DNA, 341 bp, Glycine max
cccacgcgtacggacgcatcagggcacttcacaagggttgctagaattagccaagctaggcggctatgacaccgttagcataatcctgcatgtacactgtcaataacaatgccaagcatattcgcacgccaaaggcacatagtgtgtacattcaatatccctcacaggcgacactaccgccttatccggcggaactcaggaagacgtcacgggagatggctaagaaacagaacagttcgtcatacctcgagtggttgtctgtactgcaccacatagtgtcggcatcaacttcagggatcatgcacccaacatgccaaatggcatgccaggtaatgatccat

SEQ ID NO: 82660 - DNA, 164 bp, Glycine max
gttatgcgtcggttcactggttctgtttgacgatggtgaggagaatatggacctgagagtgagctgtgaagcatcattagcactagtagcatagccatgccgtggtgcaagctactcgattggagccaccccgaatctgaactggctatagagaaccttcctta

SEQ ID NO: 82661 - DNA, 393 bp, Glycine max
gcggcattggcggcattggctgtgctggttgaggttgaggggagataggatgtactatacgaagtggagctacctgtgattgtgcataatcctttcttctattttggtggtcttggaggctttggttcctttggacctcccaggaatttaatctcaagcttttttgggggtagggacccatttagtgaccctttcttcgcccaaccttttggagggatgtttgagtctagtccctttggtggtcctactggatttcctttccccactggtatgaatccatctgggttccttgagcatccagccccgggtttggatccatctgggttccttgagcatccggctatgcatccatctgggttccttgcacggcaaaatccagagcctagtagacaa

SEQ ID NO: 82662 - DNA, 398 bp, Glycine max
aaaagccttagccttccctacaactccaaacacaaagacatcatcatccatggctgcctccgtctccactgtcggagctgtcaacagagctcttttgaacctgaatggttctggagctggagcttcagctcccagttcagccttctttgggaccagcttgaagaaggttattgcctcaagggtccccaacagcaaggtttccggtggaagcttcaagattgttgctgtagaagagaagaaagagattgaagagacccagcagaccgacaaggacagatggaagggtcttgcctatgatatctcagacgaccaacaagacatcacaagaggaaagggtttggttgactcccttttccaagctccacaggatgctggaactcactatgcagtcatgagct

SEQ ID NO: 82663 - DNA, 404 bp, Glycine max
gaagaagtgaagagaagagaagagaagggatttggatctgaaaagagaagatggggggaggaatggaagcaaacaagaacaagttcatagaggattggggcactgccagagagaatctggagttcaatttccgttggactcgccgcaaccttgctcttgttggcatcttcggcatcgctattcccgtcctcgtctacaagggcatcgtccgtgaattcgtaagtagtcattttccaattcccaattagggctttctttatgaacgaatcactttagggcttttcattctacctatgcgttcgattctttttcttccttctttatgttatacttggattttcactttcttttaacaactatatctctccttctgctgaaacatgttttattttaaaaaacaatca

SEQ ID NO: 82664 - DNA, 397 bp, Glycine max
gaagaagtgaagatatgagaacagaacgtatttggatctgataagagaagatggggggaggaatggaagcaaacaaagaacaagttcatagaggattggagcactgccagagagaatctggagtatcaattggcgctggactcaacgctaccttgctcttgttggcatgtttggcatcgctattcccttcctggtctacaagggcataagccgtgaattcgtatgtaggcatgtttcaattaccaaattagggctttatttattgaacgaatcactctatggcttgtgattgtacctatgcgtgcgatacttggtataccttttttattgcatactaaggatcttcactttcttttaacaactatatgtatgcgtatgatgatacatacattatttt

SEQ ID NO: 82665 - DNA, 147 bp, Glycine max
atcacgcgtacggtcgtatatgagcacttccaaagggcctcgagaaactgccacgctcggcgtgtatgtgacacgtagcaccattctcatgtacaccgtacaccacaatccacagatccttctcacggtcacggcacataggtgata

SEQ ID NO: 82666 - DNA, 398 bp, Glycine max
agaagaacaagtagttgagaactaagaaggagaagcaaatggcttcctcaatgatctcttccccagctgttaccactgtcaaccgtgccggtgccggcatggttgctccattcactggcctcaagtccatggctggcttccccaccaggaagaccaacaatgacattacctccattgctagcaacggtggaagagtgcaatgcatgcaggtgtggccaccagttggcaagaagaagtttgagactctttcctacctgccagaccttgatgatgcacaattggcaaaggaagtagaataccttcttaggaagggatggattccttgcttggaattcgagttggagcacggtttcgtgtaccgtgagcacaacaggtcaccaggatactacgatggacgc

SEQ ID NO: 82667 - DNA, 299 bp, Glycine max
ctcagacctatacctaaggttttcgttacacaatgaaatgcctttgccttgtgccggcttttgctgctagtgccgatcttgggttaagagcctatggacgcccctcaaacagaaagtgctgttatgagccacctcacttgcactcacggtgagtcgctcaccctacattcatatgatcagcagctatatcagcgatgccagaattagaagagaagctagtgattgatggatagatggcttatttgctaggttaagatctgataaagagctctgattcaggcatgactaagagcgctgga

SEQ ID NO: 82668 - DNA, 307 bp, Glycine max
ctcagacctatacttaaggttgacgctatacattgaaaagcgtttgcctcgtgccggcgtgtgctgctaataccgcacttgggttaagatcctatggacgccccacaaacttaaagtgttggttagtgccacttcacttgcattgacggtgagttgctgcagcatagatccagatgttctgggagtctataaatgatgccggaatatagaagaaaggcatgtgtttgatgcgatagcaggctattatgctagatagggatgtgagagacagctttgattcaagcatcactaaaaacttttgatggag

SEQ ID NO: 82669 - DNA, 63 bp, Glycine max
cccagacctaaatataagaaagacgttacacatcgataagggattgcctcacgccaggggggg

SEQ ID NO: 82670 - DNA, 316 bp, Glycine max
cactgtgttactattgtgctcgcacgagtgaattatcattaatcagagcttggtcttgggtggtgccagtgtgccacactatgctcaagcagaatttggggttcgtttttgctgaaaaccatgctgagagagaagagataattgtaccctcagggaacttttggggtgtcagtacagtaaaagagtcaaaagtggcatagtttatgttagggatagggtaggtaggtaattaaaggggctatatgaagcaggtgttcctgctgaacatgtatattacaaattagcctttttataattcaagttgaagatacaactc

SEQ ID NO: 82671 - DNA, 401 bp, Glycine max
cccacgcgtccgcccacgcgtccggtttgttgtgagctataagctagtttatcgtgaggagaatatgaagttgtttgttttctttgttgctgcagtagttttggtagcatggccatgccatggcgcatgctaccaaaggttccctctccgaatgaaaactggctatggtgagcgttcttcggaggtaaaatgcgcaagttttaggcttgctgtggaagcacacaacatccgagcctttaaaaccattcctgaagagtgcgttgaaccaacaaaagactacattaatggcgaacaatttagatcagactctaaaacagttaaccaacaagctttcttttatgctagtgaacgcgaagtccatcacaacgacatatttatattcggcatagataacaccgtac

SEQ ID NO: 82672 - DNA, 399 bp, Glycine max
  unsure (1)..(399): unsure at all n locations
aaaaagcggtccgaagtgaacgtgggaaatgtacatatatgctacactagttgcattacacagaaaagggtatnaatatcacacatattggggatgacctgttcatgtggttggtgccaccagggctaaagtgcataacagtgatgcaacatacgaacacattactaaggtgtgctcaattggaaagaggagcttgggttcatcagaaagggtattgaattacacgtatctaaagagagagagattgagcacacgcaaaagcactaagaggtgtaactagagtgagtgtacggcatgatacctgttaggaggcagacgtaaagacaccatttggatatacaaggaaagatgtcctatgaacttgacctggagctacttcactagagattgacttaaaaa

SEQ ID NO: 82673 - DNA, 288 bp, Glycine max
ttctactctactgcttaactttctgctctagaaaattcagtggtgatacatggcttcggctactctctctgtagccaaaccagcccttcaggcaaatgggaaaggcttctctgaattctctggcctccgcagctcatcaggcttccttcccttttctagaaaatcttcagaggatttccattctgtcattgccttccagacctatgcagttggaagcagtggaggatacaagaagggtgtgacagaagcaaaactgaaagttgccataaacggatttggaaggattgg

SEQ ID NO: 82674 - DNA, 181 bp, Glycine max
aaaaccccccccaccccccccccccccccccccccacccccccccccaccccccccccccctcccccccaccccgccccccccccctcccccccccccaccccccccccccccccccccccccaccccccccatccccccccccaccacccccccccccccccccacccccccgccccccc

SEQ ID NO: 82675 - DNA, 150 bp, Glycine max
gttgaagtggcagctttgcactcttgcttatattatatttgtaggcatttaagtactcgtgagattaaaatggaccgtgacaaaagaaagacttgacactcttgtgaattagcatttcttgaaatatttccggttgctatttccgtttcc

SEQ ID NO: 82676 - DNA, 121 bp, Glycine max
gggcgagccacgcgttcgaaacttggtagcccacttgcgaatttatattttttgaagggagttccgctgcaggacaaaaacaccgtgttttttccgtgcgggggaaaagaaaagggaagga

SEQ ID NO: 82677 - DNA, 202 bp, Glycine max
ctagaccatgtaaccctttattggcattgctgtagctgctccatacgcagtgcttgacaccttatgccagaagctgaaaacaggtgtcaagctctacatttctgccagtgctcacaggcaaaggtggatgcctaacagaataaagcagtggcttcaacacatgccccttattttgttgtgctcgagaagctttgatagtctt

SEQ ID NO: 82678 - DNA, 267 bp, Glycine max
ttcgactcttggccagtttatataaacaaactttgggtagataagactgctgaatgtctcatctctaattattgtatttggaaaatagttttgagttgaggatctaatcattaccagatttaatatatctgacacatgctgtctgaaggtgctacgacaccaacgacaccaagttatgtgtccgctctcacgcagcttctgtgcagcacagaggtttatgcccgatacgtgggagccactttcgagctcagcaagtttggatctatt

SEQ ID NO: 82679 - DNA, 319 bp, Glycine max
gagatggctcttatgtgcgttgctgttctagataggccgtatgcatgggccagaacgtacaaagtcaaaagtgacgaaagatggaagagagcatgactgggcaccatcaaccccggacttagatggactataacttatcatatcaagaaggacaaaaaagcatcacatcaaaggcagcatgatgcacaacaacgctgcattctgatgcagcacgggtatgaatgtcatatacaagggagccacttgcgagctcagcagggaaggagctatagagaacacatattggggaatttgaaattctacgttttacaaccaatgc

SEQ ID NO: 82680 - DNA, 380 bp, Glycine max
caccatcccacgcaaccccaaccctcttctcgtttcctcacccccaccactctctcgaaaccccaacgtcttcaccttaaccgtgccgcgccgccgcagaaggattcggtttcgggtctcggccgccgcggagcccgatgggccgtcgtggtcgcaatcgctgctgcgcgggtcacggcggttttggggaaagtttggggaaatggtaaagaaggagacgggtctcgacttcgaaaacaggagtgtgaagaaagttggcgagtttgtgaacggagatgaattgcgaaggttggggactgattgggtgtttcggtttgtcgattggaatcgttgggaacggtggaagaatatcaaggattgggaacctaagcgaattggtg

SEQ ID NO: 82681 - DNA, 387 bp, Glycine max
agttgagaactaagaaggagaagcaaatggcttcctcaatgatctcttccccagctgttaccactgtcaaccgtgccggtgccggcatggttgctccattcactggcctcaagtccatggctggcttccccaccagaaagaccaacaatgacattacctccattgctagcaacggtggaagagtgcaatgcatgcaggtgtggccaccagttggcaagaagaagtttgagactctttcctacctgccagaccttgatgatgcacaattggcaaaggaagtagaataccttcttaggaagggatggattccttgcttggaattcgagttggagcacggtttcgtgtaccgtgagcacaacaggtcaccaggatactacgatggacgct

SEQ ID NO: 82682 - DNA, 366 bp, Glycine max
cccacgcgtccgctggaaactgagcgagatttggcggctaagagttctcaggagtcgcgtactgcgattggaacgttgaaggaggcgtttgaagcggtgactagggagaagagtgagattcaaagccgaaacagtgctctagagacgaaaatcggttatctggaaactgagttgaagcaactcaacgattatacgcggaaggaagaggagattacgcgtgcgaagattctcgaactggaagggaaccttggcattgccatgcagaaggaagaggagatgaaaatggagataagtgctcttctgaaggagaagaaagaggtggaaatgaatgttgaaatgttaacagaagaaaaagatggtgttcgt

SEQ ID NO: 82683 - DNA, 196 bp, Glycine max
taaactctcttaaaacaaaattcttttcaaaccactttccccacactctgtagggtgtcattttttttttggaacaacccccaaaaaagagttatttgaccccttttcagtgtagtgcgctgaccactgaaaacagggggctgggttttgaataaggcacattttggcctgtgtttatgtcaccttaattattttt

SEQ ID NO: 82684 - DNA, 347 bp, Glycine max
gctataagctagtttatcgtgaggtgaatatgaagttgtttgttttctttgttgctgcagtagttttggtagcatggccatgccatggcgcaggctaccaaaggttccctctccgaatgaaaactggctatggtgagcgttcttcggaggtaaaatgcgcaagttttaggcttgctgtggaagcacacaacatccgagcctttaaaaccattcctgaagagtgcgttgaaccaacaaaggactacattaatggcgaacaatttagatcagactctaaaacagttaaccaacaagctttttttttatgcttgtgaacgctaagtccattacaacgacatatttatatt

SEQ ID NO: 82685 - DNA, 382 bp, Glycine max
ctcgttcttcttcgtcgttatctttttcttttgttgtttgtgtgtttgtttttgctctcacctgaaaatgtcttgctgcggtggtaactgtggttgcggaagcgcctgcaagtgcggcaacggctgcggaggctgcaagatgtacccagacttgagctacaccgagtcaaccaccaccgagaccttggtcatgggagtggcaccagttaaggctcaattcgagagtgctgaaatgggtgttcccgctgagaacgatggctgcaaatgtggagctaactgcacctgcaacccctgcacttgcaagtgaagtgttggagagctaaagcttcaagcagagatggcccttagaaataatgataaaaactatatgtagtttcaaaac

SEQ ID NO: 82686 - DNA, 221 bp, Glycine max
  unsure (1)..(221): unsure at all n locations
atcagggtcttgagccaatcctggttgggtagaaacccttttggtctttaagtgaggtcannagttttatgtctnngaattagacccgatcaaattctctacctggcctttcgatccccttttgctgatgcaaaattgctgatgaccttcgggtgcctgggtcaaaggagtattgtgcatattcgtgtacaagcagcgaaatggtaggaaaaggcctgaca

SEQ ID NO: 82687 - DNA, 239 bp, Glycine max
gaaaaaagcatgaacgtagaaaatttgatgaggcataaaaacaaaaaaggaaagggggggaataacaaaagagagtgattccactactaaaaaataaaaatgaagattctataggttcaccaaagtgatagttgattggttaggtgatgtaaaattgttgtgcttggtaattctttaaaggtttctcggggtggtggcttttgggggtgatccgtttttttctcgtttgggtgatagtt

SEQ ID NO: 82688 - DNA, 117 bp, Glycine max
tgaactattgcatactgcccatcttaatctaaaaggattggatgagcttttgaaggaagctcaggcgcatgctgatggcgtaattccaaaataatatcgcatttaatcgaaacacaa

SEQ ID NO: 82689 - DNA, 377 bp, Glycine max
cggacgcgtccgcccacgcgtccgtccatgcttccggataaggggcagctgtactatgtgtatgagattgatggtgttggcactcatagcttgatctcagtgacttgtgctaagaacaagctctatgcacattttgtcaatgctcctactcctgagtggaacagagataaggacgtgttgaggcatgttcatgagtcttttaagactgtggggtctttttagttggcttgtggtgttttgtattttgtagaggtaatggatgattatctattatgaggatgaggatggtttcttttgatgataaaatttaagtttttcctacttgtctgcttgattcaatttttggcatagttagcttcaatttggaactggtttaa

SEQ ID NO: 82690 - DNA, 398 bp, Glycine max
gccacgcgtgcgtcgagataactagaaacagtgtgatgaaaatgaaggtccttgatttcttcgctgctacaattttggtagcatggcaatgccatgcgtacgatatgttccctctccgaatgaacactggctatggtgcccgcactccggaggtgaaatgcgcaagttggaggcttgctgtggaagcacacaacatctttggctttgagaccattactgaagagggcgttgaagcaacacaggcatacatccatggcgaacaatatagatcagactctcaaacagtttaccaacaagcttacttctatgccagagacctggaagtacatcccaaggacacatttgtgttcagtatagatggcaccgtgctttttaatattccatactacaaaaaacat

SEQ ID NO: 82691 - DNA, 396 bp, Glycine max
ctctgagactcagcagtaataggaactaccaagtaaccatgtcccgtcatcgccggcaaccctcccaagcccttccgtcggacctattcgccgccgacgaactcactaagccctttgacttcacgcaaatcatcaccgaagaaaccggaaccgccgccgctgccgccgccaccgtttcccgctcccaagagatcaaagactcccctctcgccgccacttctccgcccaagaagaaggtgccgccggcaaccaaatcggcttgaaccgccgtatgcatcatgatgagtctgctcctgctgctgcattttatgtctgtcattttctgtttttctttttctttcttttctttttggttgaaataaaaaatgttaagatgacagcagagaaaagctcaag

SEQ ID NO: 82692 - DNA, 56 bp, Glycine max
cggacgcgtgggaaaaaaatttttttaaaaaaaaaaaaaaaaaaaataagggaggg

SEQ ID NO: 82693 - DNA, 149 bp, Glycine max
ggtctggactgagctaacataccgactatgggaaccatcaccatgctcgggaactgtctattgactgtccacctgacccctaacgatcttaaagggctgtccttaggagaatactgataatctgtgctgccacatctggaggactaaag

SEQ ID NO: 82694 - DNA, 263 bp, Glycine max
agcacgcgaacgaaaaaacgttgttcgtgatggcacgtacgaagcaaactgctcggaagctcacatgaggaaaggcacctatgaagcatctcgtatccaaaggtgcaacgtaagtcatgcaccaactactgtttgtgggaacaacacacaattgagtggaacatgcaccaaagctcttcactagatcagtgaataccatgagagtaccgaaccgttgaacacatagcttgatttccagaagctagttccagaaaccgctgatg

SEQ ID NO: 82695 - DNA, 266 bp, Glycine max
ttgacgcgtgggcaggaatttcactgggcgattctccggtcgtcggccggcgggactattaaattggcgtgggcggataacgatgaccggtactacactactaggggtttcggctgatgagaacggcttatgtcaccggcgactgcaactactgtgaggaacgtgccctagtttggcccaagctctacattactatttcatgctaggtgtaagaggtattcttttcttgcctatgaagtttttattagattttttcttttttctct

SEQ ID NO: 82696 - DNA, 348 bp, Glycine max
cccacgcgtccgggcttccttaagctccttagtgctgctccttgcagctctaatgctatcccctcaagttcttgcaaactatgagaatcccccagtgtacaagcctcccactgagaaaccaccagtttataagcccccagttgagaagcctcctgtttacaaacctccagttgaaaaccccccaatttataagcctccagtagagaagccaccagtgtacaagcccccagttgagaaacccccagtttataagcccccagttgagaaaccaccagcgtacaagcccccagttgaaaaaccaccagtgtacaagcccccagttgaaaaacccccagtgtacaagccccc

SEQ ID NO: 82697 - DNA, 245 bp, Glycine max
ctctctctctctctacaatggccttagccgcagcccccacaactttctctgtggtgcactccaccaccccggcctcctcctcctccgccacctccgcctccccctcgcgcgtgcagctctcctcctccctccgctcgcgcccgctcgcgcgccgccttggcttcgccgcagcggacccgctgctcgcggcgaatgtcgcagcgcgcgtcgcatcggtgagaggaggaaagggcgcgaggggggtg

SEQ ID NO: 82698 - DNA, 214 bp, Glycine max
aaaaaaaaactccaaacccctaattcctctttgaaagtgccacgacggatttgatagtggttttaaaccctagctagggtgttagtgtactatagatacaaaacgagaacgacgagtgactaatacagatcaaggatgagtttggtagcgggttatacaagaaataatttggggcttcaccctttattctaattccaaaaccttaaaccttttt

SEQ ID NO: 82699 - DNA, 312 bp, Glycine max
ggattttatactatatattatctaagagtccccttatatttcaacatctttaaaggtcaactattccattaacactcttaaatttttccaaatttatatatgttatttttgagaatatttaaaatagggggttttttttataaaagatgtgtaatttggtatgtttacagaaatgaggccacttgtgctttatataacagaaggagaggtttttttcttatggaacgaaaaatttcagtgtgcaaagtgggacctgctatactgatatgaccacccattgtaacaagaccaagtgcccgcaaagcttgttta

SEQ ID NO: 82700 - DNA, 144 bp, Glycine max
gcaaacccaaaaccttttgccatttatgccttcaccaaagaatgaacctttcaagagaaagattctatcaaaaacatcctaaggaagtgtcgtatttaatgacacaatgttaagtaggctttatttctgtctcctactacttct

SEQ ID NO: 82701 - DNA, 382 bp, Glycine max
cccacgcgtccgatcagggcgactgatgagctgctgctgcgctagaaagtatgggtagcaaaggatctggtctaggaaaggggacacatgtaaagaacaataccaactgcgtacttaacttacgtgatgaagtgggtattggagggcttgaaaatcattcttatattttggagcaactaattactgttggtgcacttaggggtgcagaagtccaaggaggattcgagaaattgattgcactggcaagagcaagacgggaccctcaaactgtggatggagcctatatctcggcttgtctttgcaacagacaggaccttacaagatggaaatctgcatcttacacctccagtaaacctcaccaatgcaccgatgtctctagtcg

SEQ ID NO: 82702 - DNA, 99 bp, Glycine max
ttatcacataaaaataggataaaaatttttagagctttgatatatattatgcctgagaaatgaggtattataagtatttgctttaaataagacaatgca

SEQ ID NO: 82703 - DNA, 263 bp, Glycine max
agccttccgccaacccttccggaaggggaagctttaccaaaggcaggaggacctggtctaaccggaattggcctcttcggggttggcttttgtggccttcaaccctgccctttcactgtgggaggtctcagtagggcctccctcctctaagggacctcctttcattcaaaggtggggcccggtgtggccaggagatcaagactgacaggcctattggattaatggtggcatggctttgaagggagggagtggtgcctctggcc

SEQ ID NO: 82704 - DNA, 268 bp, Glycine max
tactttaatcagtaaactacttttcttctaccctacattcacattctatggaggcgagaggttgaaaaaataacagatgtaaaaccttttcaacaccattgtgtaaacacttactgcgaagcaaaactatggatcattttttgtagaagacaacctaagctcaatgagctaccaattcaatcaaaatgtttggactccagaaacccgtgcaccatctcatatgaggcggataatatgctaatgtcttgttatggaggtacaataagat

SEQ ID NO: 82705 - DNA, 385 bp, Glycine max
gagataactagaaacagtgtgatgattttttatgtccttgttttcttcgttgctgcagggttggtagcatggcaatgccatgcatacgatatgttccctctccgaatgaacactggctatggtgcccgtactccggaggtgaaatgcgcaagttggaggcttgctgtggaagcacacaacatctttggctttgacaccattcctgaagagtgcgttgaagcaacaaaggaatacattcatggcgaacaatttatatcagactccaaaacagttaaccaacaagcttacttttatgccaaagacctctcagtccatcccagggacacatttgtgttcaatttagatggcagcgtactctctaaaatttcattctacaaaaaacatg

SEQ ID NO: 82706 - DNA, 384 bp, Glycine max
  unsure (1)..(384): unsure at all n locations
gagatacctagaaacagggagacgatttttaacgaccttgttttctactgtgctgcggttttggtagcatgagagtgccatgcntacgatatgttccctctccgaatgaacactggctatggtgcccgtactccggaggtgaaatgcgcaagttggaggcttgctgtggaagcacacaacatctttggctttgacaccattcctgaagagtgcgttgaagcaacaaaggaatacatccatggcgaacaatatagatcagactccaaaacagttaaccaacaagcttacttttatgccagagacctcgaagtccatcccaaggacacatttgtgttcagtatagatggcaccgtactctctaatattgcatactacaaaaaacat

SEQ ID NO: 82707 - DNA, 381 bp, Glycine max
cccacgcgtccggtgactcgttcttcttcgtcgttatcttcttcttttgttgtttgtgtgtttgttttttctctcacctgaaaatgtcttgctgcggtggtaactgtggttgcggaagcgcctgcaagtgcggcaacggctgcggaggctgcaagatgtacccagacttgagctacaccgagtcaaccaccaccgagaccttggtcatgggagtggcaccagttaaggctcaattcgagagtgctgaaatgggtgttcccgctgagaacgatggctgcaaatgtggagctaactgcacctgcaacccctgcacttgcaagtgaggtgttggagagctaaagcttcaagcagagatggcccttagaaataatgataaaaact

SEQ ID NO: 82708 - DNA, 393 bp, Glycine max
agccttccggttttaacctagtttatcgggaggagattatgaagttgtttgttttctttgttgctgcagtagttttggtagcatggccatgccatggcccaggctaccaaaggttccctctccgaatgaaaactggctatggtgagcgttcttcggaggtaaaatgcgcaagttttaggctggctgtggaagcacacaacatccgagcctttaaaaccattcctgaagagtgcgttgaaccaacaaaggactacattaatggcgaacaatttagatcagactctaaaacagttaaccaacaagctttcttttatgctagtgaacgcgaagtccatcacaacgacatatttatattcggcatagataacaccgtactctctaatatcccatact

SEQ ID NO: 82709 - DNA, 182 bp, Glycine max
gctttgacagaaactcaggttctgaaatttaggggtttagaattatgtaagcaacccaagataagcaaaaggaagaaaaatggttgctttgttttgtctctgttcgttgtaaaatgctttctttagtaaatgggaagttcctttgtttctaaaaaaaaaaaaccatattatcataagaggca

SEQ ID NO: 82710 - DNA, 345 bp, Glycine max
tgttccccttgcaaacttaatacattcattggatttattcatgtgtcagttactttttgagaagtgtggaatatatacatgtgatggttggtggtgatgaagttttaggtcctaagacagtgcagtgtttattggcatgtgacattgtcaaagactcatggtatgtaaatattcatcataagctagcataagctggactctttttagttgcctgtcacaggcattagtactatcttcggaggactatccacatgatcagggatgaaggatgtatgatgaactctttaccatgtacgactaaagaacaagtggagtatttgtctgtgccaagctagaagatgaaaa

SEQ ID NO: 82711 - DNA, 320 bp, Glycine max
atctccctccccccactcccacttttttactccaaacaaaccctaaatctctgtgggctatttattcttgtgagaacttcaaccatgagagatatccttcacgttcagcatagccaatagcggtgaccaaatagtatccaaattctcggaggcaattttactcgagcacgacattaatactaccacatagtacaactacattcgccacaccgtcttccaactagaacggatcagacgctatcactaataggctcttatccgaacttacgtttcgaaaacagatctttaggatttttatccttctaacattaactgcatta

SEQ ID NO: 82712 - DNA, 365 bp, Glycine max
cactgactccccctaatagcacttatttcgactaacgaacgctgactcaaagagggacacttcctacggatcgctgagcacccatactagaaaggatacaaagtcacagacgccactgcgctaaccaatttagaacgaagctctgcgcggatatatcacaacgatcacgtcatgactactaccacgaaggactacttctgaggccacagacgcctacaaatcgagaggatcaatgcctattacagatcggcacactggcgaaagggacgttatcagagcaccgcttatggatcttgaaccttgtaccatggacagcattatatctggcccttacggtaagatatttcatcatgacaacttttttt

SEQ ID NO: 82713 - DNA, 379 bp, Glycine max
gtggagaactaagaaggagaagcaaatggcttcctcaatgatctcttccccagctgttaccactgtcaaccgtgccggtgccggcatggttgctccattcactggcctcaagtccatggctggcttccccaccaggaagaccaacaatgacattacctccattgctagcaacggtggaagagtgcaatgcatgcaggtgtggccaccagttggcaagaagaagtttgagactctttcctacctgccagaccttgatgatgcacaattggcaaaggaagtagaataccttcttaggaagggatggattccttgcttggaattcgagttggagcacggtttcgtgtaccgtgagcacaacaggtcaccaggatactacgat

SEQ ID NO: 82714 - DNA, 340 bp, Glycine max
ggaacctttgctgcaccagcacatacttatgctaagcgcagttgctttgctggggaactggaaacacttctgggctcactattggggggattatgctcgctgggtggagtcaaaatacgattaggctacagtcttcattctagatattgcataggatgattggtaaatcttgtctgttgattcattattgaagtacaacggttgttgacttttttattcctctgaagcatattgtaattgagcaatacggagggagcaagcaccatgactcgagtctcaattataccctttatggtgccagtgaaggtataagaccatcttcgtactagcaaaagctgag

SEQ ID NO: 82715 - DNA, 382 bp, Glycine max
cccacgcgtccggagataactagaaacagtgtgatgaaaatgaaggtccttgttttcttcgttgctacaattttggtagcatggcaatgccatgcgtacgatatgttccctctccgaatgaacactggctatggtgcccgtactccggaggtgaaatgcgcaagttggaggcttgctgtggaagcacacaacatctttggctttgagaccattcctgaagagtgcgttgaagcaacaaaggaatacatccatggcgaacaatatagatcagactccaaaacagttaaccaacaagcttacttttatgccagagacctcgaagtccatcccaaggacacatttgtgttcagtatagatggcaccgtactctctaatattccat

SEQ ID NO: 82716 - DNA, 288 bp, Glycine max
ttccactcgtccggggagatccgcgtagtgattggagttgggtacatgttattacggggggaactttctaaaatttggtactcccaccaataacatacaagacttactacacgtgtctgaaacgtaagtatcacaccatgaacaaggttacccaatacatcaatttaatgatatcttagctgcccaatcaaatcacccatattatcacaaacaatcatgttattgtctacaaactaaatccttttaccacaataaaaataaaaccacttataataataactttaagac

SEQ ID NO: 82717 - DNA, 100 bp, Glycine max
aaaaaaaaaaaaaaaaaaaaaaaaattaaaaaaaaaaaaaaaaaaaaaaaaaaaaaaaaaaaaaaaaaaaaaaaaaaaaaaaaaaaaaaaaaaaaaaaaa

SEQ ID NO: 82718 - DNA, 382 bp, Glycine max
cccacgcgtccggataactagaaacagtgtgatgaaaatgaaggtccttgttttcttcgttgctacaattttggtagcatggcaatgccatgcgtacgatatgttccctctccgaatgaacactggctatggtgcccgtactccggaggtgaaatgcgcaagttggaggcttgctgtggaagcacacaacatctttggctttgagaccattcctgaagagtgcgttgaagcaacaaaggaatacatccatggcgaacaatatagatcagactccaaaacagttaaccaacaagcttacttttatgccagagacctcgaagtccatcccaaggacacatttgtgttcagtatagatggcaccgtactctctaatattccatac

SEQ ID NO: 82719 - DNA, 194 bp, Glycine max
cccactcgtccgcacaaacacattcttttgcataagcgcaaattgatttgatagaggagaaactggaaacactaaaataggactaactataagaaaaaggattatactgggctgccgttttgtaggatccatacttacatacgccttctcacgacttcattgcctttatattgtgacacgaaaattaaattcaa

SEQ ID NO: 82720 - DNA, 93 bp, Glycine max
ttcagtcttatttcgactctaatggttgactttgcttgaaatcaacgttcagtagtataattaaatccgtgttcacaaacacaaacatacaac

SEQ ID NO: 82721 - DNA, 310 bp, Glycine max
ctccgtccactcgtccggattattacaataatcatacaaaacggggcccaattctgggggaggttattacatggtgggcgcccatcaacaccccgaccacacttctgtgcatggctttctgaacttcatcatctttacacatcccaataatatcacacgacaacgctcatgcgtatagttccactaggctcaccgacgtggaggtcataccaatcatcgagaagtcgctgctgaaacacgacattgttttcatcgcgctcagtttgtttgatacaatcgtttcaaatcagcaagcacactcttcccatta

SEQ ID NO: 82722 - DNA, 174 bp, Glycine max
  unsure (1)..(174): unsure at all n locations
taatttcccggtccaccccacccttccgttttcctgaacaaaaatttatatttaaagacttggagtttagtnaaaaaaaaaagaggaaaaaaaaaaaaaaaaaaaaaaaaaaaaaaaaaaaaaaaaaaaaaaaaaaaaaaaaataaaaaaaaaaaaaaaaaaaaaaaaaaaata

SEQ ID NO: 82723 - DNA, 323 bp, Glycine max
tccggttaaatacacgaaaatttctatttagtcactctctaactgagaaagtgcttgcaagagagaaacaagaggggcgcggtgaccacgctcaaagtgaaagtgaatatacaaaatgattattgcatttgcatgatcaggaaccaccccataagctttttactgcatttagattctgagggagaatgatccaaagtctcttctgtttgttgtggttgtaaacagagagatatcaatttaactaaggagtgtcattttagattcagatattccaaatcacaccgttggagttcactttgtgcttgttgatcattgtgattctt

SEQ ID NO: 82724 - DNA, 377 bp, Glycine max
accacgcgtccggccagctttctcacttggaaggaaagcctgctgatacatgatcgagcttcggcacagcatctgtccacctatgaccaattaaggcttgctcgctgtacctggatctagagacagaggctgaccatctcaataggcttctcgatgatagtgacgtgcacacttgccgatcatgcgctgcctgataagagccttccctattgagggcagacgcctgagagacgtactaactgaaaggtatatgccctctgctattaaaacatagctatgcgtgttttacggatcaccggctcaaggactcaggttgttggacccctgctcagtgatcatgtatcctatgccaacatactagatcacttctttgaacc

SEQ ID NO: 82725 - DNA, 393 bp, Glycine max
accaacgcgtccgctgttaccactgtcaaccgtgccggtgccggcatggttgctccattcactggcctcaagtccatggctggcttccccaccaggaagaccaacaatgacattacctccattgctagcaacggtggaagagtgcaatgcatgcaggtgtggccaccagttggcaagaagaagtttgagactctttcctacctgccagaccttgatgatgcacaattggcaaaggaagtagaataccttcttaggaagggatggattccttgcttggaattcgagttggagcacggtttcgtgtaccgtgagcacaacaggtcaccaggatactacgatggacgctactggaccatgtggaagctgcctatgtttggttgcactgatgcttct

SEQ ID NO: 82726 - DNA, 299 bp, Glycine max
cttctgtgttgttaaaacaaatttctgtgcttgattccctcttctttcaaaaaaaaaaaagaaaaaaaaaaaaaaaaaaaaaaaaaaaaaaaaaaaaaaaaaaaaaaaaaaaaaaaaaaaaaaaaaaaaaaaaaaaaaaaaaaaaaaaaaaaaaaaaaaaaaaaaaaaaagggggggactttttggggaacccaggctaacgcccgcgggggggaaaagccatggcgttttctaaggggaaacctaaattaaattaacgggcggtgttttaaaaaacgaaatggctgaaaaaacccggg

SEQ ID NO: 82727 - DNA, 386 bp, Glycine max
gtttgttgtgagctataagctagtttatcgtgaggagaatatgaagttgtttgttttctttgttgctgcagtagttttggtagcatggccatgccatggcgcaggctaccaaaggttccctctccgaatgaaaactggctatggtgagcgttcttcggaggtaaaatgcgcaagttttaggcttgctgtggaagcacacaacatccgagcctttaaaaccattcctgaagagtgcgttgaaccaacaaaggactacattaatggcgaacaatttagatcagactctaaaacagttaaccaacaagctttcttttatgctagtgaacgcgaagtccatcacaacgacatatttatattcggcatagataacaccgtactctctaata

SEQ ID NO: 82728 - DNA, 309 bp, Glycine max
cgcaactaaagtaataaacattcgattggatgttaaataaagagctctggggtagagcatttcaaaacgggtctgaacatgtctgctgttatatagaagacacacgattgtgactttgaagacagttgcattcgtagggatgaatgaaatggctctgtcttttgatgtacgaagatcggttctaaattggaatgcaggtaaccgcgtttgaatatctgtggcgaataacatgaataatagcagtgtttcgtaaatatactgctgatttatctatcacaacgaactcttgctgcttggataatgatgagg

SEQ ID NO: 82729 - DNA, 96 bp, Glycine max
gtttgttattttttttttccttacaaatttcatcatgatcaattgtattaaactttcaatgtttttcttgttatacagcgaagagaaattgtcatc

SEQ ID NO: 82730 - DNA, 389 bp, Glycine max
cttctttatttctacattaattaattattctcttgcaaattccattaatcaaatgatgcatgaactatgatactacccatcttcttctaactgcccaccattgacttgttttgaagcacatttctcatcaatggagagacagagaagtttctccttcaaacccactaggcttttggtcttctctttcactattttttcctccatcctcttcctctctaccttcaccacctggctcaccaattacacaccttcaattcaccaacagattcatctttacttcaacacttctacttcttcttcttctgtcggtgacggtgaaagtgacagtgtggctctttcacctttaactgttcattccttgaccaaaaactaaactgtaaatgtcgtga

SEQ ID NO: 82731 - DNA, 338 bp, Glycine max
cggacgcgtggggtttgttgtgagctataagctagtttatcgtgaggagaatatgaagttgtttgttttctttgttgctgcagtagttttggtagcatggccatgccatggcgcaggctaccaaaggttccctctccgaatgaaaactggctatggtgagcgttcttcggaggtaaaatgcgcaagttttaggcttgctgtggaagcacacaacatccgagcctttaaaaccattcctgaagagtgcgttgaaccaacaaaggactacattaatggcgaacaatttagatcagactctaaaacaggtaaccaacacgctttctgatatgctacgtgaa

SEQ ID NO: 82732 - DNA, 266 bp, Glycine max
cctatgcgtatgtccgggcgttcaatcacaagcgattatcgtcatgcatcatgatgatagctacaagcacaagaagaacagttgcatttcgtgcgggaccaacggatcccgtcactgtcccaaaccatagtgtatccactttgctcagctctcactctgtcaactacccatgtgcataatacctcgcactccatttcgagcgatcagattatgaatatggtggacgaccgctattttattatacctttatcacatcaacattcatg

SEQ ID NO: 82733 - DNA, 306 bp, Glycine max
gatcgagataactagaaacagtgtgatgaaaatgaaggtccttgttttcttcgttgctacaattttggtagcatggcaatgccatgcgtacgatatgttccctctccgaatgaacactggctatggtgcccgtactccggaggtgaaatgcgcaagttggaggcttgctgtggaagcacacaacatctttggctttgagaccattcctgaagagtgcgttgaagcaacaaaggaatacatccatggcgaacaatatagatcagactccaaaacagttaaccaacaagcttacttttatgccagaga

SEQ ID NO: 82734 - DNA, 343 bp, Glycine max
ccaatatattccattctctctgtgtatttccctacctctcccttcaagatgcagatcttcgtcaagaccctcaccggcaagaccatcacccttgaggtggaaagctctgacaccatcgacaacgtcaaggccaagatccaggacaaggaaggaattcctccggaccagcaacgtctcattttcgccggaaagcaacttgaggacggccgtacccttgctgactacaacattcagaaggagagtacttttcacctcgtcctccgtctccgtggtggcatgcagatcttcgttaagacactcaccggcaagaccataaccctagaggttgaaagcttcgacacca

SEQ ID NO: 82735 - DNA, 299 bp, Glycine max
aaatgttggaaatgcagttgcgggtgataactgctttcccttcttgatgactgagggtggaaatttgtgggagaactatagcttaaaggttaataaagcatgccaaaaccagtgatgagagtgaaaaaaagtttgacacttgtaagaggcaagaaaatttcacagccttttatcagatgatctcacattatgtaagcaagagctaactgatgagggtcgtttatgtatagagactgatgatgataaggtgatcaatcttattatatttaaaaaaaaaaaatacaatatatataaattat

SEQ ID NO: 82736 - DNA, 248 bp, Glycine max
aactcgcccttcttctttcggcgggctgtgttttgccgcggaggggatttcaactgaaaaaacactccgtgcagctataacacttactagagcaagatccagcataggtagcgaagcgcgcatgtgttatttaattgccccaattaaagggtacactacggcaaaaccgaaagcccttgcatgtgttagaggaatgtttcgagtgctgtgaatagatgaagatgtaaatgggggaatgagtaaccacc

SEQ ID NO: 82737 - DNA, 396 bp, Glycine max
cccacgcgtccgcccacgcgtccgattgtttgttgttgtaactcgttcttcttcttttgttggtctgtgtttgtgtttggtttgtctctcacctgaaaatgtcttgctgcggtggtaactgtggttgcggaagctcctgcaagtgcggcaacggctgcggaggctgcaagatgtacccagacttgagctacactgagtcaaccaccaccgagaccttggtcatgggagtggcacctgttaaggctcaatttgagggtgctgaaatgggtgtgcccgctgagaacgatggctgcaaatgtggaccaaactgcttctgcaacccctgcacttgcaagtgaggtgttgggagagcaagcttcaagcataaaatgcccttaattaggaataatgattaac

SEQ ID NO: 82738 - DNA, 65 bp, Glycine max
tcgcccacgcgtccgtccacgcgtccgttcattcgtccgaatttgttctatgaatttaacggcat

SEQ ID NO: 82739 - DNA, 308 bp, Glycine max
gttgatcgagataactagaaacagtgtggatgtataatgaaagtccttgttttcttctttgctagaattttggtagcatgggagggccatgcgtacgatatgttccctctccgaatgaacactggctatggtgcccgtactccggaggtgaaatgcgcaagttggaggcttgctgtggaagcacacaacatctttggctttgagaccattcctgaagagtgcgttgaagcaacaaaggaatacatccatggcgaacaatattgaacagactccaaaacagtttaaccaacaacgctttacttttatcg

SEQ ID NO: 82740 - DNA, 373 bp, Glycine max
cacatatttatttaatatggcaagaccctgcagaaactgaggagatatggaatttctggaatcctatcctatggacttttgaacactgcatactgtctcacaacgtttctttttgtgtggtatgtcaacaaatgtgcctcttagttagcttgcagttttgcttttctttttcttagagatctagtttgtataagaaattgtaagtctgtattgagttccccacttcttcctacttatctaccttctcttggcaagggtggttacttggagttagtcttcctcatgcctactattttttaggataccttattcacaatctctggatccttctaattattttgagggtactgtaactaagaatacactttatttt

SEQ ID NO: 82741 - DNA, 391 bp, Glycine max
gtagttttggtagcatggccatgccatggcgcatgctaccaaaggttccctctccgaatgaaaactggctatggtgagcgttcttcggaggtaaaatgcgcaagttttaggcttgctgtggaagcacacaacatccgagcctttaaaaccattcctgaagagtgcgttgaaccaacaaaggactacattaatggcgaacaatttagatcagactctaaaacagttaaccaacaagctttcttttatgctagtgaacgcgaagtccatcacaacgacatatttatattcggcatagataacaccgtactctctaatatcccatactatgaaaaacatggatatggggtggaggaatttaatgaaaccttatatgatgaatgggttaacaagg

SEQ ID NO: 82742 - DNA, 130 bp, Glycine max
cccacgcttccgttcttttcattcccttcaatgcccttacaccccatggggggggctataacacacactttcagggaggagaacactgtgagctgcagtatcatgtaaaatattattattagtggggact

SEQ ID NO: 82743 - DNA, 108 bp, Glycine max
  unsure (1)..(108): unsure at all n locations
ccggaanggaaggnccgcgccgacccacgcgtccgattttttttgcaactacattatattcaatttacacaacacaacacagattaatggggaggttgtttgtcgcga

SEQ ID NO: 82744 - DNA, 176 bp, Glycine max
aatcctattcctcccggaccctgtatagtatcagtatgaacgcgatatgatgattatcgagagggagagactcctcattgggaggcagatatgagatacttccttctttatctttcttcacagcacctaacaaaatacttgacaaagcatgggcgccgactactacaagatttttc

SEQ ID NO: 82745 - DNA, 155 bp, Glycine max
cccacgcgtccgctctttctctttcttttactgcttcttcactttctctcgtttcaatcgaaaaaaatcatgggcagaaaattttttgtcggtggcaactggaaatgcaatgggaccactgaggaggtgaagaagattgttactactttaaatga

SEQ ID NO: 82746 - DNA, 273 bp, Glycine max
cccacgcgtccgtccacgcgttctgctgttgactccacttattcaccaatttaggctatatgcaatcaaatttgcaaaacccaagtttgaaaccttgataaatagttgttccagattggcatcaaaagtaagaaggtgcacaattcgaccttctccactataatttgcaatgacatatatcaaacagtgataccaactaggagtgacatgcagcaaattcacactgcaaaatttacaattaagagtctcattgttgtaggtggtagagaattt

SEQ ID NO: 82747 - DNA, 298 bp, Glycine max
aaaaaaaaaaaaaaaaaaaaaaatttatttaaaaaaaaaaaaaaaaaaaaaaaaaaaaaaaaaaaaaaaaaaaaaaaaaaaaaaaaaaaaaaaaaaaaaaaaaaaaaaaaaaaaaaaaaaaaaaaaaaaaaaaaaattaaaaaaaaatattaataaaaataaaaatataatataactatgttaatatattataaataaaatttattatattaaaatattacataatattatgggggggttcttaatgaactccctttttaattccttttttgtttttttttgtatatttgttattttt

SEQ ID NO: 82748 - DNA, 400 bp, Glycine max
cccacgcgtccgaactttttagtcccttttagttaaaaaaaaaaaaaaatacatctttgagtccttccctcaatatggcattaatgggatgtgcgactgacagatgttttgcaatttgtggtggtgtttagccaccagaaattgattttagcatttttgaacatcaaacacaatttctagaatcttgtaaagaaaaaaaactgcaatgcattccaaaatcccaatttccagatttacacaaatctgttttctagattcacaacaatttgaaactcccttgtgaaaccataaaacccccatcagattccacaaattcaacacttccaaatgtttccacagtatgctctttgcaatcaacccctcatcactcatgactacgatctggagccccttcctttta

SEQ ID NO: 82749 - DNA, 136 bp, Glycine max
agaaagtagcaaagatgacaggtttgtttagtctaaggaaggggcaaaagacaaaggggccagttttgttaatgcctaagccttcattggacttcaatactataaacattccttgtataggcactgctacactcac

SEQ ID NO: 82750 - DNA, 306 bp, Glycine max
gtcatcaacccgcgccttgccggtctgtttatacgtggcggacgcgtagcgcgttcggtacctgcactctaaaaggcgtcacggtgccggaagaccactcgccttttatgatcgacgaatatccgattatcgctgccatcgtcaacttcctggaaggggcgaccgagatgaacggtcttgaagaacttcaaatctaggaaagcgaccgtctattggacgttatcaatggcctgaagtataatggccgtggattgtgataagggcaagactgctgctcgtttatgcgtggtacgcccttgatatgta

SEQ ID NO: 82751 - DNA, 372 bp, Glycine max
gtcgatgtcactagtggcattcgcagctccaaattgcaatttctcgcgcgaactttgcgaggtctagggttccccgactgccatggaccacgccggattaacctacggacaggttctgaggagggacatcccatgggagacctacatgttcaccacgctaatctgaggccccaaccttcaattattaaggtgctacaatcatctgccacagagtcacagaggacatttgctagacgattatggagcctcttatgttcgcgtgtatggtcgggttttgcgtgacattcttaaggaagataccgtggagatagtttggcactttatatatgaaatgcttgttgcaaaccctaacagagcatgactgttttatga

SEQ ID NO: 82752 - DNA, 322 bp, Glycine max
  unsure (1)..(322): unsure at all n locations
ggccaaatattccattctctctgcgtatttccctacctctccctttaagtatgcagatcttcgncaagaccctcaccggcgagaccatcacccttgaggtggaaagctctgacaccatcgacaacgtcaaggccaagatccaggacaaggaaagaatccccccggaccagcaacgtctcattttcgccggaaagcaacttgaggacggcccgacccttgctgactacaacattcagaaagagagtactcttcacctcgtcctccgtctccgtggtggcatgcaaatcttcgttaagacacttacccgcaagaccataaccct

SEQ ID NO: 82753 - DNA, 249 bp, Glycine max
acggtttctgcactctcttcctcccatcgtattcctttatctgcgcaggagaagctgatacggaaaggattttgctagtatggcgttgggcgaatactcaagaagcgacgtcaactggagttaacccacaattatcaccatcttcaactatagggacacctctcttctggattggtgttggtgttgggctctttgcactgctttcagtggtagcttcaagattaaagaaatatgcaatgttacacgctt

SEQ ID NO: 82754 - DNA, 235 bp, Glycine max
  unsure (1)..(235): unsure at all n locations
acccacgcgnacgggccaagcngattanaaangagaaagctttcatctttgcaaagcgcacccccgcgctgcgggggtcccttgttgcttgggagcacccactcatatgctacttctactgcttcacgaacaactcaagattcatggaatgaatatttgcccaacacaaatctaaatgggcatgaacataaagcccacatccgatttcctcatcactaaccaacactcaacaaac

SEQ ID NO: 82755 - DNA, 177 bp, Glycine max
atctctgttgatttgatgcaccatgggcatggctgtcatttcacatgttattacacattgttccactacattggagtgattatgtttgatacttatgggaatacatatattataacgggtgtgtataatacaaaaaatatatacttatacaaataaatagggggggtttttttatat

SEQ ID NO: 82756 - DNA, 351 bp, Glycine max
ttctttctttttctgtgagcctttctttcaggttcttaacttgatcagtgtgcagtgtccaaatcataagggtagttgcaaattgcaatggctaagcatgatgttgagggtggttccttctctgcaaaggactaccatgatcctcctccagcaccgttgattgatgctgaggaactcacacagtggtccttctacagggctttgattgctgagttcattgccacaatgctcttcctttacatcacagtgctcactgtgattggtttccaaaacccagagtgatgtaaaggctgggggtgatgtgtgtggtggagttggcattcttggctttgcttgggcctttggtggcat

SEQ ID NO: 82757 - DNA, 413 bp, Glycine max
ctataagctagtttatcgtgaggagaatatgaagttgtttgttttctttgttgctgcagtagttttggtagcatggccatgccatggcgcaggctaccaaaggttccctctccgaatgaaaactggctatggtgagcgttcttcggaggtaaaatgcgcaagttttaggcttgctgtggaagcacacaacatccgagcctttaaaaccattcctgaagagtgcgttgaaccaacaaaggactacattaatggcgaacaatttagatcagactctaaaacagttaaccaacaagctttcttttatgctagtgaacgcgaagtccatcacaacgacatatttatattcggcatagataacaccgtactctctaatatcccatactatgaaaaacatggatatggggtggaggaat

SEQ ID NO: 82758 - DNA, 392 bp, Glycine max
  unsure (1)..(392): unsure at all n locations
tcgagttttgatacaataactaagttccaatgtttatgaacatgtaaagcatcaaagttgcaagtgaagaaattagatgctttacatgttcataaacattggaacttagttattgtatttttgctactactcgttggtcgtcccgttgttttgggactaggtttgtgctggctagcttgctttatttatttcgatttttttttttttattgattttaagggggnaagaaataaaaaaaaaaaggacgagtaaggggtgaaataacacccaccctccatttctagtcccctttggggggggtgttttttttttttttttgccgcgcccgccccccccaaaaaaaaaaaccnaaaaaaaaaaaaaaaaaaanaatgtgttattttttatttttt

SEQ ID NO: 82759 - DNA, 416 bp, Glycine max
  unsure (1)..(416): unsure at all n locations
cccacgcgtccgnnaaaaaaaaaaaaattaaaaaaaaaaaaaaaaaaaaaaaaaaaagggaaaaaaaaaaaaaaaaaaaaaaaaaaaaaaaaaaaaaaaaaaaaaaaaaaaaaaaaaaaaaaaaaaaaaaaaaaaaaaaaaaaaaaaaaaaaaaaaaaaaaaaaaaaaaaaaaaaaaaaaaaaaaaaaaaaaaaaaaaaaagagggggggggcttaaaagaaataaaaaaaactcccagggggggaaaacactaatatttttttttaggaaggcaaaaaaaaaaaaacagcgctcggtgtataaaacggattactgggaaaaaacgggggtgaagcaaatttaaaagtcttagaaaaaaaatccttttttggagaggggcttaaatataaaaaattggcaaaaaaataattttttt

SEQ ID NO: 82760 - DNA, 409 bp, Glycine max
  unsure (1)..(409): unsure at all n locations
naaaaaaaaaaaaaaaaaaaaaaaaaaataaatttataaaaaaaaaaaaaaaaaaaaaaaagaagggaaaaaaaaaaaaaaaaaaaaaaaaaaaaaaaaaaaaaaaaaaaaaaaaaaaaaaaaaaaaaaaaaaaaaaaaaaaaaaaaaaaaaaaaaaaaggggggggcggttttaagggaccaaagtttacgaccgggggcgggggaaaaaaaattttttttttgggggccccaaaataaaataaacgggccggggtttaaaaacggggggaggggaaaaacccgggggtccccaaaataaaaggcctgggggaaaatccccttttcgcaggggggggaaataaaaaaagggcccgaccggatgccccttccaaaaaatgggccaccctaaatgggaattggacccccc

SEQ ID NO: 82761 - DNA, 409 bp, Glycine max
gtttgttgtgagctataagctagtttatcgtgaggagaatatgaagttgtttgttttctttgttgctgcagtagttttggtagcatggccatgccatggcgcaggctaccaaaggttccctctccgaatgaaaactggctatggtgagcgttcttcggaggtaaaatgcgcaagttttaggcttgctgtggaagcacacaacatccgagcctttaaaaccattcctgaagagtgcgttgaaccaacaaaggactacattaatggcgaacaatttagatcagactctaaaacagttaaccaacaagctttcttttatgctagtgaacgcgaagtccatcacaacgacatatttatattcggcatagataacaccgtactctctaatatcccatactatgaaaaacatggt

SEQ ID NO: 82762 - DNA, 114 bp, Glycine max
gcgacatcaacacacatggcaagagcgtcttctgcaatctctagtggtggctcaatggctggccctatgaccagctcatgatgcgcatgctcaccagctaatgcgtcagctaca

SEQ ID NO: 82763 - DNA, 96 bp, Glycine max
  unsure (1)..(96): unsure at all n locations
tcgtccacgcgtctcgtccacgcgtnccgaaatatcttttctatgatacctacattgaaaagactgatggtaactgtaaaaacatacttaagtaat

SEQ ID NO: 82764 - DNA, 401 bp, Glycine max
aagctagtttatcgtgaggagaatatgaagttgtttgttttctttgttgctgcagtagttttggtagcatggccatgccatggcgcaggctaccaaaggttccctctccgaatgaaaactggctatggtgagcgttcttcggaggtaaaatgcgcaagttttaggcttgctgtggaagcacacaacatccgagcctttaaaaccattcctgaagagtgcgttgaaccaacaaaggactacattaatggcgaacaatttagatcagactctaaaacagttaaccaacaagctttcttttatgctagtgaacgcgaagtccatcacaacgacatatttatattcggcatagataacaccgtactctttaatatcccatactatgaaaaacatggatttggggt

SEQ ID NO: 82765 - DNA, 412 bp, Glycine max
gtgagctataagctagtttatcgtgaggagaatatgaagttgtttgttttctttgttgctgcagtagttttggtagcatggccatgccatggcgcatgctaccaaaggttccctctccgaatgaaaactggctatggtgagcgttcttcggaggtaaaatgcgcaagttttaggcttgctgtggaagcacacaacatccgagcctttaaaaccattcctgaagagtgcgttgaaccaacaaaggactacattaatggcgaacaatttagatcagactctaaaacagttaaccaacaagctttcttttatgctagtgaacgcgaagtccatcacaacgacatatttatattcggcatagataacaccgtactctctaatatcccatactatgaaaaacatggatatggggtgg

SEQ ID NO: 82766 - DNA, 392 bp, Glycine max
gataactagaaacagtgtgatgaaaatgaaggtccttgttttcttcgttgctacaattttggtagcatggcaatgccatgcgtacgatatgttccctctccgaatgaacactggctatggtgcccgtactccggaggtgaaatgcgcaagttggaggcttgctgtggaagcacacaacatctttggctttgagaccattcctgaagagtgcgttgaagcaacaaaggaatacatccatggcgaacaatatagatcagactccaaaacagttaaccaacaagcttacttttatgccagagacctcgaaatccatcccaaggacacatttgggttcagtatagatggcaccgtactctctaatattccatactacaaaaaacatggatatgggg

SEQ ID NO: 82767 - DNA, 105 bp, Glycine max
gaactaggtattgcatttgtggtttttacatactgagtttatttatcatttacacttttctttaacataaaaaaaaaatggtttttaagaatttgcgtttttgtt

SEQ ID NO: 82768 - DNA, 432 bp, Glycine max
atcgagataactagaaacagtgtgatgaaaatgaaggtccttgttttcttcgttgctacaattttggtagcatggcaatgccatgcgtacgatatgttccctctccgaatgaacactggctatggtgcccgtactccggaggtgaaatgcgcaagttggaggcttgctgtggaagcacacaacatctttggctttgagaccattcctgaagagtgcgttgaagcaacaaaggaatacatccatggcgaacaatatagatcagactccaaaacagttaaccaacaagcttacttttatgccagagacctcgaagtccatcccaaggacacatttgtgttcagtatagatggcaccgtactctctaatattccatactacaaaaaacatggatatggggtggagaaatttaactcgaccttgtatgatgaatgg

SEQ ID NO: 82769 - DNA, 421 bp, Glycine max
  unsure (1)..(421): unsure at all n locations
gataactagaaacagtgtgatgaaaatgaaggtccttgttttcttcgttgctacaattttggtagcatggcaatgccatgcgtacgatatgttccctctccgaatgaacactggctatggtgcccgtactccggaggtgaaatgcgcaagttggaggcttgctgtggaagcacacaacatctttggctttgagaccattcctgaagagtgcgttgaagcaacaaaggaatacatccatggcgaacaatatagatcagactccaaaacagttaaccaacaagcttacttttatgccagagancctgaagtccatcccaaggacacatttgtgttcagtatagatggcaccgtactctctaatattccatactacaaaaaacatggatatgtggggtgagaaattaactcgaccttgtatgat

SEQ ID NO: 82770 - DNA, 351 bp, Glycine max
cttttctcatagatagccaccttatactcctcggcttcctcgataattttcagtctcattgcttgctctctattccgttcatagcgtggcgcggaacagacaaaaagaaactaccaatttctttagataggcatggctttcaccttctacgccttcaccgtctacagacaaccacttaggcgtccccgtcgtcgccgacaccgtttctggctaccccgacttctcctccttcccctccgacgacgtccgctttaattacgccaacaccacggcgtcgcccgagatacttcggatgcagcgataccgggccagcttatttccagtcacccttcgagctagtacaccgagaat

SEQ ID NO: 82771 - DNA, 356 bp, Glycine max
tccaaccaaaaagggaaattttgcgggtatttgtgagtgtgtgagagagagagcgagcagtttcagacacagagagaggggtttgggattggagggattgacgctgcgtctcttcctcttctctttcgatccatccctcattcctaatcctccaatccaaccacctcagcctcacactcacatatacacatatctgaacgcgtatcgtccctcctatggcttcaaagcgcatcctcaaggagctcaaggacttgcagaaagacccaccaacttcttgcagcgctggtccagtagctgaggacatgttccattggcaagcaacaataatgggtcctgctgatagtccttatgctgga

SEQ ID NO: 82772 - DNA, 167 bp, Glycine max
cttagatcggaggaagagaaacctgcatattccaaagtctgaagtatgtcaagtcgtactagagatattagtgccggctgtcaaaaaacagggtatcccactgaaaagagtcctgcgaatggaactacttatgacaagagttgccgctaatgcactcatggagggtg

SEQ ID NO: 82773 - DNA, 217 bp, Glycine max
  unsure (1)..(217): unsure at all n locations
ccctcgcgtccgccctcgcgtccgggtatttaaaatttttataaaaaaaataaaatattaaaaattttaaaaatataaataaaaaaaattgggaaagaaagttatttttgtttataagatttttttttgtgttggttgaattgttttttttttttttttttgtggnnagttttttttttttttggnagtttttttataatgttttgggttggttttt

SEQ ID NO: 82774 - DNA, 433 bp, Glycine max
cccacgcgtccgcccacgcgtgcgcccacgcgttcgaaataagagcagaggcggaggtagtgactgtgctatctgcgacctaggattacgagcccacctatgtatcacgctgctctgcttgacccattaatgataactgatgctgcaacaccaaaatcacttcattctaaccttgcttcaacagaatctcagagctacggagacaatgtatgataaacatccatgcttcttaagaggaaacacctataaactactcccaaagcgggagcacgggagtgaacaagccaagaaagagattctgcattatttccgtacaagcagatatatgaaaactaggagatttgactaacacataatgtttgaatcacgaatagttcggtcagaaagcatggtaagagtcaagggtcgtattgccaagatggaacatgaacat

SEQ ID NO: 82775 - DNA, 397 bp, Glycine max
ctaagcattccaaaaatgaatagcagctgtcctgttggtttgaattttgttcatatggttgagtgctgcgctgtggaagtcttggtctgtgcctctttctttcattacctttcctcctatatatctcttttttcttcttctcttttttttttcttcattccctctttcttttaccttctttctcttcacttttttttttccttattctttctcttctctttctatattttcttccttctttcctccctcatcatttattctcatatttttcttcctcccctcttttttccacttttactctctcttcacctctctttttcctttctctcttttctttcttcctttttttttctctttccttttttcttccttttcctcattttcttctctatttttt

SEQ ID NO: 82776 - DNA, 441 bp, Glycine max
cccacgcgtccgccccaactgaacatctatttttgtaaatggatctgcggtatatctgatgtaagttttatttcttattcaactctaatcttacctaaccaaaatttaaatcttgtgctataatgcaggtcacaacaattgattgaaaattttgagtccctagataaataaggcatctaaatctcaattttggccagtggagagtgatgaataaggacatctaagcgtgtctttttcctttaacatgctcttaaattccaccccactcgatttcaatgagatttgaaacctccataattgaccatgcaacctggtctgattgaatcatacatactgtaacattatgctactccaatgtgtacgtttagaatgatctgttgtgataaacctttaagtccttgtacaagttttctttcatgcaatcttcctcttagtttggtt

SEQ ID NO: 82777 - DNA, 308 bp, Glycine max
catacgcgtacgtgcaagagaggatatggaatgggaatactcataggcggcagccgaactacataaatcactcacacaggtgatgtgctcaaacgacccggtggggcctcatgctgtaccgatctcgattgctatcataacttgttcaggagaggcagcactggcctaggcggcgtgagtgaggtgctccatggaggaaaagcactcaagcagggcaaacctagggatgggggcatccttgttagcagatcgagctgacgcaacatgtcaagcccagcagccatggcttggtgtgatgagagactcag

SEQ ID NO: 82778 - DNA, 271 bp, Glycine max
gcgagcggccgctcgcgatctagaacgaggcagcaagttgttgaaaatgcatcacttaaaatattgaaagttgaagagaaactatcgaaaggatggggtggagataatgcttatcacgttagtgggtaccgctacttacttgtagatggagatagaaatgtatccagggcttctccagcaacaaaagttacaactttaacaaaggagtccttacttgctatgaataagcttaggcaagaggtggagtttgtgaagagtacagccaacctgg

SEQ ID NO: 82779 - DNA, 378 bp, Glycine max
ggcagaaagcaagctcatcctagagttttaaaaatggcagcagcctccggcagggctctctcttccccatccttggctggcaaggccgtgaagctgggcccatcagcccccgaagtcgggagggtcagcatgaggaagaccgtcaccaagcaggcctcctccggaagcccatggtacggcccagaccgcgtcaagtacttgggcccattctctggcgagcccccgtcctacctcactggcgagttcccaggtgactacggctgggacactgctgggctttcggccgacccagaaaccttcgccagaaaccgtgagctcgaagtgatccactccaggtgggccatgctcggggccttgggctgcgtcttccccgaacta

SEQ ID NO: 82780 - DNA, 432 bp, Glycine max
taccgaccggaagggcgacccaggcgtccgagcagacgaacgaactttcataaacaagaactaggacatggaatctcacttcaaggagggggatatggctatccacgcatacatatgccagccatgaagagggtactgcgagcctagactctgatgcattatgtcctcaagccacgtgcctctacgttcattatgtcttacaaggcaatagagcagcatcaaaagtacccaatcagaagagtttcaggtgagcggcttccatgaaggcagaaaggttgtgacagtgcctcacagcacgctgcattcacacgcctcaatgatggctctctgatgtggccgaggccgccgcttcgccttctctcaagaacttcttgctcagcatcgccgccagtggtgttgttgatgctgccattatcggtgcggaggtcgggg

SEQ ID NO: 82781 - DNA, 376 bp, Glycine max
gagataactagaaacagtgtgatgaaaatgaaggtccttgttttcttcgttgctacaattttggtagcatggcaatgccatgcgtacgatatgttccctctccgaatgaacactggctatggtgcccgtactccggaggtgaaatgcgcaagttggaggcttgctgtggaagcacacaacatctttggctttgagaccattcttgaagagtgcgttgaagcaacaaaggaatacatccatggcgaacaatatagatcagactccaaaacagttaaccaacaagcttacttttatgccagagacctcgaagtccatcccaaggacacatttgtgttcagtatagatggcaccgtactctctaatattccatactaca

SEQ ID NO: 82782 - DNA, 113 bp, Glycine max
attcccaactgtcgatttctattacaaatgcactttaccatggactttatgtgcagatggctattttaagcttacccatgaacttgtttagtttaatccacaaaattactgtg

SEQ ID NO: 82783 - DNA, 380 bp, Glycine max
atagctcacacttcaaggttactcacaccatccaattcaaaatcatccaatcgacatacaagtttaccaaaatcacactctgaccaaaaacaaaaagggccaccacatcagacacacacatctcaccctccttcaaatcaaattaactactagtagtaccactttactttcccttcctctaagctttattattttttctttctctaagtatttttagtgacaccctttttgaatcagatccaaaagaagctactagttttgtttctttctttacggggttttgagccaattatataagttttccatgcacgatttgtgcctagttgagagcatgaggctgatgagtctggcttggttctcaattctactggtgattctgg

SEQ ID NO: 82784 - DNA, 264 bp, Glycine max
ccgggcgacccacctcgtcactctacactcgggccttacacttcattctcggcgtccattcacatacactctcttccagctcgtcagtcattacaatactcactcggtatattgcttccactcactatctacagtagccaaatggagcccatcagagatatgctatttcatgggataaggcagcttatttggccaaggacattatcttctgctagtcttgaataagctgatgtgtattctatctcaagtatgatcaacagtgat

SEQ ID NO: 82785 - DNA, 368 bp, Glycine max
gttgatcttgaagataatgtttaattcatcaaagacatcattcataggaggggggaactacagtcacaagttgggaaattgaaaactcggattgataatgtggttagtgaaaatccaggaaagttctgttctgtaactcaattgagcatgattggatcatctgatggatttaatcattctcgccataattctgcttcttttgttggaaatgacaacacatttccggacaggataacttcctttatcgaaacgactattaagccccatcttgagtttctccaggaaaataccaaggatgaaattcttatacaaaatcaggcagccaatgaagagttgtatgattttgagagtgttagaaatcagtttgt

SEQ ID NO: 82786 - DNA, 368 bp, Glycine max
gtggaatgatatcataacttctgtttccatttttttttcttttctatggccgaatttaccgattttgtcaaatttctgcaggtcatacagagtagagagcaaggttatccaattatagtgtcttcaattccaagagaaactaacgctttatactctttgcgtgacccatctgaagtactaatctttttgtcacggttggcaaaatggaggaaaacctcttactaaagcatgcctttaaattttggttaaggcatgtggatcatcaccagagggagaatttggcagggcatataatagttacttcccatgatggatttggagaattgggatggatcctattttcttttttagtaccttgttggaaaaat

SEQ ID NO: 82787 - DNA, 370 bp, Glycine max
attcgaaacagggaaagcaacctgatctcgctcgttgtcaatggccttacgctgaatgtcgtatattgcgatcaggcctacactatgttcgttgtgcgaatgcacactgactgtaaggggctcgctaacgccttgaacaccgcaagttgcacccatcgttatcaccgcatacaacaatagcttgctttgaaaccacctctgagtagagcaccctatcaccagaggcatacatccaatgatcacaacatagcatcacactgttaatcaactcaccaacacgctctactcgctaccatcgaactctaagatactaacgctgactcatgagctttcattatagatcgcaaccgactctataatatgatatact

SEQ ID NO: 82788 - DNA, 373 bp, Glycine max
  unsure (1)..(373): unsure at all n locations
cccacgcgtccggcatcatcatttgtgggtactttattacccaaccactgcagacaaaccaaacactcagctgntcctgcaagtagatcaggtgctccaagaaggaggagagtgcacttagcaacaacaagagcagagaccatgactactgtcatagaaaaactgggcattaagattgagaggaaccctcctgagtccaagctcactcaactgggtgttaggcaatggcccaagtaatatactacttcttttctttactatataataatatttctctttttagtttccttgtaatttcttttttccatttgatttcaattattctagtggtatttatttagtttctccttttattatgcctatgaggttagga

SEQ ID NO: 82789 - DNA, 254 bp, Glycine max
aaaaaaaaaaaaaaaaaaattatatttaaaaaaaaaaaaaaaaaaaaaaggagaggataattaaaaaaaaaaaaaaaacgccccccactctttaatttccaaccttccttacccatccatgcaacataaataactcttctattgagccacctaatttcgttccccttcccataagattcacaacttctttcctgtgaaaaccctccctttccctctcttaatcgccttccaaaacattctcctttcccctgttt

SEQ ID NO: 82790 - DNA, 290 bp, Glycine max
gacccacgcgtcgtcttttggctgtgcccaatctaatctctaactctttacgactgcttgtaagcccttagcattttacacccattaagaatatggcagcagcagggaaagctccgtgatggaaggagggcaccttcacagaagaattggagggttgcaagaaagaagcaggagctaaaggggggagtagagatgcaggaatgagggctgagaggttattggtaataaagtgatagtaaatggacaaaggctgagaaactgtgggtggtcacagagggggataacatcat

SEQ ID NO: 82791 - DNA, 384 bp, Glycine max
aaacagtgtgatgaaaatgaaggtcctggttttcttcgttgctacaatttggggaggggtggcaatgccatgcgtacgatatgttccctctccgaatgaacactggctatggtgcccgtactccggaggtgaaatgcgcaagttggaggcttgctgtggaagcacacaacatctttggctttgagaccattcctgaagagtgcgttgaagcaacaaaggaatacatccatggcgaacaatatagatcagactccaaaacagttaaccaacaagcttacttttatgccagagacctcgaagtccatcccaaggacacatttgtgttcagtatagatggcaccgtactctctaatattccatactacaaaaaacatggatatgggg

SEQ ID NO: 82792 - DNA, 96 bp, Glycine max
caaaaagttctgaatgcttttaatttgtatcagtatttggaagaattaggaaggtgaacaatctattttaagcctacttcataggtttttcaactg

SEQ ID NO: 82793 - DNA, 274 bp, Glycine max
cccacgcataccgaaaccgttgcgattactgctagatcgccgatctctgggcgtttttttgtttgactgtgaatgacttctctaacctgaaaatctacttcatgatctggtcactcaggctccggaaccgcctctacgtgcttcacaccatgccgacacttaaaccaacacccagacttgagctataccccatcaaccaccacatgaacactagcatattgaccaaccaccaatctaacgctcaattcaatgagtgctaccaatgacatgtgtc

SEQ ID NO: 82794 - DNA, 375 bp, Glycine max
agtttgttgtgagctataagctagtttatcgtgaggagaatatgaagtggggggttttctttgttgctgcagtagttttggtagcatggccatgccatggcgcaggctaccaaaggttccctctccgaatgaaaactggctatggtgagcgttcttcggaggtaaaatgcgcaagttttaggcttgctgtggaagcacacaacatccgagcctttaaaaccattcctgaagagtgcgttgaaccaacaaaggactacattaatggcgaacaatttagatcagactctaaaacagttaaccaacaagctttcttttatgctagtgaacgcgaagtccatcacaacgacatatttatattcggcatagataacaccg

SEQ ID NO: 82795 - DNA, 202 bp, Glycine max
cccaaccctacggaaactcttattcttcatcgcaacggcctgacatatcatggccgctcaccccaccaccaaattatactgatgcaaacaaggcacaatctccatgtccctaaccccacccccctacgaaccttcaaaacttcaaatttcaccccataaaagcatccatcagtgtcacaggaaacgacgctccatatacatg

SEQ ID NO: 82796 - DNA, 253 bp, Glycine max
aaaaaaaaaaaagaatttgtttaataaaaaaaaatttttttttaaaaacaaaaaaaaattaatttaaaaaatatgaaaaaaaaaaaaaatcaaaaaatctttatttaggggggggccatttttaacttttataaaatgaaaaaaaaaaaaaggggcaggaagaaaaaccaaaaaataaaaactaatcttatattgtttttaataataacaaaaacacttgcataaaaaaaaccacttttatttatgaaaaata

SEQ ID NO: 82797 - DNA, 274 bp, Glycine max
cccacgcgtccgcacacatgtccttcatgctgactggtccaaagattcgagagaggtatatgtaggggacataatcaaagtaagagttgagaatatagaggactatggtggctcatgggcatatgcgcttgcttgactgactttatcactttactggactaatacacgtctaacaagtgtcatgggatctaatgcacgatgtcagcgatatgttaacagcaggagatgaaatgagggccaaagttgtaggagttgctaggggaaaatacaaggt

SEQ ID NO: 82798 - DNA, 74 bp, Glycine max
cccacgcgtccggataaattgaattttaaagcctagaaagcttccaaagcagggcaacgtgttttgaggaattg

SEQ ID NO: 82799 - DNA, 110 bp, Glycine max
catttgaagaactttgatgtttgatgggtttgtaataatgtcccttgaaaatggggggggtttgtgttgaactcaattgtgtcccattaataatagtactctaatatccc

SEQ ID NO: 82800 - DNA, 372 bp, Glycine max
aaaaacgtgcattaatagtatatacatgagctttcacaaggtcaatgcgcgggtggcattgcttggcaccacgatcgaactctactataccaaaactatctcattaactctaattaactctttgtacaccatccaactgcctatctttcaaacatttatcattcaaccctactaacatcaaaatctgcttcatttcttatccatactttaatataaaacatgttgaactcccaaagcactatatatcaacacgatactcatgactatattcaatagatgggtacgcgtttgcaaaaagaacgccatcgatcttggcgacgacaatttcactctgtcctactacaccaatataccttaccagcctgttctttc

SEQ ID NO: 82801 - DNA, 302 bp, Glycine max
aaaaaaaaaaaaataaaaaattagatataaaaaaaaaaaaaaaaaaaaaaaaaccgtttttttaaaaaataaaaaaaacaaacccccccctttttaaaatttccaaccttactttccctttcatccaacctcataccttttctttagtgtcacctattttctattcattgcccctccttttccaactttcctcctggtaaaacccttcctttccccatctaaatccccttccattactttcccttttcctcatttcccttattacctaatagtccctcacctttttccctttccaacatttt

SEQ ID NO: 82802 - DNA, 296 bp, Glycine max
cgaagttgcaggtagagcagatttaaacgttatttatgggcggacatggtaatgtcaggtgctttttatccaggtgcacttaatgggctacttagacgtactgtgtctgacactgttctctgtctcaagtcattgcgatgcactcactgctcgagagactggagtactgcagccgcgacagcacagtatcagtacaagagtgtctgcttgcgatttgacggatcgtgcacaacactacgtgaggaagaagactagagtcgatgacatgcaccttgatcatacattcatagtcagag

SEQ ID NO: 82803 - DNA, 349 bp, Glycine max
  unsure (1)..(349): unsure at all n locations
ccggaacggaagggccgggccgacccacgcgtacgtccacgcgtncgntttatttcactgtttaaaacatgagcatataaatgggtacgctttatattatctatctttatattatctataaagggtaaagatatccgatgtgaatctatttgtttagttttctatcggtatgtatataggtgaataatccaacatgcctttttgtgaagtaaaaaaactaccctcgatccatgcctcaaaagggttgataataagtaaaaaaaatcaatgaatttataataaaaaaacgcaaaaaggttttatcatgaattcattgatttttttcccacgcctccgttctagatcgcga

SEQ ID NO: 82804 - DNA, 178 bp, Glycine max
  unsure (1)..(178): unsure at all n locations
ccgtaacggaagggccggcccaggcgtccgnacacttaaagggtttgggaggagggatttcttaaaggttgttgttaggcggcgcgcgtttgtttacattggccccccctcctctggaacatacccttggttccaaaagttaaggcaggggcttgtggcctatgcattggccattggg

SEQ ID NO: 82805 - DNA, 202 bp, Glycine max
  unsure (1)..(202): unsure at all n locations
gaccggaanggaagggccgggccgagcgacgcgtaaaggaataagggccgctccttcctattatcttttaattgctggggacaccttttggcgtgggggcgattgaaagtggcacacaccaaacgtgaaagccaagaccattatgcctgcaacccttcaataaggagtggttttttccttctcggttttctattttggaata

SEQ ID NO: 82806 - DNA, 376 bp, Glycine max
gctagtttatcgtgaggagaatatgaagttgtttgttttctttgttgctgcaggagttttggtagcatggccatgccatggcgcaggctaccaaaggttccctctccgaatgaaaactggctatggtgagcgttcttcggaggtaaaatgcgcaagttttaggcttgctgtggaagcacacaacatccgagcctttaaaaccattcctgaagagtgcgttgaaccaacaaaggactacattaatggcgaacaatttagatcagactctaaaacagttaaccaacaagctttcttttatgctagtgaacgcgaagtccatcacaacgacatatttatattcggcatagataacaccgtactctctaatatcccatac

SEQ ID NO: 82807 - DNA, 307 bp, Glycine max
  unsure (1)..(307): unsure at all n locations
acggagctaacacactggacttttttttcataacttccaccaccgtcgtgggcgggttttactcattattttctgctactccacactacaacaaccgtgtttgaaggactacaaaagtgagcataccatggctttgtccctttcttatgcaatcacaaagccatttttgagggtccaagacagaagcatcatgaactgtgaacttcagagacccaaaaatggnnggggagctacgataaggtgtgaatcaaaagagtcatcattatagttgccagaaaaacatttcaagttggagatagggtcaccc

SEQ ID NO: 82808 - DNA, 88 bp, Glycine max
cgaatattaactgatgttattcaaatctttaatgagacaaagtagggcgggcaatttacttacccaaataaagggaaaatttgtattc

SEQ ID NO: 82809 - DNA, 240 bp, Glycine max
gcacggactactctgaccaatcataaccaaatatttgatggccgcgacctggacaaacagcctgatgtggaatctccaggcccacaacttacctcctgcgtcttgctaactatactcacgaactgttcattccacccgaaatttcactgctactgaactctgccgtggggtggtatccatgggaggctctaggaaggtctgcgttggaggcaagtgctagctatatgggaccaaacactc

SEQ ID NO: 82810 - DNA, 350 bp, Glycine max
ggacaccgtttagaccgatggagaatggttagcgcgcacagaacctacactgccgaggagaagcacgtggaggatcaaatagagcagccactgaatacactcccgaaagatctctaatgtgcaggcctataacaacgaatgtaaactagacagagaggaaaagttcttggacagaccgcgtaacctgcaagccatggctatatattgcgaggctattgcaaaaatggaagaatatcaccgagacataactgagttacaagcctgactggatcatagatacgggcaatgtggaatcacaactagagttgtggtcctctcctcaggtttatcagactttagagcatcaaatg

SEQ ID NO: 82811 - DNA, 97 bp, Glycine max
ctcttccctcgcgaatatcaactgaggaagccaaatttgtaatgagacaatgtattgcagaaatttactgacccaaataaagggaaaatttgtattc

SEQ ID NO: 82812 - DNA, 346 bp, Glycine max
cccacgcgtccggtgagctataagctagtttatcgtgaggagaatatgaagttgtttgttttctttgttgctgcagtagttttggtagcatggccatgccatggcgcaggctaccaaaggttccctctccgaatgaaaactggctatggtgagcgttcttcggaggtaaaatgcgcaagttttaggcttgctgtggaagcacacaacatccgagcctttaaaaccattcctgaagagtgcgttgaaccaacaaaggactacattaatggcgaacaatttagatcagactctaaaacagttaaccaacaagctttcttttatgctagtgaacgcgaagtccatcaca

SEQ ID NO: 82813 - DNA, 352 bp, Glycine max
gcgaaagctaaggaagaggcagaaaaaatcaaagatgtagccagagaaaaagctggtagcagaacaagaaaaggcatttacctcctctttattggcttactgacctttgcaatagttgattctgttgcctcatcatcaactgattggagaaaaatagcagttctgggagctattctagtggctttagtttctcagttcatctacgaacagacaatgtcaatagaaactggaaaaataagaaagatcgataccgaagaggaaaataactgaagtttaattgttactgagattcaatgcaagtttctgtggaagacaaaattataatggatgttgcgtgatgcaataatcccaa

SEQ ID NO: 82814 - DNA, 198 bp, Glycine max
  unsure (1)..(198): unsure at all n locations
gggcgagcacgcgnncagcacacggccgaaaggatatttttttttctgttgattgcttggactatgggtgggtcttaacatactcccaaactcccaatggctttgctttggaaaagcaaaaaaaaaaaaaaaatattggatggaggaagcactgtaaatttcaaaattggcctaaatggatccctattccccccgggg

SEQ ID NO: 82815 - DNA, 356 bp, Glycine max
cccacgcgtccgctagaccatggcattctcgtgagagagacaaaaggggaaaaaattaaggccctctcttctcttaccctacgcacttcccctctcttatcctgcgcactctattattcccattgattccacttcccagtagttagtatcccaaatttccgaggggacccccatccccggcaattcaaccttttttttttcttcagttaaaccgtaaccaacaacaacgttttcatgataaaacgttaaatgtacgctgagacaacttccgcgagtttctctcacccgttacaccaaatggtgtttcccctctccatattcttcttgctgtgtcctgatcttgttggattcgggcc

SEQ ID NO: 82816 - DNA, 344 bp, Glycine max
gccttgaaaaaaaaaaatcaaatatttgtttcaatagctacctgtataattccatgtaacattttgtaacgaatcgggttgctacgttggtatctctgtgttgtaattaaacttcgaattcaaactcaaaaaaaaaaaaaaaaaaaaaaaaaaaaaaaaaaaaaaaataaaaaaaaagaaaaaagaaaaaaaaaacaaaaataaaaaaaaaaacaaagatataaccataacaaaaaaaagaaaaagagaaaaaaaaaggggggggcccttttaggggatcaaagtttacttccggggccttgcgaggtttaatcttttttatggggccccccaaattaatttcc

SEQ ID NO: 82817 - DNA, 348 bp, Glycine max
gtttgttgtgagctataagctagtttatcgtgaggagaatatgaagttgtttgttttctttgttgctgcagtagttttggtagcatggccatgccatggcgcaggctaccaaaggttccctctccgaatgaaaactggctatggtgagcgttcttcggaggtaaaatgcgcaagttttaggcttgctgtggaagcacacaacatccgagcctttaaaaccattcctgaagagtgcgttgaaccaacaaaggactacattaatggcgaacaatttagatcagactctaaaacagttaaccaacaagctttcttttatgctagtgaacgcgaagtccatcacaacgacat

SEQ ID NO: 82818 - DNA, 346 bp, Glycine max
tttcaaaataaattgagggggcttcatataattaaacatttgtttgcaagtttttacaatttaggtgttgtaaatgcaattttaaaccttgattacaaatgaaacagcactagaaatatgccgtgtgagtaccatggagtttttatcttcttaacaattgcttttgtatatcttatttatgatctgttcaataatttaattttctggacataactttggttaattttgaatcctagatattaagcaggcaaccccatctggatgatgagatctacaacaagcttgttcagagagctaaagatgtaggatatgatgtgagcaaactccacaagaccccacagagcga

SEQ ID NO: 82819 - DNA, 341 bp, Glycine max
aaccatgacagctaatatacaaaattgagacgcggctgaacaaaaatgagagtgttgagggtcccttctgatgcacgagagtgggtcctccccactaactttgaagaggctaaggttcaccaactactgttacaccgacatggacgctaaaactgctaacgcacaacttgctcttgtgaaagaaagatattgacgagagatccatgtttttgaaacatcacctctttatcaatcttcaaaggctgggtgctccacactaacgacaagagaccgatgacttctatgactacactgctgaacattatcacagacttttcgctactcaaaacgaagataaattc

SEQ ID NO: 82820 - DNA, 176 bp, Glycine max
gaagaccaaacgcgcaaaatggaaccgcttgagcaccttgctgactgcccactgaagcatgcatctataaatgcatgtctacaccccactgaaatcaacaaaatcatcattgtctatatttcacacaacataaagcctctagttgacgatggcctaatcatattgctaaccaccat

SEQ ID NO: 82821 - DNA, 350 bp, Glycine max
acaagaccgccgctcatgcttcttattaggcgcgggcatgaaaggacctgagtgcacaggtctctagcgttatgctacacttctcatcatgccagaggaggctgcttaacagattgttgcacgcgaaccccacctatctctatgtagctgagctacagacgccaactgtattcttaaagtgctcgggaccacctaagactggaccggagtacacagagccgtgcagatcgtaccttgggaactattgatctacttctatgagaaagaaagatgcgcctgttgattgacccgtaatgtcctataagcccctggcagcactgagagctttatctggctctgcatggctgctt

SEQ ID NO: 82822 - DNA, 271 bp, Glycine max
  unsure (1)..(271): unsure at all n locations
gtcttttatcacacaatgttgggagcgctcattgaagcggtgagatagacttcgggagtggtgattctgggcttcaatctctatcctgtcattgtttttttctcaggaaatgaatacaagtcgtgactgcttcattttcacggatgcgttggagacttcaagcaatcaactctttaaaatagctttacatgactgttcattatgaatttgctatcaggatttatatttaatgaacctgaattttttttgtntttaaaaaaaaaaaaaaata

SEQ ID NO: 82823 - DNA, 178 bp, Glycine max
ggcatgctaacataaagattacgaggctaagagaaagaatcacaggaaggtgcagggtgtaacaggagctgctaacacattatcaatgggacacccaatgctgactttttctcacacacaagactacggtctggactacaatgatccgcttccttcgccattagttcacccgccggag

SEQ ID NO: 82824 - DNA, 125 bp, Glycine max
cctaggcttccggggagtatgatcatctgaatatcggatagcatcgtgattgagtggagggaacgggaaggatatagtggtgcatattgctgcgcatggggaaaacatgccctcgatatcttctg

SEQ ID NO: 82825 - DNA, 354 bp, Glycine max
tcttctctttctctatcgtaactctcttctctgctctcagatcttccaaaaccctccgttccttcattactaaaatcacttctcttcaaagattctttttctctttctttctcagcctccacttcttttttctttcccgcgccctccaaccgcttcttgctccgtttttcccttcccgcatttcatctcacttgcattttccgctccgtacggaattgttgtccactctgcaattattttccgggaaaaacagagcattctcccgatgacagtaacatttttgtgaggaagtgaagaaaaatggacgatagaggcggttccttcgtcgccgtgagaagaatttcgcagggtctt

SEQ ID NO: 82826 - DNA, 349 bp, Glycine max
ggtaaaacaaaagtttaagattttttttttcttttcttttcttagtttgcgatcttctaattttcaacgctctccactttctctattctttgatgggtcatctccaattacggtttttgtctttggtctttgcttcatttcctgttctgaattctaggttattatactctccaattgttgtattttcaagaaaaaaaatggcataatcatccaaagaaagaaagcatgctgctttggagaacttattcatgtttgtgttctttctttaaagtttgttaaatttaatgcagaacaagaatccatgttattttttatgcagagaacaagaatctatgtatttgaattcaaa

SEQ ID NO: 82827 - DNA, 66 bp, Glycine max
  unsure (1)..(66): unsure at all n locations
cccacgcgtncgcccacgcgnccgaaaccaannnaggggcnctnaaaacaaaggccccncaaacca

SEQ ID NO: 82828 - DNA, 121 bp, Glycine max
gtcgtgggatggtatcacaacaggaacgtgtccccgaacctctcactttgctacagcgtagagccaggatttttcagcaagaagttataaataaactgacgtgggtgtcatggcgctacaa

SEQ ID NO: 82829 - DNA, 182 bp, Glycine max
aagagcttttgttcaaactttctttgttctccattaaggctcacaaattaggggagttgtttcagagatatctccaccaatacaagagaccgttgtaggtaaacacagactaccgtggccacccctgatcgttagtttagacgggaacacatatagcactgctatctaccgatatgttattg

SEQ ID NO: 82830 - DNA, 290 bp, Glycine max
gcacgcgtcaacaaagctgatgcttctcctgcttctatttcgcaggactttttttcactacacaattacttggtttaactcacttggacttagttatctgggttggcaacatactacccacccatattttggtcactttacttacttacaaactctctttagcatgttaacaccctgagagacaggtttcatggttgggaccctcataatgacttgttgccgaaaaggccaatacacctgacctcagtgagcacagatgtcatggggggaagggccgcctagagctttta

SEQ ID NO: 82831 - DNA, 429 bp, Glycine max
aaaaaaaaaaaaaaaaaaaaaaaaaaatttaaattaaaaaaaaaaaaaaaaaaaaaaagggaggggatataaaaaaaaaaaaaaaaaaaaaaaaaaaaaaaaaaaaaaaaaaaaaaaaaaaaaaaaaaaaaaaatggggcgccccttttaaaggttccaagtttccttccccttccttccaacttattaattttttttttgggccccctaaattaaattcactgcccgggtttttaaaacgtcgggattggaaaaaccctgcctttcccaaacttaatccctttgaaaaaaatccccttttcgccggttggtttaatacaaaaaagccccccaccattcccctttccaaacatttgcccactcttattggcaaatgggcccccccttttaccggcctctttaagcccggggggtgtggtggttcccccc

SEQ ID NO: 82832 - DNA, 144 bp, Glycine max
cccacgcgtccgcccacgcgtccgttcaagcctttgattcagtcactaccgggcatgtatatctccaccttagagatattccaccatggacccttgctagctgattatgtttactacctttattgttgtgtttgtgtattacat

SEQ ID NO: 82833 - DNA, 495 bp, Glycine max
  unsure (1)..(495): unsure at all n locations
gtaccggtaacggnacagggccgacgccgacgccgatccggcccatggcttgannagcaattattgtggtttcactccttctttcaaatcacancannctcttagctcatgtgggtactaaactaaacaagtttcaaggtgaacccacgtcttcaaaatattgccaaagcaaccattcaaacctctagtncttatcaaccagactcgtggcaggtcttagagggcaagagcaaaaaaagaggatctttgtgtaaagtgaatggcttgccagattggccactgatggccattatagtagagcaaatggaagggcagagagatttgatcactgagaaaacagtttcccatcttagtgatcaggcaataaaaaatgtttactcttggtacataatgttcaccgtttgggggtgcttattctttggtgccatgaaggatccatattacgactcagaaacatataggggagatggaggagatggaactggcaactggatt

SEQ ID NO: 82834 - DNA, 430 bp, Glycine max
gataactagaaacagtgtgatgaaaattataggtccttgttttcttcgttgctacaattttggtagcatggcaatgccatgcgtacgatatgttccctctccgaatgaacactggctatggtgcccgtactccggaggtgaaatgcgcaagttggaggcttgctgtggaagcacacaacatctttggctttgagaccattcctgaagagtgcgttgaagcaacaaaggaatacatccatggcgaacaatatagatcagactccaaaacagttaaccaacaagcttacttttatgccagagacctcgaagtccatcccaaggacacatttgtgttcagtatagatggcaccgtactctctaatattccatactacaaaaaacatggatatggggtggagaaatttaactcgaccttgtatgatgaatgggt

SEQ ID NO: 82835 - DNA, 374 bp, Glycine max
cccacgcgtccggcctgggattatcaagagaggctttgagcgtggtggacttggctgccgcctggtggaggccttggaggcggtgtaggtgggctaggtaatggagacggtggtggcattggcggtggagcgggtggtggtggttggtttggttatgtgtgttgtggggtgttttggttgttttttttgtttttttttgttttgttttggtttgtgtttttgttttgttttttgttttatttttttttttgttttttttttttttttgttttttatttgttttttttgttttgttttggggagggggggtggggggtttttgttttttttatatattttataattttttatttattttataatgttttaatatt

SEQ ID NO: 82836 - DNA, 408 bp, Glycine max
cccacgcgtccggttctagatcgcccttttttttttttttttaatatagcttatgggttccattcctacctgaaattacaacctaaacatacccttcacaacccatcctccaccaccacaaccacaagatcttacaatcttacaagatgtcataaattactccaaacttcttttattaacactttcgcccccaacctttcccaattccagatctgccttcccgtttaaaaaaatcacggtcgggtcataactccaaaatcagaggggcgtaaaggagaagcataagattctagattaaggaagagaactaataaaggaacacaagattgtttcacccaacgcatttcttttctaccttctggctttttcctcctaaaaacctatggtacccacccacaacatcaaata

SEQ ID NO: 82837 - DNA, 417 bp, Glycine max
ggccgccctttttaaattttaattaaatataaaaaaaaaaaaaaaaaaaaaaaaaaaaaaaaaaaaaaaaaaaaaaaaaaaaaaaaaaaaaaaaaaaaaaaaaaaaaaaaaaaaaaaaaaaaaaaaaaaaaaaaaaaaaaaaaataaaaaaaataaaaaaaaaattaaaaaaaataaaaaataaataaaaatgggggggggctttttatgggatataattttttattatttttttttttttttattttttttttttttgggtagcttttaataaatttattgggcctatttttaaaaaatcttggttgggaaaaatccttgggttttttaaaattatattttttttttgaaaattttttctttatcctggtgggtttttatataaaaattgccattatttttttcttttaataatgt

SEQ ID NO: 82838 - DNA, 269 bp, Glycine max
ccacgctcggggtattggactacacacacaggctatagactgttgcaagcagcctagtcacttactggacttggtcaggcctttgctttacatcactggctctaagcattactcactgtagctcaaaggagcacctataaggattagcataacggccacatggagcggaacccatcatcacttgacgatggactgtcaacctgccgatcagacgatggcccatctaaggacgggggccggcacgtcctttgggcccatcggaagcgcct

SEQ ID NO: 82839 - DNA, 432 bp, Glycine max
cccacgcgtccgggttggtgcaagcacctcaagtaatgatccagagcacaaacaacaaaatccagagagtactgaatctagtcaagaagcaactaggacatcatcaaattctctagaacttccattaagttcctctaattcagtaacactagaaagcagccggagtttggaagaacagaatacaccattgttagagaatgacaaacctaaaaaaaccagcgatattaaagaatttaggacatcattgatacagaatgacaaactacttgaaactaatgaacaaaatatagagaataattctgagtcccaatcacaacacagtgtggtgatgccgaaacaaaatcattctgttgaacatgaggatggactgccaaagaaaatggggagaagggaaaggatgcttgatctgggaaagaagatgagcgagaaatt

SEQ ID NO: 82840 - DNA, 386 bp, Glycine max
aaaaaaaaaaaaaaaaaaaaaaaaaaatttaaaaaaaaaaaaaaaaaaaaaaaggggcgggaaaaaaaaaaaaaaaaaaaaaaaaaaaaaaaaaaaaaaaaaaaaaaaaaaaaaagggggcgccccttttaaagaacccaagtttacttccccttccttccaacttaaaatttttttttttgggcccccaaaattaaattcactgcccgctttttaaaaacctcggaactggaaaaaccctgcctttcccaaactaaatcgctttgaacaaaatccccttttccccagctggcgaaaaaccaaaaagcccccaaccaatcccctttccaaaaattttcccaccctaaatggcaattggaaccccccttttaccgccccttaaaccc

SEQ ID NO: 82841 - DNA, 433 bp, Glycine max
cccacgcgtccgcccacgcgtccgcccacgcgtccgaaatgaaggtccttgttttcgtcggtgctacaattttggtagcatggcaatgccatgcgtacgatatgttccctctccgaatgaacactggctatggtgcccgtactccggaggtgaaatgcgcaagttggaggcttgctgtggaagcacacaacatctttggctttgagaccattcctgaagagtgcgttgaagcaacaaaggaatacatccatggcgaacaatatagatcagactccaaaacagttaaccaacaagcttacttttatgccagagacctcgaagtccatcccaaggacacatttgtgttcagtatagatggcaccgtactctctaatattccatactacaaaaaacatggatatggggtggagaaatttaactcgaccttgtatga

SEQ ID NO: 82842 - DNA, 63 bp, Glycine max
cccacgcgtccgcccacgcgtccgaaaaaaataaaaaaaaaaaaaaaaaaaaaaagggggggg

SEQ ID NO: 82843 - DNA, 421 bp, Glycine max
tgcactttctttcatggccgttcttttctccaatctcatcagcatcaccaacgacgccaaacctcgcttccctttcagctcaaaacccataatttgtggggccaaacggaacctcatccttcaaactcctctcgtctgcattggcattggcctaactcctcaagtctcagttgcgcaatcttcacctcaagagtcgtcgccgtccaaatcgcttctttctagctttgaaaacacgacatcttggtttcagttctacggtgatgggtttgccattcgagtcccaccagagtttaaggatatcatggaacctgaggatttcgatgctggacagtctctttatggggacaaggcaaagacagactttttcagcacggtttgcatcttccgatggatcagagattctaagtgttgttactcggcc

SEQ ID NO: 82844 - DNA, 373 bp, Glycine max
gacacacgcagactatttatctctacatatggcgctatgtttctcaatttgactggggtctctgatcaaactaacttccaagttctgtaccatctccaacaccattcatttaggatgtactccatgtgaagaataacacctctacacgcttcttgctgatagctggaaataatctgattgaacctgaccttagatcagatcctagagaccaattctccatcaatggcggttgcgctctatgattacatcacatccagatatagtgaccaccacacacacccattaggatctcagatagcgacattttaatgctaccacccaagctagatgtctctttcggatcccgactgacgataacgggggctgacatgat

SEQ ID NO: 82845 - DNA, 428 bp, Glycine max
gatgagtagctttacggaacagctgaaatgtccattatatatactgttttttacttgtatgcgaataagactaatctctaattggataagggataaaatatggaagaaagaaacagggaaggtacaaatggaggaaaaataaaagtgaaaaaaattgttacttagttaagtaataaaaactaaaaataggaggaaaaaggaaatggaaagagtaattgaatgagtagaaaagaataaaagagaaaacaagtaagttgtattaaagaaatttttaggataataatagtaagtagatgcagattgattgatcgatcattgaagaatgatatgtgttgtagggtcattgcctggaaagcaattgtttgtttttatttatgtgtcacgcgaattgtgcattgattacgtgattgttgtgtaacggatggcat

SEQ ID NO: 82846 - DNA, 106 bp, Glycine max
gcgaatctgactaaacaaattgaattttttcaattaacttgtaaaaaaaaagaggagtgaaatggagttttttgaaacatcggaaaaagtagtcgtttatatgaat

SEQ ID NO: 82847 - DNA, 356 bp, Glycine max
gctagctattagttcgatgttgtcgtaagtgaggggccaatatggtgaagatagctcgagtgactttgcatgactatattagcgctctctctttaaaggctaatttcgcagagttccacacaactttgattatgaggtccgctggtgttggatcagccatcgcttacaacgagcttacaaaagatgcagcacttgtatccaacgacgctggaggcagcagctggggcacatgcatacgcactggaaggaggtgtgtacgacaccggctatattttacgcggacatattgacccagcctgaacattttgattgggcgctggggggacataactctcactactggtagaaatactgga

SEQ ID NO: 82848 - DNA, 394 bp, Glycine max
catgaagcttggcacaaagctgaagataaatatgttttgagtgcactggccgttgctggtgtggtggcattgataggctcatctgatatcatctcatcaattgatagtcttcctttaattcctgggcttttagacgtcgtatgcattggctacactgggtggtatgcttacaagaacttcgctttcaagccagacaggcaagcttttctactaaaggtaaatgaaacatatatcgaaatacttgaaagcagcttacatagttaggaatcgatgcttatattcttttcacacaaaaaagatctatctttcagtttttattgaaaatgcaaccttgtcacaatcagcttactgaccattactttatcgcatgtgatgtaatttaacctgaaaataa

SEQ ID NO: 82849 - DNA, 463 bp, Glycine max
gttctagatcgcgatggccatcatttcatgtactagtaactaagattattttgattcataacggtagggagcgtccatgctaaaaaaaaaaaaaaaaaaaaaaaaaaaaaaaaaaaaaaaaaaaaaaaaaaaaaaaaaaaaaaaaaaaaaaaaaaaaaaaaaaaaaaaaaaaaaaaaaaaaaaaaaaaaaaaaaaaaaaaaaaaaaaaaaaaaaaaaaaaaaaaaaaggggggggcctttttaaagaaacaaatttaacccaccggggatgcaaatatataaaatttttttatggggcacccaaattaaaaaaaaggggcgggggtttaaaaaactttaaactggaaaaaaccctgggttccccaaaataaatagccttgaaaaaaaaccccctttgccaagtgggtattaaataaaaaaggcccaaacctatgtcctttaaaaaaatttgccaccctaaaag

SEQ ID NO: 82850 - DNA, 248 bp, Glycine max
aaaaaaaaaaaaaaaaaaaaaaaaaaaaaaaaaattttttaaaaaaaaaaaaaaaaaaaaaaagggaaaattaaaaaaagaggtggagtattataaaaataattattaaataattttatttaaaatatattaatttttttttaaattaattttaaataattttaattttttttaattatattaagttttggtatttttaaatttttaaatttttaagttgttttttttagtagtttaatttttttttt

SEQ ID NO: 82851 - DNA, 285 bp, Glycine max
acaaagataactataatcaatgtgatgaatatgaagtttcataagatccttttgcagccacattagtgggggaatctcagatgcagggatccaatatctaacctcataagaatgaacaatgaatatagggccctttcttcagagcgcatagaacacgactcctgcttactgccatagcacacaacatacctggctatgtgaccattcctatagtgtgcggtgccgcaacactaccttacttgcatgttgaacagtatctaccagtctgacaatcatgtaatcaac

SEQ ID NO: 82852 - DNA, 152 bp, Glycine max
  unsure (1)..(152): unsure at all n locations
gttcgtatatgagttcaactttaaaggggaaggagcccatcnatggggcatttgtaatggacaagaagcaataaacttaacctatatagtctggcttgtttatttaaaaaaaaaataaaaataaaaaatttatattaaataaaaaatatata

SEQ ID NO: 82853 - DNA, 94 bp, Glycine max
acgtcacgcatgctagatatccagaccccccattttttggtttttttcacatgcaagcagctcggggatttaaggaccctcgctgactacaaca

SEQ ID NO: 82854 - DNA, 259 bp, Glycine max
gataataatagtccttcaagtatgtatgcagcaaataatttagaaaaggtgacagacagggtctagtggatgttaactctccatcaaataggttcgtgaataatttgttctcattgggctgtccattatattgatatttgtagtgtattttgatatttgtttttccttttcatattttacagtgtccacttttgaatatggttaatttctttaaccatcagggatcgactaaattaattttacatccattttattgttt

SEQ ID NO: 82855 - DNA, 464 bp, Glycine max
  unsure (1)..(464): unsure at all n locations
cccacgcgtccggagataactagaaacagtgtgatgaaaatgaaggtccttgttttcttcgttgctacaattttggtagcatggcaatgccatgcgtacgatatgttccctctccgaatgaacactggctatggtgcccgtactccggaggtgaaatgcgcaagttggaggcttgctgtggaagcacacaacatctttggctttgagaccattcctgaagagtgcgttgaagcaacaaaggaatacatccatggcgaacaatatagatcagactccaaaacagttaaccaacaagcttacttttatgccagagacctcgaagtccatcccaaggacacatttgtgttcagtatagatggcaccgtactctctaatattccatactacaaaaaacatggatatggggtggagaaatttaactcgacctngtatgatgaatgggttaacatgggcaatgcacccgc

SEQ ID NO: 82856 - DNA, 115 bp, Glycine max
tcgctcccctcgcgcgtgagctctcctcctccctccgctcgcgcccgctcgcgcgccgtcttggcttcgccgcagcggacccgctgctcgcggcgaatgtcgcagcgcgcgtcgc

SEQ ID NO: 82857 - DNA, 117 bp, Glycine max
ttcgagccacgcgtacgcccacgcgtacgtccacgcgttcgcccacgcgttcgagttattctacatacaaaaaaaaaaaggggaggaaaaataaaaaaaaaggaaaaaaaaaaccac

SEQ ID NO: 82858 - DNA, 354 bp, Glycine max
  unsure (1)..(354): unsure at all n locations
gnnggaagctnnccagnnnnncaaccacaccgaggggcgncngggcactaannnagaggacagagcgaaaccgnagccanaagcaaaacacaagacaanacagancgaaannnncagacnccacacncccnnnanncnncaccnccaaggggccggaaaggaancgaaancgggaacgaaannccgaggacgccncggggaaaanagcgaaaaaaaaggggggaaaggaggnanannnannaannnagnngggnanannnaacaanggccncgaccnaanccaaaaaaaaaaaacccncnccgaaanncagcnnncccaaacgaaaacganaaccgaacaccgacgnggaaaac

SEQ ID NO: 82859 - DNA, 59 bp, Glycine max
  unsure (1)..(59): unsure at all n locations
cggaggaggagccggagcacgagnncacggacaaaaggagcgagagggacaggaacgcg

SEQ ID NO: 82860 - DNA, 380 bp, Glycine max
  unsure (1)..(380): unsure at all n locations
cacgcgtncgcattcgtaagacgactatctaatgttatggttggccctataatataaatgggggaaaaaaaaaaaaaaaaaaaaaagggaaaaaaaaaaaaaaaaaaaaaaaaaaaaaaaaaaaaaaaaaaaaaaaaaaaaaaaaaaaaaaaaaaaaaaaaaaaaaaaaaaaaaaaaaaaaaaaaaaagggggggggcccttaaagagaacccaagttaccccccccgggaaggcaaaaaaaaagttttttttgggggcccccaaaaacaaaaaacacgggccggggtttaaaaacggggggaggggaaaaacccgggggaacccaaaaaaaaacccctgaaaaaaaacccccttttcaccggggggggaaaaaaagaaa

SEQ ID NO: 82861 - DNA, 209 bp, Glycine max
  unsure (1)..(209): unsure at all n locations
ggaganngnccannnccccaaaggggccgcgnaaccccggaggagaagaaaannccnnacaaaccccaccncancgancncagnaacaaacccgaacggnnnnngggngngaaacccgaagggaaggngccagnggnncnnnnnganggcaaaagggcggcngannccgacgnaancgngggganaccagaggaaaagnacccagaacc

SEQ ID NO: 82862 - DNA, 162 bp, Glycine max
  unsure (1)..(162): unsure at all n locations
cccacgcgnccgcgaacagagcngncngnnngangggaagncacgaanaccccacgnaaggacganannnangggcagcacacgaccnagnanagngcagnncggnacccgngnncnngacccggnnccnngcnnccacaaaannanaaccganaaaanccc

SEQ ID NO: 82863 - DNA, 332 bp, Glycine max
  unsure (1)..(332): unsure at all n locations
cnaannncaaanggaaanngcncncncaaaacagagggcaagaggaggaagaacaagnanagaaaaaccanancnacanagnnagancncncncncgagaaaacaaacgnagaganacggaacggaggaagggcnacncggangnganannggngcccncgggannncnaacaagcanngggnaccannncnggcnanggcacaaggnncgaacncagccacacacaaccancannggcancaangcnaggggcccgagaaanngggnnaaaggcangangaaggacaangacaagaaaaacanncnggcngnncaancacnaaggaacaca

SEQ ID NO: 82864 - DNA, 349 bp, Glycine max
  unsure (1)..(349): unsure at all n locations
accggaccgatgatatcggtcgacaccacccgnccggaacgtacaatctttattttcccctgaaaattgaatggcatgtgattctttctatttaactcgtgtttgaatgcatccttgtagcaaacctttccttgatgttacatccaaaattgtgagcnnanaaaaaaaaaaaaaaaaaaaaaaaaaaaaaaaaaaaaaaaaaaaaaaaaaaaaaaaaaaaaaaaaaaaaaaaaaaaaaaaaaaaaaaaaaaaaaaaaaaaaaaaaaaaaaaaaaaaaaaanggggggggccgtttaaaaggatcaaagtttacttccccgggcttgcaaagataaaatttttttttggg

SEQ ID NO: 82865 - DNA, 389 bp, Glycine max
  unsure (1)..(389): unsure at all n locations
aaaannncacaaacatactctcacaaccctagnacctnnnaatnngnngancgcgaacctagctaatcaactacctacacttcttggatgatttttagaaggcactgcgttttgcatggctggtgatgcagcatttccctcttacacttccacttgcatgatgaccttcttcttctctttgctcttagctcttcacttcgccatggccgtcccagaacgaagcttctcctctttagcttctataaaagaaggtgcaaagaagaggaacaccatggtagctgcttcaactgctagagaagaaggaagcacacaaaatcttaagacagaagaagccacaccaaaagataaccatgtttctgatcatctcttgaagggtactaaataagaag

SEQ ID NO: 82866 - DNA, 96 bp, Glycine max
  unsure (1)..(96): unsure at all n locations
cacgcgnncgnnccaaacaaaaaaaaaaaaaaaaaaaaaaaaaaaaaaaaaaaaaaaaaaagaggaaaaaaaaaaaaaaaaaaaaaaagaggaaaa

SEQ ID NO: 82867 - DNA, 120 bp, Glycine max
  unsure (1)..(120): unsure at all n locations
caaaaccaccagagaaaacgcgnngaggcnccagcggcagggangcaagcacgncncgcagggcgcnancaagaggngcaagcaggnngagancggnggngacaagaagggaaaaggaac

SEQ ID NO: 82868 - DNA, 321 bp, Glycine max
  unsure (1)..(321): unsure at all n locations
agnngcgncgngaaagaancgcagaaagaangaaggcggggcaggaannagnncccagcagcgggaagacggacagagcggcgangcccgangaaanngnngaccangngaagnnccnaaggcnccaggnnaagggcccgagcangagnagaccgggaggagcnggngcagnngcncagcnngnngcngangnnccccnnncngcagnggagggggaccaggacanagaaggggnanccaangagcaagccngggacaaggggnccaanganggcacagaacaacagggggcnaagcnaaaggaagaagannggggagcag

SEQ ID NO: 82869 - DNA, 177 bp, Glycine max
  unsure (1)..(177): unsure at all n locations
cccacgcgnccgcaaagggggaggngcannncnctctgctnngcaancaaacnncagcgagggaggacgacnncnnnnataacgacacaacacaaannnncacgnnacnngaggggacnncncacgaccaannangngganccaccacaaccaggancaaacnngcanagcancccc

SEQ ID NO: 82870 - DNA, 68 bp, Glycine max
  unsure (1)..(68): unsure at all n locations
aacactaggcactcnctanncccaaacatcgcagaagaaganggaggcncaccccgacgncccacgcg

SEQ ID NO: 82871 - DNA, 385 bp, Glycine max
  unsure (1)..(385): unsure at all n locations
nccacgcgnccgcngagaaggcancnagaacaaagggcggaanccgannnngaaaaccggagcgcgnaaaangaacggnaccccgcccncanaaanaaaancnacnacnaaacgcncnncncnnccgcaancaaaaagcaaaccaaacacaacacaaggagaagaaccagancncncnnncncaaancaccaagaanagnngaaaanggggcngncnnncacgaagcngnncagccggcncnnngcgaagaaggagangcgnanncnnanggngggncncgacgccgccggnaagaccaccanncncnacaaacncaagcnaggagagancgncacaaccanncccaccanngggnnnaangnngaaaccgnggaanacaagaac

SEQ ID NO: 82872 - DNA, 270 bp, Glycine max
cgcacgctcgcacgcgtcgcacctcgtttagacgagcggcgacacgcgtcgggaaggtgagaaggagaattgatagaggagtaaagcagaggtaaagctttgacaggagtgcaggataacagaaaaaagaggtgtcaaacatagcgtgagtaaggcctccctagaaatggatgaaattgaggaatttttattgagtggatggagtgttaagaggcgtatgtttttccggtgctgaatttaggcgttattacaaaaaaattcttagtgtga

SEQ ID NO: 82873 - DNA, 142 bp, Glycine max
  unsure (1)..(142): unsure at all n locations
gaggaaacaggagccaaacccnncnggcccccgcnannggaggcaaagnnggcgccgcngnnaccgcnaancccagaagacccaacgcnggagccgccgcngcaccaaagaagncanggcnccccggcgcaagaggcggcgg

SEQ ID NO: 82874 - DNA, 242 bp, Glycine max
  unsure (1)..(242): unsure at all n locations
ggcnggnncaacngaggnganggcnnngaannngccnncncccgcccaagngaagcccnnagggnncncnncaaanaaccccacaaaacnnccagggagcnnnncnnngaagagaaaaganagngacacaacagnagagagacgagggganngcncngccgcngcncaancaccaccaccagcanggccaggaacagcnanncccgagccccccgannncaagacangggangggcaaaaac

SEQ ID NO: 82875 - DNA, 272 bp, Glycine max
aaactagggagcgacaagcactgggaggggaaagagcgatgggaggcatatggcatgggaaccgttggcgctaaaagcctacacgcgttaactacagggggggaagacttgaagaacccacagatggtagtaagggcctaggtgggaagacgcccggcttaataaagggaaagaaggactgacccgacagtgcgatgaaagaatgaaaggagggcgacgaccgcttggataaaaaccagttgtgaaggaaccaaaaaataatgcatcagcag

SEQ ID NO: 82876 - DNA, 409 bp, Glycine max
  unsure (1)..(409): unsure at all n locations
tttcgctccgttctccgtttcaggtggatctcatgagctgtggttaacaaagcgagttggacctaagctcactgttcaaaggagatcaaaccttgtgatcaagaggaaccacacttcttcaattagtgcagaataccgtgataatagaggaggtggaggtggggattttgntgctggctttcttctgggtggtgcagtttttggaactctagcttatatctttgctccccagaagatctctgctaaacgaagatgagtatgggtttcgcaaggccaaaagaccaatatattacgatgaagggttagagaggaccaggcagaccttgaatgagaagataggccaactaaactctgccattgataatggatcttcccgtttgagaggtggcaacaacgtacctgctgcaaa

SEQ ID NO: 82877 - DNA, 324 bp, Glycine max
  unsure (1)..(324): unsure at all n locations
aaccagnnnaagcangaaaggccccnncagngacggcagcngnggcccncaaaccngccccgggcacngnngagaagnccncagnnagaggccnncccncccncncaaggaaccccncnncanncagaggggnggccagnggnggcaagaagancaagacngacaagcccnanggaannaanggnggcanggcnnngagggaaggagnngangcanccggcaggaaaggaaagggaaagggcgnnnaccagnnnngagacaaanacggngcnaangncganggnnacaggccnancnacgacaccaaggacnggncnncaaccg

SEQ ID NO: 82878 - DNA, 115 bp, Glycine max
  unsure (1)..(115): unsure at all n locations
cccaaaccncccncannncnncnnnnccccaaccaacaacnccacncnnnngnggncnngggaggcnnnnggcnaaaannncagcnnccagaanngaaaaaaaangaccaaacaa

SEQ ID NO: 82879 - DNA, 218 bp, Glycine max
  unsure (1)..(218): unsure at all n locations
ccggaccgctgagtcccgtcgacaccacccgtncgcccacgcgtncgcccacgcgtccgcttggctatttcctttgcatgcaactgaaggcaaggaatgaaagagtaacaatcaatgcagtgcatccaggcattgtgaagacaggaattattagagctcataagggcttaataacagattccctattttttatcgcatcaaagttactcaaaacgaca

SEQ ID NO: 82880 - DNA, 136 bp, Glycine max
aaaaaaaaaaaaaaaaaaaaaaaaaaaaaaaaaaaaaaaaaaaaaaaaaaaaaaaaaaaaaagggagaaaaaaaaaaaagaaaaaaagagagggaaaaaaaaaaaaaaaaaaggaaaaaaaaaaaaaaaaaaaagg

SEQ ID NO: 82881 - DNA, 249 bp, Glycine max
  unsure (1)..(249): unsure at all n locations
ggcaaaaaggcancanncaccgggcggcnccanccnnggcagcccagccgcaccaaccggncggcagnagcaacgcaaggagancacncnagngaacgggccaaagccgngaagagaaaaggcagnnangcaangacaggangnagcaacggaaggaggaacccgangnncgccgggcggcggnggggggcggccggcgggggacggagnggcagangagccaaaccaggaaccccagaagccaagaaa

SEQ ID NO: 82882 - DNA, 219 bp, Glycine max
  unsure (1)..(219): unsure at all n locations
cggacgcgngggcggacgcgngggcggacgcgngggcgagcangcaaaaaagcnngccncncgggcagancngnnngngaangaggcannnggnacngcncacagggcacangcancaacagagggngnnacnaaanacccgaagccancngnggccggnnnncnnnngcaaaaggaacnngannacccngnnggggcggnancaagccccaaaaggcc

SEQ ID NO: 82883 - DNA, 326 bp, Glycine max
  unsure (1)..(326): unsure at all n locations
gnggngcngagggnncaaagcagagcagaagngagaggaagagccgaaaagcaangnngaagcggggaccgaaacccgnnaccggggnnagnagggncacaancaagagaacaaaaaananncnnnncnncaacncaaaacccgangncnncaagaggccaaanncngagaccnangncanannnggggaggcgaaaanagaggacnngagcncncagnngcagacacaggcngcncaacagnncaggangccagananggganccngaacggcaaaacaagaagaagcngcngcngcagcagcgcaaccngaagaagagggagag

SEQ ID NO: 82884 - DNA, 237 bp, Glycine max
  unsure (1)..(237): unsure at all n locations
gaaaaaaaaaaagaaaanaaacaaanaagacggancaaaanacgnanagnagcggggaannacgggacaaaaanaaaanccgcgngggnncagaccngggacaacncaaagncangangcnannnggnnngcncaaccaacaaannannccgagaananacaagaaggaaaaaaaanacgaganngnancaaaaannananacaaaaaanaanaagaananccccngggggggaggg

SEQ ID NO: 82885 - DNA, 271 bp, Glycine max
  unsure (1)..(271): unsure at all n locations
aaaagagaaaaaaacaaaaangcngaggggcgcngcnagcgcgaagacaagggggcgaacggggacgnnggaggcgccaccanngggganaagggnncngccnnggcgcaaccacaagagggnggnggaccacgacgaggaccaaggaagacggggggcacccaacggggaggaccacccccgcggaacgaggcgaagcggaacggcagggngnggngacggcangaaaccccagaaaaagggggaagacaaaacggggaagaacgcagaa

SEQ ID NO: 82886 - DNA, 241 bp, Glycine max
  unsure (1)..(241): unsure at all n locations
gaggaagancaacangcagagaagcaaccccganggggcacggaggcagaagagacgcccacggacccccgaagaaggnggncncacgcaaagagcagcgagacaggggacggacaagcaagaanacggggcaagaggggaggaacaaggaggggacagaacanaggcacccaccagagcannacagacaaanngccagacgaaagagaccaaaccaaccaacgaagaaggagaaccgagg

SEQ ID NO: 82887 - DNA, 98 bp, Glycine max
  unsure (1)..(98): unsure at all n locations
cgggagaagggngncaacggcagagcgnncgggcgnnncagnnacaacncaagggcncacccacgcggaggaggcccacaagcgncgagcgagcgccc

SEQ ID NO: 82888 - DNA, 207 bp, Glycine max
aaaatcaagatatacttaagcgattttttgacaaaagcttggcttggtgtggggctggcttacttaggctgtgagagctggacttgggaaaaccatgcctgcccttttgaagcgcactgggtgctgctctagccatctgatcttacacaacagatgcaattggacacatatcctggcagacgtactgaggaagagggataagggact

SEQ ID NO: 82889 - DNA, 250 bp, Glycine max
  unsure (1)..(250): unsure at all n locations
gagagaagaaaacgnnggnnggagaacannaccggaaagagaannnnngnggagggcagaaangnnnagcanngnnngcgcacaccaaagcnnccncaccaacgcccnnannccacnaacgcacaacccaaagnncaggaccaccgnnacccccccnncnncacccaaaaccgncncnngcagnnccccacaacangaacagcaacaancnccaaggaagaagaangagaacaagnnagcaaagnnggca

SEQ ID NO: 82890 - DNA, 336 bp, Glycine max
  unsure (1)..(336): unsure at all n locations
cccaaanncacncaaaanncaaggggcaaccaagaagggcagcaacaangncgggncgcggaaagggngggaagggnnnaggaaagggaggagcaaagaggcaacgcaaggggcnccgcgacaananccagggaaacacgaagcccgcganncggagaccggcgagaagaggnggcgngaagagaaacagcggnnngagccacgaagagaccaggggcgngcncaagancnggcncgagaacgcgaancgcgaagccgcgacggacacggagcacgcaaggagaaagacagagacngccaaggangncgangacgcgcccaagaggcagggaagga

SEQ ID NO: 82891 - DNA, 393 bp, Glycine max
  unsure (1)..(393): unsure at all n locations
gcagnaatatgggctcagatgaggaagnggatgaagataaangancagaagcaacgccgancgagggatagctagcgaaactattctttgtgatctgatgaaaattggactgctttgttatcctctatctggaaaaaatttgttgatgccaaatttcttagatagaagttgagcatagagaagatcattccacgtgtcaggcaaccctgtaagcaccagttgcttgaactcctggtggcatgaggtgaaagcgtccaataactgtactcgtaatgctgcgcgtttaactatcctggaagtaccattgtacagaggctatgtgggcacggaattgggtgcactaaaaaacggactgtgacatatgatctgagaactgattggactgtgctttta

SEQ ID NO: 82892 - DNA, 460 bp, Glycine max
gatcgagataactagaaacagtgtgatgaaaatgaatgtccttgttttcttcgttgctacaggtttggtagcatggcaatgccatgcgtacgatatgttccctctccgaatgaacactggctatggtgcccgtactccggaggtgaaatgcgcaagttggaggcttgctgtggaagcacacaacatctttggctttgagaccattcctgaagagtgcgttgaagcaacaaaggaatacatccatggcgaacaatatagatcagactccaaaacagttaaccaacaagcttacttttatgccagagacctcgaagtccatcccaaggacacatttgtgttcagtatagatggcaccgtactctctaatattccatactacaaaaaacatggatatggggtggagaaatttaactcgaccttgtatgatgaatgggttaacaagggcaatgcaccggcactg

SEQ ID NO: 82893 - DNA, 465 bp, Glycine max
cccacgcgtccggtttgttgtgagctataagctagtttatcgtgaggagaatatgaagttgtgtgtttgctttgttgctgcagtagttttggtagcatggccatgccatggcgcaggctaccaaaggttccctctccgaatgaaaactggctatggtgagcgttcttcggaggtaaaatgcgcaagttttaggcttgctgtggaagcacacaacatccgagcctttaaaaccattcctgaagagtgcgttgaaccaacaaaggactacattaatggcgaacaatttagatcagactctaaaacagttaaccaacaagctttcttttatgctagtgaacgcgaagtccatcacaacgacatatttatattcggcatagataacaccgtactctctaatatcccatactatgaaaaacatggatatggggtggggaatttaatgaaaccttatatgatgaatgggtt

SEQ ID NO: 82894 - DNA, 391 bp, Glycine max
cccacgcgtccgcccacgcgtccgagcataatcatgatcatattttctgaacctctcaatgcactgtggactatccaagtgatcaagaccatcggtgcatgacatcttagaaagcttaacgcaaattcaggaacttgtgactgaaaagatggtcatggtctcaaccatcaaattcctagcgtaaaacagatggttttttggggtcataattacgtgttaagaggcgctatttatacgattcagtatactgattgcaaagtgcatcattgccacccactaacttattctgcatttcacattcattctagttgtttaagtactataaagaaagtccatgatataatactgtctctgtttctttttaattatcagattttttatttatttatct

SEQ ID NO: 82895 - DNA, 320 bp, Glycine max
cggccggatcggtcgcccacgcgtcgatgactcaacccttacccaccaactttttttaattcaaccaaaccatgccttgttttacttacacttatttagttggttctcaagcgtctgcaccattctttttttgaccttgttcaaattgccataacacctgtctgcggctgaaatgggacttggcactattggattgtcacggcattaggaaataaggttacttaaggctaagggctggggattacaggactaacacacgctagacttgtgcgctgaagggggaatttaagaccgagatggtttagttaaaagataatcat

SEQ ID NO: 82896 - DNA, 97 bp, Glycine max
  unsure (1)..(97): unsure at all n locations
ggggattggngccattacgggtacgtgggttttcctggtaaaaatcccaattgtcaattagttatgatgagaggtgaaagattaaaaagtaaataaa

SEQ ID NO: 82897 - DNA, 433 bp, Glycine max
cccacgcgttcgtccacgcgttcgtccacgcgtccgtccactcgttcggataactagaaacagtgtgatgaaaatgaaggtccttgttttcttcgttgctacaattttggtagcatggcaatgccatgcgtacgatatgttccctctccgaatgaacactggctatggtgcccgtactccggaggtgaaatgcgcaagttggaggcttgctgtggaagcacacaacattcttggctttgagaccattcctgtagagtgcgttgaagcaacaaaggaatacatccatggcgaacaatatagatcagactccaaaacagttaaccaacaagcttacttttatgccagagacctcgaagttcatcccaaggacacatttgtgttcagtatagattgcaccgtactttctaatttttcatactacaaaaaacatgga

SEQ ID NO: 82898 - DNA, 470 bp, Glycine max
ggtcgaccacgcgtgcggcactctcttacacactccccatggacttcacccaagacttgcactgtctcctatctgagcggacgggggaagctcgtcgccggagaggccatggaattggacctcgacttcgccttccgcctccagttaaaggaagccctcgcggcctccctcgccgcccagccctccttctcctccgtcgccgtcgtcgcgatcatcgaacaacccgtcgtcgtcatccacgatgacgacgtcaacgccatgacgctgcatcgcgaggagctggcgcgtatggagcgcgagatgaaggaccgttagcagagcgaggcggagacgcttaaaatgagagaggaactctgccgtcggatccactactagaaggtggcgtgggagatttccgcgattcccgagaaggactggcagcagtggggtgacaactttgtgatccattctgagagggctcgtcttctttg

SEQ ID NO: 82899 - DNA, 365 bp, Glycine max
gtcaaacttgcagagcaacttccagttacgctctgcggaatactggcagaaatcttccatgatgctgccgaaagacgcatcggtggaaggatgctctccaagcaacacaattagatggctctaggtacagtacggcactggccactgttatggatgtcgatgacaatcatggcggggaccacaacgacatatacctggtccatgtaccacatactcgccagaagacagtattctaattcacgcaagaccttgaagaagctcaggtccatgttccatcataagaagccagagcgcgttgtaattagttcacagacacaccttgctctgcccgggctggcgttgttacatcaactattatgaacttc

SEQ ID NO: 82900 - DNA, 319 bp, Glycine max
acaatcacaaaagtcatgtaaacattggagaatctctaccaacgagaatctcacaagagttgggatcgagcacgcctctcgagttatctccagctccgaaactccatctggcggattctgtagtagaaaaaatagcaatctttgttggattatctgggaaacactcaaacgggttcgctctgaatccaatggcaaatcaaaccggtgtggactctgcaaacgtgggtgctatgaacagactcgtgagaagaaaacaagttgattatggtcattttatcaaaaacgacggacctcatcagcttgacaagaaactatccgc

SEQ ID NO: 82901 - DNA, 186 bp, Glycine max
gttgcagaacatctgtttcgttgttttatatgatgtttggctgagaaagtgtgcaacaactggatacatattcttttagatctaagcaagagtttccctcgtgattgctccaatgtacaaatatccactgtattattggagttatctcttttctctctcttaaaaaaaaaaaaaaaaaaaatatat

SEQ ID NO: 82902 - DNA, 482 bp, Glycine max
aaaaaaaaacagttagatcataaataatttaaaattaaaaataaaaaaaaataaaagaggtaaggtaaaatattaaaaataaccaacataatatatattgtttctcctaaatttaattatcctatcttacattcatatttgtttaataatctttcattttttattattatttccttatctctattcacttgttgttttttttctactcttatatttttaaaacattgtcttaccccaattatatttttttgttaaatattcctctttttcctaattctattttacttaattttttccttatcattctttttttctaatgtatgcaaattcttattttcttttttcctttcctttattatatattaatttttttatttattttttctttattttttctttaattatcttttcttattttcttttttctttttattcctattttttttatttttcatttattttattttatttttgttttttta

SEQ ID NO: 82903 - DNA, 183 bp, Glycine max
cttacaatggatcctactctcatcactgactccacattctctcccgcttactctctcgccgagagtgggcccgtaatgccccatttacctcctaacttacacaaacacatcttcatcaatcacttcaccctcacacacctgacactcacacgtcgcaagagaaaaaactgcttctacaccacc

SEQ ID NO: 82904 - DNA, 479 bp, Glycine max
gtgtgtgtagcaaagggtggtggtgtggtgcttgttgtggttggtggtggagtgcgcaggataagcggcaaagaaggttgagacagaagggtcagctgaaaagaaagaggaggaagtgattgcagaagctgaagctgagaagaaggaggaggtcacagtcacagacacagaggctccaacagagtaaaagaatgtgaagaggggaaatgtgcagtttaagtgagtgtttgagagggtatttttttcttagttgcatcgtgtcttgttgctccatgcatgtcttttctttgtttagtggtctaataaaaagtctaactagggaagggatgagtgatgcgaatgccaaccactcagtacaagaaccacatggcatgtagtctttcaatctgatctattgggtgtgcattggtagctcttcatccaatgaaatatgttatggtccttgggtgattcgatctgcattcaccgtaacttttttt

SEQ ID NO: 82905 - DNA, 483 bp, Glycine max
tccacgcgtccgtccacgcgtccgattatgttgttttatgttcgtgtggctttcttgcctctgacaacattcccctgtgattgctgggaacatgcacatacatatatatttataaaagggttgtgttagagcctagaggctcatttgtttccatttcttcttctctctcattgacacatccttgttgtgctgcatgccttatgcaatatatttgcacatacaataatgtgtgcatatatacatatatatgtatatatatcatttgttagggacatgttaatgtactacaacaaaaacattaacatcatctgaggttaatttgcattttgcaacaacagttactgatttggcgtgtttgaactttgaattcaaatgacgcaattaccttcaaagatcccaaacatgtcaccaagttggccagatttctcttcacaccaccagaagatgcaattgccaactttttaattcggttgctacaacaat

SEQ ID NO: 82906 - DNA, 138 bp, Glycine max
accactcctaacagtacccttaatatattatgcaccatattgacacctcatctgtgcgctaggacgattatgtcataacaactctaacctacatcgaatatcccttcatggcattcaaactttacctgtctttgaagc

SEQ ID NO: 82907 - DNA, 403 bp, Glycine max
acgctttttcaagaaaccaaagaattggagattagcatgtcaaacaactgttggtaaaccagattgcagaggtgcggttgtgattcaacaactaccagagtggaaaggacacgaatggaaatatgcaaagcctggagagtcggactgggagtcggagtaaaggaaatgatatatatataaaacgaatttcttcctaagacatttttgttttcgcttcattgcaaaccatgaagaaagccttggatacctgcaattcgaacataggagatatattctgtttttttagacttcagaggcacttcaagaagaaaaaaaatatggaaaatattgtaaagctcatttgcctttttacgttccttatattttagtgggatccacttattataaattatttagattagtt

SEQ ID NO: 82908 - DNA, 414 bp, Glycine max
tttcactcttacaataaaaacatatgactttgcataaccgctctctgtgaatatgtggactaggtggacacatactttgggcgccaaatttatagagcatcacttattcacacgcatactctcattgctgaaccaatatatgcctgtaaacatgacccttaagacagagactctgctcatgaattgagactactagctgaacatctcaagcatctttaccaaaatcacttactgatacactaaggaatgtacttaccaagggcataaacaattcctaagacaatacaaaccctcatacctattggtcaagggtcgctttcagatttgtatcaacaacacacacttttcttgcaccataggcttggacttgaacagacaagcataccattgctaggtcactgcttcaattattaa

SEQ ID NO: 82909 - DNA, 505 bp, Glycine max
  unsure (1)..(505): unsure at all n locations
agagtttgttgtgagctataagctagtttatcgtgaggagaatatgaagttgtttgttttctgtggtgctgcagtagttttggtagcatggccatgccatggcgcaggctaccaaaggttccctctccgaatgaaaactggctatggtgagcgttcttcggaggtaaaatgcgcaagttttaggcttgctgtggaagcacacaacatccgagcctttaaaaccattcctgaagagtgcgttgaaccaacaaaggactacattaatggcgaacaatttagatcagactctaaaacagttaaccaacaagctttcttttatgctagtgaacgcgaagtccatcacaacgacatatttatattcggcatagataacaccgtactctctaatatcccatactatgaaaaacatggatatggggtggaggaatntaatgaaaccttatatgatgaatgggttaacaagggcgacgcaccggcattgccagagactcttaatattacaaca

SEQ ID NO: 82910 - DNA, 498 bp, Glycine max
  unsure (1)..(498): unsure at all n locations
gagtttgttgtgagctataagctagtttatcgtgaggagaatatgaagttgtttgttttctgtgttggtgcagtagttttggtagcatggccatgccatggcgcaggctaccaaaggttccctctccgaatgaaaactggctatggtgagcgttcttcggaggtaaaatgcgcaagttttaggcttgctgtggaagcacacaacatccgagcctttaaaaccattcctgaagagtgcgttgaaccaacaaaggactacattaatggcgaacaatnttagatcagactctaaaacagttaaccaacaagctttcttttatgctagtgaacgcgaagtccatcacaacgacatatttatattcggcatagataacaccgtactctctaatatcccatactatgaaaaacatggatatgggggtggaggaatttaatgaaaccttatatgatgaatgggttaacaagggcgacgcaccggcattgccagagactcttaaaa

SEQ ID NO: 82911 - DNA, 302 bp, Glycine max
cccacatctccagcgccccatctactatatccattcttacaacctcttacctccgacggcatagctttcttataatgctccctaaattcaatacacttccccactttttacaactcctcaactattaaaaccctgactttccccaacttaatcttctctcgacacatccacttttcgacagatcacctattaacaaatagaccctctacctacggcctctccaacagttccacatccttaatcaccaactgcacaccccctataatcactcattaaaccctcgatttgattaatttactctc

SEQ ID NO: 82912 - DNA, 494 bp, Glycine max
atcgagataactagaaacagtgtgatgaaaatgaaggtccttgttttcttcgttgctacaatggtgggagcatggcaatgccatgcgtacgatatgttccctctccgaatgaacactggctatggtgcccgtactccggaggtgaaatgcgcaagttggaggcttgctgtggaagcacacaacatctttggctttgagaccattcctgaagagtgcgttgaagcaacaaaggaatacatccatggcgaacaatatagatcagactccaaaacagttaaccaacaagcttacttttatgccagagacctcgaagtccatcccaaggacacatttgtgttcagtatagatggcaccgtactctctaatattccatactacaaaaaacatggatatggggtggagaaatttaactcgaccttgtatgatgaatgggttaacaagggcaatgcaccggcactgcccgagactcttaagaattacaacaagctggtgtc

SEQ ID NO: 82913 - DNA, 380 bp, Glycine max
cgttattcgtcgccacgcggcagaagaggagcgcataaaaagcacttggaaaaccctacgaagagcagcctcaggcgaagcacgacccatgcatgcaggtaagatcaagacaggagatcctcggatcacacgtgatttgcgaaagcactgagatggaaggcctggcgttcaacatcaaagataacccttaccttgtctaggcttgggggatatcagccttcctaggttggtcgaaatcaaccagacagagattgcgaaatgcttgctcgctgaccctagctggaactgcgaagagaaggcggcatgaaccagtgggctagagaagacagtaatctgggggaatgtggcttcttcgttgttgctaaacaggctgttggatt

SEQ ID NO: 82914 - DNA, 180 bp, Glycine max
  unsure (1)..(180): unsure at all n locations
ctgggatatagatagtatgcatataacatataccatttttttataacatacatcaaanaagagcatgcatttttatttaaaaaaacatatccaccttaaactctttcactcatactatttaatataagttctcccctcctcctaataactatcatttaatcatcttctctaagcaacttt

SEQ ID NO: 82915 - DNA, 352 bp, Glycine max
gtctcgtcactccttgatttagccctactcttttcaccgccgtggacactttcgggatgggggtagttgcttactactacgactacattctgttccgatagttataacaagatcctgatcttgaatattaatacaacactcattttaactcccttaactacttcttggagcttgaagctcatattagccacaaactactacacctaaaaatagcactatcataatttatacaccttgaagtccaacctacgcaattacatacttgcacccaatctaaaccattccgccttcaactatcacaccaaaagctgcaatgtaactctgtacaaattgcattcacagcttctaattc

SEQ ID NO: 82916 - DNA, 244 bp, Glycine max
aaaaaaataaaaaaaaaaaaaagaatctatataaatataaaaataatatatataaggggcgaggagtaaatcgaggtacccattttatgataaactttccttccatttttgttcctctagtaggcctagtatttccggcaattgcaatggcttctttatttctttatgttcaaaaaaacaagattttttagatacagaaaacaaagtaaaattctggggttttttattccccaattataatact

SEQ ID NO: 82917 - DNA, 204 bp, Glycine max
gtgtcttcccttttccaaatttggcatgtagggtttaaggaggttgaggttagtttctactaattaggaaagatatgagatgacatggtttcagctgagaaaactacctttttgatatatttatcaaattcaatatagccttttatggtttgaactttgaagtgtattttaccttcaagtttattgtagtttgtaatgcataat

SEQ ID NO: 82918 - DNA, 486 bp, Glycine max
cccacgcgtccgctagaaacagtgtgatgaaaatgaaggtccttgttttcttcgttgctacagttggggtagcatggcaatgccatgcgtacgatatgttccctctccgaatgaacactggctatggtgcccgtactccggaggtgaaatgcgcaagttggaggcttgctgtggaagcacacaacatctttggctttgagaccattcctgaagagtgcgttgaagcaacaaaggaatacatccatggcgaacaatatagatcagactccaaaacagttaaccaacaagcttacttttatgccagagacctcgaagtccatcccaaggacacatttgtgttcagtatagatggcaccgtactctctaatattccatactacaaaaaacatggatatggggtggagaaatttaactcgaccttgtatgatgaatgggttaacaagggcaatgcaccggcacttgccgagactcttaagaatacaacaa

SEQ ID NO: 82919 - DNA, 483 bp, Glycine max
caagtagttgagaactaagaaggagaagcatatggcttcctcaatgatctcttccccagctggaccactgtcaaccgtgccggtgccggcatggttgctccattcactggcctcaagtccatggctggcttccccaccaggaagaccaacaatgacattacctccattgctagcaacggtggaagagtgcaatgcatgcaggtgtggccaccagttggcaagaagaagtttgagactctttcctacctgccagaccttgatgatgcacaattggcaaaggaagtagaataccttcttaggaagggatggattccttgcttggaattcgagttggagcacggtttcgtgtaccgtgagcacaacaggtcaccaggatactacgatggacgctactggaccatgtggaagctgcctatgtttggttgcactgatgcttctcaggtgttgaaggagcttcaagaggctaagactgcataccccaac

SEQ ID NO: 82920 - DNA, 482 bp, Glycine max
aagtagttgagaactaagaaggagaagcaaatggcttcctcaatgatctcttccccagctggggccagtgtcaaccgtgccggtgccggcatggttgctccattcactggcctcaagtccatggctggcttccccaccaggaagaccaacaatgacattacctccattgctagcaacggtggaagagtgcaatgcatgcaggtgtggccaccagttggcaagaagaagtttgagactctttcctacctgccagaccttgatgatgcacaattggcaaaggaagtagaataccttcttaggaagggatggattccttgcttggaattcgagttggagcacggtttcgtgtaccgtgagcacaacaggtcaccaggatactacgatggacgctactggaccatgtggaagctgcctatgtttggttgcactgatgcttctcaggtgttgaaggagcttcaagaggctaagactgcataccccaa

SEQ ID NO: 82921 - DNA, 288 bp, Glycine max
ctgatcgcgagggccgacctttttttttttttttgtattgcgctatatttgtgaactagtgtggatgtggaatatgaacatcctagagaggcaacaatcataaaatcatccctgcctcgaaaaaaaaaataaaaaataaataagaataaaactaaactaaaaaaaaataaatagcacaagaataaaaagaacaaatcacttatttctagcattgaaaacaccacatattgcatgcaggtctactgatactgaaaaaccattagaatcctaccctaacttaaggatatt

SEQ ID NO: 82922 - DNA, 99 bp, Glycine max
ctcactctttccagcggatgcatgcataactgcttgcggcgaagccgccttctcactaatgtcccctggttcatttcctcaatcgggcgctaagccacc

SEQ ID NO: 82923 - DNA, 412 bp, Glycine max
cccacgcgtcctgacggacaaatcgaaggtaattttacaaatgaccaccgaacacaagagcgagagagttgtcgaccttaaagaccagcttgacatgcttagccttcagaaatcggttcacaccgagttcaagaacatcgaatacgaccatatgcacatgaggattgctcgcatgcttactgagaagcgtgtaagagaaatcgacgatggtatcaataagaggttccacagatagctagacacaaaacggtagaaaagcatagttgtaagaccacctccatctataaagaagctctctacagcaagaatcagcagcagaagctccatacactgaaaaagctgtatgtgcctacacatctatatgcaagctacagagttcaatggtgaaaattatagatcagtcataattatc

SEQ ID NO: 82924 - DNA, 87 bp, Glycine max
cccacgcgtccggttatatggtggcggataagacaaatgttgttgagtttcgttttaggtagagattgaattctcagttttgatttg

SEQ ID NO: 82925 - DNA, 283 bp, Glycine max
gcgagacatgaaaaagcggcttgtgcagctgtaatccccatttacgaacggccatggacatgggtcgagccttatctggaaacccatccagaacataacgtagacccactgggacaccgcgtgtccactgccataaaacaatgctataaagactatgcatggcaaagtcatctgctccactagcggcaggacctttacaggaaagatggtacgctttgcacagtaccgacagtacatgatgaacgtatggctatagatgattgaccgccacctcacacactat

SEQ ID NO: 82926 - DNA, 475 bp, Glycine max
cccacgcgtccgatcatcttcattactgatctcaacatgacatgtagtctagtgttatgaatgttttaaaacacttgattatgtgtcatgtaggcattagtcggaatgatagacatcgaacatcttggattacctaataatttttccatcatctcctactttaagaatttctaattattatcgtttccttgatttgcttgtgtatttatttgttaatgatgccgttgctaggtagaagtactaaagtttggggtaagagaggtttgttgatatttaattatgtgtgatgacccttgagcgagacgtgactatgaattgtttcaacttcttttgttaaataataatatgaggaatgaggaatggcggggcatgagaactgagaagggggtcagtgaaatgaaatctgtgaatgatgtaactgatgtagacttcgaaatcaatgtctttgaattttgtttttaaaattcatcaatgc

SEQ ID NO: 82927 - DNA, 236 bp, Glycine max
tgaagattccgcaacagagagtagaaaagatggctcggttgatcacagcggtgtggtgcgcggtggctgtgctactgtgcgccgctgcactcgcatcgtggttggaggaagcggccaaccctatacgaatggtggcggaggtggaggaccgaagaattcaggtgtagggctgtgccagcacaggctggagacaagagtgtttactatcattttcaggatctagtccccactactgg

SEQ ID NO: 82928 - DNA, 200 bp, Glycine max
gtttggtcttattgatggtgtcctggaaactgagtattgtatacagtttatttgcaggatatatcttagaggttgaaaatgctaatttttgtcaaattgatattgcagaatttcattcgttaatgataatttgcaaatgtggaggattgtattttcttcttagttccccaaaattatgctattgttgaaagttaacttcc

SEQ ID NO: 82929 - DNA, 247 bp, Glycine max
  unsure (1)..(247): unsure at all n locations
attccggcccacgcgtgcgttttgttcttatttatggtnttctgcttactgattttttttttcagcacattngcacgatatgccggggatgttttaaatgctcatacccctcaccccgtatctccacatttccattctcctatacccattacacaaacatcaaaaaacatgatggtccacagcaccacccaattctgtaactttcttgacttcaaacccgcgaacaaacccgaatccttagattttg

SEQ ID NO: 82930 - DNA, 438 bp, Glycine max
  unsure (1)..(438): unsure at all n locations
cccacgcgtccgtccacgcgttcgcccacgcgttcgtagaaacagtgtgatgaaaatgagggtccttgttttcttcgttgctacaattttggtagcatggcaatgccatgcgtacgatatgttccctctccgaatgaacactggctatggtgcccgtactccggaggtgaaatgcgcaagttggaggcttgctgtggaagcacacaacatctttggctttgagaccattcctgaagagtgcgttgaagcaacaaaggaatacatccatggcgaacaatatagatcagactccaaaacagttaaccaacaagcttacttttatgccagagacctcgaagtccatcccaaggacacatttgtgttcagtatagatggcaccgtactctctaatattccatactacaaaaaacatggatantgggtggaagaaattaactc

SEQ ID NO: 82931 - DNA, 447 bp, Glycine max
cggaaaaaccgggccggaccacacccttccaattggaaccacccctaattggggttggccctccaaagtccgccccatataaggaaatgcggcgaagaactgtaatggcagggggaactaatgaaaatctccttccgaagtttgggaccaaaaccaacctaacaccaaaaagggactattatagttccggggtgctactacttgaaatagtaagtggtcgaaaaccttcacagtcgttgtattaaatcggatgtctaaaactatttaaatggctacccccttttttgcaatgtaattgttttaattaacttttgaactctaaaaaaatatcttccttttctaataaaatccctagggttattccattttaaaaagtttaggacttctttttttttcctcaccaattttttccctatttttcctcttaaatatttaataaatttattt

SEQ ID NO: 82932 - DNA, 457 bp, Glycine max
  unsure (1)..(457): unsure at all n locations
gggcccgaaancccggggcggaccacacccttccggttggtaatgaaaaatgaggatggtagtttttatttaagtaagtttaatctgaaacggggggttttaatttttaatactttggaaccaaaaaatttaccacccaagggccaccataatggttttttcctaatcaactgggcttttttttgaatccttttcttacctcctccaattttaaaacctttttacttggggcctttttttttttttttccttttcctcctcctccttttttttataaattcttccttttttttaataatacactttttaaaattttacacattttgccattaatgctgctttaagaataagtgccagccccgccaaaaagaaaaaggtgttaatggtaaataccaacagcggcggccatgccataatgggtttttactttgcaaagagactttttggggctggccat

SEQ ID NO: 82933 - DNA, 475 bp, Glycine max
acccgaaatgtccgtgggcggaccacacccgtccggttgaccatggcggttgctttaccaagtccaggtgcaccactgaaactgtaaaatgttggggggggcaaaggtttgcagttgcgtaggtgtaaccttaatcttaataagctgaaggttttgggggggtttgggggttgtcctgaattgccaggggtttggtaaaaaagaaaaggaattggatggttagggttccgacattggcgagattatctattttctttgtatggtatcttttcggccaatgcttcctaactgtgtttttaaggcggctttatttgaatttccggtgtttaggtttattgtgcgtttatttatcttttttttaatttctctttttctctaaaatttgtttgtaattttttttccctttttctctaattttaaaagtatttttttatctgtatctctatttcttttctttttttttaagtttttttta

SEQ ID NO: 82934 - DNA, 419 bp, Glycine max
gtttggggtttcctttctcaataactctctttgttgttccgtttaaagggttcaccaggaggctcaaaacggcggttcggggaaggccgttcttgttgttccggggtcgttggtcgttgtgaagccgcagttcctcgtggaggttcccaaggccaccgccccctttttgtttttaagggttgctttgggcgctgaggaagttggccgtccgctcaaccttaagcgcaaggttgagcccgggctccttttattcctttccgaagaactaaaaatggttggttcaaccattttcgtggccgcacctggtggatgccactttttcgccggcgaaaccggggggaaccggggtcgttttgggcttgaggccggaggacgtggatggggcagtacctaaggcggtaggcgctgttccatttgcg

SEQ ID NO: 82935 - DNA, 264 bp, Glycine max
aaaaataaagaaggtggagggggagaatggttttgttttgaaggaagaaatccatttaccgtgcttaaaaacctttttttttttggcggccaatggtttaagcgtttacaattgcaaaggccaacttttgttcaaagttgacttttttggccccgccactcccgacaaaaacaaactccgtctcatggatcctaccggacgtggcctcctaaccgttcttcaaaagcggccaattttgcttaaacgttggaaaggtttcaaagg

SEQ ID NO: 82936 - DNA, 297 bp, Glycine max
ggggtggaccacacccgtccgccacacccgtccggaggaggaagttattttgatttttgagagtggaccccaccaaagaaggggatggattttaatcctttaaacggaaaaccaaaattgggggggatttcttttggttccacccaaggcaattaattcaatattagatgtttccatgaataattttggttgggttatcccatgtttggatgtcctttttttttaacgaatatatttttttaaaagatagtttttggaagggaaaattgtcaggcaaatagttggttgttttgttcc

SEQ ID NO: 82937 - DNA, 404 bp, Glycine max
  unsure (1)..(404): unsure at all n locations
acgggnntggaataccggggcggaccacacgcgtccgcttttgaaaaaaaaaaaagaaataatttttttttttaaaaaaaaaaaccaaaaaaaaagggggaaaaatataaaaaaagaaaagagaaaaaaggggcgcccgtttaagagaaccaaggtttacaaccgggggaatggaaggaaaaagtttttttaagggggaaccaaaatcaaatgaattggccgtgttttaaaaacgttggaatgggaaaaaccttggggtacaccaaaataaatggcgtggaggaaaatccccttttggcaagttggggaaataggaaaagggcccgaacgaatggcctttccaaaaagtggcgaactctgaaggggaaagggaaccccccttgaaggggccatttaagcggggg

SEQ ID NO: 82938 - DNA, 375 bp, Glycine max
cccacccgtccgcccacccgtccggggaattttcttgttggctggccagaaaacattaaacggtggcccaagccttgcgggggagaaaggcttttttcgcaggctgttttccatggggccaaaccacaccagggggtttaaactggccccaggggttggacccaacctttggaaaagagggaccatttgggtttttggctctaactaggaaggttgtcccatgattttttagaaatctggaccagtgttgggtttgcaatccatggtgtgaaccttaaaggcctgaaaggtcccttaactcttggcggacggagaattttgcttttggtttttgcatcggttttcgggttgtccggatattataaattcattttt

SEQ ID NO: 82939 - DNA, 216 bp, Glycine max
ttaacaaccaagggaccggttaccagatcctctattgcatgtgcagataaacggacggccaaggcctcccggttaatgcaaaggaatagtaccacccgtggccccctaaattggggcggcctaatatttaacggattttaaaggtggtttttctaatccaatggacttcaattattaatttaacacaatagtttggaggctggatatttttcaggg

SEQ ID NO: 82940 - DNA, 406 bp, Glycine max
ccaacgcgtccggtttagggttaatttttttaagggggtttgggttccaaagacaacccttttcccccggggggacccggtttaacggccgtgggggaaaggggggaacccaaatgccaaccgggtttaaaacagtccgggattttgagggttttggggcccgacatgtccggggatgaacgattggaattaacccagaattccaagggggtgctggttgttgaagggggattgtttgtcagggttttaaacaaaggagtttttcaattagcgtttggcataaagaggaaaaacaaagcgggggagaccaacatttattgggatggcatttacctctggttaacttacttaaccaagcttgattaaattacccttttgggggggccattgttaacggatgataatg

SEQ ID NO: 82941 - DNA, 294 bp, Glycine max
attgtcgtttttccccgcccattaaaatattttttaagcccagccttgggaccttccaagggaggaaccccgatttgttgtgggaggtccccaaagccaaacttgcacccccgggatcaggaggggctcaacctcccattccaattcctaacggtacccctaatccaaatccaaaccctaacccgaacacgcctaaaacccccaaaggatccaaaggaaaatctggtaagggatgcacttcctacccatcgtttaataaggccaagtccaaaaaccccacttgccttggttttt

SEQ ID NO: 82942 - DNA, 349 bp, Glycine max
cccacgcgtccgaattaaggttttttaaaaataatggcccctaaaacaattttcccaacactttttaagggggtcgaattttttcctttttttttcaacaatagggtttgggaccgcccttttggggtaggttaaagggccagggttaagctggtatgggttctgtttttggaattcctgggcatttccatgatcacacctaaggttttggcaccagattttgcttataactgggatggagggggttttggacctgggggtttaaagacctaacagggcccttttgaatgcacaggaggatgtagccggacacagtaccacaggccgggcatgtttttttgccaaaaat

SEQ ID NO: 82943 - DNA, 359 bp, Glycine max
ccacacgcgtccgtttggatccaacaatgcttttggccccaggcattaaataggatttaaccatttaatggaaccattttaacaggatgcggaattaaagaaaattttggtggaatattgggataacgaggtaatatactaatagttggggggtttaaataaaactaatattaataattaactcaatataggcaactttacgttggggggtttaataatccagttaagatttaagctatcttggataatgttaagggaggatcatattctttggggtggaatttggggtatccaccagataacaggtggtttccggggaatattttgtgttaggggctttaatttattaattgaattat

SEQ ID NO: 82944 - DNA, 291 bp, Glycine max
cccaagagggcttttttcctctgactttttttttttctggctatcctttgggttaggggaactgttgaaggggcaactccaggaagcccattgccaagccaccatgtttaaccattaaacagaggcctttttccttccattttccttttgggaatgggtttttttgtttaccaggcagaaggggcagcaggggaatatggggtgggcccaagcatatggaccacctacatttgacggatttctgaaaggatttgggatttttgcactcgtgccattggagcgttttttttt

SEQ ID NO: 82945 - DNA, 338 bp, Glycine max
cccacgcgtccggggaagggatacccaattttgttgaactaaggtgccatacaaggtgggggtggccattaccatggccatggccaggctagggcggtgcttttaattttggtgttgccactgccactactttgtcaggagcagtaataaggagggggaattggggatttaagggtccccggccgattgggattgggccttggacttggagtttccttctggtttatggccaggcccaaatccttaattgcctcggttaaaataaaggggggaccttctttggatgagatactaaaaattttctaatggcccaagcagttccctttaaaggaggagga

SEQ ID NO: 82946 - DNA, 439 bp, Glycine max
  unsure (1)..(439): unsure at all n locations
aaanccggggccgaccacacccttccaaccctttttacacaaattaatttaaattaataattccagttttaaatgcccttacacctttgtcaataataataaaaccttggccctaaaatattaatccaactcaaaattaacccttttcccaataaattattaattttattccatttttacatctttcttgaattaatacttttattaatatttatttaattaaatgttctttttaatttttatttttttttttatctaatttaaatttttcttatctattatatattatttttatctatttttaatttttttttttatttttattatatattatttatctttttatatttatatttattttatatttttatataatttattttcttaattaaatcttattataataactttttattatacttatatatatttattatat

SEQ ID NO: 82947 - DNA, 298 bp, Glycine max
cacacccttccgttttggttggtaaaagatggaagggctttgtatattctaatccttgtttctgccggattgggggtgttttaaacttaaaggggcttttttaaatattccttttatttttaattttttatttaaattataaaattttaactttttttaatttttcaaatttttttttatttttaaatttttagtaatttttattatttttttaatatcatttgttttttttttatattataatttatttttatttttttttatttttttataaatttttttaattattttgttttaa

SEQ ID NO: 82948 - DNA, 407 bp, Glycine max
cggggcggaccgaggcgtccgaatccctttcaagggcggccccttaatttttttttgttttaaactttttttcctccccctgggggtttttttctttggcaacgtggtcccgccgtttttttttcttgcttcaaccttaacaccaaccttccaaaccctttttcttaacccttaaatccaaaccctctgccgccatggccacatggtttttggccaggaggggtcaggtggtggtcggggttggcagggccagggaggtaattgccggggttaataggtccgccgttaatgccggggggaccatcattagggggcccatgactaaggcctctattttcccccatggggcggttggggtttttggggcggcaatggggatgtttatactggttttttccggtgtcggg

SEQ ID NO: 82949 - DNA, 285 bp, Glycine max
ggccaggtggggcttatatgaccctattttttccggggatcaaatcatgagggttgggggattgaaaaagttggatggggcccaccttcttaattttaatccattgattccaacttctaccaaccaagtttttttggtctgggatgcctatggggcaatcaaggtttcccatgcctccctttttcttggctttgggtattagttttaatatcctggtttcctataggtgttctttattttttctatttttcccttattatttttcttggacaatatttttttttt

SEQ ID NO: 82950 - DNA, 280 bp, Glycine max
ccaacgcgtccgggggtggggaactaaattttccagggagttggaaacaactttttaaggaagccgttttttttgggggggtgggaacaatgcaatgggatatataaacctgaagttttgaacatatttaatttttgttttccggttgtgaaaaaacttgtttaaatgacaagctttgggggaatcaattaaaaatggggttaattgtgaatggttacattgttaaccgccatttaaaaattgggggaaacaaaaagtgattatttttatcattattttt

SEQ ID NO: 82951 - DNA, 266 bp, Glycine max
aaaccaccacctttaaaaaggcaaacttttttaaccttggctgcccccaccgttgtgcggtggctctaaacaaggggggggtcccattttgccattttccttacaaattggaaggcccaacccttttaacctgtttactttctgtccaggtttgcaattggggagcctgacacttaaactggggactacaactttgggttttaagtgtttccagggaaggcttgcaaacctgtggatgggtatgcctctatgtattaatttttcct

SEQ ID NO: 82952 - DNA, 410 bp, Glycine max
cccacccgtccgaaaaaaaaaaaaaaatatttttaaaaaaataaataaaaaaaaaaaaaggggaaaaaaaaaaaaaaaaaagggggaaaaaaataaaaaaaaaaaaaaaaaaaaaaggggggggccgttttaggggtccaaagtttatttcccggggtttgcaacttttttttttttttttgggttccccaaaattaaattaattggccgtgttttaaaacacttttatcgggaaaacccttgggttacccaaatttattgctttggaataaaatcctctttcgcccggttggtttattacctaaagggccccccccattgcccttttccaaaaattggccaatctttatggcgtattggacctcccctttatccgttccattattcccggtggtttgtgtgtttccccc

SEQ ID NO: 82953 - DNA, 344 bp, Glycine max
agcagggcccccaagggcaccaggatttgtttcgggtccagttccaaattttggaacaccgatggcgcaacaacaaccgccggcggaggcgaccagagtttcaatttccgccagtcgggggacccgccgccgaagttgatcggccacttctttaaaaggcaggaagcctccggcaggatgcagttggccatggatttggagatggaggacctgaaccccgaaggcaacaccggaaagtaaacgccgggggttgaatttccgttgactaactgggtttgaggggagctaaaggtttccttgggggaacctacctgcattgggaatttcctggaagcgcaaaacaa

SEQ ID NO: 82954 - DNA, 271 bp, Glycine max
ccacacccgtccggttggtaaaagggggctggcgtttttttaccttggcaggactgatcaaaaaggaataccttgccgcttagtggttggattagttcctattaaaattggggtggaaaaagttagtaagatccatattggggggatgcaccatcaaatttttttacattaaccactattttcgaaggcccaacacatttttaaaatcggggaataatcaccttaagaagttcgggccaagggcaaagatccggagggacaatgcgaccat

SEQ ID NO: 82955 - DNA, 405 bp, Glycine max
aagctatggccattgattggttggctccaccattttttcttggcagataataattaatttaagtcctggggctggtaacctgtggatccatgatcatggactaaggggtggcggaggaacgtcccctgccaaaataagcctaatggcctcccaaggtggatataccaacggtggttccttttcaactgggggcaccactgccaaattggccggttactttccttccagggccggaactacctgcagtacctaaggtcccaattcctgaggtaatagtaattaccgccaaaataatccctggggtcccaaggacctatccagccactactactaatttggcaactggctaaataaactggtggtggccatcccaggggggttctggtttggtgggggtttaatttt

SEQ ID NO: 82956 - DNA, 256 bp, Glycine max
aacacctatttgattaattttagaaactggtatgtatgggaacctcaaggatttttcctaactgtgcttcctttgaaggcagggcgggttcctccgccactccaattttcggttgtggttactgtgtcataccgatacaaaagttcaggcctggtaaaactctaaaaaaaccttttttttgggtaaccaaaataaaaattaatagcccgctttttaaaaactcaagattgggaaaaccccggtgtttcccaattta

SEQ ID NO: 82957 - DNA, 217 bp, Glycine max
acacccttccgcccacgcttccgtttgaatccaggaaattatatataaatgaagactaaaaacaattgggagagattttgaaaatggtttgggggggattttaaattaacgctcctaaaggtaaaccaggctttttatgcccgttacaaaatgtcatttaaagaggccgttgcttttaatcttaaggggggcatccgccggttttgggcccctttgg

SEQ ID NO: 82958 - DNA, 142 bp, Glycine max
ggaggaccaacccaaccgaaggaaggaaacaaaaagaaaacgaaaaagaagaagaaagcaaaacacaacaaaggggggaaaaaaaaaaaaaaggggggaaaaaaaacaacgacaaaaaaaaaaaacaaaagaaacaaagaaa

SEQ ID NO: 82959 - DNA, 279 bp, Glycine max
aatggatcctttgggggggataggaaaaggtggttggggcagttttaaaccccatttttgaacggccatggccatggttccggccttttttggaaacccagttggggggggactaaaaccaactgggccccgccgggttggttgcctaaaataaaggcgatgaaaacaatgcagggaaaaggggggtgttcaacgaacgacaagacggtggctggggaggtggtccggttgtcccttaacccaaggtccaataggccctttgggaaaaaaataaagttc

SEQ ID NO: 82960 - DNA, 249 bp, Glycine max
caaaaatttgggcggcagaattttaaggccttttttggtaagcaggcacaacacatcccggaaagggcttttgcttttgtgcccagggctttttggttgagctttgtaataaacaacaacaggcgttaatccgaggcctttttaaggccactacccctacgtgaaccaaaggggaccttttgtacaacaaaggcggtgccaaattccagggttcaaatcaattgcatttttgatggaaaagtgcttttc

SEQ ID NO: 82961 - DNA, 415 bp, Glycine max
ggattggttattgacagggttgttaaattttttgggcgaaggttccgggggaccattttggtttttgtaggtgattgggggtgttttttttattattttctttattctatttttttttactgttcttttattttatttatttttttagaatttattatttttttttatttttattttttattttttaattttttctattttttttattttattttcttttttttatttttatttttttatttttttatttttttcttttttttattttttaattttttttttttttattattttttttttaatatttttttatttttttttttctttttttatatgtttttctatttttttaaattttttattattttttttttattttttttcattttttttttttattttttgtttttttttt

SEQ ID NO: 82962 - DNA, 78 bp, Glycine max
cccacccgtccgcccaaacaatgtgaaggacttgcctattattcttggccacaagccattccaaacctttagccattt

SEQ ID NO: 82963 - DNA, 337 bp, Glycine max
ccacattggaatccatacctggccgttaatattaaaggaacgtttataggcggcttcccacctaccttaggccttcccccagggctcgtgttgaaccaccctgtgggggcctcgaccattcccaacctggggtggccggcattggctaaggcaggaaatgcggggggctccatggaggaaaggcctcaaggcaattcaattatagggatgggggcatccttgttggcagttgtatttgccttaacctttttaggcccagccttggttttggtggatgggagcctatcccctgaaggacccggccttcctttgggccttagcaccaacccctttgttt

SEQ ID NO: 82964 - DNA, 396 bp, Glycine max
cccacgcgtccgccacacgcgtccgtggaaatggatgatcataacaataagccccaccatcataattttggcttgaccgatttagggcagggggggaataacgggccggggccggccaatacaactttcccttcaatgcggccgaacccaacgggggagtttttcccgggccaccacaaccgtaatttaactcttttacctactaataatcccaaacaccaccagaattttagggttttgatgttgggtcaagacataatgccacctggctttaacaactttgtttccacacccaatgattttgttgtggttaccacaaccataaccttacccattcaaccggttacttgcggttttaatgccgttgagggggcaggttgcatcggtggagacccc

SEQ ID NO: 82965 - DNA, 341 bp, Glycine max
aggcgcttaattttctggccttcgggggcttttttatggccgtcctacctggcctaatttttcttcatcctaataattccgcccccttccttccccaatatccatttcctgggcttggaaggatgcctggggttcctaaggaggcccccgtttttttggatcagctcaggcagatcctggttgagttggcaaaggagggggatggggggcagtttcatagcccagggaccctccttttggctttggggggggaggtgggggaattgtctgagattttccagtggaaaggtgtggtttttttgggctttttctttttttatgtctttgttcggttttttttt

SEQ ID NO: 82966 - DNA, 410 bp, Glycine max
gaaaaaaagaaaactcccttaaaaccctcctttttaaggtcctttcctttcttcttttgggtctaagaaaaaacaacaattcggaacaaaaccaccaccttggcggcaggggcaaaaactcccttaaacactttctcttttttaacattaacactctttttttaattctttttcctcaaactttttttttcttccccaaccaccatcaacgaccttttccgttccaagggcttaccaccggggttcttcccggggggggggaaatcttccaccttttttgaaactgggcacttggaagggttcctggacgcaccatgcttaacaaattacgagaccagagtcctttttgaccaagtcgtaactgttaacctaacttacggaggcctcataggggtggggggtttccagta

SEQ ID NO: 82967 - DNA, 192 bp, Glycine max
aaaaaaaaaaaaaaaaaaaaaaaaaaaaatttttaaaaaaaaaaaaaaaaaaaaaccccccccttccggtttaaaatgggggggggccgttttaggggaccaaggttaacttccccgtcattgcaacgtaaaagttttttattggggcaactaaaatcaatttaatggcccggggtttaaaaccgtttggcc

SEQ ID NO: 82968 - DNA, 422 bp, Glycine max
gaaaatggttctgtgaagggcaaaaatttttttttaaggaacctaaagattttcccctggggccgggttataatcgggggggggccttttattttgtccaattcttattttcccttctttccaccttatttttttttttttggtgccttttaaataatattaattttctgtttttttccaccttttttttttgggaaaaacctttttttcccctatttataattcttaaattttatccttttttttctttttcttatttttaatattttcccaactttttattttttttaaaatttttctattttattttttaatgtttctctcttattttacctaatttattttcgttgtttttgttttttttactttattttctttttttttaatttttcctttattttttctattttttttattttttt

SEQ ID NO: 82969 - DNA, 278 bp, Glycine max
aaatcccggccgaccacacccgtccgaccgttaaggaagccttggacctggccctttttttatcggctctttttcttgcctgtccggcggtaatatagggctccaccggggtcgtactattatggcaggaaaatttctccctaggaaactaaactgaatgaccttttttttttttaaaaaaagtgccccgttgtttttagcagaatgctcctgattttaagcttgttttggttgtaccgagatctttatgtttttataaatttatgggcaagtaattc

SEQ ID NO: 82970 - DNA, 418 bp, Glycine max
cggttattagggaatggtttaaaagtttaatttaacaatttaaggatgaattaaaaattccccggggatctgtaattaatttttaaggagccaggggccatgttttccgtccataaatggatggccgggaggggggaggcttccagggtaaactcctatgtaggtaaattttggattaattttttgggggggacccatttgccaaacaggccaaagaggaaatggggctcaccatggttttttccctgtggggttttatggttaaactaagaattttttttaagccatgaattttgtcccctggcaaattccgggcttggggtaattttggttggctgaatcatttttattaatttaaccatgtggagtgttacctggggcttaaggattgcaatttgaaattggccatattcttatt

SEQ ID NO: 82971 - DNA, 381 bp, Glycine max
tggaaactgaaggggtttgaaactgccctactttgcccgtggttatttataaagcactaactcggcttaagttttttttaccaccaaaggggggttgtgaatgggggcaggaccttgttgggctttagcattagaaaagctgggaggggaatttaagaatcaaaggggggggttttaagggtggggttattaacagacctccgggccattggttttgttagggggcaccaccaaaggttttttccaccaaccaaatgttgagggggccaaagcccagggggttccagggttttagatttaacatccccagggaaccaagaaggttgaaggcggccgtccacagaaggcatttagtactgggtggcccaaagcaataccacc

SEQ ID NO: 82972 - DNA, 398 bp, Glycine max
agggggatggagggttggggggggggggtgaaggaatttaggaaaaatgggcggccggccttgtttactaaccacattttttgggcccaaatggttccatttaaaccccataaaagccccagttgggttttttccaccaaaggcgggtggttttttgggggaccagcaccgggggcaccagcggcagcagaggaggttttgtgttaccatgggcggcaggggactaacagccgggggggatgggtctggttgcaaactcagggggggggaggggcaccttcatgggggggctgccaggggggtttgggggagcagcaaagcccccgagggggggcacccttgcctcaaccacactcttaagggccaccccccctgtcttatgctgggaggattcccac

SEQ ID NO: 82973 - DNA, 330 bp, Glycine max
acacagtttttgaagccctggttggttcaggattgaaaatgggccgattaggggatgttcctcccattccttcggttggcccacgtggaaggggtgttggaaggggtggaagcctttaaacttcctattttggggtggctttatttaacttttaatgccaaagggaatggtggccttttgatgttttttaggtaaaaatcagaccttttattgcttttttgggggggttgaccagaattttggtggggtccccatttaatatttgtggccggggattttttaaagttgagctttgtttttcctaggttgggaggtttattgtttttttta

SEQ ID NO: 82974 - DNA, 416 bp, Glycine max
ccaacccttccgttctttttttccaattttaagatttgtaaccggttttcaaaaaaaaaaaaaaaaaaaaccaaacctttaggggggtgggtttttttgttaaaaatttttgtttgggtttgaaattttttggttttgggccggcccagggttttttgagatagaatttgcccgggaaagcacccccaatcttggcattagaattgggggttcccaaaaatttggggtggtaccggtttttaataactttggtggttcaaatggggctttacactgatcgtttgggccctttaaagtccccttttgttgggcaggagttattggaggctgaacctgttttggtgggggcggctgactttggccatttgattttccggccgaaggaaacttttacggtttttaaggaaccattgggg

SEQ ID NO: 82975 - DNA, 249 bp, Glycine max
cggaaaacccgggcgggcccacaccgtccgcccattataaattttagaaattggttgtttttttttttaatcaagcccagtcgttgtaaggggggcttattctgttaaatgcgaggcttctaaagccctacctgtttaaacccttgggaattaacaaggatcggtccaaatccaagttccgtcttttgccggtgaaaatgcattcaggtaaggcaacgaatccgctagaggaatttcagaatttttttt

SEQ ID NO: 82976 - DNA, 329 bp, Glycine max
aattcccgttggaccacacccgtccgcatcgaaaaagggaaaattaagatggggatttttcgatcacctttaaatttgcatggggggggggaggcccatggttactagggaatggcccaacctaaagaaagggatggggatcaatcccctttccttaaactccaagaaaactttggcccaaggaggtgacatgggcctcgccaaggccggggaaattcttacttgtgccgaattcggggatggttgcagatttttgaagctccctttggcaattgagatagccagggggtacccttttgtttaaattcaaagagggcccggggggtttt

SEQ ID NO: 82977 - DNA, 439 bp, Glycine max
gtttttcccaatagccaagcacagccaattttttttaattaatttccaccaatctttttgttttgttggttttccatccgcctcaatcggttaggcttaaaccaccatctaattcatatgatggggggaagagggggccatcaagaggggcattctggtgcttttgccgacctttcctttttggttttaaacctccttggctcgcctttgacgttttccgacagggttccgccagcgtaacggcttccggcccaggttaaaatatccccggcgggttccgggtcgttgttgttggaaaaattccctggcgttgttcgctggggggatctgggacgtttttaatggggttcgtgttgatcccctgggtttggggatggataatgctttcttaactagccgaaatcctgtcaaccttttccgttttggccgttcatttttt

SEQ ID NO: 82978 - DNA, 471 bp, Glycine max
gaccggaaataactgggtggaccacacccgtccggttttaaatcggaagcggcccctttttttttttttttttttttttttttttttttttttttttgtttttttttttttttttttttttttttttttttttttttggggggcccccccaatttaaatttgctttttttcatttttaactttggaggggaaaaccccaaaaaaaaattttgggtttgcccccaaaatttttagggaaaaggggggattaaaattattttttttcggggattttttttttgctccaaaaaatggttttttttctcttctttgccacaaaaaaaggggaaaattgggaactaaaagaaagggggtggggcccccccctttttgttaaatttaaaaaatttttttcgggggggttaaaaaaaattccccccccccacctttttttttatttttataaaacccccaatttttgccccaaatttt

SEQ ID NO: 82979 - DNA, 233 bp, Glycine max
tcccgttcaaccacacccttcgcgaagtcgttattgccattgccgttgaattgtttttttaagttgtcctaggccatggggtggttggtgccattgttgggggtcctgtttattactttacctttttatggtttttttccaattttatatttttttcttataaattttaaaattttaatttttataatttatatacaaatttttacttttttccacattttttttaaattttt

SEQ ID NO: 82980 - DNA, 209 bp, Glycine max
aactttttaaaaaaataaattatacattttattttttaaaaaaaaaaaaaaaaaaaaaagggaaggatttttaaaaaaaataggtagagcaaaaacgccctcccttttaaaaaatccaaacttacctacccttccattcaactaaataacttttctataatgtcacctaaattaaattaactgtcccgcttttaacaaccacttaactt

SEQ ID NO: 82981 - DNA, 271 bp, Glycine max
  unsure (1)..(271): unsure at all n locations
cccacgcgtccggtctagggttcattcttcttagggggtttcggctccgaagacgacggcgctccccccggaggaccgggggggcacaaacgtggaggaaaaggaggaaccccaatgcccaccgggtctcagacagtacgagactatgatggttttgnggcccgacatgtcctaggatgaacgacttgcactcacccagaagtacgaggaggtgcttgttgctggaggtggcatgtatgtcgaggtttttaacagaggagttatttcacta

SEQ ID NO: 82982 - DNA, 206 bp, Glycine max
  unsure (1)..(206): unsure at all n locations
ggaancccggncgaccgacgcgtccggctgttcacaacacaacaaccacacatgacaatagttttcagaacaccctgaatagaatattgtggaattccatgactgctagtgaggaatacaacatatncaatgattacaaaattattcagtctctaaataccaaatttcaagcatccattgcttctaattcttttttttttattttt

SEQ ID NO: 82983 - DNA, 293 bp, Glycine max
  unsure (1)..(293): unsure at all n locations
cccacgcgtccggtgaaaggatgaccaatttttttttactaaggttgcatacgaggttgggagttgccattgccattgccatggccagtgttnnntggtgcttctcactcttgttctgccactgccactactctgtcaagagcagtaataaggaagtggaattggggaattaagggtcctcgtcgtatggtattgggccttggacttggagtttccttcttgtctatggccggtaccaaatccttcattgcctcggctaagataaagggtgttccctctgttgatttgatact

SEQ ID NO: 82984 - DNA, 91 bp, Glycine max
  unsure (1)..(91): unsure at all n locations
ctcttggtgtttaaagattgaaagagctatatacattcctatactaacttctntcgggatggttctttttttaatggttaacaggctttct

SEQ ID NO: 82985 - DNA, 275 bp, Glycine max
  unsure (1)..(275): unsure at all n locations
aaaattcttattacacattctccctaccaattttataattcatcttctagtcacactactgcatgttcaaattgcaagtgtggatggttcactcacatacactagtgcatttatactatatctacaatctctgatgtagttttttttatcactcattaatccatnttttccatctacaactaggctttcacaccaacttgtaattttcaagtttaattcttacattattcttctcttagattgtttcattcaaaattatgcttcaaaactatatt

SEQ ID NO: 82986 - DNA, 292 bp, Glycine max
  unsure (1)..(292): unsure at all n locations
cgtccgcatccccttccatggcagctccttcactctcttcttttctcaactctctctcctncccctgcctgtctttctccttctgcacgggctcccgccacttctttctcctccctccaccctcacaccaaccctccaaacccctctttcttacccttaaatccaaaccctcctactacatttacacatcgttcttcgacaagaatggtcaggtggtagtcttagttggcaaggccaaggaagtcattgccgccgttcataattccgccttcaatgcctgtagtaacatcat

SEQ ID NO: 82987 - DNA, 196 bp, Glycine max
  unsure (1)..(196): unsure at all n locations
tcttccttgccaatttgagcatatattatcctctattgctatcgatgatcaaatcatgatnnactgggcgattttatatgtaagttttgttgcccccttctcatctttaaccactttttccttctttcaacaaacaattatttttattttttcattcttattactcttttattttttcatattttttcttctttaa

SEQ ID NO: 82988 - DNA, 221 bp, Glycine max
  unsure (1)..(221): unsure at all n locations
cccactcttcctgtgttgtttcactattcttgccattgagctttcaaccacttctggaggcagcctctttaactggtttgtttgtaaccatacnatttaatatataaacttnnnnnncttaacatattttacttattttttttttattttatattttattattttttttatttttttattaatatttatattactattattttttattaatttattatttt

SEQ ID NO: 82989 - DNA, 396 bp, Glycine max
  unsure (1)..(396): unsure at all n locations
caaaccaacacctttaaaattcaaacttttttccntgctccccaacattggttgtttctacaaattttttgccattatcatttcctacaatttatctccaccttttacttttctctctacatttttatttttttttttacttaacttcacttcatctctgtttttatatttcattttttttctaaacttttttatttattctttattttttattttttcttttttttattcttttatatattctttttttgtttttctttaaattatttttttttattttnttttttttttttctttttttttctttttaatctttttttttctttttttttttaatttttatttatttttatttatttatantattctcatttattatttttattattttttttt

SEQ ID NO: 82990 - DNA, 250 bp, Glycine max
  unsure (1)..(250): unsure at all n locations
accgccacgcgtcccnaaaaaaaaaaaaatttattttaaaaaaaaaattaaaaataaaaaggggagggtatatttaaaaaaaaagaaggcaaaaaaaaaaatataatataaaaaaaaaaggggtcgccctttttaaagaaccaaacttaactaccctttgattagaaaatataatcttttttaaagggaacccaaaataaaattaattgccctttttttaaaaacttataaaatggaaaaaacctttttt

SEQ ID NO: 82991 - DNA, 345 bp, Glycine max
agcgaggccccccagggcaacaggatttggttcgagtccagctacgaattctggaacaacgatggctccaccaccaccgccggcggaagcgaccagagcttcgatttccgccagtcggaggacccgccgtcgcagctgatcgggcacttccttcacaagcagcgagccttcggcgagatgcagctcgacatggatttggagatggaggagctgcagcgcgaaggcgacgacggaaagttaacgccggtggatgaatcttcggtgactcaccgtgtttcgagagagcttaaggtttggtgggtggaacctaccttcaatgtgaattttctggaagctcaaaacgac

SEQ ID NO: 82992 - DNA, 284 bp, Glycine max
cccacgcgtccggatggtagaagggtgcttgtgttttttgagcgtgggaggactgaatcagagtgggataccttggcggctaggtggtggactaactactactaaaatctggattgcagaagtttatgagatacatagtgggtggattctacagtcaattctcgcaccttaaatactattgtgcacgtaccaacacatctttaaaaacagcgcattatcaactttaagagctccacacaagtacacagatcccgaacgatcatgtcaacatcctaattaaagcg

SEQ ID NO: 82993 - DNA, 445 bp, Glycine max
  unsure (1)..(445): unsure at all n locations
cccacgcgtccggataactagaaacagtgtgttgtaaatgaaggtccttgttttcttcgttgctgacaattttggtagcatggcaatgccatgcgtacgatatgttccctctccgaatgaacactggctatggtgcccgtactccggaggtgaaatgcgcaagttggaggcttgctgtggaagcacacaacatctttggctttgagaccattcctgaagagtgcgttgaagcaacaaaggaatacatccatggcgaacaatatagatcagactccaaaacagttaaccaacaagcttacttttatgccagagacctcgaagttcatcccaaggacacatttgtgttcagtatagatggcaccgtactctctaatatttcatactacaaaaaacatggattttgggtggtgtaatnnaactcgagcttttatgagatatggtttta

SEQ ID NO: 82994 - DNA, 113 bp, Glycine max
aaaaaaaaaaacgtgattctctcttctttttttttaaaccacaaaaccaacaaactagaagaggagttttagaagatgggggtgtcgttcactaatctattcatcattttgtt

SEQ ID NO: 82995 - DNA, 370 bp, Glycine max
caaaaatttgagcaacatgaacttaagaccatgctttacaagcacgcacaacacaaccccgtaagggcttctgcttcagttggcaaggctatctcgctgcactctggtatcaacaacaacaagcctccatccgaagccttcttcaggccactacccctacggcaaccaaagaggaccctcttcaccacaaaggcagtgtcaaactccaaggctcaaatcaatgcatctttgaaggagaaggcagttgcaggactcacagcagcttctgtgacagcatctatggtgtttcctgaggtggctcatgctgctggatatgatttctccccttccctcaagaactttctgctaagcatcttttgctggtgggttt

SEQ ID NO: 82996 - DNA, 302 bp, Glycine max
  unsure (1)..(302): unsure at all n locations
ccggccggaaacccggncgaccgcacgcgtccgggattggataatgacaagtctgttaaataaatttttcgaaagttcctnnagaccatggttgtgtttttataaatgtgtggtttgtaacaaatattaaaatnnaatatatatttatttatattaattttttatatatttaataatttaatttataatattaaatttattttaattattttttattttaaaaatacttattaatataaacnatcttttaatgatttttttaatattcatatgttatttttaaattttatcctcttaaattt

SEQ ID NO: 82997 - DNA, 184 bp, Glycine max
  unsure (1)..(184): unsure at all n locations
acagatcatgtggaggactttgcttatatttttggacacgatgcattccaaaactgggagcatcnttttggtgatgggccttatgttatacatggntctgtatgaaaaaaaggtccattattcgatgctacaatcctcataatcatgcagatccaatggacttacaaaatcccatgtataatgt

SEQ ID NO: 82998 - DNA, 199 bp, Glycine max
  unsure (1)..(199): unsure at all n locations
ctcactcgaatacataccctttcgtttatactaaaacaaccatcatcaacatcatccgaacgacatttatcactggcgcggggctcctnctcaaaccacctgatggagcctccacctataccaatcttggatttccagcaatggctaatgcagaaaaagctagtttctccattgatgaaaagccttcaagcaattcaaa

SEQ ID NO: 82999 - DNA, 212 bp, Glycine max
  unsure (1)..(212): unsure at all n locations
cgcccacgcgnccgngggaatggatgatcatcagcatcagcaccaccatgggcacggtttcatgaacgggcggaggcaaccantaaataaccgncccaggccttcccataccaccttccccttcatgcctccctaccccacggaggagctnatcccctgccaccaccacctgaatctcactcccttacctactcatcattcccaacaacaac

SEQ ID NO: 83000 - DNA, 152 bp, Glycine max
cccacgcgtccggttctttcctcacttcaaatatgtcaaaaatggcaacagaattgggtcggtggcacatcggtcgatccgggcggttggcaaaaaatacgggcccatcatgcacgtatggttcgggtcgagctccgtggtggtgggctcgt

SEQ ID NO: 83001 - DNA, 80 bp, Glycine max
aaaaaaaaaaaaaaattaaaaaaaaattttttttaaaaaaaaaaaaaaaaaaaaaccccgcgcggcctgttctagatcgg

SEQ ID NO: 83002 - DNA, 456 bp, Glycine max
ttgaaactgaaagtgtctgaaactgccctactttgaccgttgatatctataaagcactcactctgtctcagctttttttaacaacaaaggggggatgtgaattgaggcaagaccttgcttggcattagcaatagaaaagctgggaagagaatctaagaatcaaaaggtggagttttaagtgttgtgttaataacagaactccgtgacaatggttttgataagtggcaacaacaaaagtattttacaccaaacaaatgatgagagggccaaagcacaaggtgttacagtgcttcagaattcacatccacaaggaaacaagaatgttgaaagcgggcgtacacagaatgcagtcagcactgggttgaccaaagcaataacaacaatggatgaattcaagtgtggatttccatcaaaaggcttatcaaccacatcaaataaatggtggggaaatactga

SEQ ID NO: 83003 - DNA, 413 bp, Glycine max
cccacgcgtccgcccacgcgtccggatcgtgttaactagaaacagtgtgatgaaaatgaaggtccttgttttcttcgttgctgcaattttggtagcatggcaatgccatgcgtacgatatgttccctctccgaatgaacactggctatggtgcccgtactccggaggtgaaatgcgcaagttggaggcttgctgtggaagcacacaacatctttggctttgagaccattcctgaagagtgcgttgaagcaacaaaggaatacatccatggcgaacaatatagatcagactccaaaacatggtgagcgacaggcttacttttattccagagacctctaagtttcatcccaaggacacatttgtgttcagtataaatggcaccggacttttttatattccatactacaaaaaaca

SEQ ID NO: 83004 - DNA, 211 bp, Glycine max
  unsure (1)..(211): unsure at all n locations
gccattcgaaatctgacaagatcgtagctattatatttcatcaataccatgtacgctaaaggggtgttactaccgaatacgctgagcattctaagacctaccgtatgaaacatctttcaactaacaaggatcgngccaaatccaaggtctcgctgttttgccgagaaaattgtataaggttaagaaaagcattcagcaagtgcttgccata

SEQ ID NO: 83005 - DNA, 355 bp, Glycine max
ggggggttgtttttatttttttttttttagggcacccccaaattaaaattttctttttttatttttaactttaaaagggaaaaaacacaaaaacaatttttgtttttccccaaaaattttttattaaaatttgtgactaaaaataattttatgcttcagtttttttcttccttccaaaaaaggattttttacctttacttgccaacataaaaacttataatgggaaacttaaaataaaggtctttcttccccccctttttttttaaattaaaaaatttttttttgggggaattaaaaaaaattctacaatcccctttttttttaatttttaaaataaaaacaaatatttttccca

SEQ ID NO: 83006 - DNA, 131 bp, Glycine max
  unsure (1)..(131): unsure at all n locations
gagtcggtagtggcattgtcggtggagtggtttgtggaggtggtctaggtcatggtgttggtggtgtcattggtgggggtgcaggtaataacagaagcatnggattgggatgtttttttttacaacataca

SEQ ID NO: 83007 - DNA, 237 bp, Glycine max
acacccttccgccaacccttccggtgctttcccgctttcttttcacttcaaccgatttcctctccggttcggcctaaatattcagagggggggttaaatccattaaacatacattctaagttaatttttaatataagtaataacactcatttatttttctttaaggtaaaaagaacttttccatcaaatgaaattccaatcttttatgatactttatgattttatttttaagttttt

SEQ ID NO: 83008 - DNA, 340 bp, Glycine max
acacccttccgaaggcaagtatgagttatcaaaacattcattttcccaaacacaatgatcacgggagcggtggtgttattcctagggggtttgggagaccatccaccttgctacgcggaattaattgttcaagcaaaaagaaggtttggaaacataaggggatgagatttggcctcctgacaattctatggtgcccgaattcattttgaaggtccattatccgtggatccagcttttatggcactttgcccacacctcttacctgattggggcctgttaaaagtgtttgtgggcggcctttaaatttccggggcattaaaaacatcgatttgacttggtt

SEQ ID NO: 83009 - DNA, 465 bp, Glycine max
  unsure (1)..(465): unsure at all n locations
cgaaattccgggtccgcccacacccttccggagggcttaccaattaccaaaaccccacctttatctaccaccaaaccaaagaaagggaagggaaggcttgggttacctgggggggcgaagggggaataaaacccaaccccaccctgaagcaaagtcgaccggcccaaactaaacgaaccccttaactgaggccccagggttgaacggccccggggaggttccccggcccttgaacacaaccgatttgattttcgggttgggctccggggccgcctccaacgccagggtaacgctggccggctatggccccgcttccgaagacctaaagccctgccgttgggggatcctccccgccgtccagtccaacgcccccaagttccgggtggttttttgtttttgttaccaaactttttttttttttttggccgttggtgggatcaaattnaatcaacttttttttttttt

SEQ ID NO: 83010 - DNA, 332 bp, Glycine max
cacaggcgtccgccacatttcctggatatctaagtaatcaaatttccttatttaacccctaaattccaagcaggagggtttagaagaagcaccaccaccacttcaaccaccacaggggcgatgattggcctggcagggttgataataggaggggggggaggcaccacaggcattttgggcaccttggggaacttggtgctgcggttgccgtggctaatcccttgcatgagaagcaggtggccaagaaggacccatagcttgctaacaggcacagggttaaataggagattgcggcagcatttccttgtggggtggggggtgttgttttttat

SEQ ID NO: 83011 - DNA, 380 bp, Glycine max
ccacacccgtccggaatatggaggggttaaaattaattgcaaagcccctgtttgggaggaccttgaaagggaccgatgcttttgaggatcctcttaatgttgggggggttcgggatcttgttttttcctttgccaaaaaggagggccttttttccaatcccaattcattggaaattgttgggcttgttgggtttttccatgacttagttgcttccaaatccctaagggcccaatttggggaaaaaattggggggaattttcttgatgaaaaggggttttagggggccaccaggttcaaaattttgaagatcttcaaaggattggttttttgggaggaagtgttagggaaggggaaatttgttaggtttttccagaatttt

SEQ ID NO: 83012 - DNA, 341 bp, Glycine max
  unsure (1)..(341): unsure at all n locations
gggncnggaattccggggcggcaccacacccgtccggaattttttcacacagggccttaagttgttttaaggattttctttttgaaaacttggggttggattaatatacccaggttttaataaacccaaaaatggcagtgtaataattgagttggggggcctttatgagaatattaagttccaaagttttgtttgttgagaaggttattgaccagacttttgttccaagggttaaacttgcttatgctttcccaggacaggggtttggggtgtatataattcctgaggcacaaaaggatgaggggtttttggatggactggttggttttttgacaaatttt

SEQ ID NO: 83013 - DNA, 252 bp, Glycine max
acagccgtccgatttgacttttgaataagtccgcagggtttttttgttaatatggtccatatccaccactgggccgggcccacgtgggctaccattgttctcacttaaaaaaaaaataccaaatgtttcttaattggtttcaaaattaataaattatttaatattaaaaatgggggggccgttttaggggttccaggttttcgtcctctttctggcaacgtatatagttttttatttggtgtacttaattta

SEQ ID NO: 83014 - DNA, 257 bp, Glycine max
attttgttggcagttgggtttaacagggccaccattggcagttggtttgatgggccagggagggaggtaatattgggcacaatttggggtaaaatgctaataatggtgcattggatcacagacggggttggtttgggtggcacattgatgtttaaaaccattggaggacctaattaaccaaaaatcattaaggcttttgctttgggccagtggtaattattgacttttgccaaattaattatgaatggcatttttta

SEQ ID NO: 83015 - DNA, 412 bp, Glycine max
acagccgtccggggatgggtttttttttccactgttaaggggaggtttaaggggggcaccacaaacaccctgaaatccttgtggggtaaggtggccataaccgccgaaaccctaaggaccgggtaagatattttggatgcagttaaaaaaatcggggtcgaagcggtttttttaccagccgtggttaaaaagaccattgccgaagttaaaatgaagattaattttttggttgcagatttttccagcaggactaaaaaaatttcagggccatttaaggatgtcattgatgcaaggggacgggaccgggttattttggcggtgtgaatgctttttttggcatttttgggatcttaattttaaatattggggttgcagggcctggattccttttgggtcatggtcggtgggattc

SEQ ID NO: 83016 - DNA, 273 bp, Glycine max
ccacacgcgtccgccaacccgtccttttatttttccgccaacgcgtccgaacaaggggaggggttatcattaggggcggcaccacctagtttaagttgaaatggcttttcaagggatggcatttggggccttaaaacctgcccctttaactgtggagaagtcctaatgggggggctatccctttttttaaaggaactttttttaattcaaagttggggccaggggcagtaatatcaagattttcaaactctttggaattaatggtggcatgtt

SEQ ID NO: 83017 - DNA, 281 bp, Glycine max
ccaacccttccgaattggaagggattgtttttaaagttgtggaagcagaaaaggtaagtggtgacatttccttggtgggtggcattggaaggaggaccttgttgtttgtttgggtggaggttttagattgttttgttattggattgtagttgtctattgtatttttttcttttttcccttttgtctttattatatgattttttattattttggttattaatttttttatttcattattattttgttcttttatattatattattttgtataattttttttt

SEQ ID NO: 83018 - DNA, 129 bp, Glycine max
acacccttccgccacacccttccgaaaagttagagaataaatatattgccttcaccaccatctggtttttgtgttcaattaaatgtggcgggggccaccacaaactaatggttgtctattttaaactca

SEQ ID NO: 83019 - DNA, 440 bp, Glycine max
gaccacacccttccggtacctactgggaaaataagggggtattatttttgaacataacatataacaacggggcggggtagttttaaggttgcctgagcaaaatttgggtttatagattgccggggatttgggatggtttaattctttagtggttaactattttttccattgtttaaatattattttttaagtgtaaattctaatattgccttgtgtagtattagtctctttatatttatggattttttttgttttattttttttctttctttttttatttttttttttttaattttaatttatttttgggtgttggtgtgtttgttttttttatattttctcttttattaatttttcttatttatactattattttattttttttgatttctaaccttctttaattttttttaatttttctctttagttatttttttttt

SEQ ID NO: 83020 - DNA, 207 bp, Glycine max
gtccgccacacccgtccgacaatttagggtttaggattttatccaaaccccttttccatggaagaggaggcggccctggaggtggtggatccaaacaccgccgttgccgccgccgccggggccatggccgtcaggatggccagggccggcgtaaacggtcccttgcctaacaagaacctcgccaggggggaaggggccccccaggcg

SEQ ID NO: 83021 - DNA, 250 bp, Glycine max
attccgggtggaccacaccgtccgtccacctgttgagaacaaaacggggcaattttttttatgtttatctttccaaagagggtggtggatataaacatggggttccattgtttaaaattttatcttttaggttcaataacttgctttctaaggtagttttgtattaaaactttttaaaaatatataatataatggggggtctctcttttttatccaatttttttacctgttctttttatttttaattttt

SEQ ID NO: 83022 - DNA, 313 bp, Glycine max
acacccttccgccacatccttcacctaaccaggcctttaatttttttaaacctcacccaagattttggggccgggggaactgttccaaagagaacaggttctgttcaacctttccaaagataacaatcctcaaccaagctagatcaaaaggtttttttccaaggcctaacaaccatcaaaaattttcaccgcataattaacagaatttaggtcttaaaaaccatgtaaacgaaacttcctctttttttaatcccaatttgcagtcttttctaagttttacagaaggcagccttccttaattcccatccaattt

SEQ ID NO: 83023 - DNA, 222 bp, Glycine max
attcccgttcggcccgacccgtccgttacacctaattgctgtgaatcttttttatttttaaaacaaaatctgtttttaaaatgggcgcaattttttataattgggtggggaaataaaaatttgttcctttttagttaccaataaagcttttccaaaaggcatttcagtaaagtgtcaataccaaatattttattgttgtttcccccccactctttaaaaact

SEQ ID NO: 83024 - DNA, 212 bp, Glycine max
acacccttccgccaccaccaggtccgacccaatcctaatattattataataataatcctaacgggtaaagaggtaaataaaagggggcgggcttagtaataggctaatagggtagtagttctttaatgttgggaagttggaactccttaagcagttttagagtttgtgaatttggatccggatgaagaattaatcctttttttccctttttt

SEQ ID NO: 83025 - DNA, 199 bp, Glycine max
accacatggcaaggaaaatccacattccattcctaagccttggttaatttgagtggtagggagggttagcctaagggtggcaggtgtggttgctgggatgtccatggttgggggggccataagtgctgaacccatggcacaggctgaattcacgtgcggtctgtttgtcggcgccatgttttcgggcttaagtattttt

SEQ ID NO: 83026 - DNA, 215 bp, Glycine max
cccacgcgtccgagaggggccagggtgcatttttccttttaccgaaactttgggaaaactttaaggaagcttggtggtcggtccgagagggagcgtttggaccccgggttgaagctggtcggttggtccggacttggttgcaggggggggtggtggggggttaatttccttttaagccttttttgtattatctttggattttttttgtctttatt

SEQ ID NO: 83027 - DNA, 327 bp, Glycine max
tggattggaccctggccaaaaaaaaaaaaaaaaaaaaaaatttattatttaaaaaaaaaaaaaaaaaaaaaagaaaataaaataaaaaaaaaaagggaaaaaaaaaaaaaaaaataaaaaaaaaaaaaaaaaaaaaaaaaaaataaaaaaaaaaaaaaagggggggccccttttgggggcccaaacttactttcccttctttgtgtctaaaaatttttttattgggggccccttatttaaatttatctggcccggttatttaacatcggggccggggaaaaccctttggttccccaataatttttttttagaaaaaattcctttttt

SEQ ID NO: 83028 - DNA, 248 bp, Glycine max
tccgcccacccgtccgtttggaaggatttaatccattttatatttttaaaaatgcctgggataaactaaggatttcatatttggtgaccggggacaaaaccctattggaaggctgggcctttttgaaagaaaaaaactttgaaggggttttccaatttaccaaagcatttgtgattgccagccttcgatacccatgtaccgaatccatggtttaacattgttttaaccatggggatgtttgttaattt

SEQ ID NO: 83029 - DNA, 375 bp, Glycine max
cgcccgaaattccgggtggacccagccgtccgaatttttttgtaaacgggccaaattaagaataattcaagattggcaaccgaaccagcagaagcaacttgatctttaagggggacgcgcttcttgaaggccaataccggggcggggggggggcaggcccggttggggtttgtcaggaaaaaagcctccgcccggaggaaggacccaagggggccgggcactacctataataggcacccttagaagccggggaaaacaaaaaggccagggtaacttgattccccgttcttgaagcttggttcttccgttttgggtcaattttttagagttaagagggtaaataaaaattggaggtttggtggggtccaattttaa

SEQ ID NO: 83030 - DNA, 429 bp, Glycine max
cgccggccggcccggcccggaattccggtcggacacacccgtccggttttggtttttaacggtggactttgcggtttttaatctttccgccatttccgatctttgcaatgtccttgataacatcttcctcaaccttttcctgagaatattgaaggctggaaggctgcctgagaaggttctgggccttttaatggcacctggtagggatgaagccttttaattggttcaggccctcattatccaccatttttggaccccggtgcttccaaccaggggttttggggcaaaataagactttaagttggtaggatggttgtgcccttggaggaggtctaaggcggtattcaccgtaattgaaggggtcattgtatttggggccctgatttctgtctctacacctttaatgaaggattggtggccaatattttc

SEQ ID NO: 83031 - DNA, 381 bp, Glycine max
cccacccttccgccaacccgtccggtcttattgggtggtttaactccggaaaaaccaaccgggtttactttccaaagggttcttttgggcaggtttcgttcccaaaggttaaggcttgaaaaagggtgggttggtgaaggggaaggggggccaaggggttggtttaggttcaaaggggttcccattaggggagggttaagattcaaaatttaaggctggagaggactttgggggaaaggggctgggctggttttttccatgggaatttaatttgccaaagggttgaaaagattaagggagggtcaggtccattttggtgccctttttgttgggacctactggtcaatgcatgtaaaccttgcctaatttaagggctttgaa

SEQ ID NO: 83032 - DNA, 85 bp, Glycine max
ccgaaattccgggttcgaccacacccttccgccaacccttccgcaagggcaaaaaccgaattaaacttttttgaaaaaattgccc

SEQ ID NO: 83033 - DNA, 419 bp, Glycine max
  unsure (1)..(419): unsure at all n locations
acagccgtccgcccacccgtccggaggaaatgggggtccattggaggtaaagtcccggaggaattgggggaaccagagttttaccaggatttaaacagcttgaccaaacaccaccttccaactggaccaggtttaataaaagtagagaaaaagggaaatgcctttaacataaaaccagataatgccactggtggccataattttggcaggggcaatccagcacccaaggatggggttcctgttccttcaactgaggggggtttaaattaaggcaaacttaacaggagtgccacctagaaatgggggaggggttccatgaaaatataaatatttaacttttttttaaaattggggggattccatgtgtggtttaaaattccattccaanattttttanttttatttttttatatatttat

SEQ ID NO: 83034 - DNA, 443 bp, Glycine max
cccccggcggacccggcccggaattcccgggccgcccacacccgtccgaggttcttaatccacccagcccggtcccatatttaagccaggttgggtggcctaattggatatttgaggcttggggtttttaataaatttatctagttaaaggaagggattggaaggtggggtttgtaataagtttctccgttgggccccctgggaggccagccttttttatccaatgggcggatggattgggacctttgaaggtcctgatgggttggatttttttcctttaatccgattttctggtgggggccaagaataagggccctcgggtaaggagaccgatggcttagtatcttttttcccaaagggatttttgggccagttccggttaaaattaattaatgcctaaatgtggtttattgttggctttaacctcaaaattcataaggttt

SEQ ID NO: 83035 - DNA, 410 bp, Glycine max
acagccgtccggcggtttaaacctggagagaatcctcttccttctttttaagctatccctctttggaaaaatttagatctggtttttcttggatctacgtaccgcttttagggcccggatctgattggatctgaaccagatttacaccccgaggggggtttgggccgggcttttattagatctgatgcatgggggctaaaatttacttgccaggggggggcgattaatttcctgtagatattcgatgggaggaacgcaattccagccgtttccgttggttcgatcgttccagacgctggattgggatatttctggatggttttataagcagcatgtcttcttccggctttagtggtggcggatttcggttgtgtgaaaataagcgtttgattggaagttttgggttggaa

SEQ ID NO: 83036 - DNA, 408 bp, Glycine max
gaaccattccaaggcccgttgaaggtggttcttatttgaaagggttgaccaattaatttgccgggattattttttaaatggttggggttaaactcccatccattgggggaaggtccccatgggcctaataaaatttttgggttatatgttggacctaagctggggtattccaattttaaggaaaccgcttttgttgaaaaaaaaaaaaaaaaaaaaaaaataaaaaaaaaaaaatggggcggccgtttagggggttccaggttacctacccctggcttgcaacgtattagtttttttttgggggccccaaattcaaattaattggccggtgttttaaaccattaggcttggataacccttggtgttcccaatcttaatggctttgtaaaaattcccttttttcaggtt

SEQ ID NO: 83037 - DNA, 142 bp, Glycine max
tcaatcatatgtgctatttaaaaaacctttttttttttatataataataatgtaatataggggtgggtattataataggggggggggtttaaaataatatatttaataatagataatattatgttaatatatattatataaa

SEQ ID NO: 83038 - DNA, 232 bp, Glycine max
ccacacgcgtccgccaatggttcggtttattttttcgccaacgcgtcctaaggaaggagcggccgaacccgtaatggaactggtggtaatataaattttatagttggttactgacgctgaaccaaccgttaaactaaacttcccaaataaccatgggggattttaaacatatttccgttaaccgttttttcggcgaaggctaaatggttgatgtggggctggggaagaattg

SEQ ID NO: 83039 - DNA, 226 bp, Glycine max
cgaccgaaattccggtggaccacacccttccgccaaccctttctcaacgcttcttttattttttaaaaaaaaaaaatatttgattgtgtaattaatttggagggggggaataaattttttttaaaataattaataaaaaataatttatttattattgataattttttatttttttaaaaaaaactgtttattttttttttaattttaaataaattcttttatattt

SEQ ID NO: 83040 - DNA, 176 bp, Glycine max
ccaacgcgtccgacaacgcggccgttcttattgggtggatgaactccccaaaaaggcaccttgtttattttccaaggggtcctttttgggaggtttagtttccaagggttaaggcttgaaaaagggtggtatggtgaatgggaaagggggccaaggatttgtttttggttcaaaag

SEQ ID NO: 83041 - DNA, 381 bp, Glycine max
ccacacccgtccgattggtacaaggtagggttgttgttttgttgcgtgaccaaattgaggggtggtggttaattatggggcaccgagggattaagtttttgtgcaaatagcgacgtaaaaatttgttttttgccccggggggacggccagttttaagaagaaggccataataaatttaagttccaatttaaagggacctttaaccaaaatccatgccatttcccaaaatggttttgcctttagttgaacttggggggggtttgggtaaagtttaaagccagccaagaccaaaggcggaggtaatttggaatccctgtttggtattgataaggcttttccagaagaaataatttagaaacctgttgggttttttttggaaga

SEQ ID NO: 83042 - DNA, 420 bp, Glycine max
ccaacgcgtccgggttcttttgggggctttttgattcaatcctaggggacttgtttgttgaaggggacacagggtagaaactaaaaatggggaaggggaatgaagaaccaaaaccattaaaggatttgggtttatccgagtaatgggtggaggctggcgaaaaattggttgggaaaatttcattaaggttccagccggaggcaattccttttgtttggtagggaaaggatgtgttagtgtttgccaaaactggttccggtaggattgtagttatggtttttccattaatgcatgcttatttggaagctctattctcaaatttttttttttgtttgttttgtggtttttctaattgtggaatattgtttatttaatatttttcgttaatatatatttaaactattttgggttccttttata

SEQ ID NO: 83043 - DNA, 323 bp, Glycine max
ggtttgttataaataccatttgccacatctgtgtgaaataataattaatccctgggggggtttaaccattttgttaacatttacctaagctgttgaggccacaaattttaactttttgggctggccagaaataattaggggggttttgtttttggggaaaaagaaagggtttcccttttttaaattcccgattttaatataacattaattattttttttgaaaaacattaattatgggaatagttttggttggttttggccatgggaggaaatgaaaggggttggaggatgccttaatgccttgcccataggctccatttttg

SEQ ID NO: 83044 - DNA, 326 bp, Glycine max
gaacaccagggggtggggcaataaataccattgggggggaagcctggttaatgggtttgggtaatggcattcaagtggtgtgtggttccttaattggcctatggatgtgacgattataataataataatgtgtttcttggggaggaaaaaaaatggtaaaaggtggcctaggattggggaatgttggaaaattctttcctcttgaattatgttttttaactattaatggtgtttaaaaaaaatttattattaatttaaaataagggtgggtattttatagggttctaagttttcttttgttggtttgtaagttaattatttttttt

SEQ ID NO: 83045 - DNA, 231 bp, Glycine max
ccaacccgtccgtgggtttttgggattaaatttagtcaaggggggggaaaaagaggggggggagttggaagaataagggggattgcctttttggtggaggttcctgtttggggggctgaaaggttatccttatttaatgccctcttaaaggttgcttgtgatgaatctaaaccaaaccaatttttttaaaatttgaaaataggggatacaaagttttttatatgttcttgt

SEQ ID NO: 83046 - DNA, 376 bp, Glycine max
gcccgaaattccgggttggaccacacccgtccggttattcgtggggggaatatgaagtcgtttgtttattaaaggcccccggaccatttcctgggcatggaatttaaattccggcgtaaacccatgaccttccttggatttaattccgttggcaatggaatttcaatttccctaggggcttaaatatttcccggcatttgtgcctagcctaatttttttaatagtggatatccattcccctaatttttttttattttttttccccgcccaaaccttaattccttaccctattccgttttttttaattcataatgaaagggggaaggtccaagaccgattctaagagtgccatttccaaatttgttgtgaatataaa

SEQ ID NO: 83047 - DNA, 368 bp, Glycine max
gaagcgtagaatgaatggcaatggttgtattttaaaaaattaaaattaaggaacgaataaaaattctttaattttggattggaaaaaaaaaaaaaaaaaaaaaaaaaaaaaaaaaaaaaaaaggggggggcggttttaaaggatcaaagttaactaacgctggcatgcaacgcaatagttttttatatggggaaccaaaattaaattaatgggccgtggtttaaaaacgtatggacgggaaaaaccttggtgtaaccaaattaaatggcttggaagaaaattcacttttttaaggtggcgttataagcaaaagggcccgaacataattgctttttcaaaatattggtaaactctaaatggaaaatggg

SEQ ID NO: 83048 - DNA, 216 bp, Glycine max
aggtaactccacaactttaatgccatttgctttgcctatcctcctctctggtggagggccgaaaccaaactggttaaaatgtgcaaattaatattgccagaaccaccatccaaaaatttccccacctttcaaattacgaattttgaacctgaggggaaatatttcttaaatggcgtttgaatttggctttaacctgtaccaaacaagaattttttg

SEQ ID NO: 83049 - DNA, 417 bp, Glycine max
  unsure (1)..(417): unsure at all n locations
cggaattccgggtggccccagccgtccggtctttcggtcggaacttccttggngctgtacaaggaacggaatttggccaaaggaggcatttaactaatggttgcccaacccaaaattcaagggtttccattgggcaggatagctgcttgttccagcattcgaggaaggcattgaggaggccacttttcctttttgtctgggcctaagctggggtttttccaacttggccgtcttatggcaggccaaagagtaggattcctgttgatgaaaaacggtggtttaaccaaaatcggcggatccagaaggaaaccattgcgccagaggacttcccaaatttggttggagagggtttccaggttaagagggtttcatcggatacctttttaaggggggttccagggctcatttcccgggatt

SEQ ID NO: 83050 - DNA, 255 bp, Glycine max
cctaatctaatttttttttttgggccgaattttcttttaaggtttgaaaaccttaaagattttaggtggggctttggccggggttgttttggctgttaaacctcccgtttggaactaaccgatccagagtaactttaatttacaactactctgatacaccgggaagccaacggcggccaaaacttgtacggaattagtcctgggggggtttaagctttaggggttatcaattatgggggggtttacaattaaaat

SEQ ID NO: 83051 - DNA, 413 bp, Glycine max
ccccggaccggaattccagttccgaccacacccttccgcgaccccttgggatgaaagccatcacctttttattttttgccattggcacatccttgccttttaaccatatataatttccttagcagggcaacatgcattaccttttgcaaaatccgacccaactttaaccatacctgtttggtcgatttcccttacctgaatgaaaaatattcctccaaatattttgcactgtaaatataaaataaccggggttcattttattgggggtggggcaatttgccatggacctgacggagcaaaaggtgccggtgaaaggaattgtggagccagatgaagttttccaggccgtttccaaatttggaaggaagactgcattttgggtggttgaagccccccaatctaaaaccaagcct

SEQ ID NO: 83052 - DNA, 299 bp, Glycine max
ccacacgcgtccgccaacgcgtccgccaacttttcttttggcaaccatggcattggcaaccgaggcgttttttttaacccaagccttttccggtttaaaggccggggaccgggcttccgggccagggaggcaaaactccagcttttctttttccagcccgaagcccttaaggttttccagaacaatcaaagcagcagccgccgccaggaccacaaaggccccagcaaaagtgggggctgcaccggtcgggttcaccccaccagaacttgacccaaacaccctttcccggatttttgggg

SEQ ID NO: 83053 - DNA, 378 bp, Glycine max
ccacacccgtccggaggaatataagggttgttttccaatctctttggttttccaggggcagggtatttcccttaactggactgggtggggttaccaattcccctggtttggcaggtccaaggagattggaagcttttgggttggggttagtggtccttgtgttgtgggtgtttttctcgtagttatgttaacttcattctttttttttcttttatatatttttgtctcttttttattgaatcttatgtttttttaatttttgttgtattttggctaattatactcttttttttaatttattttttataatattgtttttgaatactatattatgtttattgtttattatattttatatactcttatttatttttattt

SEQ ID NO: 83054 - DNA, 74 bp, Glycine max
gtaaatcggagggttaaaaaaataatttttttacaaggagaatggtaattaatcttagggggaaatttttaaaa

SEQ ID NO: 83055 - DNA, 347 bp, Glycine max
caagccaatctgagctatcactacactcatgttcagcaactacatgctcacgtgatcgatcgtatcaatgcttaagaatctgagagaccacccaactgccacaccgaaccaaatgttctaacacgatcaaggtcttgacaccttcaggcatgtgattttgactactgaagaatcgatcgtggaccaaatcactgtgaaagtacatcatccctagatccaactctatatgcaatctgcacacagcatctagctgattctggccatgctaaaagtgctaggaggcggactattaatctactgtgacactaataacatatgatttgaacatgctgaaaaagatgagacga

SEQ ID NO: 83056 - DNA, 102 bp, Glycine max
ggggggtttttgttcttattattttttcttttttttttttttttttttctgtccttttttttttattttctttttttatattatatttttattttttttttt

SEQ ID NO: 83057 - DNA, 231 bp, Glycine max
cccacgcgtccgcccacgcgtccgctcactctaccgcccacgcgtccgaaactaaggaggtggactcatatacacaagtttggggaaaaaccagaaatggcaaatgacatcatagagtttgggagcctctatgagtatatttagattccaagtttggtctgccgagaaagttattcaccatactatacacacacgggctaaacttgaatattctctagcaagacagaaatt

SEQ ID NO: 83058 - DNA, 130 bp, Glycine max
atttgactcttgaataagtgcgcagtgttttcttggttatatggtacatatacaacactgagacaagcacacgtgtgctaacattattctcaactaaaaaaaaaaatacaaatgtttcttaatttgtttc

SEQ ID NO: 83059 - DNA, 181 bp, Glycine max
cccacacgttcgagtgagaacaagtagagtctcctttatgaaaccacctctctgcaaaaccgacgagagtagccagcatggggcgccagcgaaccctaaaattctcattcagaaattgaccctaacctcttggtatgcatggccgaaacagcctctaaacctcgtatcacacccgtttaca

SEQ ID NO: 83060 - DNA, 197 bp, Glycine max
  unsure (1)..(197): unsure at all n locations
cccacgcgtccgtgtaagcaagctattacaattttattctgaactaataaccaacaagacgggaggatgtcttttcaatgaggagaggccaccaaacccnaaacccacccattatactacaccctttaatatcaatctttttccatccactcttacatatacaacaatctctttttacttaccataaataacaacca

SEQ ID NO: 83061 - DNA, 176 bp, Glycine max
  unsure (1)..(176): unsure at all n locations
tcttccttccactccttcctccaatcttccctttttactcttaaatagccaacaccaaancaaaggtgggtacattttaaggtgtgaagggcctcctccacttcctctcttttaaggacttcttcttcttgtgatcattttacacttttctactctaatttgcttgttcttttttt

SEQ ID NO: 83062 - DNA, 237 bp, Glycine max
ccgaatcgtcgaccacgcgtcgagcagagcaatagctctcttgttaatctggacccttggctggtgcataaaggcaccagcaaactaaccaagccattatgctgcaccctataggagtgtttcttggttcattggaatagttgagtacatgaaggcagacttgagcgagccaagtttggacaccttctaacagaccggagatgggacataggaggagcagcatgatttatacgtcag

SEQ ID NO: 83063 - DNA, 296 bp, Glycine max
gtaactactgcgcaaattagggtgctttcattctggacctaagagatcaccaacgtgcctggttgtcctcaggttcccttagtaaacttacggttttttgcttgtcgaggatggggcggggtcaagccctgggaggatgtgctcatactccacatggctacatgctctcgttcaaggatcaattccatgcttgtcctcggcaggatgcagcacattattagcactggaaatgcgagtattacagaaattcgtgactactcaaagactaccagttcactcttgcatattactcgtgg

SEQ ID NO: 83064 - DNA, 138 bp, Glycine max
cccacgcgtccgcccacgcgtccgtccacgcttccgtgctatttgcgagttgcaatgagtaacgaagaggctcctttatcagcgtcgggcgagtagctacgagttgagcaaaggcatcaatgggcctcgacaaggtta

SEQ ID NO: 83065 - DNA, 95 bp, Glycine max
catatatcactcacaaatgaatgtttgtttcaattaaccattgatatgcactccctctcaaaccatatctccctatgtttcattttcatcattat

SEQ ID NO: 83066 - DNA, 375 bp, Glycine max
agatttgaaccttgccaaaaaaaaaaaaaaaaaaaaaaaattaaatttaaaaaaaaaaaaaaaaaaaaaaaaaaaaagaaaaaaaaaaaaaaaaaaaaaaaaaaaaaaaaaaaaaaaaaaaaaaaaaaaaaaaaaaaaaaaaaaaaaaaaaaaaaaagggggggccccttttaaagaaacaaattttatttacccttcgttgcaactaaaaaatttttttaatgggccacaaaaataaaattaattggccgggttttaaaaacttgtgaactggaaaaaccctgggttaaccaaataaaattttttttaaaaaaaatgcgggttgggcagggggggaaaataaaaaaaaggccccaacaaatccccctttcaaaa

SEQ ID NO: 83067 - DNA, 98 bp, Glycine max
tcgatccgtgaccacgcgtcgccacctcggaacaggtgagactaaatgagacaaatgcttctaagatcgttccagtgaccactgcaaccgccgtccgc

SEQ ID NO: 83068 - DNA, 440 bp, Glycine max
cccacgcgtccgtttcgaaagattttatccattagtatattttaaaaatgactgggataaacgtaagatttcaattattgaaagtgagtaagtaaacaatttaattggattggtcgaatggtatcaaaaaaatggagcactaactgccattacttttttattattgaattaactcgttcaactttgtttttttttttatcatatcttattttttttcatttaatatttttctatttttatttatacatatttcttcttattatattcttatcaatttttattatttactttttattttttttttatttttattttatatatattatatacattttatttatcattcatatttatctattttccatgttataaatttatttatattatttttgttcatctaatttttatttgcgttatatgttttatactatctctatttc

SEQ ID NO: 83069 - DNA, 357 bp, Glycine max
caacttttctgtcaaccggcccaatctagcattagcccagcatggccaccgcaacagcaggagccacctcgtccttcatggggacgcgcctcctggaggcccattccggagcggggcgggtgcaggcccggttcgggtttggcaagaagaaagccgtcggcgcgaagaaagaccccagggggtcaggcaatacccacgaagggcagcctaagatgcggagaagacgaagaggacaagggtaactgaatcgccgcttctgcagcttcgttctttcgtttttgtttcatctttttagcgtcagagggggaataaaaaatggaggttttggtggttcccgctttcaccattgacgttccc

SEQ ID NO: 83070 - DNA, 315 bp, Glycine max
  unsure (1)..(315): unsure at all n locations
aagatcggaatcaacgtanttggaagaattggccgtttggtggccaggttttctctacagagagacgatgttnaacttcttgccaataactatcctttcattaccaccaattacatgacatacattctttaattctacagttttttactttttttttattcttcaatattttaattattatgattttattattaatatatttttttatatatatatatctaatttatatttttcttattcttatttacattaatatattatactatatttactttaaatttattttattaatatatatataccttatcttattat

SEQ ID NO: 83071 - DNA, 455 bp, Glycine max
  unsure (1)..(455): unsure at all n locations
cacgcccgtccgatcactttaccaattnggctaaagtatatttcacttttctgtttcantcactactaatacccagctttctggggagatgagcttcatactgtcgtctggacagtgcgnnntctatcttcccnncttctagnntgatgtgttgcnnctttgcnntggggaccttaatacacaagaccttttgaccatcatcatggtggaggatggcacgtctccaagtatacctactaaccatggagaagttacctcactcgtttcaattggacaaaagcatctgtgctcagtgttttcaatcaaaagaatgatgtattctcttttgggaagatttgacaatgcagcttcaagccttgtctcctggaaacttgtgctggcaccggcaactgnctattatttatcttcaaaaggatcaactttgggatgaaatagactttgaattttcttggaaa

SEQ ID NO: 83072 - DNA, 239 bp, Glycine max
ggtaacattcccaggcccgctgtaggtggtgctaatttgaaatggctgcacaattcattttccagggttatattttaaatggctagagataaactcccatacatttggggaatgtacgcattggcctaataaaattttttggatatatgtttgaactaagcttgagttatacaattttcaggaaaacgcttctggtgaaaaaaaaataattatgaatataataaaaatttaattatggt

SEQ ID NO: 83073 - DNA, 387 bp, Glycine max
atggccaccttgctattcagcaatcagcattcgcaggtcaaactgctctgaagcactggaatgagttggtccgcagaccgggccccgcaaaggtcgaccaacatgcgccgaccgcaagagtgctcctcatagcatttggtatggcctgatcgtccaagtacctgggtccattcaagagcgattcgcatacctgaccggagaatccagggactacgagggcactgtggactatagctgcccggaacctttcagaacctgagctccaggtgttcacagggatgggcctgctgggcacttagctgcccttttcagaggttcctgacaagaatggcggtataatttggcgagggccgttaggtccaaggctgttcattattttcttttttt

SEQ ID NO: 83074 - DNA, 429 bp, Glycine max
cccacgcgtccgcccacgcgtccgttaaaattataaaaaaaaaaaaaaaaaaaaaaaaaaaagaaaaaaaaaaaaaaaggaaaaggaaaaaaaaaaaaaaaaaaaaaaaaaaaaaaaaaaaaaaaaaaaaaaaaaaaaaaaaaaaaaaaaaaaaaaaaaaaaaaaaaaagggggggtccctttaaaagaaaaaaaattaaagtacgggtaaatggaaaataaatatttttaaaaaggtgaacaaaaataaaataaacggccctttttttaaaaaatggaaacgggaaaaaaacttgttttcgcgaaaggagagggggggggaaaaaaaattccttttttaaaaataagggtaaaataaaaaaaaatcccaaaattatatttttttttaaaaaaatttcgaaatcaataatggcaaaatggaaccccccc

SEQ ID NO: 83075 - DNA, 277 bp, Glycine max
cccacgcgtccgcccacgcttcctgtcctatttagtcgaaggactgctcaaaaacgcaccatgtctactctacaagggggtcctcttgacacgcttcgctaccaaaggctacggcatgaaaaagggtgggatggtgaacgggaaaggaggccaaggagctggtttaggatcaaaaaggttccgattaggagaaggctcacactcaaaatttgaagctcgaagagactttataggaaaagggctgaggctggttatcaaatgtgaaattcatatgcca

SEQ ID NO: 83076 - DNA, 412 bp, Glycine max
cccacgcgtccgatttgtacgaggtagtggtgctgttctgttgcgtgaacaaattgaggtgtgcgtgttcattattgggcaccgatggattcagtttctgtgcaaatagcgacgtcaaaatttgttctttgccccgcggcgacggccagttctaagaagaatgccatcatcaatttcagttccaatttcaaaggaactcttaccaaaatccatgccattttcccaaatggctctttctctagctgcactttggcgtgtgtctggtgtcaagttaaagacagacaataacaaattctgaagtggggggggggtggcgtggttttttatgataatggctatttctgtataatatattgatgaaaccttgttggtgtattttttttaagttttaaagtttattttttaccaattt

SEQ ID NO: 83077 - DNA, 374 bp, Glycine max
  unsure (1)..(374): unsure at all n locations
cccggtcgaccacgcgtccgggtctgtttaaattacatctgccacatctgttgtcatccattatagatacctccaggattgtcaagatttttttaacatatgcctaagctcctaaggacacanattatcactttctgagctggacagaaatcattagagcggatttgtgtagcgtgcaaaataatatctttttcatgtctattaatgttactatacagtattcatttttcacttgatttaaccgctcttctgtttttagatattatttatattgtgtttcataatgtattttatgtcttattctatcatctttatccattttgggggggggggggggggggggggggttaatcttttttcttctttttttatta

SEQ ID NO: 83078 - DNA, 360 bp, Glycine max
  unsure (1)..(360): unsure at all n locations
cgtcggaacaacaagtgttgcgcaatagataccattgtgtgagcctgtttatggtgtggtattcattaagagagggggaaccaananncactatttctcatctttcttacataattttttttcattttttttttaatttatttttttttatttttttaatattctttttttttttattttttattttattttttataatttttctttatttttttttatttattttttttcaatttttttatttttattattttaccgggtggttggtaatacttttattatttttttttaatctataatttataattttttttcctttatatatattaatttttttatttatttttctttttattatta

SEQ ID NO: 83079 - DNA, 343 bp, Glycine max
  unsure (1)..(343): unsure at all n locations
cccacgcgtccgttggttttttggagtaattttagttcagtgtgtggaagaagaagagtgggagttgttagtattagggtgggtgattntttggttgaggttnnatttttgttgttgttttttttatttttttggttttttggtttttttagtttttttttattttttttatttttttgttttttttttttttttttttttttttttttttttttttttatttttttttttttttttattttttgttgtgttttatttttttttttttttttttttttttttttttttttttttttttttttttttttttattttttatttttttttttttttttattttttt

SEQ ID NO: 83080 - DNA, 82 bp, Glycine max
gaagcgtagtatgcatggtcattgttgtaatataatatatttatattcatgtaccaataaaaattcctttatttttgatatc

SEQ ID NO: 83081 - DNA, 557 bp, Glycine max
  unsure (1)..(557): unsure at all n locations
tgtctnntttcgttcgaacccttcccttgggtgcnntgtacataggtaacnttngtatttnntgtcaaagggaagggcaattatacttcaatgttgatgcacctnaaaccatnaaaatnncaaaggattaccaaattgtgcnnaggatangnncttgcattgttacagcnnattcggaggaaaagcnnattgaggaanggacacnnttttcctttcttggtcttggtctttcaagctggtggtnnttttccaaacttttgnntcgtcttattggcaaaggacaaagaagtaaaggaatcnncgtatgnnatgaaaannacggttgctttcatacanataatcggcgtgataccagaatagataaacatatgtcgccagaggggacttcccaaaatttttgttaagagaaagggttttcaaagttaaaaggtagtatcaatttcagatatactatataaaaagaggtggatttcagggcttcaatatacncggagatttntgtaagtttggtcaaggttgatttgcccaaagggatggttcagcagggttactttttc

SEQ ID NO: 83082 - DNA, 119 bp, Glycine max
gcccaccgtccggatgaatatcatggctgcctccaatcttttgtttccagagtctatgtatatcccctacttgactgggtggtacaattccctctttcgcaagtcaaggagaaggaagc

SEQ ID NO: 83083 - DNA, 134 bp, Glycine max
actaatcatatcgttatataacttatttttataccatgagaatcgctatcaaccacaaggggaacatttttaaaacatgcggcaactacgacttctctgacatgactagctctaccaagggaaacagctatggt

SEQ ID NO: 83084 - DNA, 64 bp, Glycine max
catcattccctttgtttctgttgctttcttgtttgttcttcttcttcttgttgatcgacggggt

SEQ ID NO: 83085 - DNA, 366 bp, Glycine max
  unsure (1)..(366): unsure at all n locations
gggggcaaaaaaaaaaanncnaatattactnaaataataataaaaaaagaaaaaaatatgaaaagaacaagaaaaaagagaagaagaaaaaaaataaacgaagaaaagaggagaaaaagaaaaaaagaaaaagaaaaaaaaaaaaaaaaaaaaaagaagaaaaaaaaaaaaagaaaaaaaaagaaaacagagaataagaaaagaaataaagcggaaaaaaaaaataagaaaaagaaaagaaaaaaatgaaaatgaactaaaaaagaaaaaaaaaaaaaaaaaaaaaagaaaaaaaaaaaaagaaaaaaaaataaaataagtacaaaaaaaaaagaaaaaacgaaataaagaaaaaagaaaataaaa

SEQ ID NO: 83086 - DNA, 375 bp, Glycine max
  unsure (1)..(375): unsure at all n locations
ggccgaccacgcgnncgccactcgttcggaggatgtttgttaaaatatggtttaccccaaggcagcaagaccactaggagaggtatcatgaagtcatgatttctctactatccgagcgacctattgcgacctggtggatgactgtgagaaagagaaccaagaggaactgacatggctcagagccaagtgccaaatgtagttaaaggatcactatgatggacggattgggccatgctcacctaggggtaacagtgtgcacagaacagaaaatggatttgtagcaccatttgtgacaggaacctttataggaggctacaatgggactgggttgaaacccattactactaagggggattgtgaatccaggaagacacc

SEQ ID NO: 83087 - DNA, 356 bp, Glycine max
aaaaaaaaacaaaaaaaaaaaaaataaaaaataaaaaaaaaatatgaaaaaaataataaaaaaaaaaaaaaaaaaaaaaaaaaaaaaaaaaaatataaaaataaattaaaaaaaaaaaaaaaaaaaaaaaaaaaaaaaaaaaaaaaaaaaataaaagaaaaaaaaaaaaaaataaaaaaaactataaaaaaaataaaaaaaaaaaaaaaaaaaaaaaaaaaaaaacaaaaaaataaaaataaaaaaaaaaaaaaaataaaaaaaaaaaaaaaaaaaaaaaaaaaaaaaaaaaaaaaaaaaaaaaaaaaaaagagaaaaaaaaaaaaaaaaaaaaaaaagaaaaaaaaaaaaaaaaa

SEQ ID NO: 83088 - DNA, 452 bp, Glycine max
ggaaaagggccagcgagaaacaattcacaatgttgtctaacgcagcaaaaaagctggtaataacggggaagttaataaacaccagcaccgtgtttgtgtgctgatggaaatatttggttcttgcggcaatacagggtcgctgatccatgatccggtttgaaaatgtactctaggcaggataagtaagaacgttcaaagatatgagagctcacctaacatcactaaactgctggaggacatttcacaaatgatggactgtttgtgagcgtgctatgcttacatgtttgctacatcctgttgcttacgaaataaagcactgagtataataaattcctttgagataaacgagacattttttttggaaacatacaggacatgttgtcgggacattgtcactagcaggctacacgttacaaggtagaagcgtgcatatgatgataactgattagctt

SEQ ID NO: 83089 - DNA, 52 bp, Glycine max
  unsure (1)..(52): unsure at all n locations
gaccacgcgtncgnaaaaaaaaaaaaaaaaaaaaaaataaaaaatttatttt

SEQ ID NO: 83090 - DNA, 259 bp, Glycine max
  unsure (1)..(259): unsure at all n locations
aaaaaaaaaaaagaacccaaaaaaaaaanataacctataaaaaaaaaaaaataaaaaaaaaacaaaagaaaaaaaaaaaaaataaaaaaaaaaaaaatataacaaaaaaaaaaaacaaaaaaaacaaaaaaaaaaaaaaaaaaaaaaaaaataataaaaaaaaaaaaaaaaaaaaaaaaaaatacaaaacaaaaaacaaaacaaaaaaaaaaacaaaacaaaaaaaaaaaaaaaagaaagacaaactaaaaactaaaaa

SEQ ID NO: 83091 - DNA, 265 bp, Glycine max
gcccaagccctatacaaccaaactctaacactttcttatttgattcagtttccatggctagcctcaaggttgcatttttggctgcagtgctctgcatggttgtggtgagtgcacccatggcacatgcagctatcacgtgcgggcaggtgacgagtagcctggccaattgcatcggttacctccagaagggaggaacgccgttgtctggatgcttcaacggagtgaagagcctcaatgccgtcgccaagaccaccgtctaccgtca

SEQ ID NO: 83092 - DNA, 317 bp, Glycine max
gcgttctttttcagctccttacctttttcttatccaatagcttgtagtcaccaaaatagtgtgatgcgatggtgtcttctaatgcgtgaatctgtgcatcttccacgcaatcatgcttgcctgtgtctcctaccatttcaaacacgcttgttagtccttttcttaatgtttcgtcaccaagaagttaccttgtgaagaaaaagcatgtgaaatttagcaaaaacatcagtgctgttgcttgttgcatcaacaacaacaactgaggtaatttattgagttcatgctttcatcatgggcttagtatgaaatttggtggg

SEQ ID NO: 83093 - DNA, 308 bp, Glycine max
gccagcggcatagctgcaaaacttgaatactttcgggggaacagcataaaatcttaatctctgatgcacctctttccctaaaacaaaatgccagaattctaaaattctaaccatttgaccattttaaaatttttacctgtctacctacacaaatgaacacacgggctctaagtctataaatctcttaagccattaataattttatttttattctccgtatctacgagtacactagttagcttcttagctttggttctttggttttattcgttcaggcgtaccgcaacaacaacggctagaggactgga

SEQ ID NO: 83094 - DNA, 270 bp, Glycine max
ggaaattaaaatttaaaatatttcccatgatttgtgggagttcagagatgacagaagagaataacttaaaaaagaaaaatgacacactaaagggaagaacaccacagaggaaagtgcaaacggctccccctgtcatgaaagagactttaatctacacttatccacaatcttgaagacataatcgagagggtcaaagaaacgttgcaaatacaaagccaaaagcatttcccattattaaacttgccataataaccttcattttttcaatta

SEQ ID NO: 83095 - DNA, 203 bp, Glycine max
  unsure (1)..(203): unsure at all n locations
gaacggaaggangaaaangtataacaataaaaaaacaataaactaggtacgcaaaagaaaaggcggcataaggtctaacagcaccagaaaaagacatgaccaaaagtttaatcctcgtcttcctcatcatcatctccacctgcggccttcttaacagcagccccttgggtttttctcttcactcttccaaggcgaccaccacc

SEQ ID NO: 83096 - DNA, 379 bp, Glycine max
  unsure (1)..(379): unsure at all n locations
cttaaaaacaaaacttgaataaaataantgccaatatataaaaacccttgtcattttaacttcatcattttttccctactccaaccctccattatgattttaaaacctttaaaattcacccaaattaataaatacaacacacataactcttttccctccctaatattttatcttaaccaccccccacaatttatttaactttcaaacctatttttctttaaaaaaaactatccctattcaattttccctctccctcttccatcatcaaccactaacaatggccattatcatatacttccaaccaaatcaactactttatccctatgaccttcattttataaaaacaaccctcttattacaacttatttatttttccact

SEQ ID NO: 83097 - DNA, 302 bp, Glycine max
aaaaaccattaccataccatatctcattaaccccggggttttcaattgtctgtcaatcctattgtgagccaccacaactaagttacttgcaacagttcataactcaactgtaatttaaaaccatgatgatttacttcattgcccttcttcttcttcagcaaaattcagaatctgacaaacatctttctcatcagtgttgaaataggacctcctcccccccaactcagcaactctttttgctgcaccggaatctctgggactctcattcaaacacttcaccattttaatctttggaagcatga

SEQ ID NO: 83098 - DNA, 195 bp, Glycine max
  unsure (1)..(195): unsure at all n locations
ataatcataccccccccacancnncccaaccccggaattttaaaaaccncacaatccccccaaaaaccaccacaactacattacacccaacaacacataaaaaaactttactttacaaccattataatttactaaaaacccccatttccccctcaataaaaaacacaaacctacaaacctaccacctttccctat

SEQ ID NO: 83099 - DNA, 73 bp, Glycine max
  unsure (1)..(73): unsure at all n locations
acgtatagctnggatcctctagagcggccgctggttttgtttttttttttttttttttttccatctataaaac

SEQ ID NO: 83100 - DNA, 73 bp, Glycine max
  unsure (1)..(73): unsure at all n locations
taagctnggatcctctagagcgggcgctttttttttttttttttttttttttttttcctccgcttattgatat

SEQ ID NO: 83101 - DNA, 323 bp, Glycine max
aaaaaaattaaagcaaaaacgactataccttatggagtcattttttcaaaattcataatctaatcatatttatcctaaacccaatattaaataaaattttttcaaccctttaattgtctccaacatccttttttgctccttttaaaaccatcattttatattcaactttacctcattctctttttgcttgatcaaccaacacaaaacccccattcaaaatcttatacaagcaaattttctcaaacaaacccttataaaatttctcacatttataaactcaaaaccttaaaaaaaatacaaacttatgccccattttttttttc

SEQ ID NO: 83102 - DNA, 140 bp, Glycine max
tcggagcgtgcgacccctttattcctcccctattggtgtgtgaaattttggatttatccaccaaaggtttttttcatattatttgaaaggagatttgtttttttattattaatagaaaacaaaaaccgattttttcccct

SEQ ID NO: 83103 - DNA, 285 bp, Glycine max
  unsure (1)..(285): unsure at all n locations
ggnnttttttccgaaaaatttaaaacccccccccaccccaccccaaagaagangaggngaaaaaaaacataacccccaccatatttctcccaaacccaatataaaataatttcccctcaaccaaaaaatngcccccaacatccaccaaggaccacccaaagccaacaccccatttcaacttcaccccacacttttccgtctgggtcaaccaacacaaaccccccaatcaaaaactcatacaccccaactttcctcaaaatcccttctccaacatttttctttata

SEQ ID NO: 83104 - DNA, 110 bp, Glycine max
ggcctcatgcgaagctttgtttccctcaacgcagggggtgcgtggtaccttggtcctctctcaaagtcctccataattgcatgagagacgttggcttgctttttctttcc

SEQ ID NO: 83105 - DNA, 91 bp, Glycine max
ggaaaaaagacatgctaaacttattacttaatgggggcccatttgtcgccatttataaaacaaaccctcatgtattattttaacatgcaaa

SEQ ID NO: 83106 - DNA, 299 bp, Glycine max
ggggggcatttaaaactcccatcacataacataacacccaacaaaaaccattgaatccaaaacacttagaatataaaaaaccatttaaactaatcccgttcagaaagattaaatcaagaaccaaaaataacaaccgttctttaaatcctttaaaaataaaaataccctaaaaaatcaaacggtgagaacgacggctccaccggccttctttatttttttttcaacgatctttaaaataatcttgtcctttaccacaaaagcctttttcttaggcaaaacccttttacccaaaaccttaa

SEQ ID NO: 83107 - DNA, 376 bp, Glycine max
cggttattatataacaaaaacaataatgtaaatgagggtcattaatgatcatgatgatctctcatacaaacaaaagcaaattaagaaattaaaaaattaatttttaattacaaaagaaagaaaaggaccaattggtcatcatcattgttctcctacatcaaacccatacacacatacagaatgcaaacacaaaataaagggtctttctattgatgaagtaaactaattggttaggtttcttcttaaccaccctaaagccttaataaccccttctctcaagatttacttattgtacaccgtcttccccaactcttccactaattgttcaacccagaatatccaattgtcattccaaacttttccatttttttatata

SEQ ID NO: 83108 - DNA, 473 bp, Glycine max
  unsure (1)..(473): unsure at all n locations
ggtntttaataaagaggactcaacatttatattgcgcaaattctccccaacctgtttccaattcattaacaaaaaaccaccgactctcaccctaatacttagctaatgaaatagaccatttactaacacccctcaaaaaacaccacacctttaatatatctcaaccctaagctctctctcccctatatcctacaatctagctgaatctccttaaacataaaggaaaccctcttatccttaattgctcctaattcacaattctcaaatagcccctcatgttatatttcaacacccttctataaaacctatacaaacttctttataaacctagatcactctttaatttctcatccaccaaccttaccagcctcttgaaatgaatcttccttttcatcatcttcttgcatttctgaaactcacaaatttacctcatacccactaaaccccgtcttaaaccgtctttctttttcaca

SEQ ID NO: 83109 - DNA, 310 bp, Glycine max
  unsure (1)..(310): unsure at all n locations
tacaacaancacaaattatttcaatatcttttaaaaacagcattttcttttcctcatttgctccctttacacacaagaagtaactttaatcctaaattaaaaccctctttttttctttcataaacattaacaccatcataattagactattcacaattcaaccacccaattcacaaaatcaccctatatctctttagtagcaaacatatctaactattacacccatattataaaccaacccaaagtttttcttcaaaaaataaataaacatcccaattttctccattataaaaccatcaccttcaacact

SEQ ID NO: 83110 - DNA, 194 bp, Glycine max
gaattcccaaccaccacctctagtcttaccatctttcactataacccttctaattacatcttgcaatcatcatactcatagctctaccctgtaataaattaccattcccttaaaacttcccacattatactatactgaatcataatataccaatccttaatcatctaaatagctaactacttcacaaaaattgc

SEQ ID NO: 83111 - DNA, 397 bp, Glycine max
  unsure (1)..(397): unsure at all n locations
agaacagaccaagtgccattttcatcaaagccggcaggttattaccaaaaagatatcatccaatactaaagcctgttattggaagaaaaaaataaccccccacccaactgatctgtccaaaattaaccaaccaataccagcttatattataaatttggcccaacataaaatcaatgcttattccttaagacttgcttataagttcggacaggtgctaaatggtgttccagcaagacaaggtccttgaccgcgctgaccaagtcttgatgcataatccctgcgcccgaaaaaactgtgcggacgctcacgcattgtgttgtgctcactggaccctttccanacaagaaaactgtggttcccactgcattaacaaatctgcctactcacatagagaggc

SEQ ID NO: 83112 - DNA, 420 bp, Glycine max
  unsure (1)..(420): unsure at all n locations
ttttaaaacacaccccatctaattttttatgacatttttaaaaacacataaacccacccaacnnncaacacnttaatctacccacaaatttcttacctttacctttatacttaccaacttttttctataataaatattattaaaacttttcataaatattttcaataatattttcttttttaaatttttatcctcttacaaatccacacaaaatactatctttaaacattaatatttaaaacctcttcttcctaataatatatctaactcacattaatttccttatactcaattcccccttttcaataataaaaacatttctttccatttacttttaataaataaatactaccacccctctaaaaaaaactattttctttattttctccccaaaatattaattttttttttttttactca

SEQ ID NO: 83113 - DNA, 473 bp, Glycine max
caaaatcctcctttttttttttcggttttttttttttttttatttttttttctttttttaaaaaccccccaaaaaatctccccttttttttttcccagacccccccttttaaattcccaatttttaaaaaccttttttttctcagaaaacttttacaaagcccccttcttatttttttaaaacacccaatctttttccccttttttttttttaaaggaaacacccaccctaaaactttaaaaaggcctttccaatcacccccaaatccttttaaggcttttttttacaaataaaacctggaatttccccccagacccccccagtttccaatttttcttttctaaaaacctctcatacctttttttccccttttttttcccccccaaaaatcagaaaaacacccccccttaagcaaatatttcttcaaaaaaccctttttttttgcccaaacccccaaccaatttttttttttt

SEQ ID NO: 83114 - DNA, 300 bp, Glycine max
gcacataaaaaacctcaatcttacccttttaccggggtgaaaagtattatcaaccggaccctatttttgatttttccaaacaccacaactcacattttctttttctatatcatcccttaaacaaaattatcccacacataaccttatttgaattattgaacacctacatacccatgttttcaaacttgaattccggacctcaaccttcatgtttacaacctttccttatactaattcaccttacatcattggttcatcatgatcatacatgtttgctgtacaaaaactttatacagttac

SEQ ID NO: 83115 - DNA, 130 bp, Glycine max
  unsure (1)..(130): unsure at all n locations
cccccccatttaccaacaataaaaaccaaaacaagcccgctttttataaaaatacctcaatttcaacacccnaaattattaacactcaaatcaacaacttcncctgcttcattcaatgcctaaacaaccc

SEQ ID NO: 83116 - DNA, 442 bp, Glycine max
  unsure (1)..(442): unsure at all n locations
ccccccccccccctgtgccctctctcccctccccccccccccggcccctccccctcccccctcccccgctcccccccccccctccccccccccccccccccccccccccccccccccctctcccccccccccccctccccccccccccccccccccccccccctcccccccccccccccccccccccctccccccccccccccccccccccccccccccccccccccccctcccccccccccccccctcccccccgttgcccccccgccctctccctcccccctcccccgccccctccttccccctcctcccccccccctccccccccccccccccccccccctcccccgccccccccctcccctcccccccctcccccctcccctccccccctccccctctccccgcttctcccccccccccctcccnccccccccccccc

SEQ ID NO: 83117 - DNA, 224 bp, Glycine max
  unsure (1)..(224): unsure at all n locations
aaaaaaaaaaaaaaggggggggccccccaaaaaaaaaaannaaaaacaaaaaaatacaacaaaacaaaccaacaaccaataaaaaaacaacaaaacaaaaaacaaaaaaaaataacaaaaaaaaaaaaaaaaaaaaaaaaaaaaaaaaaaaaaaaaaaaaaaaaaaaaacaaaaaaaaaaaaaaaaacaaaaaaacaaaaaaaaaaaaaaaaaaaagaagcaac

SEQ ID NO: 83118 - DNA, 227 bp, Glycine max
gccacacaaataaaaatcagcaaccatttacagagggggcccttgactcatctctcaccgaaattgacccatattgtttagggaaattctccatatcacaaaaattgaaaactatttttggcgacaaactaacattttcattgcatatcaacaaaatgttgttatccacttttccaaaaatatctctcagcccatctgacactttagacgcccctgtatttcttaac

SEQ ID NO: 83119 - DNA, 333 bp, Glycine max
  unsure (1)..(333): unsure at all n locations
agcggccgctttnttgttttttttttttttttttnttactttaaaaaacccaacgatttactttccgtttttgcttttctcctcttcaactgctgattcctcttgtttaaattaatttgcatctgccccccccttctggaaatttccttccacaccaaggactcatagtcatacccattgtccgtcctgacaattacttaccagcacctgccaccgtaccagacttttttatataaagaagaattacaaacctggccaaccaagcgcacaacctatccctgtctgaaatagctttaccatcacaattccacacaacctaccatcccgaaccat

SEQ ID NO: 83120 - DNA, 94 bp, Glycine max
ctgaactgaagccagggtttttgctttggggggtttgcttttctcctcttcaactgctgtttcctcttgtttaatttgatttgcatttgccccc

SEQ ID NO: 83121 - DNA, 231 bp, Glycine max
  unsure (1)..(231): unsure at all n locations
ggtttaaaaacaaaaaggaaagcggggagaaaacaaggggaagnaggcgcggccaaggaccagctgcgaccggcatgcaacataacgggaagcgcactaatcaatcacggccgcttacaacaggactggaaaacagcgtaccaactaatgctgacacatcgccttcgcagtgcgaatagcaaaggccgaccgatcgactttaaaatgacaacgaaggaaatggaccgccgt

SEQ ID NO: 83122 - DNA, 138 bp, Glycine max
  unsure (1)..(138): unsure at all n locations
acgagggtttatatctgctttgtttctattaataataaaaaaaacaaaactcctttcaaataatatgaaaaaaacccttcctggataaatccaaaatttcacaaacaaantcgcgaggaataaaaaagtncacgctcc

SEQ ID NO: 83123 - DNA, 110 bp, Glycine max
ggaaagaaaaagcaagccaacgtctctcatgcaattatggaggactttgagagaggaccaaggtaccacgcatacgctgcgttgagggaaacaaagcttcgcatgtggcg

SEQ ID NO: 83124 - DNA, 218 bp, Glycine max
  unsure (1)..(218): unsure at all n locations
gaaaaaagggacgaacgcacgcgtnccacgtgtgagaaaacaacatcagaagggtgtttcttattgcagtccctcaataaatgggggggggtttattgcatatacctaaaaaagaaaagcgtgctggctatatgatgcaagcaaacgtacgcgtgcattctacgtctatagcaacactcttgggttggcctatgataagccagtggtcgttagatatg

SEQ ID NO: 83125 - DNA, 304 bp, Glycine max
attcttgtgcactcaattactctctctgtctctggagcgtcgacctttcgttaggacacaaagccccttctccgatcggttgagcaaggcctccccggcgagattcccgtggctgttccatcagctaccgagcaccacccaaaagcgcttaatatgaacgttttcagcaagactcataacgccactcactatctaattgaagtgaacccttcggacacgctttgtgaagttacgaaaacattataaactgttcagggtgcagatgtctatcctgctgcacagcatatgcttattcatcaaggaa

SEQ ID NO: 83126 - DNA, 123 bp, Glycine max
ggtaccgttttatacaaaaatatgaaaacaaaaagagaggggcgggcggtctataggatccaagcagacttacgcgtgcatgccaggtaattgctatcctatagggtgacgtacatgcaatta

SEQ ID NO: 83127 - DNA, 291 bp, Glycine max
gacggcactcgttttcggtctcgttctggtttatagatctttgcgaaagaagtttacagggctcaaccaaagatgccagaccagggaaggccaatcaattgaccttacaattcttaggaaggcttcggcaccaaccaaatggatacccgttaaggacaatctcttgtttacataaacaattggcatgtggattagaatagcgtgtacaatggccatttttccactttttccctctgcggatttatacccgctcacagggatactctcacagctctataccccgtttgggac

SEQ ID NO: 83128 - DNA, 305 bp, Glycine max
gatgagggtaatgaggaagatggttgtgaacggctcattcctcttcattggaagaatgcggccgatcttgcgggtggatgcttacctgatggcgactgctgaaaattttctatcatatggagtgaagtaacttgactacgctgtaaaaaatattgctaaatcacgatttgaagaaatttaagtttgccgaaatgattatgattgttgaataatatattctgacctggtaggcccatatggaactggtcatgataatgcagccttccgaacgaaggcgctatcggattgggaaatggctcactctc

SEQ ID NO: 83129 - DNA, 238 bp, Glycine max
gatttcacgcccgaaaacacacacgtggaattgaggggtggaaattcagacgccgacccgacaccagcatggcctgacaccaccccttctgcaccatggccctcgctgacaaacttcgggctttcgctctcgttcatgttgttcggggcccccctgtcttccaagatgctaggggtgctgcatgactactcaaatgatatcgacgctgctggagaatatagtgataactgtggtgatg

SEQ ID NO: 83130 - DNA, 198 bp, Glycine max
  unsure (1)..(198): unsure at all n locations
ggtaacaagctgctggagatatgcacaaaatgtgacgacgtgtaaccgataatagattataatcgtctgctatcagacgaaaattgctttaatattgtgtgatcnataataactgatcgctgcgaccggggatacaacgtcaatggtggttaaactatgttcgtcccgctcaaaacacttattgagcaaatacccatt

SEQ ID NO: 83131 - DNA, 335 bp, Glycine max
cggctgggagacgacaacaggaggggcattttgggaaaaaaaaatctacaactcaatgaggggaggcggcctttatataggatacaagattacgttcgcattcatgcgaaatgaaaactattttatattgtcacctatatacactgcacagtttgttgtttaacaacctgtcgactgaaaaaacgcctgttcgataacccaacattagatcaggttgtaggacataaaactttcggcagctggcgtattaacgattaggacaagaacgatcgttctttacaacagttgcacctcctgaatggctaataagaccccccctgtagcggatcattaat

SEQ ID NO: 83132 - DNA, 98 bp, Glycine max
gggggcaaatgcaaatcaaattaaacaagaggaaacagcagttgaagaggagaaaagcaaacaaagcaaagcaaaaaccctggcttcagttcagaacg

SEQ ID NO: 83133 - DNA, 141 bp, Glycine max
tcgttatgaaatgaagtattgtgaagacaaaaaaaaaaaaaaaaaaaggaaaaaaaaaagcggccgttctaaaggatcaaacctaacttacccttgcttccaacgtaatagtttttttttagtgtaacctaaattaaatta

SEQ ID NO: 83134 - DNA, 439 bp, Glycine max
ggcaatgatgcatatttggccctttatacgtcaactagtgactaccttgttgcagaacagtatacaggtaaaatggaatcttctactaatgacaccatatgaagcaacacctgaagttcccagaaacaacatatatatgacgtcgtcatttaatgatatacaatatgcagaagcagttgaaatgatggaaactagataaaaccacgattttttttttggtttagattacaaatatcttctaccggaagcaattctcttcgagtcagataggacaactataaactgcaaaactcttcctccgagtatttaaagcaggtatatacccaaattcgaatgctgagacctctgattaagcttgaacaatcattgatccatatgctcgggggtaaactatgaagttacttattaattaaaaagaccactccattgtcattttcaa

SEQ ID NO: 83135 - DNA, 317 bp, Glycine max
gggggtaacgagctgggtttggttggtgtttttgatccaacagttacatttatttggtttcctaaaatttcgcgagtcatcaaggccttgtccttacgtttgttcatatgcaatttgtgcagagaaaaagtgcgtgtgcctgtgaccaagccttatgtatcatttatagggaaaagaaatcgaacagcaagtcctataattacttggaacagtaaatcatctgacaaaggcccaaatggcacagcattgggcacctatgcttcagcaacagtgggagtggactcagattatttctgtgcaactgggatcacttttga

SEQ ID NO: 83136 - DNA, 97 bp, Glycine max
  unsure (1)..(97): unsure at all n locations
gcgtacgtaagctgggatcctctagaggggcggnttttttttttttttttttttttttttttgggtttggtcctgggtggcccccttctgtcggggc

SEQ ID NO: 83137 - DNA, 54 bp, Glycine max
  unsure (1)..(54): unsure at all n locations
ttttntttttttttttttttttggtcctaacccaaatgggaccgtccccttttg

SEQ ID NO: 83138 - DNA, 540 bp, Glycine max
ggggggtcttttttattggggtcgtttactttttttttttcttttggggggaacccgacattttttaaaggggggaaaacccccccccccttgtgggccccaaaaaaaaaagggtttttaaaacccccccttcccccccctttttttaaaaccccccctatttttttattccccccaaccccccccccccgggggtttttttttttttccccaaaaaaaaaaaaacccccctttttttttttttttaccacccccccccttttttttttttttggcccccccccttttttttttttttcccccccccccccccccgggggccccccccgatttttcccccccgcccccggggggccccccttttttttttttggggggtgttttaaaggggggggaaaaaaaggaaaaaatttttttcgggggaaaaattttttttccccaaaaaacccccaaaaaattacgcggggaaaaaaaagggaaaacccgggggcccccaaaggggggggccaccccatattttgtggggggcccccccccccc

SEQ ID NO: 83139 - DNA, 84 bp, Glycine max
aaataaaatcaatctatcaataattctatctatatagatagatagatatctatagttatcaatttttgtttgttgtccccatca

SEQ ID NO: 83140 - DNA, 54 bp, Glycine max
ccgttaatggatatgctaaaactcagcgggtagccccgcctgacctgaggtctc

SEQ ID NO: 83141 - DNA, 91 bp, Glycine max
atgcaagatcactgcataagtgcacatgtaagtggggggcaaccctcaccttacaagtcaattaaatagatgcacatgaaaaacagtaaac

SEQ ID NO: 83142 - DNA, 173 bp, Glycine max
ttttaacaagtcaagcttaaagcttacaggtttaactaaacagttaagcatcagcaattgagcatcccattttttttagaaaccaaaccagaactatttaagtgttgggctggactcgactcgtttgcatctagtggcaacaaaaatactaggtgattatctatttaattatg

SEQ ID NO: 83143 - DNA, 397 bp, Glycine max
gggggggaaaaacccggggaaaccaaaaaaagggtccccccccccccctaaagccccccccggggccccccggaaaaagaacccttttttaaaaggggggggggccccaaaaaggtttttttaaacaggggggcccccccccttttttaacccaaaccccctcccccagggggggggggaccccccccacaaggggggcaaaaaacaaacagggggggcctcccccgggggggccccccccccggggggaaccgtggtttttttaacccccccttaaaatgtggggggggcaccgttcaccccgaaaatattttttttttccccctggaaaaaaaaaagggggggaaaacccttggggacttctttttaaaaaagggggggggggcccacccccccc

SEQ ID NO: 83144 - DNA, 171 bp, Glycine max
aaaacccccaaataaaagccttatgttgatcactttacagtttgaataagggggaacttttttacacagggggggccaaaacaaaaaagaaccaaccataatggttcagggtaatgtaacaaaacattttcccttttaaattggaacccttttgttgttttttttaaaccc

SEQ ID NO: 83145 - DNA, 103 bp, Glycine max
ggggtcaacaatgcaccatgtaaaaaggatgggtatcattttcggtcaaagattggtcctgattaccttttagccatttttaagatatcaccaattataagca

SEQ ID NO: 83146 - DNA, 154 bp, Glycine max
gggaagccactaggaatgggttggtggtgattgtgggtaggaggcccccccttccccaaaaaaaacaaaaatcctcttagtttcctttattcttttaaataactttggaaattgatgtgttggtatgataaagaaaggttgacgcttaaataca

SEQ ID NO: 83147 - DNA, 88 bp, Glycine max
gatggaagcttgcttgtggagcttctatggaggctggatctttgagcttcaatgaggtcctttaatggtgattttccaccatggagat

SEQ ID NO: 83148 - DNA, 77 bp, Glycine max
accttggggggaatttcagtagcttcgggttggggttacatgaccaaatatcgaagccttatatagaaatcttcatc

SEQ ID NO: 83149 - DNA, 363 bp, Glycine max
aaattaacaaaatcctcatccaattggctgctggcccagatggaataaaaaaaaaggatttgggattttctgagagaaatccccagagcagaaaagaaaatgaagaattggtcgtggaagataattaaatccttcgcttattaaacattacgagagaggaaagaatgggaaatggaaactgttgatgaatataggcattaaacaagattaatttcaccaatttcgatcctctaacttcattttccctcccacttttatttccaacacaaaagaaaaagggaagccattgttccaaaggaaatccattcagacttcaaataactgcagaaaccaccaacagagttttgtttttaagacaacagc

SEQ ID NO: 83150 - DNA, 72 bp, Glycine max
gggaaagggttttgggttgtgttgtgctgtgctgaaaggagtgtagagagagaaaacgagaaataaagagtc

SEQ ID NO: 83151 - DNA, 402 bp, Glycine max
gggattagaggaataatcaattcgggacaatgggggtttaatgttggaaattcgagattataaattgagttagagcaattcgacgtaattgatttactagctcgataatatcaataaaactcctttaaaataatatgagcgaaaaatcataatttttttttgtggtaaaataaattgattttgatatctatcaatgaagccttttttttttttaaaaaaaatgatgcaatcttgaacacaaaaaagatagagtatggtttttagactcaccaggaccaaaggtatctttttaaaacggtggtataaaaattgtaggtaatttccaagtaaaagaagtgtagaaaaaatcattatttaatttttcttcccaattctaagagatcccaaacgatttgttttttc

SEQ ID NO: 83152 - DNA, 136 bp, Glycine max
gggccaacgagccttatgctttgtgagggctggcaagtggctcagccaaccgtgtccaacttaactttcggatgcgacaaggttccacatccgatctaattgaagcccggtcgactttaacaaagacagaattata

SEQ ID NO: 83153 - DNA, 71 bp, Glycine max
ggaaagggttttgtgttgtgttgtgctgtgctgaaaggagtgtagagagagaaaacgagaaataaagagtc

SEQ ID NO: 83154 - DNA, 364 bp, Glycine max
gggccaccaatggtttaacatgtgttctaaccatgtaaacatataaattcaggaaaaaaataaggtgggccgggaaaccttaatccacataagaaaatccacaaaaggccaattcgttgctcacaaggttaaaatatcttcaagagtataacaaaaacagtcaaaggcataaaatctatatctaccacattatggaataactgggtcgattttatctttattgagcataacaataccattaattatctatcatgcatttaaatatgatgtgcatgtcttaaaattttgaaaatagccgtatattatcgcttagtgaaaattctaattgatcctttgttcaccgctgtacgatcgcgctagtcat

SEQ ID NO: 83155 - DNA, 465 bp, Glycine max
ggggttctggaacttttcctatgtaaagatgataacatgctttggacttacaataacccgtgttggacttacaatactgcgatattattttggatgacatgggcttccaataacctgcaattaggacttacccaaggtcatgtttacaggaagggggaatttttgtggttagccactacagtattatttattatactgtcatatacttgggtatagtagctggatcactaatgatggcttcgaaatatttggttttggttttgaaatgttgatgcttgactttagtgaatttcatagcacatccagtgatagtttcataatattctttttttatcaaaataatagatcctaaatgtcattatgtattaagaaaaaaagagtgtgttcaatttttggaatttcaaaaacaccctttgaacgttaacaactgttgtggggaagcgaggttggtttttaagttttaac

SEQ ID NO: 83156 - DNA, 127 bp, Glycine max
  unsure (1)..(127): unsure at all n locations
tttttctcanntagtgtgagcaacaagggagcaaccgacgcgggtacctttatgtagttttgtggcacacccacccttcaatcgtcttcattcaaacgcacggacacgtgggcggacactttagact

SEQ ID NO: 83157 - DNA, 149 bp, Glycine max
gtaagcagcaaagccttgatgctatataatggaggcctgatgaatcagtgggcaagacatcgatggacaactcgataaaatgcgcaccaaccaacaaagtctacgataggagtctatagtttgtcttataaccacttcaaactaagaag

SEQ ID NO: 83158 - DNA, 126 bp, Glycine max
ctgaaaagaaacaaaaacccgcagattgcatgacaggtataatatacaattatttcaaagttgcgttttgaaatttctcctgttgacacttaccgtagacaagctatgaaagtaagtgaaaactcc

SEQ ID NO: 83159 - DNA, 316 bp, Glycine max
ccgaaaaaagcatccaaaataataatattgtactcagctgagaatgatgaacaagcaaaaaaggacgtgtctttgagtgttagctcaaaccacaaagaacacaaaatgagagagtagaaagaacacaacattgaaagcaaatactagcacacaaacacattggatccctccatggaaacacaaatcagcttcaacaacacttagaaaacagatggaaaaagggggagcaattaaagagagatctcacaaatcacaacataatgtgaaccccaccatgtaagtacattattggcctttgattcaagtacaaggactg

SEQ ID NO: 83160 - DNA, 73 bp, Glycine max
ggctcggatcctctcctcttctttacactgggggtcactgaacggccacacggagagaaagaggaggacggtc

SEQ ID NO: 83161 - DNA, 226 bp, Glycine max
gggcggcagcgctcgtttcgacgccagcccagacgcactcacccacgacacctctaactcttaaccctaccgcgatctgttgtcgttgtacctgcaaagttttaaatacctaaagagggacaagacattcactatttacctcaaacacagggaacgagggacaccctgacgagctctgcgacctaatactacatgctggactcgacgcttgcctaaatcccgaccc

SEQ ID NO: 83162 - DNA, 346 bp, Glycine max
  unsure (1)..(346): unsure at all n locations
ggttcatgttttatgctgtggaaaaaatgaatactttcgttgctggtggtttttggtagttttataattttggtcgcttttttataattgttggatttgatgttgttttaattcaactttttttgtttaggtacaatgaacgtatgaagttattatcattattataaattctagttttacaaaanaaaaaaaaataaaaaaaaaaaaaaaaaaataaagaaaaaaaaatcaataaaaaatcaaattaaaacaaaagcacaaattaaattttttgaaaaaaaaaaaaaaaggcgccttttaaaaaaaaaaaattttttctcccgggggggggaactttttttttttt

SEQ ID NO: 83163 - DNA, 82 bp, Glycine max
tgatggggacaacaaacaaaaattgataactatagatatctatctatctatatagatagaattatagatagatagatataat

SEQ ID NO: 83164 - DNA, 446 bp, Glycine max
  unsure (1)..(446): unsure at all n locations
gaaactcggaagcattccctcctcgagtgtgtggtgtggtgttgcagttgcaaattgcaacactcagcacaacactgcaccacttttgtttctgcattgtgtttcccagcttagctacaactacaaacaagcccacgtcgctttcataaaaccacacccaccagccaccatcactttccccaaaacccaactcatcaaaacttaaactcagagagagagagagggagagagagtaaagaaatgagtgaagaagctaaaatgaacttcgtcggagctctaacggcgaggcccacctccgatgaccagaaacaagcgccggcgctgaatgtccctccgaagaaggtcatcatcaagagcgctgatatgatccccgacatgcagaaggaggccgntgatatcgctgtcgctgcgtttgagaggtacaatgtggagaaagacgtcgcgga

SEQ ID NO: 83165 - DNA, 94 bp, Glycine max
ggggtttactgtttttaatgtgcatctatttaattgacttgtaaggtgagggttgccccccacttatatgtgcacttatgcagtgatcttgctt

SEQ ID NO: 83166 - DNA, 200 bp, Glycine max
  unsure (1)..(200): unsure at all n locations
ttccgagttaaaagggtatatgcttcgttacattaccctgaaccattattgttcgttcttttttgtttttgctcctgctgtgtgatatagttctccattattcaaactgtgaagtgatcaacattatgcttctatttggtggtttnaaaaaaaaaaaaaaaaaaaaaaaaaaaaaaaaaaaaaaaaaaaaaaaaccccna

SEQ ID NO: 83167 - DNA, 105 bp, Glycine max
  unsure (1)..(105): unsure at all n locations
tgcttataattggtgatatcttaaaaatggctaaaaggtaatcaggaccaatctttgaccgaaaatgatactcatcctttttacatggtgcattgttgacccana

SEQ ID NO: 83168 - DNA, 322 bp, Glycine max
gggcttactctactctactcttagctagatgttaatctggcagtcgacttgagctcttgcccctagaggaaaggtgggggctttcgtagttcaggactgtattttgggccttcatctcttaccatatttctactacctgggagagactgatgaagtctataacctaaagacatgatagaaggaaaagataaacgttaacagagatcataaagatggctgttaccgtctagccctgatgtgtggatcggacgtgactataaagccgatttaagtattgctgtttcgatgactgaatcacaaaacgatatgcagagtgacccct

SEQ ID NO: 83169 - DNA, 153 bp, Glycine max
tgtatttaagcgtcaacctttctttatcataccaacacatcaatttccaaagttatttaaaagaataaaggaaactaagaggatttttgttttttttggggaagggggggcctcctacccacaatcaccaccaacccattcctagtggcttcc

SEQ ID NO: 83170 - DNA, 88 bp, Glycine max
atctccatggtggaaaatcaccattaaaggacctcattgaagctcaaagatccagcctccatagaagctccacaagcaagcttccatc

SEQ ID NO: 83171 - DNA, 61 bp, Glycine max
gatgaagatttctatataaggcttcgatatttggtcatgtaaccacaacccgaagctactg

SEQ ID NO: 83172 - DNA, 71 bp, Glycine max
gactctttatttctcgttttctctctctacactgctttcagcacagcacaacacaacacaaaaccctttcc

SEQ ID NO: 83173 - DNA, 327 bp, Glycine max
cccacgcgtacgaccactcatagcagcctttttaaggccacacgacacatcagatatgagacgaccacagacagattcatcttacttactagcagtctaaccctctaacaacatcactatggcgtcagaaaactaacatggcaggtaactaggattggcatgtacattattcgtgtgatcaacaccaacgtggatggggagcatattatactgtttacgacgaccacgattaagggtattgaaaagagattcgaccacatctcttgcaagatagctgacgttaacaacaacaacacggatcgtgagttgactgatgcatagttcgac

SEQ ID NO: 83174 - DNA, 126 bp, Glycine max
ggagttttcacttactttcatagcttgtctacggtaagtgtcaacaggagaaatttcaaaacgcaactttgaaataattgtatattatacctgtcatgcaatctgcgggtttttgtttcttttcag

SEQ ID NO: 83175 - DNA, 266 bp, Glycine max
  unsure (1)..(266): unsure at all n locations
acgaaagagaaagtggagagtgcagaaaaccaccggaaccgaaagggggagaatcattttgcccaggtctttttgagtccccaaaagcagcagaagcaagtgagcagaaatctttcaagcctgctcctgcccagggtttgatcctttgatttgcttcttgtattgataaatatacttcctcgtaccgacctttattttatccagatcgaaagtgaatgtaggactgatttactgtcgaannanacaaacataatcataccataaaa

SEQ ID NO: 83176 - DNA, 223 bp, Glycine max
acgtaagctaggatcctctagagcggccgcttttttgttttttttttttcattttactttgccccgctcattgaaatccctgctgccaggtaggagaagacgcacccttctgtggtcctttctcacactttccatgctttcttcttctcgcaaccagaggactcgtgtgtcctcctggtattttcaaaccagtgccctcaggcaaacaatcattatcgatagt

SEQ ID NO: 83177 - DNA, 265 bp, Glycine max
cggagataacaacaccccaacaacgttttggggcgaaaattttttttaattttctttaaattacattcattctaccacccctttttgctatttttagcaaccttacccctttttttaattattgcaataacaccctcctgttgtaaattttcaacccctcccttttgttctaatcatacaagccccacccatttttttttttttttaaaccaaaaataaacctctgcttttcccaatggattccttccttgtcctgcaccttatc

SEQ ID NO: 83178 - DNA, 76 bp, Glycine max
caaacaaatttttatttttcataaacaataccccggataccggaaaaaacctttttggcgttttttccaacccgtg

SEQ ID NO: 83179 - DNA, 76 bp, Glycine max
ggagataacaatactgaaaatatgttttaaaaagaaatatttttaaatttacttaaaattacattcatgctaccat

SEQ ID NO: 83180 - DNA, 320 bp, Glycine max
gttgctccaactatgggggtgcccaaacttaagggggagcccccccttacctgaggttttcccttctgtacccttctggcaaccttacccttctgtcggattcttgggtccttccgacacttaggtccacccgcctattcccgacccaaacttacctatataccatcttttcctataatggggccaataagagcttggcctaaaaatgggtataactgttatccgcgcgaaattgttatccccatacgattccaaagaaaatacaagcaagcctcctgtagcttataagctggcttgcttacagaaatagcgaagcgccc

SEQ ID NO: 83181 - DNA, 155 bp, Glycine max
  unsure (1)..(155): unsure at all n locations
gtccttanaacaacaaaaaacagccgcacgggggcggagttctacccttttattctacaaccgaaattttcactcctaccatcttgccctataatgagttttataaaaacatggcgaaataaaccgcataaccccttcctgtatgaaattcctat

SEQ ID NO: 83182 - DNA, 228 bp, Glycine max
  unsure (1)..(228): unsure at all n locations
gggagnatattgagttgtttgattggtgggttattggacctgttcctaatcatttctattgttaattttgttattaaatatttaacaataatgaagagttatgctaacaacaatgatgtaaaagtcaactattttattatcttaaaaaaaaaaaatctattcaaatgcttaattgttaatttgttattagacatttaataaacatgttaaaataatttaatttgcttg

SEQ ID NO: 83183 - DNA, 213 bp, Glycine max
ttttttttttttttttagtagattgaaccaaaccatttatgggggggtttttttttttcaaataaacaatattcccaaatattgtaaaaaatatttaacaacattctttaaaacttataacatcaaagaacccaaaaataagtgtaacattgccacacaattttaaaatctatacatatacaaccttttcaatatggtcctgtcccttgcctt

SEQ ID NO: 83184 - DNA, 107 bp, Glycine max
  unsure (1)..(107): unsure at all n locations
gatcctctagagcggccgcggnnnnnntttttttttttttttttttttgagctgttgacccccactgtcgatttatatcagggggatggactcgtgggataccccac

SEQ ID NO: 83185 - DNA, 105 bp, Glycine max
gggggggagagagagagagagagagagagaatgagaatggtgcagatccagttacgaacataatcatgtagccgttcaataggtttatttttccatcactgggca

SEQ ID NO: 83186 - DNA, 398 bp, Glycine max
gggctacaagacaaaacaaaattatgaactggggagtgtttcattcaacaacagacacaacataataactcgaattctcgtcgggaacatcatgtttctggagtttttactcaacattctaagcaaatatacaacacacatgaaaccgtttttcaaagaaatgggaaaaaccttattttttggggcttctttccaaaccttggacaaaataatacacatttcttgtacttcaatcttaagctttacctgataaaaggccaagggccctttatcttttatccacaaagaaatccggtgcctcactttcaaattatccccaattaaaagaccatgggcaatcttctttatcacaaggatatcaacttgccttatttcaggaccacctttccgaggaattt

SEQ ID NO: 83187 - DNA, 66 bp, Glycine max
gttccttccacccaaactgggctcccccttggggggggttttcacaaccgtcggaccccttgttca

SEQ ID NO: 83188 - DNA, 136 bp, Glycine max
  unsure (1)..(136): unsure at all n locations
acgngccaaaatgaaaaattctacccgggtgtgttactttaacactcactattgacaacttcccaagaaatactaacgtaacacttcaaatgacatttttgcacaaaacaaaactcaattaaaatgaaaccttttt

SEQ ID NO: 83189 - DNA, 194 bp, Glycine max
  unsure (1)..(194): unsure at all n locations
ctctagagccgccgcttntttttttttttttttttttttttntggcaacccaaaccaattgaaaaaattctcccccgctgtttttcataaaacccctcttttttaaccacctaaattaatcactccccaaccctttcaaaaaaatttattccaaaacaaaaccttaccaaaacacaaacccttttctatttttt

SEQ ID NO: 83190 - DNA, 85 bp, Glycine max
tagcgaaggaaatctgagtaacaatggcagaatggaagaattttacactgagatatagtttgttttccaagtgtgggagtggcaa

SEQ ID NO: 83191 - DNA, 328 bp, Glycine max
gggacaaaaaaacttttaaaattttattattgggggtgaacaatttaaatttttcaatggggggaaaaattgcccttttgacacattacccccaacaaccggggcgcccctgtaaattcggaacagaacccgaaggggtgaccacctttccctataaggagacctaataaaacctgggctaaacatgggcaaaacggttccctctgacaaaatgttatccgttcaaaaaaccacacaaaaaaccaccccgaaaaaaaaaaagctaaacccggggtgcccaaagagggagccaacacacataaattgcgatgcgccaactgcccccttt

SEQ ID NO: 83192 - DNA, 242 bp, Glycine max
gggcactccctctgctgggttccaaccgaaaactggttgcttggaaaaaactttccaaaccattaaatgcgtctacggaaacacggacccttcttaactattctcgcagacgtagaacgcctaattaaaaactggattttttgaacgattcctgtttgggtaccacctttcctttatagggaggcgcattaaaactttgcgtggaaacaagaattattgttatcatgagaagaaacaggcac

SEQ ID NO: 83193 - DNA, 120 bp, Glycine max
ggggggtgaaatacatcaaaggataggactaaaatcctctcaagaaagaaacaacagctacatcagctgtaagagcaaaaagaaacaaaactaggagcagcattataatcttgacaatcc

SEQ ID NO: 83194 - DNA, 316 bp, Glycine max
aaaagggccaatgcctttatactttgggagagcttttacacaaccaaactgcccttttttttttcacgtttcgcaacactcatttcgaccatagcatttgtgacacttgccatcaaacattttaattttgacaataaaaaatttaaaaaaaaatctaccaacattatcttattttttggatacataagcaaagtacattgccttatgaacaccgaatgccatgatcaacaaaccttcaactataaaagcgaatgggccacccttctcttctaccttttccttagttttgaaaacaaactcacgtttgttgtgttta

SEQ ID NO: 83195 - DNA, 150 bp, Glycine max
ggggggctaaaaaaacacttttaaaaaaaaccgggggggatgtttatttataatccaatttctcccaacgacataccccaggattattccttttttaaacaaacaaatacctaacattgcccaccaattctcccaagtaagcttttaaaa

SEQ ID NO: 83196 - DNA, 342 bp, Glycine max
  unsure (1)..(342): unsure at all n locations
gggaggctcttagcagccgctgctnnntttttttttttttttttttttttgggaaaagcaaaaccttcatagttttttttgggcgggcattaaccaataaacaaatgtacatctcattcttaaaaaaaaaaacaaggatgcctaaaatattacattttccaccattttcaacatctattattttttcccacacacttcctattaaacaatttatatccgcaaatcctcaactttttttcaccacaaaaatttaatcatcaacattttcatagtgtacccttttttttaacattagaatcctcattttacccttttatttcaaacctttacttttaatttttc

SEQ ID NO: 83197 - DNA, 346 bp, Glycine max
gggggaactacttttgatgttcttttaactggggaagcattaatttccgtgttttcattcccatttgacgatgagagtctaggagatctcctaggctccaatgtaccatgcagtttcacctcaagcttttctgcatatgcctcacatgatggatctaatcctgggcactgcctcaagtgcttctcaccaaagaacttcccgtgagaatttttgataggcttagcatctgaatgaagattggaatctacattttggtcctttaggtaagcattcaatggtaattctggacccctagacccttgccacttaacgggtgttgagaatctcggggagcgtctccgagatg

SEQ ID NO: 83198 - DNA, 384 bp, Glycine max
ggcacttcaattgcaatcaaattagttcattctctgtgcgcagttccctacctctcctttcaagatgcagatcttcgtcaagaccctcaccggaaagaccatcacccttgaggtggaaagctctgacaccatcgacaacgtcaaggccaagatccaggacaaggaaggaattcccccggatcagcaacgtctcatcttcgccggaaagcagctcgaggacggccgtaccctcgccgactacaacatccagaaggagtcaacccttcaccttgtccttcgtctccgtggtggcatgcagatcttcgtcaagactctcactggcaaaaccataaccctagaggtcgaaagctctgacaccattgacaacgtcaaggccaagatcca

SEQ ID NO: 83199 - DNA, 352 bp, Glycine max
gacttctcttcacacccttgttcactcttcttctcttgcggctagggttttagcgcagcttcttctagatttaaggaagatgggtaaggaaaaggttcacatcagtattgtggtcattggccatgtcgactctgggaaatccactaccactggtcacctgatttacaagcttggaggcattgacaagcgtgttattgagaggtttgagaaggaagctgctgagatgaacaagaggtctttcaagtatgcctgggtgctggacaaacttaaggctgagcgtgaaagaggaatcaccattgatattgctttgtggaagtttgaaacaacaaagtattattgcacagttattgat

SEQ ID NO: 83200 - DNA, 177 bp, Glycine max
accactcgtacgtacggcgacagaggggggagcgaataacatattagggtttttgagggcggtgcggggatcctagcactctcttctgcagctttcgccgacagcttcattcaccatagctgcgcaaaccgagagggcttttttgaaacaacaaaaagtgtttctcatctcgaaaaa

SEQ ID NO: 83201 - DNA, 76 bp, Glycine max
atggtagcatgaatgtaattttaagtaaatttaaaaatatttttttttaaaacatattttcagtattgttatctcc

SEQ ID NO: 83202 - DNA, 201 bp, Glycine max
aacggctgccagaagacaactgacgggtacagctactagaagaccacagattgtatggtatcatgaatgtaataacaagtgaatttaaaaacattttttgttaaaacatatattcagcattgttatcttgccataataaaaaaaaggaacgtaccgatcggccttcgctctagatgatccaagcttatgtacgcttgcatg

SEQ ID NO: 83203 - DNA, 319 bp, Glycine max
gaccgctttagaagacacagaagggtactgttgcaatagactacgatgtcaaaaaggaatacaaataagtaaaggcggccgtttatatatccagcttacttacctttctgcaattattctcttttatagtgcacctaaatcaattaactgccacgtatatactcgaattgtataaccctgtgttctatattctagatgactttatacatttcccagctcatttatttttaagctttttaggaagcttaccaattgcttatgatattcatacttacatgtatatatcagttcatttgttctactggttatatcattctct

SEQ ID NO: 83204 - DNA, 228 bp, Glycine max
caagcaaattaaattattttaacatgtttattaaatgtctaataacaaattaacaattaagcatttgaatagattttttttttttaagataataaaatagttgacttttacatcattgttgttagcataactcttcattattgttaaatatttaataacaaaattaacaatagaaatgattaggaacaggtccaataacccaccaatcaaacaactcaatatactcac

SEQ ID NO: 83205 - DNA, 305 bp, Glycine max
gaacgcggctggaaataaaaaaataaatttattgggtgagcggccgatctataggagcgatgcttacgtaatcggttattcgacgtcataattttattattatgtgatcgaaatacaattcaatggctggatatttacaacgttgagactggtttagccttgaccttgcccaacttaatggcctcgaatcgcattattctttcgtttgctaatgtattagtcaataggaatgcaccgatcaccttttcttacaattactcagcctatatggctaatgagacccgcccaagatcgttatattaatc

SEQ ID NO: 83206 - DNA, 281 bp, Glycine max
ggaccccactctcgctgtatcgctatcagtctggggatatatatctcttgacctgccattctaaagtactcaatcttacatacacgtcatgcaagctactatcatctctatagacacacctaaattcaatccactggcgcgcatacatacacctctcgaactgagaaaaccctgacgccacccaacttaattcgccttgcatgaaacccaccttaatccagcataacactagataggaaatatgaccataccggatcgggctttccaacatttgggcgacc

SEQ ID NO: 83207 - DNA, 261 bp, Glycine max
ttggagaataaaataaaaaaagggcgatggtttctgtaaaaggctaaaacactctggtacacttaaatacctatctgactcagatataaaaaaacacattaacgtccggcctttgtataggtaccaatttatcttcccccggttgctaagcgtatactttttttatcgggtcacccaaattacattacctgcccatccttttataacttcacgatggggaaaaccccggtcttccccaacataatcgcctaggaatacatc

SEQ ID NO: 83208 - DNA, 94 bp, Glycine max
ggttcattgtttttgactttagattagtacatgggtgttggtttatctgtaacgctaatattcactacttcactttaataactgttatctgaaa

SEQ ID NO: 83209 - DNA, 84 bp, Glycine max
ttgccactcccacacttggaaaacaaactatatctcagtgtaaaattcttcaattctgccattgttactcagatttccttcgct

SEQ ID NO: 83210 - DNA, 153 bp, Glycine max
gagggccggttgccataacgatatgatggattgtaatgcatctcgcaagcatctagactcaggctctaacccagcacactgagagcctctcgtatccgtcatgaaaggaggaaaaggcggccactctatatgatacaaccttacctacgcttg

SEQ ID NO: 83211 - DNA, 324 bp, Glycine max
ggattgtcaagattattaagctgctcctaaatttgtttctttttgctctcacacacgatcgaactcttagtctctttcttgagaggatattagccctatcctttgatgtataccacccacctaacattttctaaaacatgtctgaggaagaggacgatctcgacgatccaactttacgtacgcgaccatgctacgaaatcactctgctttagggactgctaaattcaattgattgttgagcacatgacaacgcagctactgcaaacaccctatcatcccataactcaatcgccttacgtattatacaagtttctgcagcttgcg

SEQ ID NO: 83212 - DNA, 289 bp, Glycine max
accgctcgtacgagaccacgtacggcggatgccagaagaccaccgtaggcgacttcattcacaactgacaccttcttctgccgttcgatttcagactcttcattcgggcggtggctttacaggatccaggcttacatacacgcgcatgcgagctcgtacgtctgttatagtggcacctaagtacagttcacgtggccgtcatactacacctgcatgacatgggaaagccctgatgttgcaaacttattagccatgggtcgcgtactacttaccacagctggcgtaatat

SEQ ID NO: 83213 - DNA, 324 bp, Glycine max
aacagatacgggagaaacacagaagggtcttcagatactagtgcttatggaagcttggaaacaaaatgattcagtttcggtcaatactgcttacctaaattaaagtacacacggactggactgactaagcattactgtttcaaaactgataaacgaatggtgtcctgttatcaactacgtcatagctaggcattacgtaatcccatcgaagaagcttgaaataaaaacactatcgcttgccgaaagctggtggatgtcaatataggcccgcactctctaaagtttccaacatttgctcaccctggctggcgatttagacgatcc

SEQ ID NO: 83214 - DNA, 365 bp, Glycine max
ggaggacgaagattaaattattactgggtactgatatttaggccttgcggatgctattcattttatattatctgtgttggtagacattatacatttttgaaacgctttgacttgctataactttgccatccttgcttcttgatttgaggtaaagcttcgcctgagatatcatggcttacaactgctctttctaacctattcaagctctgttcctactatatggatctgatgtaacaaacggtagtgtcctttctaaccgatgccaccctacctacgcgttcatactacatcatactttttatatagctggccctaacactaattgactggccgctgatatacaacgtggtgactggaaaaaccct

SEQ ID NO: 83215 - DNA, 395 bp, Glycine max
ggggcaacacattttttaaaaatttgaaatttatttttgaaaggggggaacttttggggggttttttttttttgggcccaaaattcgggcaaaaaaacggggttttttttttataataaaattgcaaaatcgaaaaacttgaaaaaacgaaatggaaccctaagccttaagcttttggtaaaaatagggaaaaccccctttggcgaaatttgggggattaaaggggttgggcataaaagtcccggggcccaacttgggggggggggtttttttggggggcctttggaccttggcggggttggcgactttgttaaactgggggggggcaagcttgacttttttgggcttgggcttgaacttttggggggggggggagggtttttttttggcctttt

SEQ ID NO: 83216 - DNA, 217 bp, Glycine max
aaatataaatacgggcatgatttgttataagaaaatgtatcaaatgctacatcgataaaccaggacacagtctttgctataagaaccacccctcaagaaaatgcagaattaaagcctacttaacaaaaccggcattcacgatatatgattgaaaaacaaatgcgaagctaacaaatagaaccttaggctcggtgggaggatactcaaacacaatatc

SEQ ID NO: 83217 - DNA, 516 bp, Glycine max
  unsure (1)..(516): unsure at all n locations
acaaaagatcatttacataaacctttcaaaaaccatcactctttcatgagatccactcaaagagggccattaatggcttcccaagcatccctatgcacaacaatcaagccctaaacacttgtataacatttccaatctattaatctactcaataaactcttgaatctagcctaatcatacaaaaatccctaaatcttctaacttagggttcaagaggaaaaaggagaaaacatacaaattaaggggataaagaaggataaaggggaagcactcattttacggttcttgaatttgagctccaagacattggatctatctatgctccacttttcatcttttcctcttcttacttcttactccttttttttttgcaccttatctttatcttcttttctttcttttgccttttctctctaactctccattttcctccttacttgaatcatgggtatgtgtgtgacttagtggtccttaacctaccttaagctccttaatttgggncttgntatcttcttt

SEQ ID NO: 83218 - DNA, 63 bp, Glycine max
cattgcacatagaccagcatgtgtctaaaaaagaacccagctcagctagtgtcgtctaccttc

SEQ ID NO: 83219 - DNA, 77 bp, Glycine max
gaaaaaaaatttttaatttccattaaaaatacccgggtttcctggaaaaacctttttggggttttttcaaaaccttg

SEQ ID NO: 83220 - DNA, 369 bp, Glycine max
acttattaccaggatcggttttaatacttagaaattatttatataacttccctattttagaatccatttagaagaagaaataatattttaatgatgaaaatgaggatttatattaatttaattaattaataatgaacatttaatattactatattaaatgtctctttagttagttttcttaccatacctaacacgtcaggtaaattaagcaccataccaacttttggcacctgtctcacgattactcaaaaagcactcgttgattctctcactatatctacaatagaaacatagaataaataaaaacacagtttctttttcttttgttcagctaatttttttattttccttatacaaaagtacaaattc

SEQ ID NO: 83221 - DNA, 344 bp, Glycine max
accacaaattaactcctaattaagttcacttcgggctagatttacacaaaagagaaggggggaatgaaactaaagtgtccacaaaatgaagctcagaagaaagagcaaaacactcaatcaaggtagttgatgagcacaaacaacgaaacaaagagcaagaagtccacagaagcagcataagcacgaacagaagttgcggcagcagagaaacttccactggtagtgttggtggtgagaacaagaaccatccaatcattctcagaaccaagccctgctccagtgtacttggaattgttgagaaactgtgcgttacgatcagaatgagtgtaattagagagcacaat

SEQ ID NO: 83222 - DNA, 135 bp, Glycine max
ccgaagctgtttggatttcaattaacgttgaagttacagaggagaagaagcacttacagaggatggtggaagcgatttgctaacatccacagtgtgaaggaaccctttgaggtttctatcacacccatcgttttc

SEQ ID NO: 83223 - DNA, 123 bp, Glycine max
tcgtagctagatcctctagagcaggcgcttttttttttttttttttttttttttttttgttgacttcacctagcaagcctcgaatacaaagcctttctactttcttccccttctagacgattc

SEQ ID NO: 83224 - DNA, 232 bp, Glycine max
attttccaccgaaccttaggttaaccccttaaaaaacttaaaaaaattggaggaaaaacaccgttcttttttgaaagccggaaaccttaattttgtcttataaccattctaaaatggtttgcttgtggttatttgagggtatttgaacagatattgtggatgtggttcttagtatgagtactaatgattgtcactggaacttatgatgtatacgtaggttggctttgattgg

SEQ ID NO: 83225 - DNA, 236 bp, Glycine max
aaagagaacttcatgatcatcaaccatccaaggatttaagacgaaaggaacaagtacaaccctcgaaagtgaattaggaagaaaacacaaggaaggaaaaccattcacagaagaagattccagagaaattcaataatacacaatttttttttttttattttcatttccccccctctaataatcaatggtgggaagctgctcgtgggtgtggctgataaagacaacctggtaaacaa

SEQ ID NO: 83226 - DNA, 134 bp, Glycine max
  unsure (1)..(134): unsure at all n locations
tagctaggatcctctagagcgggcgcncgcnnnnntttnttttttttttttttnnaggtgacttcaccgagcaagcctcgaatccaaaggctttctactttcttgcccttgtgaaaaattatcgcatcccgaca

SEQ ID NO: 83227 - DNA, 458 bp, Glycine max
gggtgcaaatacacttaattaacgacccacacaaaacaaaacctcttacattctcttctagtcttttacaacttactacaaaccgtacacggaataacaacccctagcgattaataaaaaggggctctaaaccctacttttcttgaactaaacttagcagataacacaaaccaaaccaactcaaccaaacaacatccataaacctaaacagacaaaccaaacaacacacattaacctaaacagaaaccctaggcacaggcttgggaacaacatccaaaaccctaagcagacaaaccaaaccaatttaacccaccacccccattaaccctaaccagaacccttaggcccagcctggaaaaaaaggggttttttattttcataaaaaggctaagaaaactattccacttcccaggaacccccttcgatggaaccccatggaaattttggaggcaccgggc

SEQ ID NO: 83228 - DNA, 141 bp, Glycine max
gcgaaaagatagtgtacggtacagattgccaccaactatgtttttcaaaactccgtacaggtaaaaaatgcacgctgtctcgagatgaacacactattttttagtaacaaaaccacagctagttgctgctaggagagaaca

SEQ ID NO: 83229 - DNA, 160 bp, Glycine max
gatgcctacagaaagccgaacattcttacatggaggggtgcgtttaaacaacataccaactccaattttcctctgtcagttgcaaattatgacattttacaaaaatattttcattcagacccagaataatcaataggatggtcaagtgcccacttaaccc

SEQ ID NO: 83230 - DNA, 55 bp, Glycine max
cctctaaaatgtcatacaatctggaacaaagggagtatagaaattcttttactct

SEQ ID NO: 83231 - DNA, 167 bp, Glycine max
gggaaaaaaatgacatcattaatctccgttgggttagtgcttaagacattaccggggaaaattggcatgcttcaaggatcctaaactgagggttttccttcacccactttaacaatgaagcaacatacgatttctgcaacaaaataaccggtcgggactaatggaga

SEQ ID NO: 83232 - DNA, 85 bp, Glycine max
aagcgaaggaaatctgagtaacaatggcagaattgaagaattttacactgagatatagtttgttttccaagtgtgggagtggcaa

SEQ ID NO: 83233 - DNA, 451 bp, Glycine max
aaaatagattatatgatacaatatagcacaaagaagaacggacatgaaaatatttatagaacacaaaacaagtagtacacaactatgtacatactcaaaataacacccaaaaaatacatagtgttgataataagtcgcatttccagaaggaaacataacaagtagtacacagctttttcgtttttcagtacaaacaactagagctaatttcctagaacatgatgtggttcaaagttctccttgttggaggttttgaaaatggaatccttgtcattggctggagaaaactcaaatgtttcatcagacctcttttttgtggacactggtgttccaatgtgctgggagagctgtctatggttgccacacagagtgaatatattttgaattctcaggagtctagagtcattatcccctgaacttacctttaaacaaaattcctctttgtttggac

SEQ ID NO: 83234 - DNA, 184 bp, Glycine max
  unsure (1)..(184): unsure at all n locations
gcttggatcctctagagcggccgcnnnnntttnnnnnnnnnnntttttttttnaggaaaggaaagcattttttcaagttattctctacaaaaacaaattttcttccaaattttaaaaggggcccaaatttaaagggtggccaaatttttttaatggaatccgatattaattacctttaaagggg

SEQ ID NO: 83235 - DNA, 192 bp, Glycine max
  unsure (1)..(192): unsure at all n locations
cgaagcttggatcctctagagcggccgcttttnnnntnntttttttttttttttttttgggagaagatattactgcaagaaaatcattttttagtggcggttataggcaatgtttatcggcactttaaattgccgacaaatttctttccatcagttccaaaatgacgctaatttttccgtccttaaagcatc

SEQ ID NO: 83236 - DNA, 96 bp, Glycine max
ccggataaaacaactggccgattgggtcaatcgaagtgcggttgttgtcacgaattcataccactcacgtggtgaaaaaccagcgtaaaatgatgc

SEQ ID NO: 83237 - DNA, 73 bp, Glycine max
ccgcatactaacttaacatatattgagctcgaataaagcttgtttttattgtggaaataaatgcttcctcgca

SEQ ID NO: 83238 - DNA, 227 bp, Glycine max
ccctcaaattcaaaaagtgctgcattgatgtcttgaagaaaacactagaatccataccatatcaagtccttgtaatacacttgttgtgaagttggcagttcaagagctaagtagactcaatataaaaatgaatttttaaattgattaatccagcgtaaaatgactaaccttgtgtttattagctactagaaattagaattctacttgctcattactcacatggaacc

SEQ ID NO: 83239 - DNA, 292 bp, Glycine max
  unsure (1)..(292): unsure at all n locations
ctaggatcctctagagcgggcgctcgcnntttttttttttttttttttttnncattcataaaacatagcaattgattaattcaccggtgtcaaacaaaatattatctaacatttcatccctgcactcatctttattccaaagtttatacatcgaaatattctttttctgctaccgttaaacaaaatggaaaataaaaaatggcaaaattaaggggactcgcaacctctctagcgtgcctaaaatgccaaacattttatcacacgactaaaatacatacttctctttctcccc

SEQ ID NO: 83240 - DNA, 72 bp, Glycine max
gggagaaatatcatcaaataaattgggaaagttgaaacaattatcccccttttgtttttttttcccaaccgt

SEQ ID NO: 83241 - DNA, 130 bp, Glycine max
gctcttaattcagagtttaattcatcaacgggtgtttggctttgagattcaatctgaccatggtggacgtttacaaactctgcatcttcacttcttgcactcttccgcgctttcctaggcttttttaatc

SEQ ID NO: 83242 - DNA, 66 bp, Glycine max
  unsure (1)..(66): unsure at all n locations
gaaggtagacgacactagctgagctgggttctttgttagacacatgctggtctatgtgccgtgnac

SEQ ID NO: 83243 - DNA, 314 bp, Glycine max
agggcttgtgaaacatatctatcacgaggtggaggtgctcgctggcgcgaaagacttggatcatgccttataccattgattgaatgtgtggtcaaggtgtggtggtgtatatcgacgagtactagtttccctgcgactttacaatgcacattagtattatttttcttggaagcacacaaatatatcttctattttctttgaattcatttactttcaccctcacaagtgtttgtatcccaacacaaaactttaaaaatgaaatgatttcaatatgagtatttaaaaatcttaaaatttaaaatttcttaaaattt

SEQ ID NO: 83244 - DNA, 134 bp, Glycine max
gaaaacgatgggtgtgatagaaacctcaaagggttccttcacactgtggatgttagcaaatcgcttccaccatcctctgtaagtgcttcttctcctctgtaacttcaacgttaattgaaatccaaacagcttcg

SEQ ID NO: 83245 - DNA, 163 bp, Glycine max
gaccgcgcaccacactgagaggaagagggagtgagagagagtgttcttcgtttgctaccttctcccagaaatggttacgttcaggtttcaccagtaccaggtggtcgggagggctctcccaacggaagcagatcagcatccgaagatctaccgaatgaaagct

SEQ ID NO: 83246 - DNA, 243 bp, Glycine max
ggcgaaacagagagtgatttcagtgagtgatcggtgttcacttgatctcatcataatcgtcagcgtcaattgaagaagatgccgatcagaaacatcgccgtcggaaggcctgaagaggcgactcaccccgacacgttgaaggcggctttggctgagttcatctcaaccttcatcttcgtgttcgccggctcaagctccggcatcgcctacaacaagctcaccgacaacggggcttgcacccct

SEQ ID NO: 83247 - DNA, 177 bp, Glycine max
gccccttcctccaccaccacagcaccccaccacacggggggattatcagccagaacacgccctccggaacccgaagccgtcggagagaataagcacccggcaaagaagcccgcgcagaaggccccgccggagaccacgaaagccgcgacgaagaggccctacgaacccacctagggc

SEQ ID NO: 83248 - DNA, 193 bp, Glycine max
gacctttatctcgtgatcgtatcgctcaactttcaacgccagttcacactctctgctacgcgtgtaccaacaagtgcatgttcgaatcaaaggacagcgctgagctcacagcagtagcgtgatcaatctatacggcgtcctttgaagggctttgacctttcgctggtcaggttgctaccacgggcatgaatag

SEQ ID NO: 83249 - DNA, 363 bp, Glycine max
gacgaaaggagttgcctcttaacaatttattagttggtaaatcaccgaaggaagcatctcggatgtttcttgaaactatggtatctcaagacaagggattatgtccatgtagaacagacaaaaccctgtgccaatgttagcatataacctagaatgaagcttatgaagtcagatttctgaaacctcatgttggagtggcacatatagttgtaaagatccattcagtggtagattgacactttcgctggaatctgcacgatggcataatattttcaacattttctacccgattctagctgaggcttttcatttataattttttggaaaatggacttaactggtcaactttaattcttccatggc

SEQ ID NO: 83250 - DNA, 202 bp, Glycine max
gattcacacaactaactaagaaagtcttccatagccccccaaaaatgaagagcaccatcttctttgctctctttctcttttgtgccttcaccacctcatacctaccttcagccatcgctgatttcgtgctcgataatgaaggtaaccctcttgaaaatggttgcacatattatatcttgtcagacataacagcatttggtgg

SEQ ID NO: 83251 - DNA, 137 bp, Glycine max
  unsure (1)..(137): unsure at all n locations
gatgctttaaggacggaaaaattagcgtcattttggaactgatggaaagaaatttgtcggcaatttaaagtgccgataaacattgcctataaccgccactaaaaaatgattttcttgcagtaatatcttctcccana

SEQ ID NO: 83252 - DNA, 118 bp, Glycine max
ggactcaacatgaataccagtggtgcattatacactgaatagagatacacatgtcttggtacatgagctaggatctgatgcaaagttgcactatatagaaaagagaggcatgaatgga

SEQ ID NO: 83253 - DNA, 167 bp, Glycine max
ggctgcacgtgacacatacacagagagagaaaaacccttagccaacacaaccatcatgggcacctgtgctattcaacactcagtatccactgctcaaactgcactgaagcagtttaatgagttgcgtacgaagaccggtggcgccggcgaaggtcgcactaacatgc

SEQ ID NO: 83254 - DNA, 62 bp, Glycine max
gagacctcatgtcaggcggggctacccgctgagtcttagcttataaataagcggcagaaaaa

SEQ ID NO: 83255 - DNA, 115 bp, Glycine max
tgaaccacccaggatttcctgataggaacctgcttacaaaccagcgttccctatagtgaaactaattacagcttgaaataattatggccatagatattccctcaacaaaatagcc

SEQ ID NO: 83256 - DNA, 212 bp, Glycine max
acagtataacttttggtttggttgttagcatctctgtgtcagtgttgggtttcctttcggcgatatctcgcgcatatttaaccactggtatataaccaggtgggattcggtaagcagaagatttatgtatgattatgaagcgacaaatcattattacatcagaccagaggatttacctcgtatgaagtgagttaatgtgaagtacagtaaaa

SEQ ID NO: 83257 - DNA, 156 bp, Glycine max
  unsure (1)..(156): unsure at all n locations
gcgtacgtaagctaggatcctctagaagcggccgcttttttnnnnnnnnttttttntnnttttaagggaaaatataggttctaaaattgggggcgcaaaaaaatgagaggaaggtaatgggatgatccccttctgtatatttataaaaaccgtaca

SEQ ID NO: 83258 - DNA, 223 bp, Glycine max
ggaaaaaccaagatgttcccattagggcttcaaaagaaattgagccaaccaaacctgtttcgtatgggctttgccaacaactttaacacttgctttaaaaagagtccaaccaccccaattattaaaagcccatttaacttgaaaccacctttaataaaattggggatttactataaccactaaaccctaacagccctccaaaaaaatgggcctcgtggggttt

SEQ ID NO: 83259 - DNA, 403 bp, Glycine max
cgcaacaaacatttctttccttttttttttgaaaaaaaagacagttttgtgacttgtaaacatcactcagcaatcaatttaatgtagcactcaggtgtttgaaaattacaaggtttcaagtaacgtataagatgatatgccaagttttgatgacccatatcatccacggtaagaaagattagcaatcttgtagtaaggtgcattttcttctaaaagcagtgtttaaggtatatatcacagccaaccacaacaaatgtagttggaagagggcaatcgtcctgtttggcgaatgtattctgtttgagccacagttctttctgcttctcgattttttctagcttcaactgctgcacgtttttcttccgatctttgcctcgccatagcaatcttttttaccattttt

SEQ ID NO: 83260 - DNA, 98 bp, Glycine max
aggattcaaataggtgtttggtaaaataattgtaccggcataaatacttaaataagtaagtaaaaaaagagataacgttacaaaaatccattgtcgtc

SEQ ID NO: 83261 - DNA, 111 bp, Glycine max
gccgggactaattttatttttcgggggttttttattttttggggaacccaacggttttaaaatttttttctaaagcccgagttgtgggttcttttccctgcctccgaccct

SEQ ID NO: 83262 - DNA, 375 bp, Glycine max
tgggtctctttttcttgagtgtttttttttttttttgggctttccattttttttttttttttttttttttttgtggggccgggaaaaccctgggggtttttttccccctccccccccttttcccccccccccggggcccctaaaaaaagggggggtgggggggggaccccaaaccccccccaaaaaattttttttcccccacccccccccctggggcccccaaaaaagcgggggccccccccggggtttttttttttttgcccccccccccacgggggaaggggcccttacaattggcccggacggccctttttttcccggggaaaaaaacaaaaattttattggggggcttttttgcccccacaccagtttttt

SEQ ID NO: 83263 - DNA, 268 bp, Glycine max
  unsure (1)..(268): unsure at all n locations
atcctctagagcagccgctcgnnttgtttttttttttttttttttttaagcttaaacccaccgggtagcccctcctaacaagaggaatacccttttgtcatttgaaaacatccatcaaacacttagttcaaccacaaaataccggaccgaaacctacaggcatacaaactcttcctataatgatttgcataagagcattaccaatcatattcatagcagaaactcgatgaaatttttataaagtacaattcctcacaacatacgagcc

SEQ ID NO: 83264 - DNA, 91 bp, Glycine max
gggtatcctctttttcttcacttccttggagtgggaggtgcttctccagatgggaatgtcgtcgtcattttcttccttcttgactttagga

SEQ ID NO: 83265 - DNA, 81 bp, Glycine max
agggaagcttgggttttgtttcttgagagtccgaatcccccttctgtcgtcttttgcaacccgaccccgtggccggcccct

SEQ ID NO: 83266 - DNA, 325 bp, Glycine max
gccccgccaccacaaccatcattagtattttttaataaaaaaaacccctccccctccttccttcatattaaaaaaacccctcaaaaaacccctcattccacaaaaccaactcttccacccctatattcccccacacaccccccacaccaaaccgccttaccacttaaccaacaactcaaaacctgtcataataacatccattcccttattcactactaaacaaaaactcccttataaaaacccacaacaccccaacacccaaacaaacaacacaacctccttttgccccaccttttacccaaattacaccataattttcacatcc

SEQ ID NO: 83267 - DNA, 307 bp, Glycine max
aataaactccacttttattttacaaaagatgcgttataaataaattaaagcacacccattcacacactttcattacaaaacaggagaaacacaacccttttattattaaattaacgccgacaaaacaaaaaacgggaatttaaatataatcagtggtcacttagttcaaacaaacactatcattaaaaatctctacaaaaaaagacattcatccattcatgcatccaataatttatgggcacttacattttcttccctgagtcatcatttaaatttaacacctgtcacacatctttttattatccta

SEQ ID NO: 83268 - DNA, 77 bp, Glycine max
ggttattcagttaaaccaatgattcgttattggagcagatagcaacaaccatctcatctgggaaaagccatcttttt

SEQ ID NO: 83269 - DNA, 314 bp, Glycine max
gggaagaaacaaacgtccattttttgtttttgggccctccgaacacattcaagagaagagacttacccttttaagttttttagcacaagaggacaaacatttgttcaaaacaaacatggaagatgttttctcatcattccatttctggctagttaaatagaacgggaaagctggtttggtttcctattagtactttcctgtgcacaagttggccggcgacccttttttggaccttctatgattccccatctctcaaattgtttttgtcgagctcgagccctttccttctttttatttgatttctgggcaaaaca

SEQ ID NO: 83270 - DNA, 323 bp, Glycine max
ctgaggaccaatttctttcaacgggaatgaaatggcacgagttttataaaattaaaactaggtgtaataccaaagataaaattaaacccctttctttaataccaaaactcaaattccccccttttaacttgttaaaaaattttcatatattacacttttaacgtgggatgttgggcgctttttttcacataataccaaattctctaagtccatacaatctaacggtaagaaatcactcaaggcacaaattaactctcataacaatattctctgtatgctattgttttaattgggacaccttttactgcttggtttgcacacat

SEQ ID NO: 83271 - DNA, 222 bp, Glycine max
cgattattaataacacgcaagcgttttacaagaagaggaacattacatagtcactttcaaacaaaatatgtaatgagccaaattagattttcctgcataagaaattgtcttagctcaacaaaaaacattttcttttaaaaaaaatagcctaaaaaaagattaacttgactcagtatatccacagaaatatgctaaaagctcaaacatatcaagatactacaa

SEQ ID NO: 83272 - DNA, 90 bp, Glycine max
  unsure (1)..(90): unsure at all n locations
atatacaaattngncatcaacctgggattaaaagcaaaccaagtgaggttatatctttatccaaaggaaacacgcagcatataggtcctc

SEQ ID NO: 83273 - DNA, 197 bp, Glycine max
  unsure (1)..(197): unsure at all n locations
atcctctagagcagggcgctngnntttggttttttttttttttttttttttntgaggattagtatctcatcgccctatctagtcgtcattatgaagagcgcgtcaagacagcgtgaggcgagacagcgtgaggtctgacccaggagaattccgagatccggtacctagcagagcgtaccatgctttccgctatagta

SEQ ID NO: 83274 - DNA, 390 bp, Glycine max
gggctaaacttatagtccaattttcataacgaaaagcaaaaaaattaaaaatcggtggggaaacacaaagtcccgaagattacacccccaacaaaagattttagctttgtcccaattaaagaggtgctcgtattgcttgccgagattgaggcaaagataacggcttttttttttatgctaacacgcgtccctagacgtgtcccttttgtgctcccttcgagttggatatgggatttttattagcggtgcccatttccatagcttcttctttttctgttctcggcttcttcttttgatccccttttttgtcacgggagataaaatacaatattagttgtgctgctcccaacgcagaaccaaccccattaggtacagccacaaatgggtcac

SEQ ID NO: 83275 - DNA, 260 bp, Glycine max
tttatagtcaacccaacaaacagacattgtaaacctaactcactagaacttgcagattaactcaaattaccttaaaaaccctatcagaccatctaaatccaattgctaaccccaaatcgaagtcctcctgctttgaggctaacactcatggatacgtttcggcagctttatgtagtacacgccgaatacttcttaaaaatcttaacaccggatttttataataaacatgatcctgacccaccacttgccaacgcaatccg

SEQ ID NO: 83276 - DNA, 229 bp, Glycine max
  unsure (1)..(229): unsure at all n locations
ttttttttttnnnnnttttttatttaannaannnntnnaaaaattaaagaaatttttttttttttttgggggggaaaaaaaagggaatgttatttaaaaaatttaaaaagagtttaaaaaataaaaagtttaaattaaaaaaattaaattttaattaaatttattttggttttaattttaaaaaaaaaaaaggggggaattaaatttaagtgttnnnaaaatgaatttt

SEQ ID NO: 83277 - DNA, 228 bp, Glycine max
gggccaaacaaggggggggtcatttgaaaaattcgagaagagtttgataaataacaagttaacatcccccaaattaactcctaattaagttcacttcgggctaaatttacccaaaagagaaggggggaatgaaacttaagtgtccccaaaatgaagctcaaaaaaaagagcaaaaccctcaatcagggttgttgttgagcccaaccaacgaaacaaagagcaagaagt

SEQ ID NO: 83278 - DNA, 368 bp, Glycine max
  unsure (1)..(368): unsure at all n locations
attntnanattaattgaattagaagaagtttttttttgttgtttatatgcattaaaatagataatattattttaaaattttaaaaaaagttatttaaaaaaaaggttataatgatacaatttaaattntatttatgttgttttttgggattaatttagaaaaatatatagaggggattattatttaagggttcctaaaagcataccaatttaaaatataataagtcttattaaaggttggtgttatcatgaaaatagctattatatgtgtgaaattgctatccgctcacatattccacacaatatattatccggaaacataaaatttaaatcctggggttccttatgaaaaaaataacttacatttat

SEQ ID NO: 83279 - DNA, 396 bp, Glycine max
agcttcccttttttttttttttggggggtttttccccctttatggtttatcattttctttaagcgttccacttttttcttttaagagttcttttttttcttttctaaaacaaggggaaaaaaaaacccgggggggggaaaaaaacacacacaaaatcccccaaaaaaaaaatccccagcctctaaaaaaaaaaccgggggggccaaaaagggggccaaaaaaaaaaaaaagggtttcgctttatttgaacttccacgccaaaaaaaacctgggaaaaatttggtttcctaaacctgaaaaaaaaccccttttaacaaaatgccccccccacaccaaaagggttggtttcttttccaatttgggcaacaaaaaaaaaaatttcttttaaaggggggc

SEQ ID NO: 83280 - DNA, 116 bp, Glycine max
  unsure (1)..(116): unsure at all n locations
cccctcgtagctgatccttagagcggcgtcgattcgcgctggcggcgcgtggtcgcccgggaattcggccggtcctgcggcgtccagctntcctatagtgagtcgattagagcttg

SEQ ID NO: 83281 - DNA, 442 bp, Glycine max
gggagaatattattgaccatggtttatgtttctttctaatgtatgggacgtgatcatttatatagggcgcatctgttgtgaagagtccagagaacaactctgatggagacgctaaattagtaggcagtgggaagggattgaaatcaatactggggggattggaggagctatgggaccaatcacagtatacagaggagtacaatctgagtctctttttagcaaggcttaatggctaatgttccagattcatttcagagtcagagtgtacatatccatgagtacaaattttggcattgtaacatcttattttttttcccaccatgcccttcagtcatttttggtcgtcactttttttgtataccccaatgctggctggaatctgctcgtgtgcatgcagaccaggtaaatcagtgtctgtattttacagggcatttgagtgact

SEQ ID NO: 83282 - DNA, 196 bp, Glycine max
cggcgccagctcacgtcagagacaaagggtcgtgcaagacaaagggtcgtgggagacacgagggactacattaaacctataccaaccaagcaactatcttggtaaaaaaggagagttttcatggtttatccatctggtgcaaggcgaactgcccatacccaaagggaagggagcatagaaacgcccacagttctag

SEQ ID NO: 83283 - DNA, 87 bp, Glycine max
ttttactgtacttcacattaactcacttcatgcgaggtaaatcctctggtctgatgtaataatgatttgtcgcttcataatcataca

SEQ ID NO: 83284 - DNA, 64 bp, Glycine max
gatcctcccctttccctaacctccttcttcttcactactaatcttcacaaccatatcatccccg

SEQ ID NO: 83285 - DNA, 417 bp, Glycine max
gacttctcttcacacctttgttcactcttcttctcttgcggctagggttttagcgcagcttcttctagatttaaggaagatgggtaaggaaaaggttcacatcagtattgtggtcattggccatgtcgactctgggaaatccactaccactggtcacctgatttacaagcttggaggcattgacaagcgtgttattgagaggtttgagaaggaagctgctgagatgaacaagaggtctttcaagtatgcctgggtgctggacaaacttaaggctgagcgtgaaagaggaatcaacaatgatattgctttgggggaagtttgaaacaacaaagtattattgcacaagtatttgatgcgcctggacatagggatttcattaagaatatgattactgggacatcccaagctgactgtgct

SEQ ID NO: 83286 - DNA, 193 bp, Glycine max
  unsure (1)..(193): unsure at all n locations
gatcccataaaaaacacacgcgcnaaaaaaagggggaaaaaaaaaaaaaaagcgggcgcccaaagaagaaaccggtttcaaggtcgcgtcaaagccggtctccaattatcccgtcggaagaataatccgttattttaagaaaagaagatgctctcatcgtgtcggtaccgccgctcccgtatacttggctgca

SEQ ID NO: 83287 - DNA, 86 bp, Glycine max
gttccaaaagaactacgtaggtctgattttctcatcccaaattgaggaatacgtaggagcaaagggaaacacccttgtcgaccatt

SEQ ID NO: 83288 - DNA, 93 bp, Glycine max
  unsure (1)..(93): unsure at all n locations
tcctaaagtcaagaaggaagaaaatgacgacgacattcccatctggagaagcacctccaactccaaggaagtgaagaaaaagaggatncccca

SEQ ID NO: 83289 - DNA, 240 bp, Glycine max
tttacaaaaggtgttctaacatctgcatttcctcttcatatgcgtcgcatatttaagctggtggtggccaaaaaaataacgcgctttcaaaatgtataacataaagaagactttactattgctgttgctcatggttgcaactctcaattttattccaactgaattgcatgctttattctaatgtttacattcaacaccatttcaccaatatttctgagcttgataaaacgtccaaataga

SEQ ID NO: 83290 - DNA, 51 bp, Glycine max
  unsure (1)..(51): unsure at all n locations
tcgcccacgcgtncgcccacgcgttcgcccacgcgtccgcccacgcgtccg

SEQ ID NO: 83291 - DNA, 237 bp, Glycine max
gtcttcactgctctcttcgcaacacaacaaagagggacaacacagagagaagcgtcttaataaacactcttctctgaaaaacctgattgctactcttcttctcttctctatcgcttcgaacttccatctcagtaaatgagagagtgcattttaatccacatctgtcacgccgctatacacgacttaaacgcctggtgggagctctactgtctccacacggtatttagcctgatgggc

SEQ ID NO: 83292 - DNA, 213 bp, Glycine max
ttcaaaattggaagggaatttggatttctattcaaaattcacttcaatttgaattagaatttgttgagcccaatttagagcccaaatttcacttattatgagttgagaattttagcttttggtcagcccactaattcaagatcaaattcaagattcttcactaagagtactttggtgtcatgaggcatgtaaagcatgaagggtgtacacaaa

SEQ ID NO: 83293 - DNA, 244 bp, Glycine max
gagcgaaacagagagtgatttcagtgagtgatcggtgttcacttgatctcatcataatcgtcagcgtcaattgaagaagatgccgatcagaaacatcgccgtcggaaggcctgaagaggcgactcaccccgacacgttgaaggcggctttggctgagttcatctcaaccttcatcttcgtgttcgccggctcaggctccggcatcgcctacaacaagctcaccgacaacggcgctgccacccct

SEQ ID NO: 83294 - DNA, 165 bp, Glycine max
tgttcgaaacagagagtgatttcagtgagtgggcggtgttcacttgatctcatcataatcgtcagcgtcaattgaagaagatgccgatcagaaacatcgccgtcggaaggcctgaagaggcgactcaccccgacacgttgaaggccgcttttgctgagttcatct

SEQ ID NO: 83295 - DNA, 69 bp, Glycine max
gttggaaatgtgtgctgaaagggcagttgcctatttcagagaccaaattgaacctcaacttttatctgg

SEQ ID NO: 83296 - DNA, 56 bp, Glycine max
gctggcaaaaaaacaacaaaaggggacagaatttttgaagtagtttgtgtagactt

SEQ ID NO: 83297 - DNA, 90 bp, Glycine max
acaagcaaaaataacattttttttttagggaaataatcaagtttattaccccccttttgttttttttttgcaaccctacggacccttggg

SEQ ID NO: 83298 - DNA, 235 bp, Glycine max
ccaaagaaggtgaaatctataacatgggagttcaaggttcatttggattagtaaaaaaatattggcttggcaaaccaactcgagaaatcttaattggagttctaaaaacacaaaaagggggccaaaaaccagggttggatgcgatcttacctttctcgattcccttttactttctactggcgacctttacgggctgtttattcctttttttgacaccaaactttgcaacttttag

SEQ ID NO: 83299 - DNA, 354 bp, Glycine max
aatattaaattttaagggcataccccccaaccaaacgaaacacaaaaaaactaacccaaacaaaaaaaaaccaaaaaaaccaaacccaaatttctttaaaaccgacataacaaccccccccaaacccaggggccccggttctcaaacaaaaaaaacctgccccaaaacgacccccaatgccaaaaagtgaagatggaagactttcctccccccacaaattcaaccaaggggaaacaaacgaaaaattcccccccgaacttccccctttttgtcccgccccctttttctaaccaccaacatcgggccgtttatataccacccaaccctacacggacccccccaattaaaattgtt

SEQ ID NO: 83300 - DNA, 353 bp, Glycine max
tttttttatttttaaaaaaatatttttttttttttgggtgatttaaaaaatacttgttttttacaaattattttatttacttatttttttttaatatatttttttttttaaccttttcattttttaaatggaaaaaaaaaaaaaaaaattttttcaatacaatacatgaattcataaaaaaaaagcaaatgttgttggtacacaaaaattaaaaaaaaaccttttttttttttttttccaacgctaacttaacaagggtaaaattttatggaaaggaactaaaattaatttttgctattaagaaaaatattctttggtccaaattatttatacaaaatactatatttttcatc

SEQ ID NO: 83301 - DNA, 187 bp, Glycine max
caggggactaaattaattgatccatggttatttattttttgtttaacccaacggatttaaaattttttcccacagggaaaggttttgggtccgtttccttgctttttaccctttattaattaaacatggcacaacaccggtggttgtttaatttaaaaccctactaattttcaaggagggtttccct

SEQ ID NO: 83302 - DNA, 81 bp, Glycine max
ctctctctctgctgggttcgaaccgaaaactcgttgcttgggaaatgcattccaaaccatcaaatcgttcgggaaaccggc

SEQ ID NO: 83303 - DNA, 410 bp, Glycine max
  unsure (1)..(410): unsure at all n locations
cgangaaaaatttaatatatttatgtaaaatatgtctgtacgaataaagtaatagtacatatgcaaggaacaagcatggcttaactagaatgaaatataaacctttgacattatcaacattttcgggttacacctgatttcccagcacatgtatacattttcacagggggagaaaaactgggcatatttaggcataaccccggnnctattttgaccacaagcaggccatgatgtatttcacactaatccactagaacggttgactctatgtttcactatctctttacatttgggtttgggtttctgccgagtacaggaagccgagaccagtttgccgcctgacgtgctctgggatgagcttaggaagcagttcagggggcgctccatctaattccttttaaagttgaaag

SEQ ID NO: 83304 - DNA, 83 bp, Glycine max
  unsure (1)..(83): unsure at all n locations
gatcctctagagcggccgcnnnnnnnnnnnnnnnnnnnnnnnnnnnttgtggccaaacaattatattttataaaatagaacat

SEQ ID NO: 83305 - DNA, 407 bp, Glycine max
ccggaaatatgaagaatttcaattacgggaacatgtgcaggcatgtacttgagaactacaaaatacatctgcgactgtgtgggggaaaaaaaattccttgtttgaaaggtttccccgcctgggtaaaacaggtaattggaggttgaccttaaagcaggcctttgttggttggttcaccatgaaggaagacccaccaattccggtgggtaaacccttgttgttggaagcccccctctgtttttacaagtgccccaccccaacggagggaaaaaaaaaagcgcgtgtcgagtaccccatttcttcacagggtgatcttttgagagaccccccatctctaagggctaaaaattggctgttgttgtgtaaggccctaattattctttggtggaccaccctttttttttttt

SEQ ID NO: 83306 - DNA, 78 bp, Glycine max
acatcatcaaaacaaatgatcatttaagcggtgccagataatgtttgtcacaaaaagtgtcaaacacatatgatcccc

SEQ ID NO: 83307 - DNA, 397 bp, Glycine max
  unsure (1)..(397): unsure at all n locations
tnttnnnnnttcccaagggggtttttttttttttagggttaaattaacttcccttttttttttttttggaaccccaaaataaaaaagggggtttaaaatttaattttttttgccaaaacttttttttggggaaacctgattaaaaaaaccccccggtggtaaaaaaaaattttttttaaacccaaaaattttttcaaaaaggggcgcttttccccaacccttaagagtgaattttgttttcccccacccatataatccgggggggaagctctccccaagtttttcccacaaaattggccaaaaaaataccccttttggttaaaaaaaaaccctcgggaaaaaaaatttgtcaaacacgctacacatgggccccccatttttttttttttttcaaccc

SEQ ID NO: 83308 - DNA, 54 bp, Glycine max
gctctcggcaagtttcaggccttcgttagtagcagagaccaacttctttccctc

SEQ ID NO: 83309 - DNA, 92 bp, Glycine max
gggtccagatgtctagaaaattcagggggggtttcagctcaaaaaacgtagttaccaattcccagtaatttatacaagttcgtatgttcaag

SEQ ID NO: 83310 - DNA, 51 bp, Glycine max
gtaagcaaagagctaaatacccttggggcgattttttgcaaacgacatact

SEQ ID NO: 83311 - DNA, 183 bp, Glycine max
gtaaaagaaaacctcccctcatgattgggttttcttaaaagatcagacaacaaagggtctgataaaacgctgcgcttagcttacacaggaaagcatgaatttcatcaccttaacctagtttggccaggacttcgtgcagagaagatacagtcgcagcattgttctgctctggtgctgggctga

SEQ ID NO: 83312 - DNA, 441 bp, Glycine max
cgactaaaaataacatgcaagcgtgtggcaagaggagtcacattacattgtcactttcaaacaggagatgaaaagagcaaaatttgattcaccagcataggaaattgccttggcttcacgcaaaacagctacttttaaaaaaaatcgattaaaaaaagattaacttgacgcagtatatttacagaaatatgcaaaaagctcaaacataggcagatactacaaatcatgattgttcatccccttccaaagtattgggtcttccacaagactttaggcagaaatcatacggaaactcagacccagctgatacagaaatcgcactactctctctgcaattctttctcatcattccattatagtaaatacacaaaccaattctgcttcagacgattccactcgcgtcttgaacaaagttagccaatgaagtgagctcataatgat

SEQ ID NO: 83313 - DNA, 51 bp, Glycine max
ccaagctttcctataaggaggtcgattaaaacctgggcgaatcaatggcat

SEQ ID NO: 83314 - DNA, 383 bp, Glycine max
actcagtgtaaaattactttggaattctcaactaaaattcaaacaatgcactaggttggtagaaatgagaaacaaatgctaccgtcacctctctacaaatgagaaacaagtaaatacaggagaattctcataaaaaatgaaaacgcaaaaatgctgaaagaatgaacctacaaatctggaaaaaccagagagcattggcaatcataatcatgcgcgagcataaactggaagcaaataggaaacattacttctgctataaaactatacacctcttcgatactcaagttgctttgtgtttgccagtaaaatttctcgaatatagtttgctattgctttgcagccttcaattgccagttgcataacattttccaaaatgtcaattg

SEQ ID NO: 83315 - DNA, 189 bp, Glycine max
  unsure (1)..(189): unsure at all n locations
aaccttaaaattcttcttaattttccccttttcttccaacccccccccttaaaaataaaaaaaaactacccccatcccttccctttttttttttttttacaacaaaaatttttccttccccanaaaaataaaccaaaaccccaaccccccaaatcctanaagggcctttccccccttttttcttttttt

SEQ ID NO: 83316 - DNA, 62 bp, Glycine max
aaaaaacccgaaaaaaaaaattaaaaaaaataatttaaaaatttttaaaaaaaaaaaaaaaa

SEQ ID NO: 83317 - DNA, 428 bp, Glycine max
gcccctccttttttttacctgtttggcggtctttacctttataggatcttctttcagacactcaaatctgaaatttttattcaattgttaacttttaattgttaccaaaaacgggacgaacacactcgtgggggcgccaaaaacagaaaaacaactgctttataacaatttattcctttccactaaaaaattatagggtggaaaaacacttgccagagaaaaaaaaaaggggaatcctttttccttatatccaacccaaaaaaaaaccttccctaaattttttttctcaaacccaaaaccaaaactccgttaaaaaaattcccccacaaaaaaaaaaactttattcccttttgcctcttggacaaaaaaaacaacctttttcttttatagggcgcacacaacgcaaaacctctcctatttcttttggg

SEQ ID NO: 83318 - DNA, 399 bp, Glycine max
gactaactcttcaatcatattcgtgccagcgcatcacatgcttttcacggaacaaacaataacatatgttggtaaaaaaaaatcccaattgccagatgtatcactgaatgcaggaacattccggttcatcctaaaaaaaccggaccggtattttttggacttcgaaacttactattttttgagacgaatggactctagattaaagagatgagaagagaaagacttgggacaaaacgttcaaaacaaacctatattataaagagcaactctcgacctatttaagtgaaacatgcggggcacacacggggggtgcgacaatagaaaaatcgggcttagcataatgcacatgtgtcataagcacaaaagaacccgccgcatatttgaagaaaccactacccc

SEQ ID NO: 83319 - DNA, 52 bp, Glycine max
gaaattgacattgagccaactgatacaatcgaccggatcaaggaacgcacat

SEQ ID NO: 83320 - DNA, 283 bp, Glycine max
ggttgggttccagcattaaaaaatggcttgaatttagacaacttagaaagaaaaagcaggaaccaaggcaacgcgtttctgaatcgcgactatgatcatcccttactgcgttccttgttctgggctcttcatgtgaccgccggttagttgtgtttgttagatgtaaatgtgatctatgtaccctcaggggtcccccgcgttattatgtgcacatgcatattacgcatctatcatcggcgatctcctttttctttgtgaagttcaatcttaaccgatcactagt

SEQ ID NO: 83321 - DNA, 54 bp, Glycine max
gagggaaagaagttggtctctgctactaaggaaggcctgaaacttgacgagggc

SEQ ID NO: 83322 - DNA, 371 bp, Glycine max
ggaattatgggtgacccacgcgtccgccgctcctcgtacacctgctaggggaacacctcctagggggcttcagggggcgtctgcatattgcatgatagagcgcgcttcgaattctgtttggagacgaatttaaacttgattcgcacgcccaccggcttttaattcgtggctggctctgtgttaacacaccacgtgaggagcattcttagcaacaaaagccgccgttctagaggatacaagctgacgttctcggccttgccacttgatgagctttctatagtatcacgaatatctaatctatcggcacggctcttactatgactctactgaaagaaccatgtaagcccctaattttatcccttttcagcaca

SEQ ID NO: 83323 - DNA, 61 bp, Glycine max
ggactttgctgcgttgtgttgctttggtttattaaatgtcaactttctatttgtagtgtcc

SEQ ID NO: 83324 - DNA, 125 bp, Glycine max
  unsure (1)..(125): unsure at all n locations
gaagaagggttcgtagacagcccgaaagaaggtcctctcttcgtattctatagaaagacgaaatagcgtaagagaagaaagtagaaaggatttggattcgaggcttgctaggtgaagtcaacana

SEQ ID NO: 83325 - DNA, 313 bp, Glycine max
gggtacctatctattgatccgatatggcgcgactggtgtgtgtccttttttccttgcatttcatggttatcatgtcaggttccttcccagcaaatagtgaaagtgtttacaaaagagcgtcctatgtatgtatccacactacccttcgcatgactgacccaacttcacttttatttacataacaacaaattgagtgaacacccgactgctatcaaaattgttgaggctaataccgcgtccatacctgagcttatgactatgtacatgatggatgaccctctaaccgaaggaccaagtacaactccaaagcttg

SEQ ID NO: 83326 - DNA, 153 bp, Glycine max
agcgtaccaacttttcctataaggagtcggattaaaacttggcctaatcatgggcataacttttttctgggggaaaatggtattcccttacaattccacaccacattccaacccgaaaccttaagggtgaaagccgggggggcttatgggggg

SEQ ID NO: 83327 - DNA, 420 bp, Glycine max
ggaggataatacacttgcctattaacgattttattattggattatgatcggggggagttgtacaagatacaagtgatgcagaatttagacggctaacttctgtcctaacagtaattttctaagattctgtgtaccaataaaaaaaaatctgagaaaagttgttaggcgcctgttagattcagctatgttgccatgaaagttcaactctggcagaaaaaatactttctcaactatggtgcacattggcccttggctggattgggatcatcggattcccaaagctctccttgctggcaacacaataccaactttactggcgcaacctttccttccactgggaatttggcttcccccaaatacgaaaagcgtttcctattcacttcacattcaaatgaaaagaacctcttatattttcttttg

SEQ ID NO: 83328 - DNA, 135 bp, Glycine max
catgggatatacagagtggtgctgttttcttgaataaaaatgggcacaaaggacgttttcttccttgggtaccccccttaaaaaatcagaccgttatccttgtaataactatataccagcttctccccccccttt

SEQ ID NO: 83329 - DNA, 392 bp, Glycine max
aaaaaaaaaaatttttgaccccccccccggggcccgttttttttttaaagggggcccaaaggttttttttcccccccttttttttttttttttttttaaaagggggaaaaaaaaaaatttttttcccccccccaaaatttaagggaaaacccccccggggggggggggccccccttttttgaattttttgggccccccgggggggtaaaaaattttttcttttttcccccccccgggggggggggttttttttttcccccccccaaaaaaattttaatttttccccccttgtggcctttgggcccccttttaaaaaaaaaaatttgggggggcccccctttttttttgcccccctttttttccaaaaaaaaaagaccccccccccgtttttt

SEQ ID NO: 83330 - DNA, 145 bp, Glycine max
gtcggaaaatataaaacaaagtgcagctgggatatagatagtatgcatataacagaaccagttgcatataacttgcatgaaacaagaagctagaagaagagtgataaagagagagagaaaatgaaaagcattggagcatgcatga

SEQ ID NO: 83331 - DNA, 118 bp, Glycine max
ggaaaaagctaaacttcttctacctcaaatctgaaaaggcttacacccaaaattctcaaaaaaggggaattttacactctctccgcttcatataaccccgtttgtgtttccctcactc

SEQ ID NO: 83332 - DNA, 60 bp, Glycine max
gggtagaggatttactctttgttattgaatatcaacgtcaattgattacgcaatatccat

SEQ ID NO: 83333 - DNA, 135 bp, Glycine max
  unsure (1)..(135): unsure at all n locations
ttntttttttcttggggtcccacgtttcctttctttaacaacggaaaggatcttatacagttctttctgcttcacaagagaagataccctcatgaaaacggagttctacaccacggacctgttacaggccccaat

SEQ ID NO: 83334 - DNA, 244 bp, Glycine max
gtccgcccagcaacatgaaactcattaatgattggcacatttttcttagtacaaaaaattgatcatttttttcctggaagaagaaaagagggtggggaattgctacatgttagatgaaaagacaaaatccagctggtgtcttggcaaagagaatactcatgaaaggaaatctgttcattaaaatgataaccaacagtccaatctcattcccttctcaaccaaaaactgggattgatagcaaaaa

SEQ ID NO: 83335 - DNA, 80 bp, Glycine max
ttttctggctgtgggacccgacaggtatgctctcactcgaacccttcacagaagatcagggtcggtcggcggtgcaaccc

SEQ ID NO: 83336 - DNA, 182 bp, Glycine max
ggggggccaaaaactgcctccaaggacccccagatcgatcaaggcgcttcagtagaatataacaacaggatccacagccggttcaataattaggtacaacttgcaaaaaagagaaagaaatataataaggtcttcttgatcaggttaaaaaaattgtggccaaattagctcaacttcagatc

SEQ ID NO: 83337 - DNA, 278 bp, Glycine max
accggccccacatatggtttattatcaacagtctgacacatgatattcatctgcattcaccgtatcgaaattaccgaaaaacatgcttgaaaactatctcagatattataaatcttgttgagcattacacacaaccaacattgctgtggatagatgaagaacataccttagagtcagatattaaactaaccgtccaatgcaatgtttcatttgaagctatttgtttagcaaaatactcatacaattcaatgtgtaaattatacataaacaccagaagc

SEQ ID NO: 83338 - DNA, 61 bp, Glycine max
cgcgaaaatacaaaacttataccattttttgccatataaaaataaacgtttgacccttgtg

SEQ ID NO: 83339 - DNA, 119 bp, Glycine max
acatggaagagagttttacgagaaatacgaaggggggaaccttctattaagacagaaaaaagtccctttccatctaaactgctgttttgttagactgaatggatcgcccccttctgtcg

SEQ ID NO: 83340 - DNA, 76 bp, Glycine max
accatacccgctgctggggcattatacacattattgttacttttgctcccggcaagataaatctgacccctttccc

SEQ ID NO: 83341 - DNA, 387 bp, Glycine max
gctcccaagtctcctacgtgtataaagacaacgacaacatcaacgacaacaactatcttttgttccatactttgaaatcactaaagtacaatgatgtatcttaaccatctaaggcatgcagatcaaccaacatatctgtattataggaagcaagtttttgatttatcattatatcatcactcagccttggtggggagatggttgccaccagttgcttatttgtagaaataaaacagagtcttgatacaattgtttccacctccaggacaggaaggattatgctggaatgttccaaaatttggctgccccataaccaaagttagtttggttgcccaaccggcttcaaaaaaaaaacgagggaagaatttttttgtttggccaaaagat

SEQ ID NO: 83342 - DNA, 198 bp, Glycine max
cggacccccaaatgttgacacactgtatgccaatccgctcaatttacaacttgggacgacccagcaatgttgtcaccggatgcttacgcgttcctcctttacctcttttaagacgtgttcaaacttggcggaatcaaaatcctaactgatgcccgcgaaaacacgttgtttgttgacacttttatgcatcttacatgc

SEQ ID NO: 83343 - DNA, 135 bp, Glycine max
ggttcttacacccaacggaacggtcccttttcaggcgtttttttcattccgttgacccctttttttacccttgaatttctgacccgttcctgcttgcgtaccaggtttcccttaacccccccttttaaaacttag

SEQ ID NO: 83344 - DNA, 110 bp, Glycine max
  unsure (1)..(110): unsure at all n locations
ctctagagcggccgcttttnttttattttttttttttcttttttttctttataccaagggttacaaggaaaaacgggggtgcatagatctgaatgggcggtccacaacta

SEQ ID NO: 83345 - DNA, 156 bp, Glycine max
  unsure (1)..(156): unsure at all n locations
cnttcgaactgaatgatagtcgtgcaaatcgacgggcaaatatctaagaagtgctcaaccagaggcagctaaatgttctcaagaaacaaaggaaagacatttgttttatttttaaacaaaaaatattgcccccttcattgctaaagcaatcaaatt

SEQ ID NO: 83346 - DNA, 62 bp, Glycine max
acccctagagggggcggtttttttttttttttttttttttttttttggactgagaagagaac

SEQ ID NO: 83347 - DNA, 201 bp, Glycine max
ttttctcacgttttttttttgaaaaggctgcaccaaataaacggtggggaatttatattttgaaggggtctaacactactcttacatatacgaaagcataaattaacaactcactcatcaacacacaatttcaaggccccaaccgcaaaaaaaacgttgtctgcttttggacatttttacataaagcttcactttcaattt

SEQ ID NO: 83348 - DNA, 64 bp, Glycine max
caccataactaggtttagaaggaaaatcctcactacagagtcctgaatggccggttcacaactc

SEQ ID NO: 83349 - DNA, 268 bp, Glycine max
  unsure (1)..(268): unsure at all n locations
atcctctagagcggccgcgtgcnntttttttttttttttttttttccattcataaaaaatagcaattgattaattcaacgggctcaaacaaaatattatctaagatttcaccactgcactcatctctattccaaagtttatacatcgtgatattctttttctgctaccggcaaacaaaatggaaaataaaaaatggcaaaattaaggggacttgcaccctttctagtgtgcctaaaatgccaaacattttatcacaagactagaatac

SEQ ID NO: 83350 - DNA, 52 bp, Glycine max
gggattcattgacattaaaaaattttataagatgaccacttaaatattgttt

SEQ ID NO: 83351 - DNA, 257 bp, Glycine max
gcgtacataagcttggatcctatacagcggccgtttttttttttttttttttttttttcttcccatcaagaatagaatggaaacgtatcatagcattgacttttaagtacatgatcatgatactgaaccctaattactatagggcgcccatctaaccctattaagggaggacaaaataaaaattcaaaaactaattatcattaacggctgtgggaagggaaccatcctataaaattctaaacacaacaactactatg

SEQ ID NO: 83352 - DNA, 214 bp, Glycine max
ggggtacggaaactctttataactttaaggtatgtgctgtcaaaaaaacttaatgtcactcttgctaaactaatgcaatgcacgggaggatgattttgtatttcaatgacagaccaataacttgtggtcgcatagaaaaaggctgtgtcaggtttactattgctcgaaggagccttgattcaaagaagaatgctattctcactaatctgcatat

SEQ ID NO: 83353 - DNA, 58 bp, Glycine max
aaggtatatcctgtccgatgaaccggcccaaaaaagaaaaaaaaaagaagacgataaa

SEQ ID NO: 83354 - DNA, 113 bp, Glycine max
aaaaaaaaaaaaaaatacggggaaattaaagggggccgttttgaaggttcaagcctaccttcccctggcttgcgaggtaatacctttttattagggcacccaaaattaaatca

SEQ ID NO: 83355 - DNA, 362 bp, Glycine max
tataggggtggcacgtgccacgtacacgtgaaaaagaaccctggtctttctgcccctctccaatctttcccgccaccgccgaaaacttttcttaatcagtctcacagtgaagttgatcggagccacatacattcacgcactgacgctactgtgtgaacgacgattaagatagtaattgttggatgaacttgaagggattcaatggatacagaattcaaaacaattgaggcaagcataatgtctatgcttggccaactccaatctgagggtggcatcctacaaagaatggtatacaagaattagaaccagcaccgacgcggttcctatttccagcgtcttttgaaggtaaggagggatttaag

SEQ ID NO: 83356 - DNA, 52 bp, Glycine max
aatcttgatggtgtggacaatcttcttgatcaaatcttgaagatccggcgga

SEQ ID NO: 83357 - DNA, 51 bp, Glycine max
accacgcgtacaacacatataaggatacggttgttagaggaccacagatgg

SEQ ID NO: 83358 - DNA, 60 bp, Glycine max
atggatattgcgtaatcaattgacgttgatattcaataacaaagagtaaatcctctaaca

SEQ ID NO: 83359 - DNA, 51 bp, Glycine max
  unsure (1)..(51): unsure at all n locations
gaattaaaatgtaaattataaggactaaaaagattattttcaaactntnna

SEQ ID NO: 83360 - DNA, 393 bp, Glycine max
ttatttaactttgaaataaataaatgaataaacgggagttatgcttcctttttattaaaaaaattaccccggaaaggttggaggggatatttattttttggcttaacctaaaggttccttcaccgaaaataatcttgttcaagccaaactattataaatagcaaatacaaagtcattgtttaatttaaaaactgtgacacaatgaaatagtcgaatttgattgagtcaagcgttgtgatacacattgcgaaaggccatataccagctctaaaacacgagtgggctttgtgttaacaattgtacagtagcttcaagtttgaacactttactatgactgcgagtgagacagaacaattcattcaaatacaaaaacaatgattcacattacaacca

SEQ ID NO: 83361 - DNA, 131 bp, Glycine max
gtcgaatgggacgccgccctgtaagcggcggcatttaagcgccggccgggtgtgggtggttaccccgcaagcgtggacccgctacaccttgcccagccgccctaagcggcccggctccttttcgcctttct

SEQ ID NO: 83362 - DNA, 204 bp, Glycine max
cagcaataggatgtacaaaagattctattcttatccaaaaccggaagactcaccctcattattcatacacaatgggaccccgctgttaaaatgtgcctctaagcgtcatttggttggctttactatgatacccttacaagaccatcacttaagctgtgagattggaattatctagttcacatgactcatctatgtacaattgtc

SEQ ID NO: 83363 - DNA, 69 bp, Glycine max
  unsure (1)..(69): unsure at all n locations
gggttgcaccgccgaccgaccctgatcttctgtgaagggttcgagtgagagcatacctgtcggngccna

SEQ ID NO: 83364 - DNA, 371 bp, Glycine max
cccacgcgtgcgagggctgcctacagacggttttatggggaaactacaactcgttctgggcggcgccatattgctgaagggaaggtaaagtaaacatacatactgcatctcttttgtcaagtcgacttttaaggatccgattaaatacatctttatgttataaaacaagccgttgtactatactatacaatgtaactgttgatgtattgcacaaaataatcactgccaatggtcacgcctataacaaatgatgggaactctactggctatgacacgacatgtagactcttgggcagatgccaaatgatattactagagctggatgtgataatgctttcatcagattactcagagaaactggaactgaaaag

SEQ ID NO: 83365 - DNA, 329 bp, Glycine max
cgaatcccggtcgaccaccctccgccagtgtcggaggctgcgaagacaaacagggggttgatgtggctaatggtgggggatcctgtatttcacaaaaaaaaaaagcggcgctctagaggatcgcgcttcttagcgtgcatgccatactcgcttgctatgcgtcatctatttaatcagtggccgaattaacaaagtggccactggaaacacctgctccgaactaaattgcttgcacaataatctttttgcagctatgtatatcaaaggcggtctatcgacttccaacacctgtcacttgaatgggaatggacctcatgaaatggcataac

SEQ ID NO: 83366 - DNA, 107 bp, Glycine max
ggctttccattcttacaaacaaagccgtagtttagttggaaagggtcttttttctttcctacttggaaggtttcttcttcgtatttctcgtaaaactctcaacccac

SEQ ID NO: 83367 - DNA, 76 bp, Glycine max
ggggaaggggtcagatttatcttgacgggagcaagagtaataataatgtgtataatgctacagcagcgggtatggt

SEQ ID NO: 83368 - DNA, 260 bp, Glycine max
aattcgccagtgaggcactgaaatcatacatccatcctacactgattcctattgctagggtcatggctatttggaaactactgccatctgaatggacgtcggcgatttcttcatacatcatcctactggttcctcgagcaccgcgaaagcgtggatcatccatggcattgtggccggagtggccattgctgccgcggggggtgcacacgcttacatgactggatatactatgattaacagccgggtaggcatcatcatac

SEQ ID NO: 83369 - DNA, 63 bp, Glycine max
ggcgtgtgagagacgacagcaagggggtggttgtttttaaaaaagacaacaaaaaagagggca

SEQ ID NO: 83370 - DNA, 64 bp, Glycine max
gagttttgaactggccattcaggactctgtagtgaggattttccttctaaacctagttatggtg

SEQ ID NO: 83371 - DNA, 53 bp, Glycine max
aaacaatatttaagtggtcatcttataaaattttttaatgtcaatgaatccaa

SEQ ID NO: 83372 - DNA, 217 bp, Glycine max
ggattccgcagcttcatgcgtaacgcgtgcctagcaaaatcagggacaacggcaccgccgtcgtgcaagaacacagcgagggtgctcggctactttagaacgagctatacccagacatacgtgaatcgccgtgtgtcgctcgatacagaaccacgatacacgatgttgaaactaataagaaaggactggcttaggttcattatagagctcatgtggg

SEQ ID NO: 83373 - DNA, 62 bp, Glycine max
ggatttcgcagcttcatgcgcaacgcgtgcctggggaaaacagggacagcggctccgccatc

SEQ ID NO: 83374 - DNA, 64 bp, Glycine max
  unsure (1)..(64): unsure at all n locations
cctgaaatggcgacangacngcagggggactggttaccgncgcctttatctcccactacccatc

SEQ ID NO: 83375 - DNA, 274 bp, Glycine max
  unsure (1)..(274): unsure at all n locations
tttttnnttttttttttnccgaaaataaaataaaaaatatttcccattattggttgtggttcatanatgacagaagagaataacttaaaaaagaaaaatgtcccactaaatggaaaaacaccacaaatgaaagtgcaaaccgctccccctttcatgaaagaaactttaatctacacttatccacaatcttggaaacataattgaaaaggtcaaaaaaaactttctaatacaaaaccaaaagcattttccattatttaactttccatattaaacc

SEQ ID NO: 83376 - DNA, 69 bp, Glycine max
aattccccaaccccccgtgaaaagccgttttcttattttgccccacaattgtttttttttttaccaatt

SEQ ID NO: 83377 - DNA, 242 bp, Glycine max
gggaataataaaatccccctccacatccccaagaacgaaagcttttactcgcctccctttaaattttacccacccccttgaacaaaccaattttacccctctccaaaatattttcaccccaaaaaaacatatgaattacccgcaaatacgcaccaatgcctttttttttcccaactttccctatagcacaaattttttcctcaccccttacatacatgactaacacaacactatccttaacc

SEQ ID NO: 83378 - DNA, 105 bp, Glycine max
  unsure (1)..(105): unsure at all n locations
gggcggttttatttttttttttttnttttttttnnngtttatttaaaaaaccccttctatcntcttctgacgttcttactaacacgtgggcggacacattaatct

SEQ ID NO: 83379 - DNA, 94 bp, Glycine max
  unsure (1)..(94): unsure at all n locations
aagctnggatccncnagagcgggcgctttttttttttttttttttttttttttttccataaattaatattaatttcttttttttccccgtcggg

SEQ ID NO: 83380 - DNA, 265 bp, Glycine max
ccttaaactgtatcaacattctttttcatttgagttgtggttgtactttaagtcacctaaaaagacaccatctactgccaactatagtttagcattaacacatcagttggacatcaaacaaacaaaaataaaaaactaaagccattagcaaatattctttcccccctttttcttttttgaagttggtgtaaatggttgatttggtcatttcactaaaatcttgtgtccccagattaacctgatcaacaacaaaaggaaacctttt

SEQ ID NO: 83381 - DNA, 336 bp, Glycine max
ggcacaagaacctattttgtcattgaagggtatagctgagaactgtataacaaacacacacaagtggactaaagaccgatttctcacaccattaactttcattacaaaacagtcttgttttcccactcctaaagcttgaaaatgcttgtacacactcagataagccaggtgggaagctagctgctagttcttccaactgattagcgagattaagaagtcccctaggttgtaacgtaagcttacggaaggtaaattttttgaccaacttaaccatgttgctatacactgatggtcttgttggcaagatgaaatttatcactcatagcatccatccca

SEQ ID NO: 83382 - DNA, 189 bp, Glycine max
gggagggcaacgagatttcccaatgttgagaatggacccatttcggggacaatgggctgaacaaagatacctgacataaaaaagaaggccaatacaactgcacaagaaatacttcaccttaagcttaaaaaaaaaatctggggggtcctaaagggccaatggacccaaactaacagctggggggatagg

SEQ ID NO: 83383 - DNA, 223 bp, Glycine max
gggaccttaaaaattattggaaaattcttaaatgaacccaaatgtttttaaaggaaaaaacccttaatgttttttataatcgcccttaaacaagacttccaaaaacttcgggggagtttaaactttaccattttttttccaggaagcaacctttgctgtaacagttggtttggcaacactggaaaggttgcccttttggtgtttttttccaaccgtaccggcc

SEQ ID NO: 83384 - DNA, 64 bp, Glycine max
acgtagctggatccctaaggcggccgttttttttttttttttttttttttttttccaaaccgac

SEQ ID NO: 83385 - DNA, 89 bp, Glycine max
caatccttactcttggaaaaacccggaaaatccaaaacaaaaccagaaacaaaccaactttccctatagtgagtccccttagagctcgg

SEQ ID NO: 83386 - DNA, 314 bp, Glycine max
gcagcgctgattgggcacgcagcagtggtctattcatgtgactcagaaaatgcctcgacctactgcctgcaaattcccaaacaacacgcttgcgatcgccacactttgttaaacaacggtctctaatgagaggaggaagtactagatattagcatttgccagaaagaaatagttattggttgacaatctcacacactcatacgaatcataatcatggtggtctagacggaccctcttaaatgtgggaatggctcacttccatttcggtgtacggactgccctgttctaatttagaaatcaattagggcctgatt

SEQ ID NO: 83387 - DNA, 429 bp, Glycine max
atagaaatatctggatttagtagaaaacatgaggtacattttttgacgacccacacatgatgaatacttgggatcttgctgctccaatgctttttgtcttgctctattgaagcttactcagcttataaccaaagtgcatccttcgttacatggaatgttgtgatggaatttatttctttgttaagactcgaacttgtccaactgctgaagcacctgaaagatggtgatattctgggatggtaagggtggcattctcattaatggagtcatcacaaggtctcctccttcgtgtgtgagtgtgtgatgccgctttcttactcctcgagctggaggctctgagtccatggtggtggtggttccttctccattcaccacggcccgggttgtctccactctcttttttgagctttatgcaaatctcttttcatg

SEQ ID NO: 83388 - DNA, 62 bp, Glycine max
ataagtacttacaaataagtttatccaaacagggtcataatcattcattagtacttggtaca

SEQ ID NO: 83389 - DNA, 111 bp, Glycine max
  unsure (1)..(111): unsure at all n locations
gcgtacgtanagctggggttcctttagaggccggccgctnntttttttttttttttttttttttttttgggtntatttttttggttttttttttttttttttttttttttt

SEQ ID NO: 83390 - DNA, 66 bp, Glycine max
cgagagatatattcatcaatttcgattctttttcgatcgagatgtatggattcatgggtctatgtg

SEQ ID NO: 83391 - DNA, 81 bp, Glycine max
ggaaaatgtgttttggataagacacctatgcgagagatgtatgaagtttaagttgcaagaatttgagaagttaggtcatac

SEQ ID NO: 83392 - DNA, 79 bp, Glycine max
cacaaatggctctccctcctatttgctcactgcccgtcgatgagacagatcacacttgttccctatgagcatgatggtc

SEQ ID NO: 83393 - DNA, 351 bp, Glycine max
gcacataatgacactcatttaactttaacgagaacttactgatcattaaccatccagggatttacgacccaaggaaccagtccatccctggagggtgaatttggatgaaaacacctggaaggacatctttacacagaactagattccagataaattcaataatacacaatttgttttttattttgatttgcccgcctctagaaaacaacggtgggaagctgcatcgcgggtgttgctgataaagacaccctaataagcccggccagcgattccacctcctatgtgaggtcctgcccagtcaatacaggggtctgctcagggacctctcacgactgcatgcccaaatgtaca

SEQ ID NO: 83394 - DNA, 533 bp, Glycine max
taggctgggttcctttagggcggccgctttttttttttttttttttttttttttttcccacagtaactaacacaaacatacaagttccatgcaaaagactattccaatccagttcaaaatccagtacaatagcaactttaaaatacatgccaaagcaattggaaaggtcttatagtgctaatgcagactgaaaaaagtctctcaaaatgagcatttagtacgaacacataaagacacagacaaaagtgactaagccaaggatgatttgcctgaccggtgaagtcggtttcgatcagtttcttctctcaccggacaactgatgtgcgctgctttgctccgccaaaggtgagtcccccactgaactgtggtgatccacccatgtttgcagaattccccagaaacatgcactcctgctgccgaaaattgacattgttgccagataaacatggccggtcggagcaggttgtgatgaaagatgaattatctccatcttttgaggaatgactttccacctctgatagatgttccttttg

SEQ ID NO: 83395 - DNA, 488 bp, Glycine max
gggagaattaatttcctttttctccttgcttgagcagctacattcatttttgttttggcacacccagattacaccaaggtaaaatctggaaaaataaataaaatttataaatttacaaaattaaacactttgtagagttttaaggtctgtattttttttatcaaaaactgcaaatactcttgttacaatattagatgaacctcatacctgtaaaatttgttgagattggctaaatctttgtttttctaaaacaaaagagagtgagtgtgctacttccttcaaaagtagtgcagaatctatctcagtgacattgattcaacaccttcaacctcaagtaagtagtatttcattaaacaacttttccttcttcaacctcctcttcgccatagattttgcattaagcaaatacataataaggattttcaattttagagtagttcaggaatgggtggtaaaggaaagcggggatgtgtatggtgctggtggat

SEQ ID NO: 83396 - DNA, 157 bp, Glycine max
agcaaaaatccaattggggaaggaaaggaaggtcaaaaagttactggtatcaatcggtggatgacagaccgatccctggtggcaatcgaaatggccctcaaaacacacatggttggattaatgaatgatgataccatacatccttacctccccatat

SEQ ID NO: 83397 - DNA, 106 bp, Glycine max
  unsure (1)..(106): unsure at all n locations
gcgtacgtaagctgggatcctctagaccggccgctnntttttttttttttttttttttttttttatgcttaaactcagcgggtagccccgcctgacctgaggtctc

SEQ ID NO: 83398 - DNA, 79 bp, Glycine max
ctgttggcacactcgagtcaaatcttattcttcttcttccattcctctttttctttctctgttttgcacatgaaccatc

SEQ ID NO: 83399 - DNA, 327 bp, Glycine max
gaagcacaacgggatggcacattgattggtttcaatcacagatttaaacattgaatccaagcccaataaaaaacctgaaaagtgttagacatcccatgaaacaaattcctgctattattgtagccataaagatgtgctaaaccagagaacatgaacataaagccaatgcttgttaaaagagaaccaattgacatagccagataatatttacccgtgcatccacaaggcacccaaaaagcatcaagccttattggttatgtcgctggaaagccaggccaaaccctcatagagacccttcccagaggtagcacacgtgctctggatgta

SEQ ID NO: 83400 - DNA, 98 bp, Glycine max
cggccgtttttttttttttttttttttttttttttttagggagcaatattatctaaaatgactgaaagcaacataaacattgagcatgtctaatacac

SEQ ID NO: 83401 - DNA, 85 bp, Glycine max
ccatcagatcactatacgacatctatctatttctttatatgttcctctttcttcttatctttctcttcatgttatgtgattattc

SEQ ID NO: 83402 - DNA, 77 bp, Glycine max
gggaatccaattttttggatgaatacgggcgccagggcagtgaccagcacggggagtgtttgactgcccattgcttc

SEQ ID NO: 83403 - DNA, 208 bp, Glycine max
ctgggccaaacaaatacaaattttggtgcaacatttaaataattgcaaactttttgccctttattgtatgtaacaatctgctgggatccaggaaacagggttttttacatacccatggggggtggggggataatgagtagcatgtttttttaaatctgtttttacggggcccccgattccaataaagttcccaccaaaaatttcattt

SEQ ID NO: 83404 - DNA, 243 bp, Glycine max
ccttgcccaaacaaatacaaattttgctccaccatttaaataattccaaacattttgcccttttttgaatttaacaatctgctggaacccaggaaacagggttttttacataaccatcgggggttgggtgataatgaataccatgtttttttaaatttgtttttacagggcacccgaatccaataaagttcccaccaaaaatctcatttcccttttgtcgttttcttgaacccccctaaccct

SEQ ID NO: 83405 - DNA, 348 bp, Glycine max
agctgcaagatcccgcaggtaaaaactgagacggatgccttgtaacccatacatatgtccaaaattcaatttccagccaatttccttaagggaaggcatcacattcacggccacttaggccttttggcctttttctagatacatgctcctaccagtataaaacctaccttacgtaacatcctcatctgttggattaaaaaaggaatctgacaaccaaaatcactagccgctgccaccaatcatttttatctttccgaccaccaactaaggcgcgctgaccacgaatccttcttgccagctgaatgttctcgggcataatggatacacgctaggcgtgaatggcacaca

SEQ ID NO: 83406 - DNA, 118 bp, Glycine max
cgctccctccttccttcgatatcttcttctccgccttcggcttcttctccgctggggccttctctgccggcttcttctccgcgggcttcttctatgcctttgcgggacccattggcag

SEQ ID NO: 83407 - DNA, 295 bp, Glycine max
ggaataaagttttgtcttcccatttttattttagattgtttgcgattttttttttgtaaaaaaaaattttttttgttcaagtaaaacccgggggcccccccctcccattttttggttttaaaaaacctctcacctttacggccccgaaaaaacccccctttattgcctccaaaaacttttttaaaccccgggcccccccatattttttttttcccccccggggggcccaaacccaggtaccccctccccaggtgggaatcccccccccccccctttttggtttttttttccaccc

SEQ ID NO: 83408 - DNA, 335 bp, Glycine max
  unsure (1)..(335): unsure at all n locations
cgcgtaagannggatcctctagagcgggcgcgcnnntnnnnntttttttttttttttttttgtgatggccaaagcagtttattgctgcgggctgaataacaaaacacacaagttgactaaagacagatttcttaaaccatagacattcatcacaaacagtgctcgttctcctactcctaaggcttgataatgcttctccacactcatataagccagttgggaagctagctacaagttcttccaactgatttgctccattaaggagccctcttggttctaacgtaagcttctggcaagtaaatgtcttcaccagcttcaccatgtggctccccttc

SEQ ID NO: 83409 - DNA, 353 bp, Glycine max
agggactagtccataaacattaattggcgttggagaacggaaaccgaaactacaggttgaggaagattaattctgataaagcaaaagcgaatgggaatgtagttcaagaaccacagaggggggggtgcggatgcttatgctatgttaaaatgacaatgactcctaagggcttgggctcgatggagatgaagctcttgcattggacttcgctgacgatttcaaagatactgatgcagccgaaggcgtttgcggatgcagcctttggcagttgcatctacacctgcaaatgataagcgtcagcgcacataagcatatgccgcatggaccaggtgcagccatgatcataataaggt

SEQ ID NO: 83410 - DNA, 335 bp, Glycine max
ccgacgcgtgcagacggctgaaaggggccttacaactgaaactgcttcattgcataattggggatgagaacaaaccttcttcctctagatacgcggaacgatggattgatttcatgctagtgtgacataagctgtttacaacagaggcaaccgatgtttgtcaatcgaaattcgaaagctattgcttattgtttggtatcgaaagaaggaggacgcgcttaaagtgctaggaagatggaacttgtcgcatcttccattaccttggtgtctagaacgaccctaacattgtatacctctacttccaattcatacataaccatatctaaataatacac

SEQ ID NO: 83411 - DNA, 345 bp, Glycine max
tgatacagctgtgataagacgacggggagggaaaaaataatacttgagttaaaaaatagaaaaaaaataattacatggatatataaatccaaataactagaatggaaaggaaaaaaaaactgggcccttttaccggataaaagttaactgttgagtatttggaagatcataacttttcatttgtgttaactaagtccaatttactggcccagatttaataaagtacttattgggaaaatctgtcgagtccccattttaactaacttgtgagttatcacgctattaccggttggacacttatggaatttgcccagacccataaaccttccaaagaatcgccaactt

SEQ ID NO: 83412 - DNA, 63 bp, Glycine max
tgtaccaagtactaatgaatgattatgacactggggggataaacttatttgtaagtacttatt

SEQ ID NO: 83413 - DNA, 66 bp, Glycine max
cacatagacccatgaatccatgcatctcgatcgaaaaagaatcgaaattgatgaatatatctctcg

SEQ ID NO: 83414 - DNA, 81 bp, Glycine max
gtatgacctaacttctcaaattcttgcaacttagacttcatacatctctcgcataggtgtcttatccaaaacacattttcc

SEQ ID NO: 83415 - DNA, 330 bp, Glycine max
gacagcactgcactcttcgcaacacaacaaaaaaagacaacccatagagcgcgtcttaataaacgctcttctctgaaaacccacattacttttcttctttcttcttctctttcgcttcttcgatcttcgatcttcgtcgctgaaaatgagagagtgcatttcaatccacatcggccaggccgggattcaggttggaaacgcctgctgggagctttactgcctcgaacactgcattcagcctgatgggcagatgccaagtgacaagaccgttggtggaggtgatgatgctctcaacaccttcttcagtgaaactggggcaagaaagcacgt

SEQ ID NO: 83416 - DNA, 366 bp, Glycine max
ggccttctcacttacgcacgggaaatagagaaagggagataaccagataactatttgattcattaatggataatgggaggacgggaagagatgtatcgacttacgatctcacgattgcttatgcgtttatgcttacgacctcaagcatgatggagctatctaactggatcaatgttccgatatcagcaaaacataaagagttagctagatatgatcatgtcagcctctacgttactacattctggatggcataatagatatatataactagttgacatgtggtctgtgctttgcagatgatctatggatctatcaaaagagatagaaaactggcagcacatttctacattagtagaagagcaattg

SEQ ID NO: 83417 - DNA, 61 bp, Glycine max
gaaacaatgggcagtcaaacactccccgtgctggtcgctgcactggcgaccgtattcatcc

SEQ ID NO: 83418 - DNA, 100 bp, Glycine max
  unsure (1)..(100): unsure at all n locations
ttctgctaattgcatacattctatttttatgattgatatattatgttcattcatgcatgatcttgacacatagntactcatgccttgcatttttcccccc

SEQ ID NO: 83419 - DNA, 280 bp, Glycine max
ggaactttggcgacgcaaaaactgaattcctttgagagtgggtttggaaccatgtaacaccgattattcactgttcaaagagaataaacaattaatcttgtagatataggggccttctctttggaacaccgttataattaccttaaattaaaacacaaaagtgttatattgtggctatcaaataactcatacttcacataatttcagcaatatgacagtgcaaacaacaggggatacctaactcaaggtgtttaaaaaaacatgtcaatatctgatgctt

SEQ ID NO: 83420 - DNA, 269 bp, Glycine max
tatcttttattttcgatggtatctgcattgtgtacggttgccctgtaaaatcagatccacaaatacatactactcattatcacccaacccacgatcgttatctataatacccagtttcctgtatcacagcaaattgatacatacaataaaagacaaaatgtctgcaataatctaaatgttgcatcaatattaaaatttgttgcgacaccatactatatcatactaaaaataccaaaaattgattcttaaagactaaaacgtaaataaat

SEQ ID NO: 83421 - DNA, 118 bp, Glycine max
ctaccaatggctcccgcaaaggcagagaagaaggccgcggagaagaagccggcagagaaggccccagcggagaagaagccgaaggcggagaagaagatatcgaaggaaggaggaagcg

SEQ ID NO: 83422 - DNA, 291 bp, Glycine max
ggtgttggtggtatgcctattgggggaggtggacctggtgttggtgcccctggtggcggaagaggatatggtgtgtgggcctcgtgtctaagaactattttggaagacataaagtagagttattttggagtacataaagtagatgcttatttgaatacaaaatagtggaagagtgcgcaccttggattttacttaaataataatgattttttttaaggccgaagggatagaacaaactgactagtgaaacgatgattgtgatgacaatcctgttattgatgaactttctct

SEQ ID NO: 83423 - DNA, 375 bp, Glycine max
gggcagcagaaaaacaagtagttgagaactaagaggaaggaaatggcttcctcaatgatctcctccccagctgttaccaccgtcaaccgtgccggtgccggcatggttgctccattcaccggcctcaaatccatggctggcttccccacgaggaagaccaacaatgacattacctccattgctagcaacggtggaagagtacaatgcatgcaggtgtggccaccaattggcaagaagaagttcgagactctttcctacttgccagacctcgatgatgcccaattggcaaaggaagtcgaataccttctaaggaaaggatggattccttgcttggaattcgagttggagcacggtttcgtgtaccgtgagcacaac

SEQ ID NO: 83424 - DNA, 352 bp, Glycine max
ccgacgcgtgcggacggctgaaaggggcctcacgacggaaactgctttaatgcataattgcagataagaacagaccttcttcctttagatacgcggaacgacggagtgatttcatgctagtgggacataagctgtttacaacagaggccaccgagattgtcaatctgaatttgcatgctattgcttctagtctggattcgatgctggaggtcgtgcattaagtgctaggaggatggaacttgccgcatgtgccactaccttgatgcctagagccgcgataacattgtatccctcaactgccaattcatacctaaccgagcatggaggagcacactcttgatactgctcatgc

SEQ ID NO: 83425 - DNA, 62 bp, Glycine max
tgtaccaagtactaatgaatgattatgacactgtttggataaacttatttgtaagtacttat

SEQ ID NO: 83426 - DNA, 75 bp, Glycine max
tttaaaagaatcaaagctaacgaacgcgtgcatgcaacgtaatagctttttaatagggtaacctaaattaaatta

SEQ ID NO: 83427 - DNA, 150 bp, Glycine max
ggaggttaggttgtatcgtatcatcattcattcatccatccatctgtgttctgggtgccattttcattgccaccaccgatcactctataacccaccaactgataccagtaacttcattaccttcctttccttccccaattaaaattaatc

SEQ ID NO: 83428 - DNA, 324 bp, Glycine max
ggcctactcacttacgcacgagaaatagagaaatcgagataaccagataactatttgattcattaatggaaacagggcggcccgtaggagatgtaacgatttacgatctcacgaaggcttatacgtttaagcttaagagctcaagcgagacggaacgatctaacttgatcaatgtagcgatatcagcaaaacagaaggagttagctagatatcttcctatctggcactacattactactgtctgactggcaaaaaagatctatagatctattggtcaggcggtctttgctttgcagcttatcaaaggagctatcgtagaagctt

SEQ ID NO: 83429 - DNA, 216 bp, Glycine max
cccacgcgtccggggattggcgagatgtctattgataaaagataatctccatggcctgttggaaaaatgggggaaggggcatccgtcggccttttgtgacgaacaaaactttcgtacgcttgctttcgactttgtgaatgttattggtggaagttaattccaatcctatggccctgctgttacagtgtctctactgggaaaaccttgtatatccca

SEQ ID NO: 83430 - DNA, 79 bp, Glycine max
gatggttcatgtgcaaaacagagaaagaaaaagaggaatggaagaagaagaataagatttgactcgagtgtgccaacag

SEQ ID NO: 83431 - DNA, 90 bp, Glycine max
gtgtattagacatgctcaatgtttatgttgctttcagtcattttagataatattgctacataaaaaaagaggaaacaaagaaagtggaaa

SEQ ID NO: 83432 - DNA, 207 bp, Glycine max
ttctgctaatggcaaacattctattgggatcatgcatatcgtatgttcattaatgcatgagcttgacacatagctactcatgccttgcattttcctaaaaactactaaaaggacgctaaattaaagcgcgcctatacaggatccacgcttatgtgcacagtgcatgatacttcatacttgtgctatagaaacacctaaattcaatta

SEQ ID NO: 83433 - DNA, 198 bp, Glycine max
ggccctttggcgacgcaaaatctgaatttgtttgatagtgggctgggaaccgtggacctccgatcattcactgttcagagtaaatcaacatttagtctcgtagatgggggtcgttcttttggaaacgctgttagattcaccttatatcaagacctaagagtgttattttgtggctacagtataactcattcttcagat

SEQ ID NO: 83434 - DNA, 131 bp, Glycine max
gtgtcagaaaagaagtaaggggttctctgactgcagatacgaattgttggttttactggcatcctctgtgatacacaccggaaacacaaagccaagggcggtcgatatagaagagccatcttctatacgcc

SEQ ID NO: 83435 - DNA, 121 bp, Glycine max
ctaccaatggctcccgcaaaggcagagaagaagcccgcggagaagaagccggcagagaaggccccagcggagaagaagccgaaggcggagaagaagatatcgaaggaaggaggaagcgaat

SEQ ID NO: 83436 - DNA, 302 bp, Glycine max
gggcagcagaaaaacaagtagttgagaactaagaagaaggaaatggcttcctcaatgatctcctccccagctgttaccaccgtcaaccgtgccggtgccggcatggttgctccattcaccggcctcaaatccatggctggcttccccacgaggaagaccaacaatgacattacctccattgctagcaacggtggaagagtacaatgcatgcaggtgtggccaccaattggcaagaagaagttcgagactctttcctacttgccagacctcgatgatgcccaattggcaaaggaagtcgaata

SEQ ID NO: 83437 - DNA, 314 bp, Glycine max
gggacccctccaaagaagggtttttctaaaataatctccattatttccttctgggcttcctaaactcaactcacaactaccatcatccaaatcagaactgcaaaagtttgctccagctatttctgatttaggacgcttcttcccacttttcaaacccagtgaaggcacaaattttttggctggtgatccagaaattttcgaagagccacctctttgtgaagcctctgtcaatgctaatgcaatcttatgagcaacatcattagtgtcaaccatttgtttggagccctgcctggcagatgaaaaaaacccatccc

SEQ ID NO: 83438 - DNA, 77 bp, Glycine max
cctgttcttcttgaagcgtgttgtcatcttctctggtcttttctctcactctcctcagttgatcccttgcagctctc

SEQ ID NO: 83439 - DNA, 64 bp, Glycine max
ggggcaaaaagagctatcacggacatgaatatctgatcaagaactatcgtaaaatatattattc

SEQ ID NO: 83440 - DNA, 388 bp, Glycine max
ccggcagaggaagttttctagttttggggttgcataacatatttaaaatttacgtcgactaggttttttttgtgcgagctcaaccgacgttttgttacagccgaaactggcatgttcccatttattcgcccaggaaaacattagcccaactcggcaaaaaaatattattcaccgatattgattaaaaaaaaatggcagtcgacgtcggccaggaaagatgaacgatcagggtctcaaaaggaagcatcatcggatgacgccgatcgaacatttcctaaccgacatcatgcaaatttcgttcacggattgaattgaaaactcaatagccgacatcggtcgtgaaatagccgcgactgatatttctcagccgacgttgcgcaatttttat

SEQ ID NO: 83441 - DNA, 133 bp, Glycine max
cgctcgttgtgaattactcttacatttcatagcccttcatttcattcattgctcgcttctgtttctgttccaaagttactcacttgtgttgaatttactacctaactttttgtcttcttaatggggggctgtc

SEQ ID NO: 83442 - DNA, 185 bp, Glycine max
ggaaaaaaacattattacaattgggcacccttttactatttttaacattttaagttttaaacaaaggagggccagcaacatacttctagtttacagtccaaaggactaaatgaaaggcctgatttgatttcagggcccatttttatatacataaattttatgggcatgggaatctaaaagggccc

SEQ ID NO: 83443 - DNA, 263 bp, Glycine max
  unsure (1)..(263): unsure at all n locations
gtacgtacgctggtaccctagagcgcgcgctttttnntttttttttttttttttttttttaaccaccctcttttgtctttttntaacagcacgggggcctggtgggacccccggataattaccgaccgctacctgcgggccaaccatttttatatatagtgagtttaaagagagctgggagaaagcaagtcatagttctgtgcggaataaaaatgttatcacaataccacaccacacaccatccggacgcataaacataaaag

SEQ ID NO: 83444 - DNA, 550 bp, Glycine max
aaaaaaacccccaaaaaaaaaattataaaaaaaaatttttaaaaaaaaagttttttttttcccccccccaaaaaaataaaaaaaaaaaaaaaaaggtgccccaaaatttttttaaaaaaaaaaaaattttggaaaataaaaaaaaaaaaaggggttttaaaaaaaaaaaaaagggcccacctttttaaaaattttttgggcggggaaaaaaaggggcctttttgaaaaaaaaaacccggggttaaaaaaaaaaataaaaaaaaaaaccttgggaaaaacccccctccccaaaaaaaaatttttttttccccagccctttttttttcccccccccccccccaaaggggaaaaaaaaattttttttttttttttttaaaaaaaaaaaagaggaaagtctccaaaaaaaaaattttttttttaaaaaaaaaaaactctccccctttaaaagaaaaaaagggaaaaggggggtggaaaaattttttaaataccccggaaaaaaaaaaaaaacgtgggaaaaaaaaccctttttttaaaaaaaaaatttttgggg

SEQ ID NO: 83445 - DNA, 56 bp, Glycine max
gggattgaatgattctagtagcttgtgcttttgcagtctttttgtttatttccatt

SEQ ID NO: 83446 - DNA, 51 bp, Glycine max
acaaaaaaacgccaactgacatgttcccttaggcggacctttctgacccgt

SEQ ID NO: 83447 - DNA, 62 bp, Glycine max
gggcacaaacttgcccataacattgaaattaatatttgaccccggatgtggctttttagggt

SEQ ID NO: 83448 - DNA, 63 bp, Glycine max
ggccttaactcttctttaagtctttacaaactatttcaagattttgtaaaggttaaatttgtt

SEQ ID NO: 83449 - DNA, 71 bp, Glycine max
cgaaccctaattttgattcctcgatttggcgcacacatctacttcacaccgtctgcgtcgcgcttttcctc

SEQ ID NO: 83450 - DNA, 377 bp, Glycine max
gaaaaaaaaaaatattttgacaatttaatcgcccggagttttttgacatctgaacggtcccaccaacacacctttgatgtccaaaccccatctaacagaactaccagcttcccatatagtgagttgtatcagagcacggcgtaatcacgttcaaagctgccttcggagggaaacagtgaagcgaacacaacctaacacaccatagggagccctaagcaacactggtaaatccagaggagccttttttgtgactaaactgacattaaaagcgtacctctaaataccccctttccaagagggaaacctggaacccccgctggataaataaatagaacaaccttcgaacaaaagtgcgattgttatccaccgccagagag

SEQ ID NO: 83451 - DNA, 387 bp, Glycine max
  unsure (1)..(387): unsure at all n locations
gggacctagcgagcatcatatataaaaacacgtaaaagtgatttatagtaggatatacgaataaagacatgttaaaatatatagaactgacacacgattaacatgcaaattctgttcagttcaggtgtagaatctcaccgattaattttgttggaattttattttgcatttattaaaacacgctttttttaacatttaaatatcaatttttagatatcttttaatctgctgtcaaacttagattaaaagaaatgaaaatctacacattgttacagattgaatgaacttcatagatgagagcacgttaaatgatttgtngtaagacataagaacgaagataagttaacacatgaaatagacacgcgattgacatgcaaattctctttg

SEQ ID NO: 83452 - DNA, 90 bp, Glycine max
  unsure (1)..(90): unsure at all n locations
ctagttagtccaccttttagtgattgtagtaattggggtttaatagncgggagaatgcctctttcatattgaggaattttatctaatggc

SEQ ID NO: 83453 - DNA, 188 bp, Glycine max
gggtgcgtaagaatatgagtgagaagaagggttttctttttttgccgaaagaggattgcgacggttattgaagaaggcggcggcggctgtctcgctgaggggcttagggttctaattttagcccaagcaagccatacaatactatgccgttttcaacaatcttttttttttcttttttttttttatcc

SEQ ID NO: 83454 - DNA, 175 bp, Glycine max
gggggtcagaatgtatgtgacttaagttattgatatgtttcttctgtttctaaattttttttggttgtgttaatttcattagtgcttgataatttggaaatgagtgtggagatgctgttcccagggttggagatgcagcaaaaccactcgtttcttttcttctggatagtgtgtc

SEQ ID NO: 83455 - DNA, 56 bp, Glycine max
cacttgtgggggtaccacctatccctatagtgaggccgattacagccaggcgtacc

SEQ ID NO: 83456 - DNA, 53 bp, Glycine max
ccaaatataatggtattggaaagaaaatctatattggtctaacagctggctac

SEQ ID NO: 83457 - DNA, 365 bp, Glycine max
gggaaaataacagaattttaatttatgcctatgaaatccttcgaatttataatacctccatataaccaccctgtaaaagaatgggaggaggctttcccaacggggagtcccatcacttgctttccaacttattaagataacattacccggttcaaaacggttttaacttcacgggggtattgaggcttctcatcacaaaaattgccttgcaaaagcgccatattcctaacgaggtataaatcaccaaatcattgggttttaagaatgtttagctttgataaaagctacactttcgaagtggttattttcatgcattgtaccccgcgcaagtaaatgctctgccgacaatctcaccagcggaaaac

SEQ ID NO: 83458 - DNA, 103 bp, Glycine max
cgatatcacaaaaacgttgttttagtaacactaatgggtataaccaaacgatcctatagaactcgcattgtgcaaagtgcaaacgctagatctgaattccgcc

SEQ ID NO: 83459 - DNA, 196 bp, Glycine max
  unsure (1)..(196): unsure at all n locations
gatcctctagagcggccgcnnnnnnnnnnnnnnnnnntttttttttttccaaatcgtgagccttttgcctgaaccatcttcattggatcactatccttcaaaagccttcgacaagaaatttatataaaaaaaaatggcgaatgaaggatgaaagatctttctatccaatttatggataatttataatttcattagt

SEQ ID NO: 83460 - DNA, 205 bp, Glycine max
ggaaaaaatgaagaccgaggaagggaagagatagatagaaagaaagaaagaaagaaagagtgagtacttacggtgaagtttcgttggaagccatgcgcatggaaatgaaataatgggttttttttttcttccttgtttcttacgttgctgttgttggagtcttgcggagactggaattcgagaaactttgaatgaaagaacttgc

SEQ ID NO: 83461 - DNA, 88 bp, Glycine max
ggcaaagaactcttaaaatccaacagcgttacaattccaggagtatcacaacaggcaagttaaaagccaatagaatgaccatttacac

SEQ ID NO: 83462 - DNA, 225 bp, Glycine max
acaaaaaatagggtttttaaaatcgggtattcatgtaaaatactatttttaggccaaattgatttacatactaaatctagtaaaatatatttatagaacttttatgaaatttaaaaggttaaaataacccctattgtgcacccaagacttttttgctaaaggctagacttcaataatttctttgtaatttttttttgacgcataaaagatggcttaactatataa

SEQ ID NO: 83463 - DNA, 223 bp, Glycine max
ataaaaaataggtattataatattgcctctttatctagaatatatttttaggtaaaattaatttacatactaaattttgtaaaatattcttatgaacttttatgaaatttaaaaggttaaaataacccctctcgtgcacccaagactctcttgctaaaggctagtcttcagtaatttctttgtaatttttttttgacgcataaaagagggcttaactatataa

SEQ ID NO: 83464 - DNA, 377 bp, Glycine max
ggggaaaagagcaacattgcttcatgaagattctccgcgccactgttgcctcctaacaaaattaagaacttcttaattcggctgacgacgaggatattataaagctgctattattaccaccatcattaataataacagcatgttctgccaacaaaaacaccattcttttttcttgaaaactacttgatgatgaggcaccccgcccttctataaagacctcctacccccctaatatttctaataatgtacaccactgacggttgctattattgctgcagaaacaacagtttggtgatcatttttctgctggtggagcaacacacttttctccttctttgccgcctaaaacaaccccccctcctccttcttcttcttct

SEQ ID NO: 83465 - DNA, 51 bp, Glycine max
ccgggtgtgccaacgttttgttggcctcctaaatgagatgaacaacatgcc

SEQ ID NO: 83466 - DNA, 388 bp, Glycine max
cagattaaaaggtcgagtgaatagaagagaacaaaattttggtaaacatcaagaaggaaaatagttaatgactaaaacttcacctaaaatagcagctcatgataacaattagtaataaaagattaatcactaaaaatacaatgatctactcagcaaaccaactccttctccaatctcaaatcttgatgctttggggatcccttggaaatatcaatctcaattaaattttcatcctcattcatctcattaatttctgcccagagctccgtgagaccttgttgcttgaaaatggattctggcaagaactctaaaaagtagttgtttggaagcttgatttcaatcaagccatcctcctcctcctcatcaacatcataatcaaagaccaagc

SEQ ID NO: 83467 - DNA, 310 bp, Glycine max
ggggaaaggcccaccccccttttttttaaacctggcaagggggggggggttacaaaccccccccccggggtaaaatgggtttaattgggccgcccaaaaaacaggccccaccttttgaataacaaaaaattaagggccctaaaaaaggcccccccggggcccaacctttttgggggggatttttcttttccccccccagggggcaaaaaaaaaccattttttttcccttggggccatttccaaaacaaaaaattttgggggggttttaatggaaaacccccaaatacaccctggggttttttttgtttaa

SEQ ID NO: 83468 - DNA, 389 bp, Glycine max
acgatacgcaatggacttaacatagttacccccacagagtacttttcagattcaacctaccctttctttctagctcctatttttttttcttcgctacacctattctttcttcttccaatcaattcgaaaaaatccaacgtcaactgctctactctaattcataggtttttttattggattgatcccgggatctatcgaaacaattgtatgggcatataaaaaaaaaaaagcaaccaagtcatcccttagcacaagcactaagtaagcaagctaccttttttttctactttttttctataagaaaaaatcacccatcaaatattgaatgactgagcactcaaatcctatcgcgagtcttgatacatagtatcttaagtcctttccacaac

SEQ ID NO: 83469 - DNA, 291 bp, Glycine max
ggaaaaaacgcatgcccacccacccataaaatgacggggacaacaaataatctgagattttacgtcaaattttaaagccagacactacctactgatgcagaattaacaaccgttcacgctttaaataactgtgaaagcatacatactggaattgacctaaacttattgtatatctgtacctaaattacctccatcacacggcatagttttaattttctacgcagagctcacaccccccatgtatctcgcctgcgatattaagcaccaattactaaccagtgttttaaaact

SEQ ID NO: 83470 - DNA, 57 bp, Glycine max
cccccgctcaggggtcttcttaaactgaccggcaaaccccgcctgacctaaggaacc

SEQ ID NO: 83471 - DNA, 426 bp, Glycine max
  unsure (1)..(426): unsure at all n locations
caaaagcccggatcctccacagcggccgcnnnnngttttannnntttttttttttttgttgttttttttgggggtttttaaatggggtgccctcctttttttttcttttttttttttttttttttttttttttttttttcctttttttttttttggggccccaaaaccccgtaaaaacccccattatgcggaccaaaaaaaaaacccatttggggtaaaaaaaaaaaaaaactcggcccccaaccccccaaaaaaaaaacccgggccaaaaaaaaaaaaaaaaagggggggggaaaaaactttaattttggcccccccaaacccccctttcccccaaaaacaaaaaaacccccccccccaaaaaaaaaaaaaaaagggccggcccccccccttcctctatttgggccccccccccttttgtttttt

SEQ ID NO: 83472 - DNA, 203 bp, Glycine max
  unsure (1)..(203): unsure at all n locations
ccccccgccccngtnccctcccaaaatcccttttttggaaggttaaacataccaaaaggaaaaactttttacaacctgcctctaacaattctatggtggtaattttcccccttccccctatgttttttccttttggaccaaccaaaccattgaaaaaaacaacccattatctcaaaccttttttttttcctttcaagttaacc

SEQ ID NO: 83473 - DNA, 259 bp, Glycine max
tttgatttatttttttttttgtttaaaaaaaaacctaacatctttaaagaaaattcttaaaatatatcctttatttcatttaatcaaaatagttctatttaactaaaaaaaattattgttttcatttttatttttaaaaaatattttcactaaaataaaacaaaaattcaaccaaacacatttacactattttatttctattaaaataaaataaaaaacattcaaccaaacaccccttatattttgcacataaaaccct

SEQ ID NO: 83474 - DNA, 337 bp, Glycine max
ggaagagtgaagagaatggctcccaagggtttaacctttctggctgtgttaatatgcgtttcagcactgtcactgagtccttctgttgcgggggaagggcaaaataatggccttgttatgaacttctacaaggaatcatgcccccaggctgaagacatcatcacagaacaagtcaagcttctctacaagcgccacaagaacactgctttctcctggctcaggaacatcttccatgactgtgctgttcagagttgtgatgcttcactgttgctggactccacaagaaggagcttgtctgagaaggaaacagatagaagctttgggttgagaaatttca

SEQ ID NO: 83475 - DNA, 98 bp, Glycine max
attatccaacttgcgacgaataaaaaaaaaaaaaaaaaaaaaaaaagcggccgcccctctagaggatccaatattatctccgccttcctacgacataa

SEQ ID NO: 83476 - DNA, 85 bp, Glycine max
gagagctgcaagggatcaactgaggagagtgagagaaaagagaagagaagatgacaacacgcttcaagaagaacagggatgttgc

SEQ ID NO: 83477 - DNA, 57 bp, Glycine max
tatattttacgatagttcttgataagatattatgtgcgggataaccttttttggccc

SEQ ID NO: 83478 - DNA, 207 bp, Glycine max
gacacatgcccatcatcaaagtttcttcctttctctgctctttgtcttctctgacacatttggggccttgttgagtgtgtttttgcgagagggtatggcgaaggacgttgaggttgctgagcgtggctccttctctgggaaggactaccaggaccctccaccagcaccactcattgatgctgaggagctcacaaagtggtcctttta

SEQ ID NO: 83479 - DNA, 261 bp, Glycine max
gtgacattttagattccaatgcacataaaatttatgtatataaagatggacactgaaatcaaatcaggcatttcatttagtcctttgtactgtatactagtagtatgttgctggccatcatttgttgaaaacttaaaatgttagaaatagtaaaagggcgacaaattgtaataatgtatttatcaaaccggacgaaacataacatcggttgagctatcacaaataaaaccgggacgacctacattggtcattacatatgca

SEQ ID NO: 83480 - DNA, 62 bp, Glycine max
ccgatgcgtgaagacctgcagaaggcacatgtgaggtgacgctgcttaatgacgacagaaag

SEQ ID NO: 83481 - DNA, 150 bp, Glycine max
gtacaatataaattaaagcgttatgtgcaagttcgttgccgccaaaaaaaccgaaaaccacgacaaggagcgcccgatctagatgatccaatcttacattctcctacgtgccacatgttacatattatatactttcacctaaattcagtc

SEQ ID NO: 83482 - DNA, 71 bp, Glycine max
gaggaaaagcgcgacgcagacggtgtgaagtagatgtgtgcggaaaatcgaggaatcaaaattagggttcg

SEQ ID NO: 83483 - DNA, 142 bp, Glycine max
ccaggcgtgcgaacaggtgcgagaggacaacagagaggggactcgcttcttcgtgcttagaaccctagcaacactgtgacccactctactcttgtgtgatggatcataacgtgctctcacactctaatgcataggttcacgc

SEQ ID NO: 83484 - DNA, 288 bp, Glycine max
gttcttaaatgaaaagccccaacctatgcctggaaaaagggtcaccaataccctcccagtctttgaacgcaaccttctttattcccttaaattttggttttttgggtgtaagggatatttaaaaggaattcctaatcttaactacattttaattggaacaaaatatgatgaatagatttcctaattttttaaaaaatgttgtatgtcccttgtaaattgtaactacctcctacttttttgctgtataaaagatgtaacattataattgtactttttatgcctgctttg

SEQ ID NO: 83485 - DNA, 286 bp, Glycine max
gagggttacacgccgtcgtcgctgtttttgtgtgtcgcttcttcgtaggtgcagcttcaatggtgaaaggacccccaaggaaacctgtccaaactttacttaaggggtccattccttgattccaaaaggtccaagtcaaaccagtttccaaatccatccctgatccaaattgagggtgtgattgccaaaaaaaaagtaccttgtgttgctgccaaaaaattggcctatatctacaaggctaaggtgaaaaaaattggaagccattaccgttgcttttggggcaagg

SEQ ID NO: 83486 - DNA, 189 bp, Glycine max
  unsure (1)..(189): unsure at all n locations
ggataaaaaaaaaaaagaaaaaaaaaagattgttgaaaacggcatagtattgtatggcttgcttgggctaaaattagaaccctaagcccctcagcgagacagccgccgccgccttcttcaataaccgtcgcaatcctctttcggcaaaaaaagaaaacccttcttctcactcatattcttacgcncacc

SEQ ID NO: 83487 - DNA, 179 bp, Glycine max
tacggtttagaggatacaaccttacgttcccgttcgtacaacacgatagatggtttctactgtgacataactacaaatgactgccggtgctataacaccaccgagtgtggcaaatgcctgacgtcaaccaactgtttcggctgggagaacacgacagtttgggaatcctggcctgccat

SEQ ID NO: 83488 - DNA, 338 bp, Glycine max
ggaacgaaacatgagaatcgttcattagaacgcattatgttcagagtgaatgcagtgtccaaactacagcatcgtgcttcctactgagtgcttacattagatgcgtaccaaggttccggcggcgacggagaactatacatctaattgtctatcactgcattggttctgccgacatgggttttgttgttcctgacttgcatactcgatggcttcaaagttgcagaaagggcaggccagagcatcctaagcagcataatcggaatccagatggggaactaactactacctgcaactgctgaaacagaacatgcgttgcattgatgaccctcctacagtac

SEQ ID NO: 83489 - DNA, 148 bp, Glycine max
actaatgaaattataaattatccataaattggatagaaagatctttcatccttcattcgccatttttttttatataaatttcttggcgaaagcttttgaaggatagtgataaaatgaagatgggtcaagcaaaaaggctacgatttgg

SEQ ID NO: 83490 - DNA, 172 bp, Glycine max
gacccccaaaccctgctgcataggaagaaaccctagcctctcaccctccctgcgacacgatgcagatcttcgtgaaaaccctaacgggtaagacgatcacccttgaggtggagtcttctgacaccatcgacaacgtgaaagccaagatccaagacaaggaaggcattccttc

SEQ ID NO: 83491 - DNA, 205 bp, Glycine max
gcaagttctttcattcaaagtttctcgaattccagtctccgcaagactccaacaacagcaacgtaagaaacaaggaagaaaaaaaaaacccattatttcatttccatgcgcatggcttccaacgaaacttcaccgtaagtactcactctttctttctttctttctttctatctatctcttcccttcctcggtcttcattttttcc

SEQ ID NO: 83492 - DNA, 223 bp, Glycine max
ttatatagttaagccctcttttatgcgtcaaaaaaaaattacaaagaaattactgaagactagcctttagcaagagagtcttgggtgcacgagaggggttattttaaccttttaaatttcataaaagttcataagaatattttacaaaatttagtatgtaaattaattttacctaaaaatatattctagataaagaggcaatattataatagatattttttat

SEQ ID NO: 83493 - DNA, 92 bp, Glycine max
tgggaaaacgggaaaacggaattgttgcgatttaaaatatgaaaaaagtggggtttatggggcttgggctgttactggtggtgatgatggga

SEQ ID NO: 83494 - DNA, 123 bp, Glycine max
actcgcgatacgatttgagtgctcagtcattcaataatttgatgggtgattttttcttatagaaaaaaagtagaaaaaaaaggtagcttgcttacttagtgcttgtgctaagggatgacttgg

SEQ ID NO: 83495 - DNA, 62 bp, Glycine max
ttgtccacgcgtccgaacggatctaaagggtcgacaaaaaggacaaacgggcagctgtctat

SEQ ID NO: 83496 - DNA, 117 bp, Glycine max
cttccaccgctggtagaaaaccaccgaaagggaacacctaaggcaaggggggctacccgctgggattaaacagtttaattaacgggcggtaaaaacttgctcctaagaaaccaaaaa

SEQ ID NO: 83497 - DNA, 338 bp, Glycine max
gaccaacaagcggtttttacatgttctcaccgttagcagaaaacgggtgttatctggataagaccgccaggaaccattcccaagtttgccagcaccaccatcacttcttcactctagtatccggtatggtgagattaattaatatataaatgatagatttataccttctcggatttttttttcttttgctgagttcttggcataaattttggagggattctgatgtgacaaaatataaggggtgtttggttgaattgtttttttatttttattttcaatagaaatagaaaatagtgataaaaatgtgtttggttgaatttttgttttcattttcagtg

SEQ ID NO: 83498 - DNA, 339 bp, Glycine max
  unsure (1)..(339): unsure at all n locations
ccacaacagcgcccgcttattttttttttttttttttttttttgnggttttaaaaaaaatcatataaaatcataaacgggttttatcttacacatctctatcccccaacattctaattacccaaaaacccacataaacaccaacccatatattttctacataagcctacatactaaaccacacaatctcctctaaattaaacacccacaacagtacaaacatcgaactttatatccaacttcaccataacaacccaaacttattattctattaaaccaaattcaaaaatttacatccttaaccatactaaaaaatttctcttcctcataaatctcaccc

SEQ ID NO: 83499 - DNA, 60 bp, Glycine max
  unsure (1)..(60): unsure at all n locations
gggntnagaagtgcgttgtgcccttttgtcgcaggggagcaacccgacccttgagccgtc

SEQ ID NO: 83500 - DNA, 52 bp, Glycine max
  unsure (1)..(52): unsure at all n locations
cgtacgtatagcttggatccctctagaagcggcgnncgcttttttttttttt

SEQ ID NO: 83501 - DNA, 374 bp, Glycine max
ggagactcaaatattataagcagagatggataatggagatttgccgaactttatacggaagcgaccaattaccaaacattaaaaacaaaaaaaggaggcatcccttagcttaacacccccctcacaggtccaaaacccttgaacttgctgaaaggcaagacatgaccactttattttaaggatgtttgtttaacacaaaacagccgggcgcgctaaaaccatctcaggcctgatacataagtttttagctgcccattaattggtcatcattattcctaactaagggctatttttgatggaagcttgctttaccaacaccttatttttaagtgcacgggtcgcaggagcaatttggtccacattagcagccatcg

SEQ ID NO: 83502 - DNA, 64 bp, Glycine max
gctcctacgtgttgctcatttgtgatgagaaaatcagacctacttagttcttttgtgaacaaag

SEQ ID NO: 83503 - DNA, 351 bp, Glycine max
gtgaaactcacatgggtctgatgaagttcgaaaatttgcacgttacactccaatttccatttttgttattggaggatgtgcctttgacacctgtatcactctttatggacagcccttgtgcttaatctatgccatgagccttgccaaggcaagaataaagacgtgctattttagcttgaactcatgaggaactgttacggacaccctggttgcaatatgtaggcattgctcgctgccaaggacaaaagcttgacatgcaaacttggccttactgcatgaagaactggcctaaagccttggtgcacactcagttgcccttgatacaacctaccctccattgacttttcaata

SEQ ID NO: 83504 - DNA, 288 bp, Glycine max
caacaaaaaggacggatgttttattgaacaatcccagtttatcagcgggggaaaaaccaaattaaaatccccccaattttcaaagggcccttacccaaaaaagggggggatctttgggttttttttttacgggttcaaacttttggaaccggggtatgtcttaattaacatgtcaattagttagcaattaattccttacatgaaccagcttgtttaataaaaataaggacccgggcgtgtgaccttccccaaccccggtttatttcctgaccttaaaacaaggaaatt

SEQ ID NO: 83505 - DNA, 81 bp, Glycine max
ggggggttccccccatacacagaagaagattccagagaaattcaataatacacaatttttttttttttattttcatttccc

SEQ ID NO: 83506 - DNA, 150 bp, Glycine max
  unsure (1)..(150): unsure at all n locations
gtacgtaagcttggatcctctacgcggccgcttttntttttttttttttttttttnnnnngcacaaaaagatgattaattcattcaaaactgggctttctaagccaaaaccttacatgctgtgtgtactcaaagtacatttcaaacctga

SEQ ID NO: 83507 - DNA, 418 bp, Glycine max
  unsure (1)..(418): unsure at all n locations
cgcgtacgtacgctaggatcctagagcgcgcgctttnttnntttttttttttttttttcctggaacgaaacgaaaaaacactggccgatcggcttcgggggtcttactgcataacgggctcctaaatctcatgcccgaaccacgcctataaaataaaccaaagttgatcatgaattaatgtgacaccctccctaaattaactatgcctactacacacgaggtcacatggtgcttaattatcacctgcgtttcgtatctcactttccaaaatgggcctgttttggtccattccaagaatcatgtgttatcactctcaacacatgcaacctgactgttttagatcgagacctgcttttaccactgatcaccatgtcccgttccttggcacccctagcatgtcacctattggcccatttat

SEQ ID NO: 83508 - DNA, 304 bp, Glycine max
aagggaaaaatcgcaaccgattggtaaaaaaattgcccctaaaccaacgctttaaataaaaaccaatttcgaccaactgggaaggaaccaaagggagcttccaatttttctccaaaaaccatcccaggggcccctttaaaaacaaaccaaaaaagggggtaaaaccggccccccctgtaattaacctttaggggaaccccggaaaccatttggaccccaaaaaaggaccatttttggctaaaacccgtttggttggcccacggccaccccctgagggggggctttttcttttttgggcgaaaaa

SEQ ID NO: 83509 - DNA, 158 bp, Glycine max
ccccgctttttttttttttttttttttttttttttgcattcacaccattcatccctaatttttctttatttggcttctttttttttttcccttttttttcaaaaaaacaaccaggccattgaatacaaacctagtaccccctaacccaatccattatt

SEQ ID NO: 83510 - DNA, 65 bp, Glycine max
tttcttttttttcgcttattgatatgcttaaactcagcgggtagccccgcctgacctgaggtctc

SEQ ID NO: 83511 - DNA, 61 bp, Glycine max
ccgctataatttttttttttttttttttttttgtttttttaaaaaccacaaaacttcttta

SEQ ID NO: 83512 - DNA, 74 bp, Glycine max
  unsure (1)..(74): unsure at all n locations
tgcacgcgtacgtannagctggatccctctagagcgggccgctnntttttttttttttttttttttttttnggg

SEQ ID NO: 83513 - DNA, 52 bp, Glycine max
gggcccgaaacccaccttacctttttaattaactggggtaaaaaaccctttt

SEQ ID NO: 83514 - DNA, 71 bp, Glycine max
ccacctccttccccctaagccatttttggtggccttttgcttcttacctggagataatatttaaacttcct

SEQ ID NO: 83515 - DNA, 62 bp, Glycine max
  unsure (1)..(62): unsure at all n locations
tacgtaagcctggatcctctagagcgggccctnnnttttttttttttttttttttttttccc

SEQ ID NO: 83516 - DNA, 115 bp, Glycine max
  unsure (1)..(115): unsure at all n locations
aaacnnttttatcacaaccaacanccntcaaacgcgggggtcttttcaaaaattatggtaccctacctaccaccataccatctttccctatagttagtcgtataaaaactcgcct

SEQ ID NO: 83517 - DNA, 313 bp, Glycine max
ttgatcctctagagccgccgcttttttttttttttttttttttttttttgcccaactattaccccccccaaaaacccacttatcgcgggctttttttaaacatttgtctaccctaaaaaaccccacaacaaccttcatacttacacacacttattaaaaacctgtcccataaaacccatcctctttcacaattataacattttattctttcaatattttatccatctaacaatccccactacttaaaaatcttacccctaaactttaaaacacttcctacctaacaaaaatatcaattcacataaatttcttt

SEQ ID NO: 83518 - DNA, 77 bp, Glycine max
  unsure (1)..(77): unsure at all n locations
tacgtaagcctggatcctctagagcggcccgttttttttttttttttttttttttttnnncccccttggggaactgg

SEQ ID NO: 83519 - DNA, 261 bp, Glycine max
gggggaaacctttttcccctacgcattttctaatggggatataacccccctttcggaggttatttaaccctccaaattcaggttttttccaattttaattacccggcccaaaattaaaccctccattttccaaagtacccttaaagggtaaggacccccaaattttacccaattctttgaaattgtccttaataaaacaggccgaatccaatttaataataattttttttttcccctttttgtggttttttccaacccgtc

SEQ ID NO: 83520 - DNA, 58 bp, Glycine max
gggcccgcttattgatatgcttaaactcagcgggtagccccgcctgacctgaggtctc

SEQ ID NO: 83521 - DNA, 466 bp, Glycine max
ggcacagttgacttagtaatttattagttttctcttacttgtacagctagcttaatagtttgttagcttagccatttagctttatatatctagtccttttgtgtttttgttagagttaaataatgagaatttatgagcacaatgctctttcttttacaaacttattcttttcacatggtatcagttgaaatcttcccttttgctgtgatctttgattgatcattcttgcaaccattgttgttgttacactttcttgatcttaaatcgcaattcttcaagctttttcctcagttaatcatggctgaaaatgttgacccaattgcgaacaatgttattatcaataatgcaactcttacaaacttgctgaatccctattatgctcatccaaatgagaatcctggtgtggcgattgttgctcaggttctcaatggtggaaattaccactcatggtcgcgtgatatgctcc

SEQ ID NO: 83522 - DNA, 514 bp, Glycine max
aacattcaacataccctcgtttagtgtgttattttcaaatacaaaattcttaatttgataagatcaaatccttattttctaataacatcaaatcttctatgaaaatgatctattactcgtataacgtcaacaaattattatgtaatcgtgatgtattattactatgttgtttataaataatttattattattttcatatgaaatacataatataaatctatcggttgaatacatgggtcaagtctatagaacacttccattactctctgtaaactttcaagctttacaaccttgattaaattacttattttaatgaattaaattgcttattttaattttatgcgatatgatatctttcaaaccgccacaaaatctgaacctaaccaaccctttcaggcgcgtgagcaccagggcgtgaacctaccttggtgctgccaagacatggcatacgcattgttaattgaattctgaagcctctgccttccactagcagcaatgtaatgctgcaatatgt

SEQ ID NO: 83523 - DNA, 79 bp, Glycine max
ctctctctgctggtttcgaaccgaagactcgttgcttgggaaatgcattccaaaccatcaaatcgttcgggaaaccggc

SEQ ID NO: 83524 - DNA, 284 bp, Glycine max
aaaaaaaaaaaaaaccccccctcaaaaaaaaaaaaaaatttttgaaagggtaaaaatggaatttttccccctaaaaaaaaaaaagaattataattcgggaaaaaattgctttaaaaacaaaaaaaaaagggcaaaaaaaagggccaaaaattttttttttgagaaatgaaaaaaaaaaaaaaccccccaaaaacccttttttttaaaactcgggcaaaaaaaaaaaccccccctgcttcttcccgaaaaaaaagttttttttttttttgaaaaaagggggggtg

SEQ ID NO: 83525 - DNA, 525 bp, Glycine max
tcctctagagcgggcgctttttttttttttttttttttttttttttctgaaataaagaggtgatatatatctgtgagagagaaaccaccttgtcccttcaatggtatttttgggacctttttggaaactatttttttcatttggttaaaccattttttttatatggaaaaaagggttcaacctacctatggtggttaggctttaaagaaattttttaaaaaagggttttcaaaatggatttggttattggaacttcacctacactatgtatctgtcggtagaaatttttaaactttatctatactaatggactataggtataagatttataagattttacctacaccaagtgatcataagtatacattttgtgaaattttacctacattaagcatttgtaaatcgaaggtattttgacttttacctataccaaataatagtggatacaaatttttgaattttacctatgataagcagtggtcggtataagcatttcttttacttttacctacagaaatttatgtc

SEQ ID NO: 83526 - DNA, 126 bp, Glycine max
ggagaaagcacaccttcatgcatgcagtctttttgcccctctgggctttcaatgaaattttgtcaatgatacgtcgaaaacgttatggggttacttttaagctattttttgtcaatgatacacctt

SEQ ID NO: 83527 - DNA, 81 bp, Glycine max
  unsure (1)..(81): unsure at all n locations
aaattaacccaaactatcgncctcccagggggattttcctaattcttggccccaacattaaaatctaataaaaagaaaaac

SEQ ID NO: 83528 - DNA, 387 bp, Glycine max
aacccgggaaaagcaaaaaaaaacctctctttttttaaaaaataaaagggccattttttttcaaaaaacatttggtttaacaaatttttaaacttaaggccgaaccgacccctcaaaaaaaacccaaaatttttagggtttaatttttccccctccccaaaaaaaaatcatttttcttaattgccgggggtcttttttttttataaaaaaacggggacccgccccctcctttccggaaaaacctttttttccccccttagaaacccccggggggatctttttcaaaacattggccctgctttctttaaaagggggcccgttttaaaaaatataaagggggcccctttttttaaccgggagggggggggtttttggccccggattttt

SEQ ID NO: 83529 - DNA, 601 bp, Glycine max
  unsure (1)..(601): unsure at all n locations
acgtaagcttggatcctctagagcgggcggtttnnnnnnnnnnttttttttttttttttgggagaaatcttcattttaaaaccaaggtaataaacataaaattgtgagttcacaaaaattttaaaatataaatatatttaaatcaaaactcagaaataaaacaaatcaaaactcgtccattttatagagattaaaaatatggcattcttatattttattaaattatattaaaatattaatttatgatattgattggactatattatataaagatctttaaaaaaaattaaaatatttttggtacttgataaattttttaattttggttttggttcttaatattttttaaaataaaattggtctctaataatttttatttttttatttttggcctctatagtactatctaaatcactttattctattttatttttcaaaatgttattagggaccaaaaataaaataagtgtgttaatcaaacataaatttattagggactaaaaagttaaaaaattcatagagattaaaaataaattttaaaaattattagggagaaaaaacatttaacccttaaaaaaattaccttattaatttattaaaa

SEQ ID NO: 83530 - DNA, 376 bp, Glycine max
catccccatttttcttttgtcttaccattggttcccatttcccagttcatgattttaactggcttatgaaatgttttaatacaagtttgtacttttaagagtaggagcactcaccttttgtgaaaatggtttgcttacagctgatgcaatgaacaaaactgatgaggaaaccatctaaaagttgatttacccattgtttttgcacaaatcttggtatcgttgaaacattactatgctattcaaatatctggttttatacaaaaaagcggtacttgaaaaaattgccatatttttgttttgaatacatgggacatacaagctaattgaggactctttgctgccggaatggtctaagattgctattggtccctttgtc

SEQ ID NO: 83531 - DNA, 58 bp, Glycine max
ccctccgcttattgatatgcttaaactcagcgggtggccccgcctgacctgaggtctc

SEQ ID NO: 83532 - DNA, 254 bp, Glycine max
cttcggttatcgatacccttttgtcttctgaaacgaggctgcaatagaaattgtaaggaaaagaataattgacaccaccctgggaatcttaaaaaattaaatatgaaaacatcaagtataatttaatatccattaacaccttgaagagtcctgtgggaacccattttatattcatttaaaaacctgttttattacccattgagcttagcttccataaaccttgaggcctattgtgtgatctaattgaaatcaat

SEQ ID NO: 83533 - DNA, 83 bp, Glycine max
ggggaccagacaatcttagacatgttaaaaatatttggtccaaaacatgaaccaaaccaatgtcacatgtctacaactatccc

SEQ ID NO: 83534 - DNA, 135 bp, Glycine max
ttttacttttgatcgactctttaaggggggggattttaactgctttgactattcaaaatttgcataaataaatgttaaaaacctattttttatgaatcagtgtaatattatatgattatgcttttgatttagata

SEQ ID NO: 83535 - DNA, 122 bp, Glycine max
tatcaattcgaaaagaccaaaaaaggggacggttgaaatagcggccgctatagaggatccacgcttacgtacccgtgcatgccactttataactattctataggctgacgtaatttaacttc

SEQ ID NO: 83536 - DNA, 77 bp, Glycine max
aagttaatcgaagaggggtaaaatcagcacttctatctcccggatgaccatgaagagccaatctaacgtgcgcttgc

SEQ ID NO: 83537 - DNA, 254 bp, Glycine max
ggtcactggctgcttttcagttgtggctgagagctttaccccgactgttacgcaatgctttcctcttgaaacagagcctctatcgctgtttatctaaccataaatgctcttttgtttgaaccggcaaggggtttctacacattagaacactggctaaggcaaaacatatgccattggcttacactgattctagaactgccttgaacagctgtctaagactcccacttaagccttcagtggagcctatcttgctt

SEQ ID NO: 83538 - DNA, 303 bp, Glycine max
agccttcgaacggttgtaaaaaaacaacagaaggtatccacagcggcggttacaaaagaacaagcggagaatgggtcgagtgagatctaaaactgtttactaatactatcaccaggtgttagagcgtcactactagcgcatgcttttgtgctttacatttaacttagaactttttcatagtatagtcgatagaacagaacatgtgtgaaagagtttagcttcactttatattggatcggagtggtttacttacaactgactgttcttctcatcgatatctattttgacttaatgaacatcttg

SEQ ID NO: 83539 - DNA, 53 bp, Glycine max
gagacctcaagtcaagcggggctacccgctgagtttaagcatatcaataagcg

SEQ ID NO: 83540 - DNA, 150 bp, Glycine max
cttcggccacgccttcggccaacccttcggaacggttttaaaaaaacaccaaaagggggggggtaaataagaatacccttcttaattccctttcgaattcaatccatcctaaaactttgggaaaaaataagttcatccaaatttttaagg

SEQ ID NO: 83541 - DNA, 79 bp, Glycine max
agccttccaacggttgcaaaaaaacaacaaaaggggtttcttaaacaagttaattaaaatgctatgttggttctcggac

SEQ ID NO: 83542 - DNA, 87 bp, Glycine max
agccttcgaacggttggaaaaaaacaacaaaagggcttaaaaaaaaaaaaaaaaaaaaaaaggggggaaaaaaaaaaaacccggagg

SEQ ID NO: 83543 - DNA, 116 bp, Glycine max
agccttcggccaagccttccgaacggttgcaaaaacaacaaaagggaggaagttgaagtattatctcaagttagaagaagagagacaacaaaaattgcatgaggaggaggaagttg

SEQ ID NO: 83544 - DNA, 51 bp, Glycine max
agccttccgaacggttgcaaaaaaacaacagaagggcaagtaccgcggggg

SEQ ID NO: 83545 - DNA, 243 bp, Glycine max
aggtaccggtgaaaaattcgggggacgacccactcctacaggtgtgagaaaaaaacaaaaagggttccggtgtgaaaaaaccccacaaaggggggttatataacataatgggtgctccaaagccggcggtttaaaagaaccaagcttaactacccctgccttccaagttaaaaattttttaatagggcaactaaaattaaattaatggcccgccgtttaaaaacgtcggaacgggaaaaacct

SEQ ID NO: 83546 - DNA, 315 bp, Glycine max
ccacccgttctactactacaaaatttttacttaagggggaatcacttccctgtgccgcttttttttttgctgcaccacctaacaacttcccctgtaaatctcgtttcctttgtacaacattttaaaatatgtctaatcccccgcacattaaaactcttatatttataatggaacttcaattatcaaagctactttttcacctgattatactcatactcccttgttccctaacattattaaaagaccactccatactccttatacaaaatattattggtcacaacgatctcttacattatttaccaatcccaatca

SEQ ID NO: 83547 - DNA, 88 bp, Glycine max
cttcggccaccccttccgttgcaagaaaacaacaaaagggggcgaaacagagagtgatttcagtgagtgatcggggttcacttgatct

SEQ ID NO: 83548 - DNA, 113 bp, Glycine max
acgaaaggggtattgacctccgggagccaccaaagaaggggcctgggaaggcttttttttcaattcctcgaaaaaaaggaaaaaaaaattgttcttggaactttgtttgaaac

SEQ ID NO: 83549 - DNA, 214 bp, Glycine max
acgcgtccgaagtctacgaaaaggacaaaaaagggaattttgaaaagggggagcggccgttctaaaggatccaagcttacctactcgagcatgcaactttacataccttttattgcgacatctaaattcaattctctggccgcctatttacaacttcctgactgggatatcactaccgttacactgctaaatccctgagcataacatacttatt

SEQ ID NO: 83550 - DNA, 363 bp, Glycine max
ttatcatctgcccaatttatatatacaggtaaatttgtataaaaataactttttgaaaatattttttttctgtattaacttctatactagtttataaaattagtacttttaataaattaataaggtaatttttttaagggttaaatgttttttctccctaataatttttaaaatttatttttaatctctatgaattttttaactttttagtccctaataaatttatgtttgattaacacacttattttatttttggtccctaataacattttgaaaaataaaatagaataaagtgatttagatagtactatagagaccaaaaataaaaaaataaaaattattagagaccaattttattttaaa

SEQ ID NO: 83551 - DNA, 76 bp, Glycine max
cttccaacggtgggaaaaagacaacagaagggctaagacacctgtgcaaaaaaaaaaagaggggaaaaatgaataa

SEQ ID NO: 83552 - DNA, 164 bp, Glycine max
agggggggcactcacaactgagcgcccggtgtccactatacaagattcaagcttacttactcgtgcatgctacatattatctaagctaacgtaccaccaaattccaattcattggtctacaatatacaaactggtaactaccataactctcccattttaatact

SEQ ID NO: 83553 - DNA, 59 bp, Glycine max
  unsure (1)..(59): unsure at all n locations
cccacgcgtncgtaacggtgcgaaaaaacaaagaaggggctcctttttcatctaaatca

SEQ ID NO: 83554 - DNA, 116 bp, Glycine max
aaaaaaaaaaggggaaaaaaaaagcgggcggtttaaaagaatcaaacttaactaaccctgcattccaaggtataacttttttaaaagggcaactaaaatcaaattaatggcccgcg

SEQ ID NO: 83555 - DNA, 363 bp, Glycine max
gaacatcgttttctcgtttgtgttttggccgttaaaatcataaaaaaataatggaaaaccacatctacgcctcctcttacagcccttccaccaactacagatccttccgtgaccatcccgccgccgacgccatgttcctctcccaccacctccaccaccgtaccgacgcctccgacgccgccgtcgaagccgccgacattgcccctcccggcgtcaccttccgaatcgcctcctccgccgcctccgcgaatttcctctcctcctggccccctgtcgccgccgccgccgccgtgccttccgcccttgacctcaaacgcttctccgacgctctctaccatccaacaattttgggtacaattgggc

SEQ ID NO: 83556 - DNA, 193 bp, Glycine max
gcaagctaaccaacatgggcaaagatttaacaacagacccattggaattgttaaagaaagcattgaatggcaagccctgtacacactacaaactgagtttttaagctgtttaaagaaatcattcatgccaacctacttctgtgatcaattcacgttaaacacgatcttagttttcaaaaaaggtttgtttgaa

SEQ ID NO: 83557 - DNA, 71 bp, Glycine max
ggaggacgacaaaagcggggctattgctcctacataccctccatcgaagaggaaatcacatgtacgtagtt

SEQ ID NO: 83558 - DNA, 294 bp, Glycine max
ggggaacgaagatagtagcgccatagacaataaccaggataactgaaaaatccattctgtttcatgaacgtctaaaccggaagaaaaattctcaaaagttgtcggacgacaactaaatgcttgaaaatgaaacagaaatccttgtgcctacaaataagatgggacttcgactgaacgttttatcagctgaaactcagatgttgcttggatacatgaatactttgactcgggctcccattgatttagatggaagggtcgacttgaattttgcgcggacaataccaatgctaccat

SEQ ID NO: 83559 - DNA, 332 bp, Glycine max
  unsure (1)..(332): unsure at all n locations
gggaacgcaacaaaattatgatgtaaagggtaaaacccaaattccaaacatataacggttatgttgattcggtttaacatagaaacggcactagttctaatatcattcccaaaaaacatactaattgtatataaacgccaattaagtagtgagttccatgatggctccaacaatgtccccggtgagagacatgagagctcttgtcagccttgctttttgacactcctgcctgtgtcatcaccaaatcaangtcatggggctcgacaccagtggtatgaaccgatgcctttgtggctgggggtcccgcngcaacaacagtatctttttgtttt

SEQ ID NO: 83560 - DNA, 329 bp, Glycine max
gggaaggcgaaatatatattatattattgatgtatggacaaaatggtaatattgcaatatgtcaaagtatattctggcacaacttcatttcagccggaagtaaaaaatgtcagtccggcatgtttgcctaccatcatgtcaggttggggtttgggaaggattatatatatcagcagtgactagtgaggttgtttccataacagccacaaactctgtgccccccatgatacaaggtgtggcaaactaccccagaattcaaacttacatatgtaaatggtttccaaaaaagctgtatgcaagttaaaacaagaaaaatattcccgaatgat

SEQ ID NO: 83561 - DNA, 75 bp, Glycine max
ctctctctctctctctctatgtggaggttgagtgagttctttgtttgtttccccttctgtcgtcggacgcgtggg

SEQ ID NO: 83562 - DNA, 424 bp, Glycine max
  unsure (1)..(424): unsure at all n locations
ctgggggaactttttatatgtcaaccacaatttttttttttttttttttttnngccaaaaaaccccaaaacccattaattttttttttaaaacccccttttttaaaaaaaaaaactccccccctgggggccaaaaaatttcctttttggggttttttcccacccccaaacccccgggggccccccctgggcccacccttttggtccccccataatttcgaacccggtccccgggggaaaccatttttttttttagggggggcgaaaaaagactggggaaaactaggggaaaaattttttccggggaaaaatttttttcccttaaaataccccacaaaaaaaaagccggaaaaaaaaaagttaaaacccggggggcctaaaggggggccccaccccaaatttttgggggggccccccccccccct

SEQ ID NO: 83563 - DNA, 140 bp, Glycine max
  unsure (1)..(140): unsure at all n locations
tnntttnnnnnnccccttcttccttgcaagctcttcggaatactgggcctttcaccactcccttgctgggctcctcttttccttcttcaaaaccccactatcggccatggattcccaccattccaatttcttcctacttt

SEQ ID NO: 83564 - DNA, 95 bp, Glycine max
ctgaagtggcaagtcttaaatgcaagttgatgcctttgaagtacgctgattcatcccaagcatgattacaattacggtcacgtcgtcatggtact

SEQ ID NO: 83565 - DNA, 290 bp, Glycine max
ccaccttccaactgttttggcttgtttattgctaaaaacatttattcactccacacatatctacttatctataagtacttaagagcgcataaagtacatataatccatagaacgttaataactctacactgaaataatctgccaaaagagtttggcttgggactaaccgggaaaagggtgggttttatttgacacccacattatctaaggtaaggggaagggtcggcaaccaaagaatccccttttggcgtttttttgcaaccgtaccgacccctgggcggacccctggg

SEQ ID NO: 83566 - DNA, 371 bp, Glycine max
  unsure (1)..(371): unsure at all n locations
tacgtaagtcttgatcctctagagccgccgcttttttttttttttttttttttttttnnnggatttttgaanncaganntnnntattatataggggggttttttataaatttggggccccttctaacattcataatttttaaaaaaaaaaaatcccacaatcatcatttacttaatttacttcaattcaaaacaattaggatgnncnngttatgggccttngttgataatgtacgtaaaaaccttttacctttttcccgcctaagattattccagttcctttttaattactaccaaacacaaattcctttcatttacacaaaccaaagcccccaaagaaggccaaaccctcaacctccgaaaccataaaaa

SEQ ID NO: 83567 - DNA, 401 bp, Glycine max
aatatactcaattttaaattctttcaaatattctaataacaaattcaaacaagttaaaaaaaaaaaaagaaacaaaaatgcacaagaaatgtggatctaaagtaaacacaaaattgccattgacgagtcaccaccctccacagcggtggcaaccttaagcgcacactttgacgcttctcgaccaccctggcattttcatagtagatgaccttaactgcgagttgtgttacccatgttcataaataagagctagttctaggaccaagtcacattcttgtgcatagaagcaccacacttttcctcctcgcatttctcttccctgcaaaaccccagttcttctcctctactttaggacccttacgacacaccaacatggtttctacacaacatctttatgacct

SEQ ID NO: 83568 - DNA, 264 bp, Glycine max
ctattaaacgatacaacattctccccttttcgcggaccctttcaaaccccacagtccaccaaaaaattccaacaccccacctttatacaaaccacctatacctataaagactcctattataacttcccctaatcaaaagcatatctctttcctttattaaaacagtattcgatcacaatcccccacaatataccaacccaaaacattaaacttaaaaactttccttcccttataaaaaacccacctaacataaattcaattccc

SEQ ID NO: 83569 - DNA, 52 bp, Glycine max
ggcagagcaatctggtgatcgattgttggttttggaaatggtaagagaaaca

SEQ ID NO: 83570 - DNA, 187 bp, Glycine max
gggtggggttggctttttcctcttcaatggatatcttatctcgatccgtttataattacaagaagttgtcttttcatttaaacaacaaattatgaccattgggtacattttgaagcattaatgttgctttttataccacccaacaatcctttccttggtggggttctgattacaagaaaaggtttgc

SEQ ID NO: 83571 - DNA, 170 bp, Glycine max
  unsure (1)..(170): unsure at all n locations
gtacgtagctgatccttagacgccgctttttttttttttnnnnnnnncaggaagaagcaaggcaagcaccgggaagctggacctttgcgttttgcaccgacgaccgggtcacccgaattcgacggaccgaggctacagtttctaaggggcgataagctgcgtaatatggc

SEQ ID NO: 83572 - DNA, 56 bp, Glycine max
gggaaccccttttggcgtttttttccaaccctcggacccgtgggcggacccgtggg

SEQ ID NO: 83573 - DNA, 228 bp, Glycine max
aaagagtctatgcttgcaggttgaaacctcaaaggaccttgttccatggaaaacttttttaagaggtggactgagttttttgacagcccacgatcaagggtcaatcacccacaatcgataaattgtgatttttgtggagaagagcattaaagacacaccggatatctattctacaaaaaaaatttggggggggcacaagatttatcccctcactctctatgtgaaaag

SEQ ID NO: 83574 - DNA, 67 bp, Glycine max
ccgcaatcagatcattgatagaaatctcactgaaatccgctaagataattatatgatcatcataagc

SEQ ID NO: 83575 - DNA, 190 bp, Glycine max
ctgatcatctatcgaaatcaaacgggggtcttttaaaataattataccatccttatttccccccttttccgccttcttacagcctcttggactcatcgattaattccacaatttctcctcccgacctaccatctttccatatttgcctatatataaatcctttacaaattcccataatatcttcttcctc

SEQ ID NO: 83576 - DNA, 414 bp, Glycine max
ataaaaatcggagtatcattttaaccaaatttatgtggtttcttatactcctcaaagatggtgggtgccacaacaggccaattttatcaccggttggctctggggtcaaatctgaaatgagtgcaaaaaatcctgctcttttaaaatgctaaaaaaggcgacttgttgataatacacccttggctcgcgcttgtttttataaatgcccgaaaaaatgattttgccatcaaagactgtactgtatttgcaaagttcccaacagccctttagaccaacagaacaccgccaaatattatctgccactcataaacaaccccaacaactgcagttctgagcaacaacagcccaacatatgccttaaatacctgcaatgtgaaaagtataggacacaacaaccacagttgggcattcaca

SEQ ID NO: 83577 - DNA, 152 bp, Glycine max
  unsure (1)..(152): unsure at all n locations
ctagagggggcgcttttttttttttnttttttttttttttttctttatccgatcattgatagaaatctcactgggatccgctaaaataattatttgatcatcataagccgnnnntngnggntttttnnaanccgacggaccccgtggtgggc

SEQ ID NO: 83578 - DNA, 328 bp, Glycine max
  unsure (1)..(328): unsure at all n locations
nnnnntnnnnnccaaatgcatgactatctatttccatattgttactgtacatgaagaaggtaatgcatcggaataagaaacaatttcttccaaagataaaagaaagcagtcaattgatgttatcttttggattagctaatttttttagtaaataacactcatacctttaatgtttttctcaaattatattcaatactcctttttctttacattactttaaccccttttctattaacatcgtcacctaacgtcaattgaaatatgggggtggccaaaataccctaacctttttggtaacattggacccctggggttttttttttaaaat

SEQ ID NO: 83579 - DNA, 58 bp, Glycine max
ccctccgcttattgatatgcttaaactcagcgggtagccccgcctgacctgaggtctc

SEQ ID NO: 83580 - DNA, 165 bp, Glycine max
  unsure (1)..(165): unsure at all n locations
cctctagagccgccgcttttttttttttttttttgnnnntnnnnncgcgaagatatggtttctgatttgaggatgaatgtggttcactccggagaggattatgcactgtangttttacctaaaaattcaagtgtcttcatctttttaaaaattagtacaactttt

SEQ ID NO: 83581 - DNA, 66 bp, Glycine max
ggcaataaggggggcctagttggggtaaaaaggctccataaaaaaagtggtgaacaccctcctttt

SEQ ID NO: 83582 - DNA, 167 bp, Glycine max
aaaaaacaagctgaaatagaattttttctaagcttaaaagcccaggttttaaacttttaaagactttgttttaaaccaagttttacggggggggggatcataaattagttttaaccttaaacaattcaaagataaatgtttcggggggacaaaattttagggcctgt

SEQ ID NO: 83583 - DNA, 375 bp, Glycine max
  unsure (1)..(375): unsure at all n locations
ggcaataaggatccctagaattattctcatgtgcagttactataattactttaattagaactgcatatttatatactttctagtaataagcataatgtacaagaacagaaaacatttttctgtatcttggtatcagaaagaattacggtcaattttttctcctttcctaaaaccctagactcctcaaaaccaaataagctgtaatggcttaagaagcaaagattgtacctgtctcaagttagaatgttagctctgagtcatccaatatcaacatcatacccttaattgaacgacagaaactttaatgtatggtcaaagatgatgaaggttcatgctgcgtgcttgaataaactnggccacttgaatggaaaaact

SEQ ID NO: 83584 - DNA, 250 bp, Glycine max
accactcgtacgtaccgacggaagaagacgactgaaggggaatccttaaaatcagcttcagccattctatctaactgcctcactcacactaacaaataagcaactgcggtgtaaggaggtaaggagctaactgcatcgtaaaccaccgctgataacaaggacaaagacaaggacaagaaaagtcctatttgtcgttcatctcgggacggaatccattttcctgcgtgacgaatccctacgcagctgaaac

SEQ ID NO: 83585 - DNA, 312 bp, Glycine max
gatggttacacgccgtcgtcgctgtggttgtgtgtcgcttgttcgcaggttcaactacccatggtgacgggaccccgcgggcaacgtgttagactctacgtgagggcgcctatactcggatacataaggtccaagttaaaccaccatgacatatacattcctgatccatactgaaggtgtgaatgccgaagaacatgtagcatggtctgcttggaagaaaatggactatatccacaatgctaaggtgttgaagaatggaagccattaccgatgcatattgggccaggctacgaggcctcatattaaccgtgg

SEQ ID NO: 83586 - DNA, 75 bp, Glycine max
cccacgcgtccgacgacagaaggggaaacaaacaaagaactcactcaaactcaacatagagagagagagagagag

SEQ ID NO: 83587 - DNA, 311 bp, Glycine max
aagcttatggaccaagtcagtgtgatgtttgtctgctataaaatgagctttaataataaaagttaatggattgatgggttttgtggaaaatataaactcttgaaagatgggcaataggaaggagatatcttctttgattgacaagaaaacggtatattgatattgacatttgaaaaaacaatgcaacaaagttttaaaggggcgtcttttaaagtgacaagacttaaaacattggtattcaacggatagagatcttttaaggggccaatagaataaattataatgccgggctttaaaaaagctgatatagg

SEQ ID NO: 83588 - DNA, 143 bp, Glycine max
ggcggtttttccttctcaaaatttcccttaatggcaggtttcaaaaccttcccaaaaattaattttttttttggcatggccatttgaacaactgccaaggttgggacaacttccaaccaacggggtttaacccctttttttgg

SEQ ID NO: 83589 - DNA, 163 bp, Glycine max
caacggggggggggtgagcttacaatcgtacttgccgcttccttaatcagaagacgcgcaactcacagcgagtgccggccccccggcatgggtcgattgctcatgcggaggggggggatatgctattatgctttggcctacgtaaggacacctgctagctggc

SEQ ID NO: 83590 - DNA, 131 bp, Glycine max
aggactattgattggccaataaaaaaaaaaaaaaaaaaaaaaaaaaggcggccgttctaaagaatccaagctaacttacccgtgcatgcaaggcaaaacttttttattaggtgaacctaaattaatataat

SEQ ID NO: 83591 - DNA, 173 bp, Glycine max
gttacaaaaaaaaaaaaaaaaaaaaaaaaaaaaaaaaaaaaaaaaaaaaaaaaaaaaaaccaaaaaaaaaaaaaaaaaaaaaaaaaaaaaggcggccgttttaaagaatcaaagcttacttacccgtgcatgcaacgtaatagcttttttatagtgccacctaaattaaatta

SEQ ID NO: 83592 - DNA, 92 bp, Glycine max
cttcctaccggttgcaaaagaccaccaaaaggggatttggggttaaattaacctaataaagtaccccaaatttcaaagggggtaatcccttc

SEQ ID NO: 83593 - DNA, 81 bp, Glycine max
attatggtgaatagccatgaatagtattgccttgttcctgcatgcaaattcatatgaattgaaatctattacaaatggagt

SEQ ID NO: 83594 - DNA, 58 bp, Glycine max
  unsure (1)..(58): unsure at all n locations
gagaccttaaggtaaggcggggctacccgctgagtttaagcatatcaataagcggngg

SEQ ID NO: 83595 - DNA, 82 bp, Glycine max
ttgtcccttaaatgatggaatttgtctaaggggggtatccaacacattgccggagggaatgcaatcttgcttattatgctat

SEQ ID NO: 83596 - DNA, 88 bp, Glycine max
  unsure (1)..(88): unsure at all n locations
accggctgcggaaaacaacaaaagggagggtgtctaccatttttttatgtagctttgttacccatactagaacaccattatcgcgnna

SEQ ID NO: 83597 - DNA, 100 bp, Glycine max
gagtgaacattatacgggtgattgatgtggtcggtgttgaatgacttaatgtgtttggttttgggataaagtttggattttgtgttgtgggcattgggtt

SEQ ID NO: 83598 - DNA, 375 bp, Glycine max
ggccaaataccctgccgggatttatatggctttcatctctttgaccttctcaagaatgatcaaatttaacgttctcccggtcaggaaaacccaaatctttaatttttaaacacaagcatatcagattaccgtgattataaaggtcacacagattattcagaaacactaacaatcaaaggattccttgctacttaaaccatcctagaaaataattgcaaagagtacacaggttaatgtgtccacaactccgacatgaatcacattccactgactgtgccatttgtacactctaaaccaattttatctttacatttaatgcattgcacaccaaattgcaagattctttttgtgtgtgtttatcaagacatggtaact

SEQ ID NO: 83599 - DNA, 184 bp, Glycine max
ttactcggtcactgctaactgatgctaattgtgctttgccttcgctataaatactttgttttaagattgtggcttttgggtaagtactcctttcgatatttataaacggactatattgtatttacaaaccgccataaccatcgtaccatgtttaaaaacttttaaaaactatttacgtgggcaa

SEQ ID NO: 83600 - DNA, 167 bp, Glycine max
  unsure (1)..(167): unsure at all n locations
agctgggatcctctagagcggccgctnnnnnnnnnnnnnnnnntttttttttttttattattctcaaagaagaatatttttctttctttttaccaaacatatgtggatccaatcacgatcttctaataagaacaagaaatctttttcgcgatcaatccttttgtccc

SEQ ID NO: 83601 - DNA, 288 bp, Glycine max
  unsure (1)..(288): unsure at all n locations
aacaacaaaanccaatccgagttttataaatacttcccccccttctctacactaaaaaaccatcccctttcctaatttttttcccaaccttcactaacacaaatcctctacccatacaattccatacaccttacctttattccataccatcaattccctaatatttaccccaataaatactttccttaatcatcaccaaaacttttttccttttcaaaattaatatcctactcacaatttaacacaacatacaatccttaattatattttgtcaatatattttttcct

SEQ ID NO: 83602 - DNA, 278 bp, Glycine max
aataaaaaaaaaaacaaaaaaaaaaaaatttaaaaatatatcttaaaaaattttttcttattcatcccccaaaaaaatatttaaaaaaaaaaaaaaaaatgcttcccaacttttcttaaaataaaaaaaattatacccttattaaaaaatattcattccttttatctaaaaaaatatttttcccacttaaaaatttatacaacataataaacaaaagcataaatttttaaataaaaaaactccctaattaaaaaaaataacttaaaaaaaattttttt

SEQ ID NO: 83603 - DNA, 63 bp, Glycine max
gtagaaaaatccaatcgaagtgcatttagtagttcccttttttttttataggaaaaaagcatt

SEQ ID NO: 83604 - DNA, 63 bp, Glycine max
ggagaaaaatccaatcgaagttcttatagtggttcccccttttctttataggaaaaaagcatt

SEQ ID NO: 83605 - DNA, 408 bp, Glycine max
gttcccttattggtttggctaaacctaaggggttgcccccccttgcccgggggcttccctttttgcgtttttttccaacccttcgaccccttggccgaccccttggccgaccccttggccgaccccttggttcaccccggaatttccgacccgttccttgaggccttccaacttttccttttagggggtctattaaaacttggcgtaattattggcattagttgtttcttgggtaaaatggtattccgttacaatttcccaaaacattccaacccgaagccttaaagggtaaagccggggtgccttattggggaacctaccttcatttattggctttggcctacttgcccgttttcaattcggaaaacttttctgcccacttgatttattgattcgcccaccccccgg

SEQ ID NO: 83606 - DNA, 103 bp, Glycine max
ccgctgctgctgcttcttctttcttcttctaaatgataaggttcagtggacttctcacaacgtcgcgggcagcgaaccgctcacgtcgccgcaatccgaacac

SEQ ID NO: 83607 - DNA, 86 bp, Glycine max
ggggggccccatcaaagggattatatgatgtcagtaaacaattatcaccatgcccttttgtggtgttattccaggaatttgacacc

SEQ ID NO: 83608 - DNA, 74 bp, Glycine max
gggaggggaacattaacgatgtcccctcccttctcagggattagcattttgcctaacttgaacttacttaggtc

SEQ ID NO: 83609 - DNA, 65 bp, Glycine max
gagatcatcacacgtccaataaagtttcctccctcgtgggtctttactaccatgaaagatcctac

SEQ ID NO: 83610 - DNA, 57 bp, Glycine max
cctccgcttattgatatgcttaaactcagcgggtagccccgcctgacctgaggtctc

SEQ ID NO: 83611 - DNA, 443 bp, Glycine max
ctggggcataaagggtagagctcaggaagggttccgcattctaaggatagagtgtgcacaagtttagtatggcacttacagtgatactgatatttacaaactctaccaaggtggatttctaacggcaaaactaatatcagcctttcaagtaaccgaggccatatcttttgctaaatgtacattgtactcattcattgaccacaattggacaggagggactcataagttacgagctcgaccaatcattcagcctaatctttcttaaaatgaaatctttcatgattcagtattgtcttgtagtatcactattgatactgtaattcagcagattcatatagcttaattactcagttctttgacgctttggggcttgagcactatcttcactagctatagcatgttgagttttgggagaatcaggcttcccacacttttccaatgag

SEQ ID NO: 83612 - DNA, 60 bp, Glycine max
gaaactcaatttttttgttttgcgagagtagagtgtgttttggtgaaagtagttctcatc

SEQ ID NO: 83613 - DNA, 379 bp, Glycine max
tagagcggccgctttttttttgttttttttttttttttttttaggcagaaactctctgaagtcattttcataactctggtctccgatagaaacatgtactgttgaatctttctctatatctggtgccatcatatatgaaaattctatgcactagagaatttggaatacaacttctgcaggcaatctttactagcctcagcataatatatcaaaatcaaattatttttcatggcacatttttacaacgtagacacacactcttcatatttgataacatcacatgtgtattaaacaaataattactctttcaacatttaatctcaattttgcgcaaactctttgtttttaaaatggtactgcttaaactgtgccgttaaac

SEQ ID NO: 83614 - DNA, 265 bp, Glycine max
aataccaataccaaggggctaacattagcaacatatagtgattcaattacaaacttgccagcaataacagctaaagactgcattacaagttactgcaacaccaccggcaacttcccacacccaatccttgccatttctttttactatatccataacagcaagggtttctcaaatacagattagcctccaaaacaaaagaaccttacaataaaataaaaaaacctagcccccaaatacgtagagggggcttccctgtctcttgaga

SEQ ID NO: 83615 - DNA, 74 bp, Glycine max
gggtgtgtaattacagaggctatgaaggatgaaagagcgtttgaaagagataagaaagtggtggtggtgataat

SEQ ID NO: 83616 - DNA, 219 bp, Glycine max
gaaccacgactgctttggttttttgtaagcgatttagacctgatttaatactatgaagctatttatggggggtcttataaaattgaaaagtcagatgggatgaaatgtccacatcttgtaaaaaagacatcaactttcgttagactctgatacaccttttcttacaattcaaacaacataccctattccacctacggatttctttgatcactgacagct

SEQ ID NO: 83617 - DNA, 481 bp, Glycine max
ccgcgtcgtagctggttccttaagccggccgtttttttttttttttttttttttttggcacaaaattcgaagtggcccaacaaaattaggagtaatttgataacctagaaaaacaagactgaattgcagaaacaaaaaacctacatatatgtctccagggttcaaacaaatacaaatcaatcctcatcatcaataaccttggtgcctaaccctttgagctcatccttaggaatctaacaacggtgacaagagagtatagctcttccttggcatcttcatcgcattcctcttgcgagcaattcttaccctaatcctccttggaacactcctgattccctggctcagacaaacttgttcaacttcacatcaccctaatcattggtccccatggcctttggcaaatttccttatctctaatagcttaggagctttcttttaaatgtgcagccaggaggcgcttgggaggtaatgggtactctct

SEQ ID NO: 83618 - DNA, 88 bp, Glycine max
cctcttacaagtcaaccgctggcaaattcttcattgtatcgtataatttgtatcggtcatgtgtatgacaatcattttgttgaagtac

SEQ ID NO: 83619 - DNA, 84 bp, Glycine max
caacaaaattattcccaggaaacaaccatgatactaaacagtcacaagggaaagttcaaagaagcctcggctacattaatcatc

SEQ ID NO: 83620 - DNA, 284 bp, Glycine max
ggaacagaacatttccctggatacacccatcatgctattcgctcacaacgggaatagcaaacgaaccctgggctccatgacaatccccttatgccatatcattcatcacaaacggacccgtggttcctcctgctaatgctggaccgtgcccttccagcctaccatcttccagtatggagggtagcttcaaagcttggcaacttattggctatatttagttcctgtgtgaaatctaactccagttactgtcacgcacatctttccacccggttgcatatgttgct

SEQ ID NO: 83621 - DNA, 379 bp, Glycine max
ccaacgagcatctagcttggcagcccgagcagttgctggctactgactgactaaccacacacacaggctgacgacaggcaggttaatccatccacattcattactaacagaccgtgctcttctacttactaggaaggctagagcttgctcacacacacttaaatcagccgggaagctagctacatgcaatttctaccgactggctcgatcaattaagtctctcggttgtaactaacgctagctgctggcaagtaaatccaccaactagatcaagcaggttgcttcctgtctgctgttttcaggcatacggacgcacgcgtggacccaccaattaatgaccgacccctgcctgcatgccaaccatctctatctagagtga

SEQ ID NO: 83622 - DNA, 299 bp, Glycine max
gcgagaacccacacgcggtggtggccttgggtggttaaaaaacaaaatgacatactttactaaaacacatcaacaagcatttaaaacaccgaccatactggtttcccttaaaaatatacccagcgcagatcaaaaacgataaactagatttgcaacctattagcctatcacccaatttttaaagataagtaacgtctttcacacacaagacatgctcaatccattcatatcatccataacacccttcttttatacttctcctttactgactaagtgcatataacattaattgcctaaca

SEQ ID NO: 83623 - DNA, 74 bp, Glycine max
  unsure (1)..(74): unsure at all n locations
tttnttttttttttttttgacacttttgcacgattggggagcaattgtagcctctccttgttgctaatatgctc

SEQ ID NO: 83624 - DNA, 196 bp, Glycine max
cacacaaaaacatccatgtcttttattgaaataaagggtcacccacaacccaaataaaccttgtttcttgattgaaataaacatccatattttatattatcaaaccccctcattcttttcacctcgaaaaactgacactaaactgttatataatatcttcactcgctagaacatattctatatcccgacaaaactt

SEQ ID NO: 83625 - DNA, 69 bp, Glycine max
ctaagcagccttttgttcagcaaaacacttcatcaaataatttatctcattctgatctgagcgctgttc

SEQ ID NO: 83626 - DNA, 123 bp, Glycine max
gggggacttcacctagcaggcctcgaatccaaatcctttctactttcttctcttacgctatttcgtctttctatagaatacgaagagaggaccttctttcgggctgtctacgaacccttcttc

SEQ ID NO: 83627 - DNA, 199 bp, Glycine max
tgttttttaatggggattgtaaatgtgatgcaatggcgccataaagaggcatttttggacccgaacatcactggagggcccattgattgtatttaactacagggatttttaaaattccacacagaattttttcgatcaacttgcatgagggggactttgttctttctttaaaggaacataggctgattttattatcata

SEQ ID NO: 83628 - DNA, 128 bp, Glycine max
ctctctaggttgtgtgcgtaaccttatgaaggtgtacgctgctattgtggtgcgcgctcacaatgtttctaagatggagccaatcattttctgcaatctgggcgcttcgctcgcagactcattttgaa

SEQ ID NO: 83629 - DNA, 181 bp, Glycine max
catggtgacgattgtaaattgtcatctgatgataaagaggatgaatccatacatcgaaatttatttatatgttaaaaaattgctgccgatgcataggagccaagcttactttcgcgagagtgcctttcttattcattgtaaaatgccaagatatttactggcagtccctacaacgacctgc

SEQ ID NO: 83630 - DNA, 65 bp, Glycine max
gtaggatctttcatggtagtaaagacccacgagggaggaaactttattggaagtgtgatgatctc

SEQ ID NO: 83631 - DNA, 202 bp, Glycine max
tggggggtccatgtttaagtacccatgcttgctacgtcttaaatcaaaaataaagccccctaaatgcaaaacactggccgaatttaaacaacgtcgttacataaaaaaccgcgggggaaaacaacttaattgcctaacttaacatccttgtaaaaaaagctgttttaatagggtggaggaatacacaaaaggcccgtaccaa

SEQ ID NO: 83632 - DNA, 74 bp, Glycine max
attatcaccaccaccactttcttatctctttcaaacgctctttcatccttcatagcctctgtaattacacaccc

SEQ ID NO: 83633 - DNA, 289 bp, Glycine max
ggtgtcaaataatcaccgcatctcagatgttttatttgcgacactgaaagcacgagcagttccgttttggtttgtttttcgccgctgcaagagagtgccctagctacctctcgagcttgtcacctacgcaactgaaaaagccatttgctttttgctctcgcttttctattgcgaaacagcgtcgcaaggagaaagaactggatgacgggcaccataaatcgaggtaagaaaatcattaagtgaaagatggggattctaagaagagtgaacgctatcgtgaccgtgatag

SEQ ID NO: 83634 - DNA, 425 bp, Glycine max
  unsure (1)..(425): unsure at all n locations
gggggtcatccttcacacataagtcattgataacatcatctaagaggtccaatgtatggcttggagggatataaagggaagacacatgagtgagaattagactgtgatgaccaaacatctacatgttgatctaccacaagactagactaactcaaccgcgaagagcatggatatgctcataaacattattaccaattactcacccataaaaatttgtgcactacaatgtacgtaaacacaaatgaatcttgtcccgcagggtttgccaggttatgatcaatttgggctgtcactgtaagggacccaagacactactcaccagcattgcactatctantattattatgaaaacgtctaacttcatataagtggaaccttttgacagcctgaggactgctaagaacctgaagcacccatgtaatctg

SEQ ID NO: 83635 - DNA, 280 bp, Glycine max
tgagaggggtcaacaatgtggcccaagcttctgagaactttcccttgaggctgactaataaaccggccctactgcgtgactaccccacatattccacctagatcacatattagacatagaagtggtcctctttgcagagacaagacttccaacacatccatgcgacaacttaactgtgctgtgaggcaacaatgattctatttaatgtcacactgtgttataagtgtcttatctgactaaagctaatcacgtctcccaatctttatggcccatgaaatca

SEQ ID NO: 83636 - DNA, 315 bp, Glycine max
aggcgttcgaacacgtccgagagggctgcttaatggggcccaggctggtgaggactgtgcattgagactgttgacaatcacggacgtttgttgcaaatggtctacttgatggaacaaatcagttggaagaacttgtaggtggccgctctactggattatcggataggggcgcatccttgccacgccttaggagttggataagcgtgacctgattgagatcaatggctgtggtttaacaactctgtgtctggtaaaaccgtgtgtttacccaactaaatctcactagtaaactgccctggcactccagttggatgt

SEQ ID NO: 83637 - DNA, 352 bp, Glycine max
gagcttcttggcgacaatgggagggcacactagctcccagaagcttatattgtgtccaaaaaaaaaacgaaaaaggttcctatcaggcggtcgaactagaggctcgctgcttaactgcccttgcctgcttgcgcataaccatcttatatgctcacgtgtaagaaatcgactgctgtttgtgatgcaaccttatgactgagcaaacccggccgttaacaactttagtggtgttgcaacccattctcatttcagcacctgtcttacaaactaagatgccgcttacgatagcgcttcccaaaaaatacgcagcctgaatgagccctcttaccccccctgtattaccgcaatatgc

SEQ ID NO: 83638 - DNA, 256 bp, Glycine max
attcgtgacccacctcgccacgctcgtcgtggaagcacgaaggtgaatgcttttgggtcgggtccctacactattgtggtctggcccggagcgggcctttcgttgatctttttgtcagctgtactgggtaaaatttggctttgtatgactgattatttgagaataatggaattggttttaaaattacaagcctatgtggtgtatgaggtcaaactttaaggcattgagctattacaattttcctgggcaaactcat

SEQ ID NO: 83639 - DNA, 95 bp, Glycine max
taacaatcttgcacacggcttgcggctggaaatgtagaggagaagggatcattgaaggggcccctctagtggatacaagcagactttcgggctca

SEQ ID NO: 83640 - DNA, 54 bp, Glycine max
  unsure (1)..(54): unsure at all n locations
ggaatggagccgaagncacacccagcctntttagcaaatttgaggacagactgg

SEQ ID NO: 83641 - DNA, 68 bp, Glycine max
cggagagatatgtttagacggggaagagtggaatgatggtctactagctacaataagagagcgggtat

SEQ ID NO: 83642 - DNA, 127 bp, Glycine max
agtataacaagtccccacattgcgccaaatggccgccttccaaacacgtagctcacccccaaaattccaaaccactacctgcaagcctaccaaatttccctatactgactcgtataaaagcttcaca

SEQ ID NO: 83643 - DNA, 144 bp, Glycine max
gccccactgattgataggcccatatttgtgcgggcattcatcaacacagacgcgtggccggacccatggttttacccaaaaattacggactgccacttgtgtgcattccaaataaaaatatattgagttggattataactgggt

SEQ ID NO: 83644 - DNA, 63 bp, Glycine max
ccaaaataaaggtccaggtattgaaggcgttttttctaatgagcgtgttatcaaaaccaaaca

SEQ ID NO: 83645 - DNA, 79 bp, Glycine max
ctctctctgctgggttcgaaccgaagactcgttgctggggaaatgcattccaaaccatcaaatcgttcgggaaaccggc

SEQ ID NO: 83646 - DNA, 361 bp, Glycine max
gttcaaaagcacttcttcaacttacttgtcgggattttttgttacactaaataatgagttcatggcacttcatttggttctttgctctttgaataaaaattacaaaatataggcccacgttgctgactattttaatccagctagaacacactggacacatacatgtgtgcttgttttaaaatagtgaagttgtaagctcaattacttcccacacaacttgatcataatctgactttagtttctcttggtcccctcactcaatttcaccctttacaggctttgtctgtaccaaaacacagcatgtacgcctctttattgcttctgcccctgcaagatcttctttagatcggacataaatata

SEQ ID NO: 83647 - DNA, 67 bp, Glycine max
  unsure (1)..(67): unsure at all n locations
cccgggcttcgntactcgagacaaaaaaaggaacactatttagactattactagtattttcttctcc

SEQ ID NO: 83648 - DNA, 522 bp, Glycine max
ggcacaacccctaaccatacataaagtttaagcgcaggttcatataaataatgtgtacaatgggcattactttaaatacacttattgaatttccgacccatcggacatggcctatttgcacagctcctaacaaatacatccacaattttattgactactaaatgatccttactttgcgaaaccactttttctatgcaataacacggttgttcttgcgcactattgaaagccacactaacaaatgtattgaataaactaatatcctgagccctgttgagataaatattacataacgccttacaaaaaaaaaaaaacattaattgtaaacgaactgatgttttttttatacgttaaaggtgatccatgcactttaacttatatacgggtgctcccatcgaacttttccaaaagttgaaacgaaatgttgcttttaactcatgggacaaactcaatcttataaactttctaatattctaatccaataaatccttataaaaaattttatcaaaacaaacaatttta

SEQ ID NO: 83649 - DNA, 154 bp, Glycine max
gtgcctaatgaggaaactaactcagacaaatggcttaatgaatactgcaaccttcggagagaggaaacttgcgtatcgagctccatgaatgaatcgcctaacaccagggaagcggccaacagcgtattgcgctccaccgtctggtctttataga

SEQ ID NO: 83650 - DNA, 186 bp, Glycine max
ggggacaggatgattttgatgacaacttttgcattgtaacacccaaatgggggataaaaaaaaaaattttttaacaaacaatccccttttaaaaatataaacactcaccacttttaagtgaaaaaccgctttcattatacaaacccatacaaatgtttaccccttttgttgtttttttacaaccct

SEQ ID NO: 83651 - DNA, 215 bp, Glycine max
ttttcatgccatattttgctacctaaacatgtgtttatcatttttacgtatttttgctatatacatacatatccaaggtatcttgctacctaaacatacatatatattttttttcaggtatttttgctatatacatacatatccaaggtatcttgctacctaaacatgcatatatatgttttgtgaggtatttctgctatatacatgcatatcca

SEQ ID NO: 83652 - DNA, 349 bp, Glycine max
  unsure (1)..(349): unsure at all n locations
taaaatcctatagaccggccgctttttttttttttttttttttttttttnnggttttannccaaacaaaaaataaaattaaacgccattttcaaaaaantcatgtcccaacaaacaaaacaaaaaaattaataattaattcaaaattatcactaaagcctaccaactttaactaatattaaaaacaaaacatacatatataaannnaagtcataactttttcctctataaaaatattatccactcataattccacataaaaaaccatacataaaaataaagaagaaaacttgctatttacaaacatataaaaaatattcttttacctaaacatacatatatatattttt

SEQ ID NO: 83653 - DNA, 60 bp, Glycine max
aaaaataaaaacacaaaccctgccgtcgcctttttgtcgttttttcccacccgtcggccc

SEQ ID NO: 83654 - DNA, 74 bp, Glycine max
gcttcaaatgttcagcgtttcgcagtttgggttagttacttcttcactgtggtttaatttaatgttcttcttcc

SEQ ID NO: 83655 - DNA, 488 bp, Glycine max
ttttttttttttttattttttttttttttttttttttttttttgggtttttttaattttttttggtttttttaaacaattgcaccccttccccttttttattcaaaaaaaaaaagggtttttccattttttcccccgccaaaccaatcataaaaaaaaaaaaaaggaacccttcatattcctaaacgaatttttttaaaaacaaaaaccccccgtaacccccccttttcaacccaaaggggactcattaactcgtttcacaaaacttttttttattttcggccccaattggcaaaacccttttttggatcccaaacaaaaggctttaccaaaacattggagttttcctattccccggcaacaaaaaaacttaaccccttaatccccccacaaaaaatgtcccccaacccgaaatgggccaaattttttttccctgcgggacaaattttaccaaaattggttcccgtgaagaaaactttaatttttatt

SEQ ID NO: 83656 - DNA, 99 bp, Glycine max
  unsure (1)..(99): unsure at all n locations
ttttnnngggggtgtgttgtgtacggtactgtgtttggggagagaattacggaactgagtctgtctgagtttctttcttatgggcctcagagagaagat

SEQ ID NO: 83657 - DNA, 72 bp, Glycine max
  unsure (1)..(72): unsure at all n locations
gtacgttagcttggatcctctagagcggggcgcttnnntttttttttttttttttttttttgggcttctggt

SEQ ID NO: 83658 - DNA, 268 bp, Glycine max
ggcaaattcgcagcatgtaattctgcaaaggggtctatcttgtgtttttggtaattttcaacatgggtggactttctatattgtttcctgggatacttacatggactaataatttcatctagctttattgatcttttttggcattgttatagacagttctatgttgtttgtttttttgactaaattgggttacaattttgtaacacggggagcttagtaaattcattaaccactgacatgagatcaaagtagcacctctagcaaggaa

SEQ ID NO: 83659 - DNA, 399 bp, Glycine max
ggcaaataacaaaacccggtgcatttaacttgcatgaaacaagaagcttgaaaaagggtgaaaaagagggggggaaaatgaaaagccttggggcctgcatgatttaagtttttttaaccggatcaaagttggaaaccccaataacggctccaaatttgggtgttaaaacaaccccaccagcaaagattcttagtaaaaagttttttagggaaggggggaacttattttcagcaggttgagccaccttcggaaccaccataaatgctttcacaaaagctgttgggagtccggcaactgcttttttttttaaagatgcattgttttgaggcttggagtttgacactgccttcggggggaaaagggtcctttttggttggcgtaggggtagtggcctaaaaa

SEQ ID NO: 83660 - DNA, 89 bp, Glycine max
gacatagcaggaataatacttcttatgataaactgtgtttattatagacaaacataaactggctgccctagagggttaatagaagctat

SEQ ID NO: 83661 - DNA, 152 bp, Glycine max
  unsure (1)..(152): unsure at all n locations
tttttntnnnttgtgtaacaccaccaatttttacccaaaccccgccctatgaaaacaaaagctctctcctcaaaaaaaaaaaatttcctcccacaaccctattttcccaaaaactaccccaaataaaaattttttttttaaatttccccccc

SEQ ID NO: 83662 - DNA, 113 bp, Glycine max
aacttcaatagaaagaaatctgaaaaaaagacggcaaatgttagaatacataagcaagatggatttattgaactaatgcctggccaaatggacattgatgtcaaagttataac

SEQ ID NO: 83663 - DNA, 100 bp, Glycine max
aacattgaactttatttcccgaaccattttttttttaaaacttgattatcaaacccaacagttgacttaaaaaaaatttttttaaacattaacctttatt

SEQ ID NO: 83664 - DNA, 68 bp, Glycine max
gggaggctccggaccaactttcctttaatttaacgcgtttttataatttggattccgcctttttaacc

SEQ ID NO: 83665 - DNA, 380 bp, Glycine max
cgggggcaacgggagtatttggggcgctcctacctattcctcaattacaatgaggaaatcagacctacgtagttctttcataactaaacgttgggtaagttggtttgatctttttccgcaagatcgatttaaatcgaacaaaagtcatttaaggggttggaccattaaacgatcttttgatattttttgaaaggagagaaactttaaggggttggaccattaactatctcttggggtgaaagaagagaaacgttaaggcattggaccattaacgatctcttggttttttggaaggagagagacattaaggcgttggaccattaatgatctcttggggtgaccgacaaaagcggggcttttgcttctacttatcctcaatt

SEQ ID NO: 83666 - DNA, 64 bp, Glycine max
ctgaagaggttaatgaactcaaagggtgttggggtgtgtgtttttcttatgttatgttgctctc

SEQ ID NO: 83667 - DNA, 72 bp, Glycine max
  unsure (1)..(72): unsure at all n locations
tttnttttttntttttttttttncctataacagacactccccttctnacnttttcccgcggttttgcaaaca

SEQ ID NO: 83668 - DNA, 173 bp, Glycine max
catccaaaactttatattattaatataacccgcgattttttaaaaagagcccgatccatacatttgtcaatataaaaaactatcccaccatttccaataagcctcacaaccttttaaaaaatcaaaacccaaggtaaatctaattcctccccatggtaaaatacaccccaaaa

SEQ ID NO: 83669 - DNA, 172 bp, Glycine max
  unsure (1)..(172): unsure at all n locations
ttcaaacggttgcgtaaaagaccactcgaagggaaactacttgacaggcgagattaagggtttctgcaacgcggggcnacttcctttggtgtaggaggatccaaagcttatcgtacgccgtgcatgtcgacgtacatagtcttttttattagtgtcactctaaattcaatgt

SEQ ID NO: 83670 - DNA, 159 bp, Glycine max
cgtaaaggggctgatcgccgggcaatttaaccctttttattaacgcgcaaaaataacccactctagcggttccaagcttgcctcccctttcgtgccacgtaatagcactcctctaggcggacctaaatcaaatttattggcggcctaaaataacgtcac

SEQ ID NO: 83671 - DNA, 93 bp, Glycine max
ggagtggctgacgctctagacgatccaagataacaaacacgtacatgcgaagtcatagaacatatatagcgctcctaaattaattcactggcc

SEQ ID NO: 83672 - DNA, 273 bp, Glycine max
tacaacttgatagaaacaaccgacagaggatgttttttatacaacacaatctccaacgtttatcggtgaggtctttctaacgcggggctgcacaccatttctttgatgaagcaaggctatctcatgatggtgtaggactttgagagacgaccaatataccatccatactcttcgttcagggaaacaaatcatttcatgaaattcaccacacatctaataataaaataaaaatcttgatattatattggcctctctatatgatcctaacttaaa

SEQ ID NO: 83673 - DNA, 79 bp, Glycine max
gccggtttcccgaacgatttgatggtttggaatgcatttcccaagcaacgagtcttcggttcgaaaccagcagagagcg

SEQ ID NO: 83674 - DNA, 158 bp, Glycine max
gacagcactgcactcttcgcaacacaacaaaaaaagacaacccagagagcgcgtcttaataaacgctcttctgtgaaaacccccatttcttttcttctttcttcttctctttcgcttcttcgatcttcgatcttcggcgctgaaaatgagagagtgca

SEQ ID NO: 83675 - DNA, 85 bp, Glycine max
gcgagaagacaacagaagggggagaagaaaatactagtaatagtctaaatagtgttccttttttgtctcgagtaacgaagccagg

SEQ ID NO: 83676 - DNA, 269 bp, Glycine max
ggtttgaaactgcaatgggaaacttgcatgctaaaaagcgtgacactcaattttgcagatacgttgttgaatgccgagagaactatcactaacacaaaatcttgttttcaataacggttctggaacactgtctaccaaaagaacatctactaccatcagctatgactttaaataccgagaacaggatactgtttcctaaagaaaagtatgctcagaatcatgatatcttgaccactgtattaattgtaacaattgccttgaataaagta

SEQ ID NO: 83677 - DNA, 389 bp, Glycine max
actctcttagttccagcacaccaagctctttatttatcccacactttcttttctttcaccaaaaatgtcaccagatttcacacttttgttctttccggaactcatgcagtcccctatgatcactttccaagccaccctctgcgtccttctcttcaccctcatgttcacgctgctcttcactcctggtgggcttccttgggcctgggcccggcccagacccatcatccctggcccagtaactgccctgttagggatctttactggctccacgcctcaccgtgctttatccaaacttcgccccgcccatattttttaaaccctcttaacgcgctgcccccccccccttttgtttttataaaaaaaaaaaaaaaatacctcaaggggttttt

SEQ ID NO: 83678 - DNA, 88 bp, Glycine max
ggaagaagaacattaaattaaaccacagtgaagaagtaactaaaccaaactgcgaaacgctgaacatttgaagcgtataaaaaagaat

SEQ ID NO: 83679 - DNA, 93 bp, Glycine max
atcttctctctgaggcccataagaaagaaactcagacagactcagctccgttattctcttcccaaacacagtaccctacacaacacaccccat

SEQ ID NO: 83680 - DNA, 305 bp, Glycine max
gaggcacacactgggaccccactctgcctggcaaccggagctaccactctcttgcccgcgaccctagctctcccactctcgctcgacgctggttccgcttgcaacccttgctcgcggtggttcagagcaatctgtctcgcacgcacggtggtcataattgtacatctgcagtttagtatggtgccggcggggcaattcacactgctcccatgaatcccattttgatctgcttgaacgaggcggagaattgagaagaaaatgagagcagagatccttttgcttccgcgcaaacacctattgccgag

SEQ ID NO: 83681 - DNA, 302 bp, Glycine max
gatttaaacacaaccacagcagcgtcccaaatggggtcatcttctgttcccatggcgttgtcactctactctgttaacaataacatccaccttccatccgaagccttcttcatgctactacccctacacctaccaatgatgaccctcttcttcacaaaggcaggactaaactacaagcctcatatccatgcataatttgaatgacaaggcatctcccttactcacaacagcttatttgacaaaaagtatggaggttccagaatttgctcatgctgctacatatgaattgttactttaactaa

SEQ ID NO: 83682 - DNA, 89 bp, Glycine max
atagcttctattaaccctctagggcagccagtttatgtttgtctataatatacacagtttatcataagaagtattattcctgctatgtc

SEQ ID NO: 83683 - DNA, 291 bp, Glycine max
accggttgcaaaaggcacaccagagggggctcttttacaacgaaacgctgtgaatcttgttctatctgtgacgggcatgatggtctaacgagcagggttatagatggctctgggtgggctctcactgatggttgaggacagccagccaggaatgtacctctgttgcgtgaaaggtcaacgtctactgcgaccctagtcgagctggaactcgagaccttaggctaccacctacattggtagtactcagattgtgttgacatgcatgatcaaggattgcgacctagctatagt

SEQ ID NO: 83684 - DNA, 489 bp, Glycine max
  unsure (1)..(489): unsure at all n locations
cgttacgctttcgagacgctttcgcgagcacattcgcgtgaatattccgcggagttttgcgcgcgctttgtgcttcaaccggtgagtgttcgaatacgcgactttcaattcatttcttgttgtgtttgctttcatctttatttcgttcactttcggctgtattttcttccttttttaacgagctttaactgatcgtttaagccgctatctcgcctaaagaatgataaaatgaattccaaccgatcatttgcgttgtaatctcgtttaatcactgttaaagcaaaatctaaccgatcgatcacattgtaacnccaaccgcggttttaataaaaaaaccccccccaaaaaaaaaaaaaaaaaaaaaggcaagtaattataaataatcaaatatctttgaataaataatcaaaaaataattagactttttctttggaagttcttgatgaattgctagtaccaagtgaactaagctaaataactacaatcagc

SEQ ID NO: 83685 - DNA, 126 bp, Glycine max
  unsure (1)..(126): unsure at all n locations
gggagatttgatgatgtcaccagtaaccgaaaggcctttttgctagaactagaaggggtggtggtgcggtgttaccacctgngggtaaaaatcgaccaaagattctagacatgcccttgaaggatg

SEQ ID NO: 83686 - DNA, 356 bp, Glycine max
tacgggctggcgaagaccgacaagaagggggggttttagaacaaaacataaagtacatttatctaaaaaaacatttaaaccaacagaacacacctacctacttaaagggattatgaatattaagaaatgccttttttattatgtgaatgccaattcggtattgacaatttggcatggagattaccctttcttggaatgtgactttttgtgggaaatgggaattctcaaaattaatgaagctgcgttggattttgatctgcaacagatcttttcgtgttatttgacacatgcaaaaggaataaggaaaggaatttcccgtccccgggggggggtttttaaagggggttttttttttt

SEQ ID NO: 83687 - DNA, 52 bp, Glycine max
  unsure (1)..(52): unsure at all n locations
ggaacaaaatgaaaagaacggtttggtnggaaaaaagatgaaaattttacgt

SEQ ID NO: 83688 - DNA, 148 bp, Glycine max
tctcagagcggcgtttttttttttttttttttttgtttacccgctttcgacgtgcttaagccattttacttaagtcatttctcgcttaacttaaaaataaaataaatgtccaccgaacgtttgaatcgtatgatccgtaaactttggt

SEQ ID NO: 83689 - DNA, 172 bp, Glycine max
gaactgatgtgtcctttgcgctttccaccgcggccgtggggcccggaattcgccgtcctgatgcgtccacttcctataggagcgatttagctggcgtatatggcatagctgttctggtgaattgtatccctacaattcacacaacatacaccggagcataagtgtaagctgg

SEQ ID NO: 83690 - DNA, 234 bp, Glycine max
ttttcccttcatcagcttcttcactctcttcaccttcaacatatgatacctgcctgactgtcctactagaagtgcgaatctcactgttgcgcgaagaaaaacctgtggctgcagatgagcgaccattgttcttgcggacatgaacactccgctttttagtgctgttgaaatcctcatcactatcactgtcggaatcctccagtgttgactctgtgccctcaaaagatgatataa

SEQ ID NO: 83691 - DNA, 59 bp, Glycine max
ggtaatggttcctgcaacatgtctgctcttcattttcagcattacctggccagttctat

SEQ ID NO: 83692 - DNA, 217 bp, Glycine max
gcgccaacagacatgaaccaatgggggagcctcgtaaaagaaatgttgctcgtgactcgacagtttaatgcgctactttgcccaaatatttcagtcatcaatgtctgaaaattggaatctaaccaacgtccatatctttgttccgaaacacctaacattgacattttgccaaagacgtcattccgatgatgcgccagggatgactttcttatggaac

SEQ ID NO: 83693 - DNA, 269 bp, Glycine max
  unsure (1)..(269): unsure at all n locations
gatgtgcaactgagcatacttngaatatataaaaaaaatgcctgcaatgtatacactcagaatcagaggagagtgatattctcattcctgtaaatgattaagcatttgaagcgctgtgtatacaagaggacgaaatttgtcatatagaatttttatgacatctattntatgctagccatggagaagaacactagctcatcacacatctcatctcatatcttcaagttcaacttcattaaaggaatggcctgctatgaagacataattct

SEQ ID NO: 83694 - DNA, 68 bp, Glycine max
caaagaacatatatatcattatcaaccaccaaagaaggtgagaagtttttttccagttgccaaactcc

SEQ ID NO: 83695 - DNA, 485 bp, Glycine max
cctacctctatttctttttcttgggcgggtatttctttctcttcgacctttatttgtttttccctcctctgactcattgcatctgttacctcattcttctttttaacaatagtgtccttcacaacaacttgctccttcaaagcaacaacatcctcatcctcaaccgccacaagcttcctgcttcttgatacaatagctttacactcttctttgggattcttctcagtattcaccgtaaagttgttggatgacttcttagctaactgcttggccagttgacccacctgaatctcaaggttttttagggctgactcagtactcttatggttggacatggtcacttgcatgaattgagccagggtttcttccaatttggtagtcctctagaaaatattaggcctttcttgaggcgtcctgttggaaggtccaccctagtccttattgaattgattaccagggtgtgatctccattgtccttgctgatc

SEQ ID NO: 83696 - DNA, 438 bp, Glycine max
cggagggagagatagctattagcggctcatccaaaatcacatcctttaaggaagcataagtagcgcctgatgaactaatcaagctctcataaattgatgcaatgtctacagtatattcttcatcacattttcctaatacctctgaataatgtagttctgaaattctcctttcagtcagttcagacaagtcgcgcagggaatatcttctggagtttgaacaaacttcatcaaactttcctaggctatatgatctttgtatctcggaactttcttcatgatttttctggcttggcctatgcttgcaagctgatgtaaacgttacatgatcaaacaattttttttggctgtgatgcatcctcgtttaattcatcctctacatgacaatttaagagagtatttcctggtttatctctgtattttgagatagataaggtaaaa

SEQ ID NO: 83697 - DNA, 198 bp, Glycine max
ttttcttaaagaaaaacttcaaattaaatatcgtaacttgagctttctacattccaggaccagttcaacagaaaataaaccatcttcattttcagaagaactaatctagcttcgtcagaattcccttccaccattgattgtaaacataaactaacaactttaacaccacaagtctaatcaaggccacattatatcata

SEQ ID NO: 83698 - DNA, 117 bp, Glycine max
ccaagctgatccttaagcggcgctttttggtttttttttttttttttacaacttcctcctatcagcatcagaggcatcatcaacatctccaacctgaatatcaatgttgtcgtgggc

SEQ ID NO: 83699 - DNA, 239 bp, Glycine max
aaaaaaaaaaaaaaaaacccgcgtttttttataaacgggctcccccaaaaaccctaaacaatctatattatttttaaaatttttttttttccccccccaaaaaaaaaaaattttctatccaaaaaaaaatatatttttcctccttctccccccaaaaaaaaaaattttaaaaagcaaaaaatttttttttttcccccccaaaaacattctttccaaaacccacacaaaaaaaattcccc

SEQ ID NO: 83700 - DNA, 63 bp, Glycine max
ccaagctggatcctcagagcggcgctttttttgtttttttttttttttttttttggacctgtc

SEQ ID NO: 83701 - DNA, 94 bp, Glycine max
aagctgggatcctctagagcggccgcttgtgtttttttttttttttttttggtcaacacaaccatgactaaactaaaattatttgtgaaacctc

SEQ ID NO: 83702 - DNA, 297 bp, Glycine max
ggaaaacaggttctgaaccatccctagacatattttatgcacctagactgtcttatagttttcataactacagggtttatcaagttcctccaaaactttttacctatcgcatagatggaaactgcaaacttccatgatttcatgctagacctttggcccaaaatactttaaagctccaatatgattctaacacattgcaaacattactgaggcaacatgggcctttctttcatcaaaccgattgtttatctttgtaagcacactctcataggtatgtaactgaacgtccatcttggt

SEQ ID NO: 83703 - DNA, 103 bp, Glycine max
ggctaacaaaaccttctctttttctcgcgtacacccaaacctgtcccattaaaactatgatcacggaatttgtaaccgttggatcatattgaaaattacacac

SEQ ID NO: 83704 - DNA, 299 bp, Glycine max
  unsure (1)..(299): unsure at all n locations
tataaaatgttaggacttaagctcattangagagcctaacccaaaagattagctcattatgtgggagagcctcatggcttaattaccaaatcaagtcttttattctacttaatttaggtaggactcttaacattgtcaccacctttaagaaccaacatccacagtgtctttcactccatagacattgacctgaaggcagccttttgtcctttgactgcttcactcacctatcagtatccaatntactccttaatccaacctatatgcagccttttctgaatctacacactcaataacac

SEQ ID NO: 83705 - DNA, 314 bp, Glycine max
tcctctaacatactaacacatgctaccgaaaatatactgtacaagacagagcaattagtgtatcattttgccactaaccatatacgttaatgtgtcacatcagaaataaacatcatatttgaatacttgattaatgaatcttgaattccctaagtccgagtttggtcatggcaaaatataaaaacattttaagaaatgaacaaaaaaagtaatataaaaacgacttgctgttacatttaaactaacaaaaagtaactgaagcattttatatttatttccgggagaacccattctttttaagatagttttattta

SEQ ID NO: 83706 - DNA, 396 bp, Glycine max
ggccaacaaagtacataagttcttagaaggtcgcttgacgcggactttctcattgtgtgcctattgggacctacatgtttaattctagcgaggtatgcgaacggggagggcaccgttctttactcttggaatctggcaacagaagtttatctccccactgtgaccaaaactctaggcgcagatgtgggctctcaaattgatgagcactaacgatagctgacattaatgcactaaaaactgccatgggggaacctcttttctggttcggaaacacactttacaatctccttttctgcctaaagaaactcgaatgtttcctagaacttgttcttatgagctttctttggagaaggttcgtcattaaactgcacaacattaacaccagacacgtttact

SEQ ID NO: 83707 - DNA, 57 bp, Glycine max
  unsure (1)..(57): unsure at all n locations
gctgatcctcagagggccgctnnttttttttttntttttttttttttttcgtccatc

SEQ ID NO: 83708 - DNA, 370 bp, Glycine max
  unsure (1)..(370): unsure at all n locations
tatgtggagaagcaacactctcacccatggaagcatcaactatatccacttcctccctaaccgagaggatttcagatttcctttggtgaggagtaatttcagcattcaaattaccacatgtagtttcgacagatttagattctccatcatgttccccactttctttttctgttgagcaattagcctgctcttggcaatcaccatcgtccaacaatcttgtcccttgcatcaattgtggggttgaaggagctggatatttatcatttccaggagacagctcatgatcattatcaacaaagctggatactttctctatatcaatggatactctactttcatgtngttcattgtctgtttggagctgcaacat

SEQ ID NO: 83709 - DNA, 318 bp, Glycine max
actcagccatagtccatgatgcatttattttgagatacagttttccatgattgaattcattttgaggggtataatttcactgtcacaatgatgaagtgagccagaattttcagaattcaccgaactagactaatagaaaacccgataatgtcaactaaaaatacttgtgatgatgggagaccatataactcactcatgcaagcatttaacgctgaagctttgcaacatggtgcacaataactgcataatctatgcactgatggagaataatctgtgccatcacacattcgaatttcaaacatatttgctgacatatat

SEQ ID NO: 83710 - DNA, 57 bp, Glycine max
  unsure (1)..(57): unsure at all n locations
gctggtccttagagcggcgctttnttttttttttttttttttttttttaaagcattc

SEQ ID NO: 83711 - DNA, 375 bp, Glycine max
  unsure (1)..(375): unsure at all n locations
gcgtacgtaagctnggatcctctagagcgngccgctttttttttttntnntttttttttttttatcaaagactccaacggtatatcatttcttataatccaaaaaccctaataataattccactcggtctaatctaaagcagcagcagtagcaacaacaacaaaaattaaaaggcttgagaaataaaataaaataaaataaaaaccacgaaaacacgaaacgagaagcataaaacaaagtcttatttctcaaagcagaagagcctccatcatcatcagtacctcctggtgaaggggaagttctgctgaacagggacaggatcaacctgtgtgatgccggggatgtcgttgataccgagggagtggagcatgtcga

SEQ ID NO: 83712 - DNA, 52 bp, Glycine max
ttaagcggcgttttttttttttttttttttttttaaaacaaaatgcacaatt

SEQ ID NO: 83713 - DNA, 201 bp, Glycine max
  unsure (1)..(201): unsure at all n locations
aaaacacacgactataatagcacttcgcanaaacacacacaaatatatagaaactcctcctaagtcatcctctgagcagcttccttggcaagaagcttctcctttgctctggtttcgttgggatttggatccatgatcccccacccacttttttgtctgtatattgggtgagtagcttgtgctcaaattgtgatcattttt

SEQ ID NO: 83714 - DNA, 101 bp, Glycine max
accaaagtttacggatcatacgattcaaacgttcggtggaaatttattttatttttaagttaagcgagaaatgacttaagtaaaatggcttaagcacgtcg

SEQ ID NO: 83715 - DNA, 247 bp, Glycine max
cgttatattaagtaaaagaataaaaaaccggcgagtcttgttggcgcatgctccactcggcataggagggatataactcgacgggttgaggtacgctctcttaattgcggcggcctggcgttcggattggctgtgtttgtgtccacgcagttaagttagtttcccgtgcttgtaccaggggctgactggtaatacgcgctgggattgacgaccgaatcatgcgaatgaacgactgttctgagacaaa

SEQ ID NO: 83716 - DNA, 72 bp, Glycine max
gactacgacaacattgatattcaggttggagatgttgatgatgcctctgatgctgatgaggaggaagttggt

SEQ ID NO: 83717 - DNA, 89 bp, Glycine max
gtacttcaacaaaatgattgtcatacacatgaccgatacaaattatacgatacaatgaagaatttgccagcggttgacttgtaagaggg

SEQ ID NO: 83718 - DNA, 100 bp, Glycine max
  unsure (1)..(100): unsure at all n locations
ggattaaatagaaatagagaacgaaagtacttannnaaaaaaaaaaaaaaaaaaaaaaaaagcgggcggtctagaagatccaagcttaagtacgcgtgca

SEQ ID NO: 83719 - DNA, 184 bp, Glycine max
aaaaggacaccgaaagggggcattgttggtgctatctttatcacccgacgttcatacacactctgccacatagtgagacccggtcgtgttgaatgaacaagctcatctaccaagtggaaacaggtgggacgaagaacgccatttataattctacgacgatggatgggcctgacataaatgctcc

SEQ ID NO: 83720 - DNA, 103 bp, Glycine max
  unsure (1)..(103): unsure at all n locations
gtgtgtaattttcaatatgatccaacggttacaaattccgtgatcatagttttaatgggacaggtttgggtgtacgcgagaaaaagagaaggttttgttngac

SEQ ID NO: 83721 - DNA, 257 bp, Glycine max
ggcccgttggacgaagctttggcttctctggctagcttaactaatcatcaaccatgtactgtcataagaccttgctttaactaaacccttttttaagccctgtgaatagagctgtactcccagtaatttctgtaccagtgcaggtgcatctaagctctgaaacacgaatacggactcttattacctggatactagcatcaatactggcctgtagctactgtgcagatccaatgcaactttaccctactaatgttttc

SEQ ID NO: 83722 - DNA, 304 bp, Glycine max
aacggttccttgcgggctaacaacttttcctattgggaagccgaataaaacctggcctaaatatgggcataacctgtttccgggggaaaattgtattccgttaacatttccaaacaaattacaacccgaagccttaaggggtaaaccctgggggccttatgggtggaccaacccaaaattattggcgtgggcctaattgccggtttacaagccggaaaacctgtctggcaacttcattaaataaactgcccaaccgccgggagggggcggtttgggatttggggcccaggggggttttcttttt

SEQ ID NO: 83723 - DNA, 414 bp, Glycine max
gggggaaaaaaacccccccttttttttttttttggggccccaaaatttggggccccaaaacaaaaaaaattggggggggtgcccccccccaaaaaaaaaactttttcccccccccatttcccttgggggccccccccccttgggggcccccggggggggccccattttttttttggggggcccttttccccccccaaaaaattttggccggggggggatttcccccccccccccccccccccgaaaaaatttaacccggttttttttttggggcccccttttccccccttattttttttaggggccccccccccctaaaaaccaaaaaaagatttggggggccccccttttaaaatataaaaaaaaccccccgcccttccccccggggggggggggcccccccttgagggggga

SEQ ID NO: 83724 - DNA, 57 bp, Glycine max
ccgctgggatccagtatgtaattgattcaattatggaatcatgaatagtcattgatt

SEQ ID NO: 83725 - DNA, 383 bp, Glycine max
  unsure (1)..(383): unsure at all n locations
aaaaaaaaggcccccccttttggggttttttcccaccccaccggccccgggggcggccccgggggtccccccggaatttccggcccggtccctgggggggtcccatttttccttttgggggggctttttaaggctgggggaaacaaggggaaaagcttttcccgggggaaaatttttttcccttcaaaattccccaaaaatttcgggccggaaaattaaagggaaaacccggggggccctaaggggggggctaactcaccttatttccgggggacgcccttcccctttttcagaccgaaaaccgttncccccccccccattaagaaagccgcccccccccggggagggggggtttggctattgggccccaggggggttttttt

SEQ ID NO: 83726 - DNA, 214 bp, Glycine max
atcaaacgggcccttttataaactttttgcaaccatacccttctttcttcttcttttacactttacccttaaaggaaacccccctatacgcacctttataaaaactcccccatacttccgttctcataaacccccccttttttttctatatcatacccccaacccttccaaattcttctacaaacagcccccttatatctttttttcaaaaccc

SEQ ID NO: 83727 - DNA, 139 bp, Glycine max
gggcaaaaacatccaacacccttgtgtcatctgaggaccctaatcggacacgtggagcgacccggcatatacgcgccgcgaccggcaggcgtaccaccttttcgtaaagggagtcatatttgagcttggccaaataata

SEQ ID NO: 83728 - DNA, 97 bp, Glycine max
ctaaattcaaagatcagtaatttgtatagcggaatcccaaagaaaacaaaaataataataattcaattagcttaggcaaatgattcaactaaacatc

SEQ ID NO: 83729 - DNA, 431 bp, Glycine max
gggaaaaaacaaattgactgtccttttgaaggaggcgataattcatgcaaccttatcctatctttgcaaatctctctgggaactccctcagagtgtttgttctgttggatttagtcacttgaccattttggagtaacgacaatggagtcatttgacgtttaatcaatccattgaaattccagggtttgtcccctttttttttgtttaaaaacatctacgggtgagaacttttgatctgcccctacgttcacttgaggcttatgcacaatgcctctcattgccccaacgtaaggctttgaggtaccaattgctatcttttgttatgaccctgtagctggtaacctatagggtgagaacttttaatctacccctaggttcgcttgaagattttgcatggcgcctttcattgccccagtttaaggctttaaggt

SEQ ID NO: 83730 - DNA, 88 bp, Glycine max
ggaaaacacagattgactgcccttttgaaaagggtgataattcatgcaaccttatcctatcttttgcaaatctctccgggaaccccct

SEQ ID NO: 83731 - DNA, 76 bp, Glycine max
gggccaaagggaatcttatatcattatgaacaagggcattagtgtacatacaatcattattgatacaaaatttcgg

SEQ ID NO: 83732 - DNA, 218 bp, Glycine max
aaaaaaaagtgaactgaataatcccctattgagtaattttgaaacctctctaaaaccatcgtgttttagttaaaattaacatgcttaatttcaatctgctgggtacagtatataaatacatggaaggctggttgcaactctcacggctttaatttacagacttagtaggtaagacttattgtgttaggggcattttggccctgccgtttaggtattcc

SEQ ID NO: 83733 - DNA, 89 bp, Glycine max
  unsure (1)..(89): unsure at all n locations
aagctaggatcctgtagagcggccgcttntttnnnnnnnttttttttttttttttttgaggagggagattctgttcttcccccttgggg

SEQ ID NO: 83734 - DNA, 64 bp, Glycine max
cgccggctcctccctccttaggaagcttctttccggccttcggcttcttctccgccggagcctt

SEQ ID NO: 83735 - DNA, 455 bp, Glycine max
aacaccccccccggttcccttttttttccctccaaagggtttcccccattttgggaattgggtttttaaatttttttttttccgtttatttttttggctaaatttttttaaaaaggggcctttccttttcgggcgggaaaaccctttttttttccattttgtcccaaatgaaaagcgggtttttttggtttttcatgggggcattttttgggggggttttggccggcctttttttttataaaaaaaccttccccgccgggtaggggggggcaataaattgttgaaaacattttcaaaccttggggccaaaaaaagggttgtggggggccctttttttggcccccaaaatttaatttttgcattaccccctccggggggttttaaagggggggggttgctaattttcttttgttcacgggaattatattttttttcaaaaacattttttttttggg

SEQ ID NO: 83736 - DNA, 105 bp, Glycine max
ggggaaaggctaggatgggggggactcccttctgcactctgagtgagttttcgaaattgtgaataatgcaaactttctcgtttctaacgttactttcagtgctgt

SEQ ID NO: 83737 - DNA, 109 bp, Glycine max
acaagggaattgaagaaattcaatttgtttggtcaaattccccaaccccctctctttttatttgttcactacgtattatatgcaataaaatattatatggcagaaatat

SEQ ID NO: 83738 - DNA, 135 bp, Glycine max
ggctcaccaaaaaccctctctccctttttttcccttcaacaaccagacagacttgtaaagatgacaatgacagtatgcgttttacaatacaaaaaagcccaacaaaaataggagagagagagagatttctcaatc

SEQ ID NO: 83739 - DNA, 159 bp, Glycine max
ggaagagttgtaatgccgcaatagacgaagcaaagcaccaaacatcaacacaattttctaagcattgaatgattaacaagatataaatgccgcagttccaatatataggggctcataaacatcaaaacaaaatttttaagcttcgtttactagcctaag

SEQ ID NO: 83740 - DNA, 461 bp, Glycine max
aaaaaaaaaacaaaaaaatcccccccttaaaaaaaatttttttaaaaccaaacccccccccttttcccggtaaaaaaaaaaaaaaaatccccctttttttttaaaaaaaaaccccccaaaaaaaagggggggggtttttaacccctttttcccccccttttcccccttaattttaaaaaaaatttttttttttttcccacttggggcccccccaaaaaaaaaaaacccctttccccctttttttttttttttttttaaaaccccggggggggaaaaaatttttttttttaaaaaggttttttaaaatttttaaaaagggggggttttttttcccaaaaaaaatctcttttaccccggggactttttcttaaaaaaccccccccccccaatttttttaaaaaaaagggtgtttctccctgaaacccctcccgagaaaaaaaaaaaaaaaaaaaaaacccccc

SEQ ID NO: 83741 - DNA, 103 bp, Glycine max
ggggtggacaaaagtttagggtgatgggaggctctcccggtcctaggactacatttccaaggcgttatgaagcgaaattgcattaaacataaacaaattctac

SEQ ID NO: 83742 - DNA, 283 bp, Glycine max
  unsure (1)..(283): unsure at all n locations
cgtacgtagcttggatcctctnagagcgccgctttttttttttttttttttttttttttggcattaaaacaaaaaagaaagcaaaattaatgggggctttttacagacaaaagtataccacacgaaaaccaaacacctgaaacacttacaatggaaaatcaccaactagaaaatacttaaacacagtaaatttatagctaggccacattctaagaagccccctttgtctaatcaacatctgtttcaaaatccagtccacaaacaagccgtgccacaacaatat

SEQ ID NO: 83743 - DNA, 224 bp, Glycine max
tttttttttttttaaacaaaatgagatgccttctgtcgtcgggtggcagccgcaccattctgttgtcttcttgcagcagcaccactctggggtcttgttgtagcagcacggacgcctggggggaccaccgaataattgaccggcgcctgcaggcggaccaccttttcttattatgaggagtattataacaggtcggaataatggtgataatagctgcctgcggg

SEQ ID NO: 83744 - DNA, 64 bp, Glycine max
cagaagaggttaatgaactcaaagggtgttggggtgtgcgtttttcttatgttatgttgctctc

SEQ ID NO: 83745 - DNA, 173 bp, Glycine max
  unsure (1)..(173): unsure at all n locations
agcttggatcctctagagcggccgcttnnnnnnttttttttttttttttttttttggaaaaaaaaatatattgaatttacatgattttcctcatcccgtggggagaatctgtacacaagttgagggtagtggtatacatttactcagattgaaatcatgttcagctggtggtt

SEQ ID NO: 83746 - DNA, 255 bp, Glycine max
aaaaaaaaacagcttccaagatgatcagatttcaaatttttgatccaataacaaagcaccctcaaacaaaattgaagggttgttcaatttggtttaaggggcataaaaaatttcaaaccctaacaaaaacttcttattttttaacaggggcaagaactttaggttgggaaccgagctttttttaagcaaccttttaagttttcacccttaatttggtgagttgcttttttttttggaaaaccaccggtgcctttt

SEQ ID NO: 83747 - DNA, 55 bp, Glycine max
gaaaagaaattcggaaaatggtatactcatgagcgccatcactatgcaaaaggtc

SEQ ID NO: 83748 - DNA, 317 bp, Glycine max
ttgtaaaaaaacaacgaagggggaaccccaaccttcccaatgaaaaaaaaaaaagagaaagggaaaagccggcgcttttaaagatccaaacttaacttcccctgcattccaacgcataagtttttttttggtgtacccaaattcaaattaactgcccgcactttaaaaacgcgttacctggaaaaccccggcggtacccaaactaattggcttggaagacattcccctttcggccagttgcgtaattaccaaaaaggcccgaacaattcccctttccaaccatttgccaaccttaattgccaaagggaaccccccct

SEQ ID NO: 83749 - DNA, 251 bp, Glycine max
tcactctacctcaaatcaaacagaaaaggttctttaacacatacgatatcttttataatcaccatatacccactccctcttctcctcactatatccacaactcaaatcaaatatactcttctccctatcaatactattataccaatacttattcctgaccaaaccctaaatctacacattcttaacattactacaacatcatattcattaaatagtaattatattaaattataatatacatcattccctct

SEQ ID NO: 83750 - DNA, 58 bp, Glycine max
aatcaatgactattcatgattggatagttgaatcaattacatactggatccaagcgaa

SEQ ID NO: 83751 - DNA, 331 bp, Glycine max
cgagcaattttaaaaaaaaaaggaaaaaaaaaaaaaaaaaaaaaaaaaaaaaaaaaaaaaaaaaaaaaaaaaaaaaaaaaaaaaaaaaaaaaaaaacccaaaaaaaaaaaaaaaaaaaaaaaaaaagccccccccctaaaaaaaaccaaacttaactaccccttccttccaaagaaaaaccttttaaaaagggcccccaaaataaaatccacggcccgtgtttaaaaaacgtcgaaacggaaaaaacccgggcttaaccaaaataaaacccttgaaaaaaaatccccttttcccaagttgcctaaaaacaaaaaagccccaaacaaacccc

SEQ ID NO: 83752 - DNA, 133 bp, Glycine max
  unsure (1)..(133): unsure at all n locations
gctcatctnaaaaaaataaaaaaaaaaaaaaaaatatgcggncgttttaaaagatcataactttaagtacccattctttcaaagttatatctaattgtgtggtgtcacctaaaatttaatttaattgaccgtc

SEQ ID NO: 83753 - DNA, 77 bp, Glycine max
  unsure (1)..(77): unsure at all n locations
ccgaaattttgtatcaataatgattgtatgtacactaatgacattgttcataatgatataagattcactttgncnaa

SEQ ID NO: 83754 - DNA, 266 bp, Glycine max
gaaagtgaaagggtttttggtttgttttcttgggtgctgcatgcactttcactcgtagaaccttgaaacgagtttgtgccacagtctccagcgacaacaactctatcaaatatggctagctttcttgctatcttgatggaggattttctgttcaagagaagattgccacttgaattgtggatctttcgtcagacacagtttcagatccaactgacacagtgagagcttctctggcgcgtgcttgaggtcatgacgatgttctatgc

SEQ ID NO: 83755 - DNA, 115 bp, Glycine max
ggggtgctctgctcgtgcctctagggttatcatttctccatttccattttctctctcacttttcaagaatcgtaagctatgggaaagtcttacccaactgtgagtgctgattacc

SEQ ID NO: 83756 - DNA, 84 bp, Glycine max
aagaatatgagttagaaaaaaaaaaaaagggaggagaaaaaaaaagcggccgctcgaattcggacgcgtgtgcggactcgtggg

SEQ ID NO: 83757 - DNA, 142 bp, Glycine max
gccagaatcagaaaacgaaagagggttttagcgaacgatcatggcatctgctagggttttcggagcgatcgccggagagcgtcatggcgcgcgtcaaagtcggcaaaaaaccgccgccgggccgtgcaaccgcggaaccgcg

SEQ ID NO: 83758 - DNA, 335 bp, Glycine max
  unsure (1)..(335): unsure at all n locations
gaaatttgtttgtggcactttttgtagtctaggcattggattaaacaattggaattcaaagagatgtggttttattaaaaaaaaaaaaaaaaaaacccaannaaaaaaaaaaaaaaaaaaaaaaaaaaaaaaaaaaaaaaaaaaaaaaaaaaaaaaaaaccccccaaaaaaaaaaaaaaaaaaaaaaaaaaaggggccccaaaaaaattccccagggggtaaaattccccccccaatttggccccccccttttgaaaaaattaaaaaatnaattccaaatttcctttttttgttttcaacaaaaaccaaaattccaccccttttccccttttttt

SEQ ID NO: 83759 - DNA, 64 bp, Glycine max
aaggctccggcggagaagaagccgaaggccggaaagaagcttcctaaggagggaggagccggcg

SEQ ID NO: 83760 - DNA, 440 bp, Glycine max
  unsure (1)..(440): unsure at all n locations
actacagtatggggggaagactgggtctctatgcatcagaaagagggcatctatgagaaatatcagaaaagcgtcaatgccaaatattagaccctcgagaacttatactagngnnatgtagtnntgtgccagtantttctttcccttcttcacaaattaccannagtttatagnnctcgtaaagggcttctgaaacacacaannctcgtttaaaaattaatttcnnctgaacaaactgtcaaaattaattaatataatcattttagaaaaaaactgttttgagccttaaataacctctttttttcaaacaatacaatattttcaagtttgcatttgaataaagtattaagaaaattgtatattttcactagtaattcaatcccattttcttgtgattctcagaaccacttcattaatatcataaaacattatcatatcac

SEQ ID NO: 83761 - DNA, 109 bp, Glycine max
atatttgggccatataatattttattgcatataatacgtagtgaacaaataaaaagagagggggttggggaatttgattaaacaaattgaatttcttcaattaacttgt

SEQ ID NO: 83762 - DNA, 135 bp, Glycine max
gattgagaaatctctctctctctcctatttttggggggcttttttgtattgtaaaacgcatactgtcattgtcatctttacaagtctgtctggttgttgaagggaaaaaaagggagagagggtttttggtgagca

SEQ ID NO: 83763 - DNA, 258 bp, Glycine max
gacgtcacgtttgatattgcagagggatgttgagagcaccaccctcatttgattgcatagcgttattttacgtataaccatacatggcttcgactgccttgggaaacgagataccacaccgcactgtggcctacttgtatgtagacaacagaccccaaactgtcttcattgactctctcggcaccggcaataataccatcatctttgaggacgccggtggcttcactgctacatgcaaattgctgcacggtcctggct

SEQ ID NO: 83764 - DNA, 383 bp, Glycine max
  unsure (1)..(383): unsure at all n locations
gcaaaaaaacaacagaaagggggtctcgggggaagtgtaaagcaagcgaaaacccctatcgggcgccctgcgnttcttttgttccgtgtttttgcattcaaggatgnggagtctcanagtgaaagcaacgcacctttgttgtcaaaagttatgggggtcgtacttggatcccagaggacaaagttgacccangttagaagtgaaagttttttggacgatcaagaaccgtcacatcatgaagaatgtgaaaagacctgtgagagaaggagacattctcaccctactcgagtctgaaagggaagcaagaagattgcgctagatggtctcttttttttggcttgcctccaaattcgaacaaaagcaatatttttcttgatatttat

SEQ ID NO: 83765 - DNA, 101 bp, Glycine max
gtagaatttggttgtgtttaatgcaatttcgcttgataacgccttggaaatgtagtcctaggaccgggagagcctcccatcaccctaaacttttgtccacc

SEQ ID NO: 83766 - DNA, 91 bp, Glycine max
cggtggaatccggcgcccacgcgtcgacggtcaagcacgagtgattatccatacccacaacaggcaggcccagaggtcattttaacactat

SEQ ID NO: 83767 - DNA, 57 bp, Glycine max
cgccccaaaaaaaagccgccattagaaataacataatcctatttgtacaaaaaatac

SEQ ID NO: 83768 - DNA, 51 bp, Glycine max
ggacccaataaaaactttgcacttttgggttcttaatgtcagccctaatcc

SEQ ID NO: 83769 - DNA, 339 bp, Glycine max
  unsure (1)..(339): unsure at all n locations
ttttaccggtgncgtacccttgtgttttgggttgcagtcgtaccttttttttttttttcttgctttttttctgtctctttggaaaaaccgggtatttttaacccggtttttaaccccaacaatttaaaccttttatggggcttattagagcccgggggggggggggaacccccttttttcaggccaaaggggttttttgtttaagggggggagggaacacccgtccccctttttaaaaggggaaaactttggggggcgaaaaaattaacaaaaaaactatattgggggcgcgccccttgtcgggttttaagggaggtatttttttggggcctttttcaa

SEQ ID NO: 83770 - DNA, 64 bp, Glycine max
aaaaacgagccttatcatcttgatgatcctttttgtcttcagctgtatcttcatcaacttccac

SEQ ID NO: 83771 - DNA, 61 bp, Glycine max
taagcttggatcctctagggcggccgcttttttttttttttttttttttttttttttgggg

SEQ ID NO: 83772 - DNA, 319 bp, Glycine max
aaaaaaaaaaaaaacccctcaattttttttttgggaaaatttaaaaaaaaacccccaaaaaaatttttttttactaaaaaaaaaccctggtaaaaaaaaataaaaaaatgggggcccccccaaatttttataaaaaaaaattttttttttttttatttttccccaaccccggggttttttttttcccaaattttttttttttttttcctcccacttggggggcaaattttatttcccaaaaaaaaagacccccccccccctgagaaaaaaacaataaaaaaaagttctttttctttttaaaggcggttttttttttttt

SEQ ID NO: 83773 - DNA, 57 bp, Glycine max
  unsure (1)..(57): unsure at all n locations
agcttggatcctttaaggcggccgcttnntttttttttttttttttttttttttggg

SEQ ID NO: 83774 - DNA, 417 bp, Glycine max
accttcaatatattcatctaattttataattattctttttaaataaattataatttaattatttttttattttttatttttaagctacttcaacaataataccaaagcacttataatttaataagtcaatttttaacttctaactaatttttcaatttcaacttagaatcacgtgtaaccttaatctacagtaatattattaataaaacgcacaagttgtgcttcagttacacgataacaactcggtgtgtacatgacagcgcaacacgtggcctcagtcacccccacagaagacacaaaagatcatccacaccttataaatcgaatttgatactatacacactggtaatgcataatgagatacgaaacctatcctagaacgaatacaaaatcatagcaagcaaagtgctggattta

SEQ ID NO: 83775 - DNA, 136 bp, Glycine max
agcctggatcctctagagcggccgctagcggttttttttttttttttttttttttctaggtctcttgacgggtaagtctggggactctacaacgttttccgcagccatctttctctgtgaactgagtagggactcc

SEQ ID NO: 83776 - DNA, 420 bp, Glycine max
cccaaaacacgaatcctagcatggctaacttacctaacaaaaaatcccctcgacgtgctatccatcaatctaaactagcctatgtgattcataactcccacatctataaaaaggagccgacccttaatcactagggggcaaaggggcgggagaggctaccctcctttgctttaacacgacttaaaatcggaaatgaatgctgcttataaggagcaccataacttcttggcactatgtggccagagccaatcctctggccaaaagggggaccacttgctgggaaatccaattttttacaattcaacacaaaactggaaagtggatactgcttaacccgtgcattaaaaatcctgaaatgccaaggagaatcagagaaatcgtacaattttcttcagcaaaaatcttaattactctaaaagc

SEQ ID NO: 83777 - DNA, 269 bp, Glycine max
acaaatttgattatggggagattaaatctcctagtggatttcactatacgctgcttcatgcacagctttaatttctcttttcttaagggggccgtaccatcttgccgctgttattatccctctaccatctattacgcccattcatgccaatgtgaccaaaaaaacattaaacccacattaacaaaccaaatacagccccacctattcctatcccattggaaggaagatccatactgggagggttatttattattcttccttctcgaaac

SEQ ID NO: 83778 - DNA, 323 bp, Glycine max
gggcaaaaacttgaaaaaatttttttggtccaagggttcccttttcccccccttttaaatttaaaggtttggggcccccccttttttttgggggggttcccccccaagaattttcccctgggctttactttttagggggcccttttgggcttttttccacccccccgggcccggggggcccccccgaatttttggggcgggtcttagggggttttcactttttctttatggggggctttttaaagccggggcaaaaaaggggaaatggggtttcctggggaaaatttttttccctttaaaattcccaaaaaaaatagggccgg

SEQ ID NO: 83779 - DNA, 67 bp, Glycine max
ggcaacaggggaaccatacgagaagatccagaagtgggttttcgcttgtgatgaccaaaggtcaatc

SEQ ID NO: 83780 - DNA, 153 bp, Glycine max
tttggcctccttggcacacaaaataaacaagtatgccgctactctgagactccttcaccgctacaatgagtctctagtaacccacgcacccattgaatgtgggaggatccaccaacctataatggacctttgacctacatagatataaccata

SEQ ID NO: 83781 - DNA, 97 bp, Glycine max
ctattccatatttatgaaaataaaaaatggtgtttatgtttaatttctttttctgtttcttttttcctcaggcgggtgacgaagctttctctttctc

SEQ ID NO: 83782 - DNA, 423 bp, Glycine max
cttattaagagggatattaacctttactagacacccccacactttaagatatttcagatttggttctctttttctccatagctcataaagattttttttttgtttataagatactcttttaagaatactacatgcaaaatataaagttttaccaaagggtttattttattatttggggtgttatattttcacaagcttatcttttatcaatgagttataaataaagagacaatcagtcaacatgtaataacaaaatacttgcagtagtaataataacgttaaacaataaaaattaaaaaccaaacaacaaatgtcctgatttttaaagacttgtgttcacaggatcatttgaccaagtaaaagatgaatgaaattagaagtatgcttttagtttttcacataaactaattctaaaagcatttt

SEQ ID NO: 83783 - DNA, 150 bp, Glycine max
gttcgttcgcgacacagcttccaccttctgcgttcctcgtttgccgccgacgaccaccacaacgcaccttcaccttcacctgacctaaccgctcacaacgaaccaacaaacctgagacattgccgcacgaaatccactgattttaacctc

SEQ ID NO: 83784 - DNA, 264 bp, Glycine max
cccgcgttcgaacggttgaaagaagacaacctattgtggttttcgcagagagacaaattggggggttgagcacatagaacgatggggttaggttggttcaggatcaagttttaaattttacttgctcgtgcatgcaaccacacaactattgtaaacagaaaaccaaatctttttcattgtcgtctgcttagatacttcttcaacatgataaacatgcttatttcatataccaaacaatgattgcccttctcttctttatgagat

SEQ ID NO: 83785 - DNA, 494 bp, Glycine max
gcacttcaattgcaatcaaattagttcattctctttgcgcagttccctacctctcctttcaagatgcagatcttcgtcaagaccctcaccggaaagaccatcacccttgaggtggaaagctctgacaccatcgacaacgtcaaggccaagatccaggacaaggaaggaattcccccggatcagcaacgtctcatcttcgccggaaagcagctcgaggacggccgtaccctcgccgactacaacatccagaaggagtcaacccttcaccttgtccttcgtctccgtggtggcatgcagatcttcgtcaagactctcactggcaaaaccataaccctagaggtcgaaagctctgacaccattgacaacgtcaaggccaagatccaggacaaggagggaatccccccagaccagcaacgtctcatcttcgccggaaagcaacttgaggacgggcgcaccctcgccgactacaacatccagaaggaatcaacccttca

SEQ ID NO: 83786 - DNA, 51 bp, Glycine max
ggattagggctgacattaagaaaccaaaagtggaaagtttttattgggtct

SEQ ID NO: 83787 - DNA, 57 bp, Glycine max
gtggaagttgatgaagatacagctgaagacaaaaaggatgatcaagatgattagact

SEQ ID NO: 83788 - DNA, 81 bp, Glycine max
ggagtccctactcagttcacagagaaagatggctgcggaaaacgttgtagagtccacagacttacccgtcaagagacctag

SEQ ID NO: 83789 - DNA, 410 bp, Glycine max
tcggatagaacaacacagtacggatctcagaacacaacagaaagggtagttcagatggtgaagccggcattctttggtatccacacctcaatcccagatcacgctctctgcgaatcattcataatgcctgcactctccattgatcattacaggatgttccaagcagaatccaagattccctcgggagactctcaccataatcgccttattacacttcaattatttggtcatttttaagttaggggagaggcccagtctattaaactttgataccttgttaaaccattaattatttcaagggacgccccttgtcgcgtcacttttagaaattatgtatcttgtggtacgatcatcctgatctaaaacaattaatgtgcccgaataatccgtggtgtactaataaacattga

SEQ ID NO: 83790 - DNA, 133 bp, Glycine max
agacacaaaaacgatcgcctaagatggggaagaaagtataaatttgaaagcggccgatctataggatacaagcttacgtaggcgttcatgcaaaatgactgctctcttataagatcaccaaaagacaatccag

SEQ ID NO: 83791 - DNA, 67 bp, Glycine max
ggcgccaaacctgtctgtttcacttcccatttcaaaacccaccaatccatcaccagataacacacag

SEQ ID NO: 83792 - DNA, 485 bp, Glycine max
gcagactcaaatttaaatattgcaaggctttaacgcattcttataaattacaagattgaaagaggtgctctgaaatttagcatacacatttcagaggcatattataaataataaaaatcactaaatcagcacatttgagagaagaaaaaataccaaaagtccaacacagaataggaatgtaaggcactaatattccagccactgtgacgggtaaagaaccatataaacagagaagatgagggtggcttgctgagtgcgagtgaaggagtatggggtgagggttctcttagacaagtcgtttcagtatattaaaacaaggtcaaattacctatttgatcattatcttatttatttttccactttgatcccttatcttttgaaaaatcgatttagtcatttatgtctataaagtgggtcaaaataatcattacatcaatgcattcatacccggtcatacaaaatttaatagctcagattaaaattag

SEQ ID NO: 83793 - DNA, 151 bp, Glycine max
cagttgggtgaagactaccgacaggaacacggggtacaactccacatagattaaaaccaaaaagaggggccggtctaaaggatccaagcctacctactcttgccttccagatcttaactcttctatagcggcacctaacttcaattcacta

SEQ ID NO: 83794 - DNA, 239 bp, Glycine max
attacatcttttttctgagcacatcagtgtttattatctttaactacctatctcgattctctcactattagaaccatgaatctcgctaaaaccggggctcaattcatcattccattcaatctaagctttcagttaagcgaatgccaccgacaacggcgaagcgagggtctgtgtcaagcttatgaaagaagggcggcaccggcggctgatgaaccctgaatgccttacaaaaacaacac

SEQ ID NO: 83795 - DNA, 538 bp, Glycine max
ggtgctccacctccacattgctgaaactctgaacagagagagtttcattgatcaaggactaccaaatatttacctacggagctgcacgaaatcaccaccatatccggctcggattccgactgggacgattcggaagaagaccccggtttccacttgctagaagaaactcatagcacgttcttaaacctctcacttaagcacatagcagaagcgggtgggacggctagagaaattgaaagtggacgaatgcacgttgtatccgaggaagaatggcctgaggctaactggaaacaacgacacacttatacaacgcataaagaagcatttagagtaatcaatatttttgctaaagaaaattgtacgatttctctgattctccttgggatttcacgattttaaatggaagggtgaagaagtatccaccttcaagctctgtgttgaattgtaaagaattggagttctcagcaagtggtccaccttagtgcaaaaggattggcgcaggccacataatgcatgacagtgatggtgctactaaaca

SEQ ID NO: 83796 - DNA, 300 bp, Glycine max
gggagctctatctaactgttggaataattataaaatattaaatgaatgcagaatgatagtaatcatcatctaactcaaaggccaagcgttgtcttgatccatctccccactttgtcactgaaattcagaaaaatgggctgcccctctatacgatccaacattacctccgcctgcatgcaacgtgcttcttcttttattgtgcaccctaaacaaatctaaatctccaacccttacaacatgtctactggtaaaacccatacctaacccaactgaatcggctgtcagcacacatctctcatg

SEQ ID NO: 83797 - DNA, 467 bp, Glycine max
acactaactaatgtatgccaatggttatatctctgtaagtgaaacaaccattatagaatggttgctactataactttaaattgatgagtgaggtaatagtgtaacattgtagcaatgaagtattctaagattattgtcaaaaaaaaaaaaaaaaaaaaaaaaaaaaaaaaaaaaaaaaaaaaaaaataaaataaaaaaaaaataaaaaaaaaaaaaaaaaaaggggataaataaaaaataataaaatataaaagggcggcccctttaaagaacccaagtttacgtccccggggttgggaacttaaaattttttttttggggccccaaaattaaattctcgggccggctttttaaaaacgttggatgggaaaaaccctggggttcccaaaattaatagcctttgaaaaaatcccctttttgacaggtgggtttattacaaaaaggccccccccgattccccttccaaa

SEQ ID NO: 83798 - DNA, 69 bp, Glycine max
agggattgacctttggtcatcacaagcgaaaacccacttctggatcttctggtatggttcccctgttgc

SEQ ID NO: 83799 - DNA, 386 bp, Glycine max
gagcaacatggtgaagctggtggagagatttacttgccagaagcttacgttagaaccaagaggactacttaatggagcaaatcagttggaagaacttgtagctagcttcccaactggcttatctgagtgtggagaagcattatcaagccttaggagtaggagaacgagtactgtttgtgatgaatgtctatggtttaagaaatctgtctttagtcaacttgtgtgttttgttattcagttctcagcaataaactgctctggcaatctagtttcatgttcaaaaaaaaaaaaaaaaaaaaaaaaaagaggaataatccaaaaaagaaataaaaattaaatggacccggggaaaaaataatcaatttaaaatttaaagcggccgcttt

SEQ ID NO: 83800 - DNA, 309 bp, Glycine max
ggggaggcatgtattttcaactttgataaccaggcgcataagctgtgattgtccacaacatgtggatagcaggaaaaacgagtgcgttcgttatcaacgacccatcctttgtccgctatcactcccatgactcttcttcttattgtgactcgacactcttcaaccactcaacaaagtgcatggtttttagtggttaaaccatggcgttcacatactctatgcatttatctcacacccttctttcacgtgctgggttccttcataggaggtcctctgaccgcgtcctactctacatttgcatcattctgt

SEQ ID NO: 83801 - DNA, 273 bp, Glycine max
ggccaaaagcgaaatccgaaacgagatcgttagagtgatggtttgttgaatgccatggcgagagtgaatcacacgccatcttctcacaaatacgctcaaaagccatcgccttgcgcatactcttccactcaatcgccatcacattcccatatagctaggactagagataagcagatagctcctcaagttgagcctcatgatgatcctaatgctcatgaacagaataagatgcgcactaggtcgctaactgagattcttcatgagaataggaat

SEQ ID NO: 83802 - DNA, 97 bp, Glycine max
gagaaagagaaagcttcgtcacccgcctgaggaaaaaagaaacagaaaaagaaattaaacataaacaccattttttattttcataaatatggaatag

SEQ ID NO: 83803 - DNA, 245 bp, Glycine max
gacacgcgtcttgtgatcactcattgcgtctggtacgctagactaaatgcacgcctttacagggggcgctgatgttgggtgcactagccagcttcttctttcacctttcactctgcatatctgttctcctagaaggccatagttacctccgctcacagtgatcatgaggccttcctatgggagctttaagctgccgattcattcactgtcaccagtgattcgtctcgcgaagtttttggcaggag

SEQ ID NO: 83804 - DNA, 401 bp, Glycine max
agggggggatccgtgtcccgaaaacgcatgtttaatgggcaactaaacagacaaacccttgatccttttttgcgactactccagtccggttctggtattctctcactcgcgatttcgtctattcttgtttggtgaaggggaagacctcgctcactttgatcttcaaagctcataacgcgttttgaagctattgataaatgaagcatattatgaagatttcgacattggtgatggccactactgcattatgggatggccttctacaaacttctatgattgcatgcagacatacttggttgttacccatatattttgttgagtatttaggatgctatggtcttttaatggttggagtcggtctagataaatttaccaacctgtccttaagaagctctattatt

SEQ ID NO: 83805 - DNA, 537 bp, Glycine max
gacgaaaatgaatcttcattgtgcttctcttgctgcaacgatatcttccgtttgctccatcaatgaagccacacacaagtctcgcacgcttcaaaagcgagtcaactcggacgcgccaatcaaactcagcaccgagtttctctcccatgactcgctggaacccaccaccaaaccatgcttctgtggaagaagacacttcattgaagctgcaacactgggaactaccctatttccaatacaaccctccagagccaccaacccaccacgtgaatacacggctttgcttaaaaagtttcatccaccaagacctgattggtacgaggagttctatgcttcggttatgaattcagctactaaggattatgaagctgaggttgcaatgtacaagtctcaaatcttcggtaacttgaaggggaagggtctaagaatattggagattggcatcggaaccggtcccaacctcagttattatgccagtggctctagtgttgaggtcgttggtattgatccaaacccgaagatggaaaaatatgctcg

SEQ ID NO: 83806 - DNA, 256 bp, Glycine max
ggaatgagcaaagcggacatatcagattccatgtgggagtaatacagacacgtggagctacccgcaagaaaattgcacgctgcctgcatgcgtgccaccttttgctatattgtggcagacgaaaggccgcgtgggtcaagcccataattgcggaccgggacaagaaggcataccatctcaatctatcacgagatacaatccagctgggtgtagtgatgggcctgggtggcctctggggggaactgacttacattaa

SEQ ID NO: 83807 - DNA, 490 bp, Glycine max
cccaaaaaaaaaaaaaagggccttttccgggtttttcacaatggcccccccccgaaaacctaaaaaaaacatcccaccccgcccccccattcaatctttccaaattccaaaaaaggggggggaaaacccggggacccttcccctttaaattttgaccccaacccaccccttgggaggggaccccccccccccccccccgggttaaacgggaaaaagggaaccccccttcccccccccggggaacccgggggggtaatccccttttttgcccccccaaattaaaaaccccccccatgggtggcccccccccccccaggggcccccccgggttgggaaaaaaaaacccttgggggcctcccgaacgggccccttaccccgggggcccttttcttttgccccgaaaccaaatccccccaaacccttttaagggtttttaccccccttggagaaaggggacccctttttttggggtcccccccgggggcccccc

SEQ ID NO: 83808 - DNA, 63 bp, Glycine max
aacatacaacttatttgttgtgtgtgttgatgcttaacctttttcttttcattcgaattgact

SEQ ID NO: 83809 - DNA, 177 bp, Glycine max
gaacatggaacttgattggcagagcagttttttggtgaaaactgaattacaaaacacacaagttgactaaagacagattttttaaaccataaacattttttaaaaacaggactcgttctcctactcctaagggttgataatgcttttccacactcaaataaaccacggacccttggg

SEQ ID NO: 83810 - DNA, 274 bp, Glycine max
  unsure (1)..(274): unsure at all n locations
cgtaagctagcatcctctatagacgccagccgcttttttttttttttttttttttnnngagaagataggnaagtggttttttcctctccttcggggggttgattctttcgtacgcttgtcctgcttttattttgccggaagtgggggggtgcgatctgatgaatattattctaccccgaagaaaaaattctcagcagcattgggaggtctgctctccgcattgcaatagctcccctttgacaattccacacaacccgacacctgggtccacacc

SEQ ID NO: 83811 - DNA, 115 bp, Glycine max
ggagcaacaaatacgaatactatgattagtcatccatctataaatcggaaacaatgtttgaaactttccgcatgatgtaaactcatggccccttaatgtgtgttggttttagcgt

SEQ ID NO: 83812 - DNA, 51 bp, Glycine max
  unsure (1)..(51): unsure at all n locations
gtnaggcccgtgacttgactgatgcccttctggggggtctgcaatcttcgt

SEQ ID NO: 83813 - DNA, 546 bp, Glycine max
  unsure (1)..(546): unsure at all n locations
acgtaagccttgatcctctagaagcgccgctttttttttttttttttttttttttttttccttttttttttttctttttttttttttttttttgggggttttttttttttggggtggttttttttntttttttnnnttttttttttttttggtgtttttttttggggttttaatggttntttttttggggnaaaaaaaggggggggaaggggggtgttttaaaaaaaaaaaaaaaaatatttttaaaaaaaaaaaaaaaaaattttaagaaaaaattttttttgggggggtaataaaaaaaaatgaaaannnnnggggatttttaaaaaaaaaaaaaaaaaaaatttaaaaaaaaaatntttggtttttttttttttatttaaagtaggttttttttgntttttaaaaataataaaaaaaaaaaattttaaaaaaaaaaaaaaaattttttatagaaaaataaaaaaaaaaaaaaaaggtgtaaaaaaaattttgtttggtttttttttttttaaaaaaaaaaaaaattttttttttttttaaaaa

SEQ ID NO: 83814 - DNA, 348 bp, Glycine max
  unsure (1)..(348): unsure at all n locations
ggnannntgggtttnnnaaacccccccccccaaggggccccccccccccttttgaaccccccccccttaaccccccccccccttttggggccccccccaaaaaaaacccccccccccccccccatacccctcctcccttgccgggggggaacttaaaaaaaccccccccctcccccttttttggtcccccccccccccccccccccccggggctttgccaaaaattttttttttaaaggaaacccccancccccccccccccccgaacccaccccatatttttaattgcccctgttgtgggcccgagcccccctttccccttttttgggggccccccccccccccccc

SEQ ID NO: 83815 - DNA, 91 bp, Glycine max
ctatccgagttcttgataccttatctctctttgcagccaagggcattttcttcttgtgttccttttgtctgttgcttaacccacccgtctt

SEQ ID NO: 83816 - DNA, 485 bp, Glycine max
  unsure (1)..(485): unsure at all n locations
acgtaagctaggatcctctagagcggccagctgnttttttttttttttttttttttttttcggcttaaaacacgaacaatcaaccttccatttccctcttttcaagcggaagacacccacaaacaaggctacagaagataaacttctctgacactgacagaagcgtttgaaggttaacattggcgctcccttgaaaagcagaagaaagcaaaatatgtacctaaactatggttctaaatcattggctttcagatattctttataagggccaaactcgggcttcaaattggatacaacttaaagatactgagttactgaccagccttagcagcctaacatacaacctaacacataataccaatgatgcttcaagagaacgttatcttctgcagcctagcttgggagcggcctccgcaatccaggaggcctgtcgcataagaccatacctgggcgtaccctgcttacgctttagtgccttaaagaga

SEQ ID NO: 83817 - DNA, 325 bp, Glycine max
acccagaataatttttaatgatagaaatccatacaattgacaattggtcatatcccttacattgcaagtaagccaccacttaaaggcttaaacaataaatttagcaggatacaaacgcagcaagttagataataaattaataaataaaaccggcaagtaaatgaaaaaggcttcttccatacacgaattggcaacccactacatttaacatcatattcagccatcgatggggtgaccaaaaaaagcaaaaaagcgaacacctggcgctaaattacaccatcatatttcacctaacctaagaactatatatatatatatggtaatg

SEQ ID NO: 83818 - DNA, 55 bp, Glycine max
attactagtatagtaatcgattccctgggtctatgaacccctccaactaaatcca

SEQ ID NO: 83819 - DNA, 331 bp, Glycine max
ggggctaactcaattaaataatgaaagaagtaggttgtttattgttcatgtaatataatcttgaatattttggttgtcctcatgtacaagtaggaggcaattgcttcaattttacttcaccacttgaaaaggagaggtccggcgtttaattggtccggacgcttagaaaagaactgcatccatttttaaaggccccctaaagctctaggcttttttgttttcccaatttttgatgaaattggaattatactcttgcacgtgtaggggtgtctctctctattttcgacccctcagattcccaaaaataaaaaagtggtcctagatgtactta

SEQ ID NO: 83820 - DNA, 548 bp, Glycine max
  unsure (1)..(548): unsure at all n locations
ttttttttttttgggttttttttttttttttttttttttattttttgggttttttttttattttttttttttttttatttttttttttttttttttttttttttaaaaaaaaaaaaaaaatttttttaaaaaaaaaaaaaaaaaaaaaattttttttaaaaaaaaaaaaaaatataaaaaaaaaaaaaaagtttttttggaagttttttatatattaaaaaaaaaaaaaattttaaaaaaaaatttttttttaaattttaaaataaaaaaaaattaatgtggttttttttaaaattggaaaaaaaagggggggaaaaaaaaaatttaaaaaaaaaaaaaaaanttttttttatatttaaaaaaaaaaaaaaaaagattttttaaaaaaaaaaaaattgaataagaaanaaaaaaaaaaaaaattttttaaaaaagtagaaaaaaaaaagtgtggtaaaaaaagaaaaaaaattttttttggaaaaaaataatttnnaaaaaaaaaaaaaaaaaaatgtgggggaaaaaaaattttaagatgggggttt

SEQ ID NO: 83821 - DNA, 157 bp, Glycine max
ccgcttcttggaaacgctttcttcttctacgagggtgggctttctcttattcttctttttttttttttttgctttgggggaattttaattttgtgttgggtgtgtgcgactttgacagattggaagtggaaggaaaacgcactttaccactcacatc

SEQ ID NO: 83822 - DNA, 254 bp, Glycine max
ggtctggaacctgtatgtttttcccattcactaagtgtatgctttcttgtaccacaagagccacacttgcacatgactctgcacttaaggcaatcacaagttgctcaatggaattcttctcggaagaaatcaagtgcattcacctaaggttcaaattataccaacacggccaactccacgaccactgggtgcgcaccaccacttttgtttctcttcgcattttctttcacccgcacccacgataactcccacca

SEQ ID NO: 83823 - DNA, 390 bp, Glycine max
ctccagagcggccgcttatttttgttttttttttttttttttttaacggtcattgaaaatattatattaaactaacaatggagatattttaacaacaacattctccatcaaaaagaaaaaaagaccaaccttgtaaaactttaaaactctcatcccatttcattgcaaccccaccaaaccacaccaacacacaattctccaaccaaaaaaaaaaacaattttaccaccccaacaaaaccccaataaataaccttacacacctacttttaaataacaaaaaaaaacaacctctccaaaccaaaatttatttttttccatcaccaacataaccccctcaaccattttcaacaatattcgccaaaaccataattaaaactacccccttcctct

SEQ ID NO: 83824 - DNA, 252 bp, Glycine max
cataccataggggaggcacaaatagaagcattggcgactagaatcaccaacaactagactcagctgaaatggcctaaccactaacggcatttgtcgaccttaaaccttcccctttcactgacttcaagccctgactgctatgcctagcctctctatcaaggaactcgttaatcattcagagttaatcacattggcaaaaagatcaaaaccttacttccttatggaaccactcctgtcatcaatgtgatggat

SEQ ID NO: 83825 - DNA, 106 bp, Glycine max
ggtgatcctacactgcaccctctgcgctcctgttcgaaccttgccgccgtcatcgacaagaaggaccaaatttgaatttgaaaaaaaatggaaaaaaggaaggggt

SEQ ID NO: 83826 - DNA, 265 bp, Glycine max
gttgtccgcttggcaatttttgttgtaaaaccaccgcttaagcacacttccaaaaccccaccacccacaaaaagcgaagaagcttaaccaccacccaacggtattgaagacagaatggaccgcgtgtcgttcacgacggaataattggacggggcccttatgaccccggaaaaaaatttcccggcggggtacccaaacttcctaatggcctccgccccccggattccgattttcggaaccaaaaaggtttttttcgccgtaaccg

SEQ ID NO: 83827 - DNA, 156 bp, Glycine max
gatgtgagtggtaaagtgcgtttggcttccacttccaatctgtcaaagtcgcacacacacaacacaaaattaaaattccccaaaagcaaaaaaaaaaaaaaagaagaataagagaaagacaacactcgtagaagaagaaagcgtttccaagaagcg

SEQ ID NO: 83828 - DNA, 334 bp, Glycine max
acttgtaaaaacacaccaaatttcgactccaaaaaaacaacaaaacgtggctatctttaatcaccatggttatttcataaaacaacctacttttcttttacacactacacatataccactgcgtaatttataatttccatgacctacctaatcctagcatcttctacttaattataaaccacgcaacaaccaatatcaaacacgattgcataactagacctatcatcttgttacttcaatctctaattgccctcattcttgacagcctacttccaatcatcacgcacatctcgtaaccagctcttacaactcttatttccattatcattatccc

SEQ ID NO: 83829 - DNA, 105 bp, Glycine max
  unsure (1)..(105): unsure at all n locations
gtaagctaggatcctctagagcggccgctttnnnnnnnnnnnnnnnnnnnnnntttttgggtttttttaagtatatgggttgggagggcagaaggggctgcaccc

SEQ ID NO: 83830 - DNA, 119 bp, Glycine max
tggtgtttttgtttttttcaggaagattgaagagaaacagagagaacagaggagtttgttttgaagttacaaagtttgagaagtggaaaagtcccttctgtctctttccacctacgacc

SEQ ID NO: 83831 - DNA, 65 bp, Glycine max
aaggttgatatcgattaaattttttttgtgatccatgttgattgagattattttttggttgatat

SEQ ID NO: 83832 - DNA, 438 bp, Glycine max
attccatagatgttattagcataacactcactccattcttgtcttatgaattaagcaaacaatttttgtcatcatcatcatcatcaagaatgagtttaactccattattcttaagagcattcacaacagcccaaaccttggtttggttcttaaatcctttcttcccaacttctttagttatgtttgcatgaatccctcttccttctccttcattaagcccctcaactttcagccgcctggccaatacctctccaacaacagctgctgcttttgcattgcaggatctgccacactcaagtgactctttaatggtgtgttctgcagtggatgatgatactacaatccgaccattgtttctatctacaacgtttgcagtaatgtactttaatgatatgaacaatctcagcacatatcgctttataaccggcattcttcaat

SEQ ID NO: 83833 - DNA, 77 bp, Glycine max
cgagacaccgtgggcgagacagcgtgggcgagacagcgtgggcgagacagcgtgggcgagacagcgtgggcgagaca

SEQ ID NO: 83834 - DNA, 75 bp, Glycine max
  unsure (1)..(75): unsure at all n locations
acgtaagctaggatcctctagagcggccgcttttttnnnnntttttttttttttttttttcgaagaaacacaata

SEQ ID NO: 83835 - DNA, 88 bp, Glycine max
  unsure (1)..(88): unsure at all n locations
ttttnttactcatctacctttggatttctaaaagtgccagatggatcatttgtaacaaaccaaccaagcctccatccaggaactatcc

SEQ ID NO: 83836 - DNA, 74 bp, Glycine max
cttttatttttgtcagatttttttactttgcggattgtgtttcataaatttaagtatgaatgtctcatctgtat

SEQ ID NO: 83837 - DNA, 76 bp, Glycine max
aaagaagtggaatggttgagtgatggcgatggtgataatcaatgtgtagttttgccatttagcttattgcactgtc

SEQ ID NO: 83838 - DNA, 61 bp, Glycine max
gggacaaaacaaaatacaaacaacaaccagaacaacgaatataatacagatatacacatat

SEQ ID NO: 83839 - DNA, 93 bp, Glycine max
ccggagggaaactttattatgaatatcaaaattcaaacagaatggtcacggaactaattgaagagctaaactcctctctctcctccttcacag

SEQ ID NO: 83840 - DNA, 137 bp, Glycine max
gaagaacgccttttactttgtttttaccccctagtgttacaattatcgcattcgtacccttctgaagtctatcgcagccgcacccttgtgacggcttatggaagccgtacccttgtgggaggttcttgaagacgaca

SEQ ID NO: 83841 - DNA, 130 bp, Glycine max
gtctaggcttttttttttttttttgcctctcaaggatattcgatcgtgacatgtattacaaaggtcgccacaataaaacacccactcatcatataccacgtcagcaaatacattcaaagctttcaaaaat

SEQ ID NO: 83842 - DNA, 219 bp, Glycine max
ttttttttttttctttttttttttttttaagaaatccccatataagcgattattttactaaaaagtatttttcaaatggaagatcatttaaactctaatattgcttttttcacttacaaaaacctgattcataaaacaacactttctcttacctaccaaaaaaaaacttattgataccttccttcccctttacaaattatccccaattaaacccctttt

SEQ ID NO: 83843 - DNA, 570 bp, Glycine max
cgtacgtaagctaggatcctctagagcagccgctttttttttttttttttttttttttttttcctttcttttttttttttttttttttttttttttggggtttttttattataatttttttttttttttttttttttttttttttttttttttttcccccccccaaaaaaaaaaaaaattcaaaaccccctttcttggggggaaaaaaaaccccccctaccaccaaaaaaataaaatggaaaaaaaaaaaccccccccccaaaaaaaaaaaaaaccaccctcccaaaaacaaaccaaaaaaactttttttttaacccccccccgcaaaaaaaaaaccggcaaacttttctctttgaaaaaaccccccccccccccccccctgttgtattccccttttgtaaaaaaaaaaaaacatttcctcctttttgcacacccccctaattggggcccccaaagagggccctcccccctcctgtataaaaaaaaaaaccccccgaaaaaaaaaacaccctcttttttaacaaactttacccgcggattttttaaaaaaaaaaatccccttttttcaaa

SEQ ID NO: 83844 - DNA, 121 bp, Glycine max
tcactagaatttctatatatttatacttaggatataataattctagagattatagctaagccaatatatatcataatataatatacccttttcttattcaaagaatttatggctatgcctt

SEQ ID NO: 83845 - DNA, 468 bp, Glycine max
gggcttacaagttgtttcggcaattacatataattgttgggctgcatcacaaattacatagaattgttgtttattatttgtaaagtctgggaattactataacaagaaagtgtacataaagatatcatacacttctttagttatggattattgcattgaatttaaaaaaaaaaattggcattattggttaattgatatacatgattagtgatgctagaataaatttttgatagtgtcatttacggatgtgatatttacttgttgtattggtaaatataatttaaggatataatatttacttattttaattaatgttttatatttttctactatcatgattgagtgtaaatctagcagatccttcccatgcatttgcatttgcatgtctagtaatttttttaattaaaatgattgacacaatatattttcaaagtgatctctattgtgaaaattgatttgattaaaatt

SEQ ID NO: 83846 - DNA, 79 bp, Glycine max
  unsure (1)..(79): unsure at all n locations
cctagagagggcgcgttttttnttttttttttttttttttnnntgggggcccacttaaaaaaaaagaatccattattgg

SEQ ID NO: 83847 - DNA, 198 bp, Glycine max
gcagatatagatataacaaacaaaaacgccaaaacgagttaacacagatttccacggaaaacgaacgtgcacaagcacaccctctttctccttcactctcttgaatttcgcgggaaagctatgaatgaagcttgtgttgtgtgtttgtcatgtcaatggtggtgaagtggatgagtagtagaagtgtctctttcgctc

SEQ ID NO: 83848 - DNA, 61 bp, Glycine max
ggagtgacgatgatgactgtgttgagttggtggtgttttctgtgaatcgcaatccccttct

SEQ ID NO: 83849 - DNA, 175 bp, Glycine max
tttatgatataaaatttaaggggggaggaaatatcattccagtccaaggggcatacaaaattaatggactcaacaaccagttacataaatacttaagaggcatttggtaaggaagatgatttgagttttctggaaaattttgggttgagaatatttagtttctcctgtttagtat

SEQ ID NO: 83850 - DNA, 475 bp, Glycine max
cataattggtttccattaggtacggcaagttgtcacttcctacttgaaacatagtagagactacaaatatcaagcttgtataataatacatcaggttagctatcagaagaaatgtgcatgaatcaaccgaatcaaatgattgaatataacgcaatgcaccagcacccatactactgtttgagcagcccaactatttaactattctccacagaaaaatctttaagccacacccaaaatcaggctggaagataccgcagcccaactatttaacgattctccacagaataatctttcagcttatcattgcagaataattgttccaaaatttcatacgcagttcattccgcatgcagaatgctatcatttcttgttggatgaccggaaacctccaaaccccatcatggcagcaacatcaggatcaatttcaggttcttcaactgccttctccttcttttcttttttcttttctcgacgc

SEQ ID NO: 83851 - DNA, 127 bp, Glycine max
  unsure (1)..(127): unsure at all n locations
gccgcgtcgtagctagatccttagagcggcgctnnnnnnnnnnnnttttttttttttttagctctaagcggcagtcaggtggccattgaaacaagcccctgctgttgactcttataatagagccttc

SEQ ID NO: 83852 - DNA, 469 bp, Glycine max
ccccaaaaccccttttttcagccttttaaaaaaccccaaaattttttcaaaccccccccctttctttttttaacccccaacctttttttttttttttttcccccccccccaaaacactttttttttccccctggggttttaaaaaaagaaaaggggggcccccccccccccccccccccccaaattttttttaagcccccccccccttttaattttccttccccggcgccaaaaaaaaaaaaaacctttccccccccccttggaaaacccccccccaaaattttttggaataaaagaggcgcctctcttaataacccttcaacagcgattttttccccagaagttttcttaaaaaaaaaaaaaagctcccccccccccccccaaaggggcaattttttcaaaaaaaaaccttccggtgtggcccccccccttttttgtttttctcacccccccccccccctggggcccc

SEQ ID NO: 83853 - DNA, 73 bp, Glycine max
ctctagagcaggcgcttttttttttttttttttttttttttttggggtcaacaaaggtgttgcccttgctcct

SEQ ID NO: 83854 - DNA, 70 bp, Glycine max
gtagctaggatcctctagagcaggcagcttttttttttttttttttttttttttttttacctctctctgt

SEQ ID NO: 83855 - DNA, 321 bp, Glycine max
aaaaaaaccccggaaacccatttgtttttaaaaaactttcttcccgcaccattgggagggggttttttttttgtttaaccccgaaaattccttgggttggggggaaaatttttccttttccaataccttgaggttaaataaaccccccatttttggggttgccgggggaacctaagtgggttttcacttgggggaaaacaactttttgggttttttgttcctcccggaattctttgacacccccacttgagcaaccggttcccttcctagcctttccttttgaataaattttacaaaaaccagccctttttcaaggggttt

SEQ ID NO: 83856 - DNA, 378 bp, Glycine max
ggcataagctcgatttttccctcctcaaaatacaaaaacataacaaaacaaaaaaaaaaaaaaaaactacctctacctgggaccatcaaagaaacaaaaagcactatgtttatttgatttatctttgggcacacaataaaacaaccgttggcattctcatcactgaagatttcgaagggtggagattgaaagcgataataaggagagtcatggtcgaagcctgcacacatgtagggcaatgatgaaacatagtaagaaggaccacccattgttcccatgggcatgggacataacctgttgttgttgcgagttgctaaatacaccacttggtgaggataacagtatgtttcaggatacacgtatgattgctgacgtgta

SEQ ID NO: 83857 - DNA, 216 bp, Glycine max
atttgttcaaacttttaccaatctttggttattgggggcccaccctggttggttgaccatatccacaaacattggcccttgggagccaaccatttcaaactttattaaggaagcatttaacttttggttaaaaaggaccattctcaaacttttcttttctttcattacataatctcataccttttttttttacccaccagaagtttaccttttggc

SEQ ID NO: 83858 - DNA, 220 bp, Glycine max
  unsure (1)..(220): unsure at all n locations
ctccttnttnaaaaattaaaaaaaaaaaaaaaaggggccgttctaaaagatccaagcttacctaccccttcattccaacttataacttttttataatgtcacccaaattcaaatcaattgcccgcggtttacaacctccttacctggaaaacccctgccttacccaacttaatcccccttcaacaaattccccttttcccaacttgccttataaccaaaa

SEQ ID NO: 83859 - DNA, 52 bp, Glycine max
gggtgcagccccttctgccctcccaacccatatacgtaaaaaaacccaaggg

SEQ ID NO: 83860 - DNA, 83 bp, Glycine max
  unsure (1)..(83): unsure at all n locations
gatccacatcctccacaacacagctccactttnagctgccattggtttttcttcttccatttctcttcccttctaaacctttt

SEQ ID NO: 83861 - DNA, 253 bp, Glycine max
caccggaagggggaccttcactgggaaattggatggttctgccaggaaaacgggcccggtgtggttggaaatggaggaccccttccaggaagaccttgctcttcccaccaggcccttaaaattttattccgtttaacaggatgaccattggattgcttaaaacggggcatcattttccagttctccctcccagtccattttacttgttgagcctagccctctgggcttacgtctgaggaagagcccttcgctt

SEQ ID NO: 83862 - DNA, 59 bp, Glycine max
  unsure (1)..(59): unsure at all n locations
ctttttgttnaaattttaaaaaaaaaaaaaaaaaggggaaaaattggaccnttnnttta

SEQ ID NO: 83863 - DNA, 62 bp, Glycine max
cccacgcgtccgcccacgcgtccgcccacgcgtccgcccacgcgtccgccgacgcgtccggg

SEQ ID NO: 83864 - DNA, 52 bp, Glycine max
taaaacgtatgcggaaaaaaaaaaaaaaaaaaaaaaaaaaaggcgggccgtc

SEQ ID NO: 83865 - DNA, 129 bp, Glycine max
ttctttcaattcaattgggtatatgagtttcaggttgggttaagcatttttaacaatggtctttatggattccgccccgcctcctggtttaaaatgggtaggacctttaagggaaggatggtttccccc

SEQ ID NO: 83866 - DNA, 171 bp, Glycine max
  unsure (1)..(171): unsure at all n locations
ggatagttcctggatggaagcttggttggtttgttacaaatgatccatctggcacttttagaaatccaaaagtagatgagtnaaaaaaaaaaaaaaaaaacaaaaaaaaacgcggccggtttaaaagatccaaacttacgtacgcctgcattccaagtcataactttttta

SEQ ID NO: 83867 - DNA, 76 bp, Glycine max
gacagtgcaataagctaaatggcaaaactacacattgattatcaccatcgccatcactcaaccattccacttcttt

SEQ ID NO: 83868 - DNA, 92 bp, Glycine max
ctgttaaggaggagagagaggagtttagctcttcaattagttccgtgaccattctgcttgaattttgatattcataataaagtttccctccg

SEQ ID NO: 83869 - DNA, 164 bp, Glycine max
tataacattaagttaaatatcaggtttgtttaattgtcaaattttggtaataaattaatgtttaaaaattcttaaataatttttatttaaaaaaatcaaaaacttccggtttgccaatttgtttgttttgaaaagaaaatacccccatttttttttccggggtt

SEQ ID NO: 83870 - DNA, 75 bp, Glycine max
  unsure (1)..(75): unsure at all n locations
gagacctcatgtcaggcgggcctacccgctgagtttaaccataccaaanaaaaaaaaaaaaaaaaaaaagaaaaa

SEQ ID NO: 83871 - DNA, 61 bp, Glycine max
actctcgctcaaagcataataaggtgagtttgagtttggttgggaagctcgaaataatgtc

SEQ ID NO: 83872 - DNA, 111 bp, Glycine max
taaaagatccaaacttacctaccccttcattccaacgtattactttttttttatgtcaacttaattcaatttaattggccgcgttttaaaaacttgttaattggaaaaacc

SEQ ID NO: 83873 - DNA, 67 bp, Glycine max
  unsure (1)..(67): unsure at all n locations
gaagaaagtagaaaggatttggattcgaggcttgctaggtgaagcccannnaaaaaaaaaaaaagaa

SEQ ID NO: 83874 - DNA, 339 bp, Glycine max
  unsure (1)..(339): unsure at all n locations
cccacgccgtccgacgnngctgtcgagnaagaaccgacatgaaggggaagtgcgatagcccatnnaaattnnctttgagataaggaaaaaagggggtataattttataatntaatggaataataatatttgggcttaagctataaataacctaaaatattatatacctaagtttaatatataaaaaatcttaggaatatagactatcttttttttaataatttaattgaaaaaaaaaaaaaaaaaaaaaaaaaaaagccggccgttttaaagaatccaaccttactaccccgtgcatccaacgtaatagtttttttttagggtcacctaaatttcaatt

SEQ ID NO: 83875 - DNA, 381 bp, Glycine max
tcctacaaaagcaacaaggaaattccttatcttgttcttttgtttcttctctagaaaaaaagttatgaaatatcctcaactctcagctgatttctttcaaactctaaattttatacatgcagctttgggattcaaatagtatgagtattttaaattttagtagtagcaacaacaacaattaaagaagagaaaataaacatacaatgcaaaaataatctttatagtaaattttaagacccaaataagatacctaacacaccattaatcctcaatctttggattgaaaaagactaactgcaattgattttttcaatgcattgattaaacattggtgataagtcttgtcaaataaaggttatctttggacactccattgctcac

SEQ ID NO: 83876 - DNA, 66 bp, Glycine max
agaaggggattgcgattcacagaaaacaccaccaactcaacacagggatcatcgtcactacccaat

SEQ ID NO: 83877 - DNA, 96 bp, Glycine max
atactaaacaggagaaactaaatattctcaacccaaaattttgcagaaaactcaaatcatcttccttaccaaatgcctactaagtatttatgtaac

SEQ ID NO: 83878 - DNA, 201 bp, Glycine max
ggccgccgcctcttcttcgagttgtaacctctctggttaaccctgacttaaggtttatgttctaaaacccttttcaagttgattgggggagataaaaatgctcgtgttgtttggagcccctgcgggttttgccctgtttaaagggcttgattaaagcaagctttcttaaattgaagacttgtggaaaaactttttcagtgc

SEQ ID NO: 83879 - DNA, 68 bp, Glycine max
gaaggctctattataagagtcaacagcaggggcgggtttcaatggccacctgactgccgcttagagct

SEQ ID NO: 83880 - DNA, 154 bp, Glycine max
gagtagcaaagatgacaaaatttaattggagaaacagttcaattgggttttaccccaaacacctaaacccaagggtttgtttgaattgtcgggaacctcaataagtcgtccttttccattaaattttttggccggccaacaaccgtaataaaag

SEQ ID NO: 83881 - DNA, 311 bp, Glycine max
atgccaaccgatttttttatttcagacaattttactcaagatgcataaactttgaacaatatgattcataaataagagaccaatttttttttttaaaatacaaagttaaccttttgggagaatccagcttaataaaattcaccatgcccacttaaaagaatccaagggcaacaaactttttggggatagatttctaacaaatcttcctaataagaatggtttttttttttttttggttaaagcccgacattaaagagggtcatgttatcccaaccttggtttttgaacttaaaaaagttttttttttgcct

SEQ ID NO: 83882 - DNA, 106 bp, Glycine max
  unsure (1)..(106): unsure at all n locations
atgcacgcgtacgntaagctggatcctctagagggccgctnnnntntnnnnnttttttttttttttttcgccgggaaagtgaaggaaaagaaaatttgaaactgcc

SEQ ID NO: 83883 - DNA, 281 bp, Glycine max
gaaaaaatattttccccaaaaaatttattttggttttaaaattattcattccaatttaaaataaatatataaaaataatgttaaataattaaatttttaaaaaaaaaaagaaaaatttaaatgtgtaaattaaatttataatataagtaaaattgatataaaaattaattaattattaaaataagtaatagattataaaaaaatgaatgataaacttaaatagaatttatttttatgttaacaaaacattttaatattaaacatgtttaaaagttttaaaa

SEQ ID NO: 83884 - DNA, 355 bp, Glycine max
aaactcgagggaaactttgtaaatatacttttgcatgatgacctgttcaacaagttgaataaccttcatagtcattctcagactaatgacaaccattgaaacacaagggccaaaaaataaataaaattttaggatacaacacaagggccttttatgaaccttcttttaccttttgtcctctcccttaagcagggcatttttatctctaccatggatttgatgtttattcagccataatagtaaataagcattgatagtttcagaagaaaaggagtgaagttctgatatttacagaaaaaaaagcaagtgacaggacgtttcaaagcagatattcatcaaccactagtcactcgag

SEQ ID NO: 83885 - DNA, 52 bp, Glycine max
ggcagctcattcttcctccttttattgttttttggtttttctgttttaagaa

SEQ ID NO: 83886 - DNA, 94 bp, Glycine max
  unsure (1)..(94): unsure at all n locations
acgtaagacttgatcctctagagcagccgctttttttttttttttttataannnnnnnccccccattttaaaactccgagaaataatataaggg

SEQ ID NO: 83887 - DNA, 75 bp, Glycine max
ccagattgaaagtgctcgtcattttgcatttctagaagccgggtaagtaaaatacctccatttttttcccatgta

SEQ ID NO: 83888 - DNA, 188 bp, Glycine max
ccttctttcttctaattgcagccgtacccttttgtcatcttctcccagacaaacccttttgttgttttctcaaaaccgtacccttttgtcggattcttgcacccgaacccttttttaatcttctttcatccgaacccttctgttgtcttttcaaaaccaaacccttttgtcgttttttcacaaccgta

SEQ ID NO: 83889 - DNA, 109 bp, Glycine max
gggggttaaaacacgtaaacatattcattaagtttgcatttaacacttgaagcatttaaagaaatttaagataattaatatacagtttgggtgctacgtaaaatatgat

SEQ ID NO: 83890 - DNA, 75 bp, Glycine max
ggggccagccttcagtccctgccagggaagacttcctcttaagaagtacatgagcacataaccaagagattccag

SEQ ID NO: 83891 - DNA, 92 bp, Glycine max
  unsure (1)..(92): unsure at all n locations
cgcacacatactctnggatcctcgagagcgccctttttttttttttttttttttttttttttctncaaataacttacacctaaccccctttt

SEQ ID NO: 83892 - DNA, 54 bp, Glycine max
ataacaatgattaagttcattttattttattttatttttcaaggaaagaatgta

SEQ ID NO: 83893 - DNA, 136 bp, Glycine max
gggaaccggtaaaaaccgattgtattatggggaagctccactgaaaatgggggacataattcaattccaaacccttatctgctgtgaaaccaactttccgtatagtgagtcgaatcagaaattgccgtcctcatcc

SEQ ID NO: 83894 - DNA, 493 bp, Glycine max
gggggccctaaagggctgcaaaaagagaacgtgtggggctttttttttcattgtattttcttcgaatttgcatgtctacacgggtgaccaaagtgctaagcctacttgggtaagctggttattttaattaccacacaaggtgcagaccctctaggatggtcttaaattcaaagcattggaaccgtctatgccggggttggattttctggctttaaatgcgatcgcagtaagaaggtgtttgtcgtccggtacattgcgcgccgtggatgaactacctattaagcgtgattgcgaagaatacacaactgcagaatattttgaacatttgactccgtccactgaagggatttggagacggtacatccgatacgtaccgggcgttcatgccacgcgaagtggattttggtgataagatttttttagaagggcgttgaacatgcaatatactttgacctcaaaaaatggcaagaaataattgcgtcttgaaaagctc

SEQ ID NO: 83895 - DNA, 146 bp, Glycine max
  unsure (1)..(146): unsure at all n locations
ctctagacgcgccgcttttttttttttttttttttttttttnnnggccccttttattgatatgcttaaactcagcgggtagcctctcctgacctgaggtctcccttttgtcgttttctcttcatccgtacccttctgtcggcttct

SEQ ID NO: 83896 - DNA, 80 bp, Glycine max
gggagcatccatcgaccaagttgagatcattaaaccttgtcttgatattttttgtgagagctctggtgccaaggttattt

SEQ ID NO: 83897 - DNA, 81 bp, Glycine max
  unsure (1)..(81): unsure at all n locations
gggnacatctgaatcatcatctctctcttgcttcgtctgcttttcctttggtgtggacttcacctggacaacatcatctga

SEQ ID NO: 83898 - DNA, 104 bp, Glycine max
ggggcctgcaaataatcttaaatattaaagcgcgggtttttagcataggcaaatctacaaggaagatctttgataaacaaacaagcatagcataaatccacatg

SEQ ID NO: 83899 - DNA, 164 bp, Glycine max
  unsure (1)..(164): unsure at all n locations
acgcgtacgtaagctcgtatcctctagacgcgccgctttttttttttttttttttttttttnnnnggggggtaggcttgatctcaagccattttttgggatttcttcagtttgggccaatcttagtttgtttttctttagtttcaaaggcccattttttgttgg

SEQ ID NO: 83900 - DNA, 187 bp, Glycine max
  unsure (1)..(187): unsure at all n locations
gcgtacgntagcttcgnatcctctagacgcgccgctttttttttttttttttttttttttttttggaaaataaatcgcgtttttttttttattggggggtttttttatttttttggggggggaaaacttaacctttcattttagttacaaatttttctgggcaaaaccttggaataacgcgtgggcc

SEQ ID NO: 83901 - DNA, 279 bp, Glycine max
  unsure (1)..(279): unsure at all n locations
gcacacattagcggagatccgtgagagcggcctatttttttttttttttttttttttttttnaaaaattttatacaatttttttaaaaatttccggcggttaatttaattgttacgggtaaattttaatatttaaaataattaaatatttatacatataattattctaaattaaattttaaaatttactaattagctttatcttaaaaatttttaaaatttttcaaaaaaaaaaaatgtattttgttgaaaatttaataaaaaaaaattacttttaaaa

SEQ ID NO: 83902 - DNA, 324 bp, Glycine max
  unsure (1)..(324): unsure at all n locations
gcgtacgtaagcttgtatcctctagacgcgccgctttttttttttttttttnnnnnnnnnnngcggaagaaaaattaaaccacagcaaatttcggggtaactgaaaatagacaacagaactgcgactcaagtaataatgtatgctctatcttgcaaaaactacttactgcgaaacctctctatgaacacgcaccgaatttttttttcccgaattaaaaaaacaaaaatttctttcattttacaaaattttcatagctgcaaattatccccccttgccttttgatccattctaaaatttattttttgttcaacattacaacccct

SEQ ID NO: 83903 - DNA, 51 bp, Glycine max
ttcttaaaacagaaaaaccaaaaaacaataaaaggaggaagaatgagctgc

SEQ ID NO: 83904 - DNA, 75 bp, Glycine max
tacatgggaaaaaaatggaggtattttacttacccggcttctagaaatgcaaaatgacgagcactttcaatcgtg

SEQ ID NO: 83905 - DNA, 138 bp, Glycine max
tcttatggggatctttattcaagttcgcaccagattttcctcccggaatgttaggccgtggaaaaggtgggaagggttcgggaaagggaggagctaataggcacagattggttcttagtgacatcattcaaggaatca

SEQ ID NO: 83906 - DNA, 109 bp, Glycine max
ggctttcaattggcgcgggtgagggagaacccgggtactgtggatacaagcttacgtacgcctacaaacataataaaaagttttgtatgaggtaacataaatttaattt

SEQ ID NO: 83907 - DNA, 52 bp, Glycine max
atgtctgaactattttgtgtggaaaaatctaatcttcccaaaaaaaagaaaa

SEQ ID NO: 83908 - DNA, 397 bp, Glycine max
ttcttgttctccctcccgcaaaaaaactccaaaaggggccgttttgcagaagacgacaagaggggtcataagggggaatctacagaaagcaaatgcaaaagaaaacccagaggcaccatccactaaggaataaagccaaggaagaaggagcctcaccaccaaaaacagccttacataagaagccagacgaggatgcttcaatggaagaaaagaaacaaagaacaggggagcaccaaattgaaggaatcaaccaggctaagaaaacccactctcaaccgaatctaatcaaactgtcatacatcaaacgtacaacaagtgtcacacatacttataagtatagacccgatcgctctcccgaaaagctctcctgacaaaacttcctatagaaccctccttg

SEQ ID NO: 83909 - DNA, 337 bp, Glycine max
cgaccttacaaacagatcactgatgactacatactgctacccactaaatgctaatgctctgaaagcaaatccaaacaaaacataagctctagcttctgctcatcatcataaacacaccattcagactcttccctccattgtttattaacaaagcatgccattaataccataactgtgtcgcttctttttgcctgtgatactcacattttggaagttgagcctgccagaaccaagcttactgggaaaaccaggttccacatatcacaaatcaccgttatgggatttgtgtattgtgattgctgatacaacagcagctttttcagacacagctacttct

SEQ ID NO: 83910 - DNA, 340 bp, Glycine max
  unsure (1)..(340): unsure at all n locations
gatctcccctttctctctctctggaactggtttgtggttctcgtttaagccatcatagggaggaggggcttttcaggtcaaagaagtgcaacagagtgagatctgactcataatttggcgacactcttgaaaaaagaggttacttggattttgtgaggttgtcttgtagttggagtcatggcgggtgaagttgtgggatttgagatggttcaaggaccagtggagaatggtactgagggaggaaaacctgttttgaatgagaagagaaatgcaagctgaaanatgtggaccgtgcgatcctaaattggccatgaagattgaaaaaaagatgtttaactat

SEQ ID NO: 83911 - DNA, 69 bp, Glycine max
agacctcaggtcaggcggggctacccgctgagttaaagcatatcaataagcggagcaaaaatatattta

SEQ ID NO: 83912 - DNA, 79 bp, Glycine max
aaataaccttggcaccagagctctcacaaaaaatatcaagacaaggtttaatgatctcaacttggtcgatggatgctcc

SEQ ID NO: 83913 - DNA, 161 bp, Glycine max
ggtcccaatcagaaaaaggtgggggttgttaccttggctttttgttgccaatcttgatccgattattatcaatcaatcatcatgtcgtcggcgaagaagatcacactgaagagttcggacggcgaggctttctaggtggacgaagcggtggcgcttgagtc

SEQ ID NO: 83914 - DNA, 76 bp, Glycine max
tcatatgatgttgtccaggtgaagtccacaccaaaggaaaagcagaagaagcaagagagagatgatgattcagatg

SEQ ID NO: 83915 - DNA, 175 bp, Glycine max
gtttttggggtttgtaattgtggggactcgttcggcttcgtcgttatcttcttctttggttgtttgggtgtttgtttttcctttaacctgaaaatgtcttgctgcggtggtaactgtggttgcggaagcccctgcaagtgcggcaacggttgcggaggctgcaaaatgtacccaa

SEQ ID NO: 83916 - DNA, 257 bp, Glycine max
aggcgtccgaacacgtcagaaaggaacacacacatgggagtatctgtcctaactaccgggattattcactggctacatagcgggcctcatcgggattcaatcttacgtacgcttgcaatctaacaaatagcatttttatactgaaactaaatgtaattcattttgcgttgttttacaacgtttaaactgcgaaaaacgttgcatgccccaacataatcggcgagcattacattcatatttcgcacaacggccaaata

SEQ ID NO: 83917 - DNA, 384 bp, Glycine max
ggtggatcggtgccccgaaaacgcatgtttaatgggcaattaaatagacaaaccgtggatccttttatgcgactactactatgacggtcagggattaactaactagcaattagctgtatacttgtttggagaactggaagaccaaactcactatgatctataaagatcataatgctgttgatacctactgataaacgaaacatattaacaggatgttgacattgaatatggacactaatgctctatgggttggacatctacaaacttctatgatgacatgcagatatacttggttgtgacccatatatatagttgagtatttaggaagttatggccttttaaaggttggagctggtctgatgaattatccaaacggtagttaaa

SEQ ID NO: 83918 - DNA, 241 bp, Glycine max
gattacagattcaattttactaaacatatcccaggggttcttacttgggatataagtacacgaattcagttcatattttgctgatcactctactttatacatcattataagcctttattcatgtttgaaccaagggacatgagcaccaagcttattgacaacgaagagacaacttccattaataccgactgtatccaccgagatcataaccagcttttttcattactgatgaacatttctc

SEQ ID NO: 83919 - DNA, 379 bp, Glycine max
ggatgcacaagtttgttgagatggctagaagcaataagatgaaaatgaaagtgcttgttttgtttgttgctacagttttggtagcatatgaatgccatggctcagactaccagaagttccctctccaaatgaaaactgggtttggtgggcaatacagcaatgaggtggcatgtgccagttggaggcttggcgtggaagcaaacaacgtagtcaagtggcaaactgttcctgcagcttgcggagagtacatagctgactacgttctaggagaccaatatagatcagattccaaaacagttaaccaacaagcttatttctatgctaaatccctcaaactcaccaacaaaaatgtctttgtcttggacgttgacgacactac

SEQ ID NO: 83920 - DNA, 190 bp, Glycine max
agtttttattttggaaacaatgccgacgagcaaataccatcattttgtggttttttgacaaaataacaccactctaaaatattttataatctgatcccacaaactctcttttttattacttattcgctctcaaattacatacttgtagaccttgggcccaatttattttttttaaaaccgtcaaaatttt

SEQ ID NO: 83921 - DNA, 303 bp, Glycine max
aaaattcacaaagactccaccaccaacaaaggtggcggtctatataaactttacgcgaacccacactttcttttataacattttataaccacaaaaatcctaccttacatactacacttataaccatcttcacccttttttttaacaataccccctacataattatagaacctcacctcttctcttttacaaacattgtttatctatacacaaacctacatttccctctaaaacaatttccaccccttaaaatgcacatcatcctctccattataaccttttcttcttctatcatttcaacac

SEQ ID NO: 83922 - DNA, 425 bp, Glycine max
gggggaacataccatttactcgtatttgaatggaaggggtgtaatgttaaaaattatccacgtatcattatttaattttaaaattttacaatagcagtcacagaaatcataaaagcaaattgccttggtggcacaagaaatctgcttttgtgcaactttacatttttcttttggttttgggtcttcccaaagatacatagtttctttttgggattagttcattctcgcaagctgaattttgctttgtctaacccacctgaattgctgagctgtgggaggaattgggatacaaacaaataatccaagttattgatatatttcaaagaagaaatgcaaaaagagcttggaagatggactttgggctccgcaacttttcaagactatctcttcttattgacccttggaactgatcttgttggtttccc

SEQ ID NO: 83923 - DNA, 250 bp, Glycine max
  unsure (1)..(250): unsure at all n locations
ggntatgctttttttttttttttttttgggcagaaacaacgcctcannctttcatggatagcggggaaaacctttgaaataaaaacaaatttaggcttgtcaatactttaagtcctgttttattctcgggggctacatcccgaaaaaggggtctagtcactcaagaggaagtttatatctcggatttttttccttaccggagggaaaacaaaccctgaacccaaatttgtgaatgcccccccagtcacca

SEQ ID NO: 83924 - DNA, 311 bp, Glycine max
gggggaagaaatcacgagaggtttgtactcgaacattgtacagttgaaattcataaaaaaggacaaagcataattcgcccaaagttcaggaatttatatacaatttatccttttatattcggtccttcatcaaacaatgttaacctgtttgcaatccatattttacagggataattccttctgaagcctgacatttatcatagtcacaaattgaacgtggttgagatcatcgacatttatttatttaggatagatcacggattaaagttgacaatcttcttttctctaaagctttccacagtctccctgag

SEQ ID NO: 83925 - DNA, 254 bp, Glycine max
ccgcgacgaagctggatccttagagcggccgttttttttttttttttttttttttttttttggattaaccggccaagtatttgagtgggaatttgaaccactgctaatccaaaattaccaatcaccaataactatacaactgttctttaggtccatggtaccaatcccaagtgcaaaaactattcacatccaattcattctctacttaacacagcataagcaaatctacattgaacatattgtccaacaatatt

SEQ ID NO: 83926 - DNA, 180 bp, Glycine max
  unsure (1)..(180): unsure at all n locations
cctctacagccgccgctgnttattctttttttttttactttttgggggattagaaaccccctcattctaaataaatgggcggtgttcccacaaaacatacttttcaaaaaaacattatttcactccttgcttaactatttaattccacaatccccaggcctagatcccctttttttattc

SEQ ID NO: 83927 - DNA, 157 bp, Glycine max
gggcccaatttaactactcaaaggagtaacaatgtggctgtcgttcattgaattcaaaagacagaaaccagtcttggaacactcattaccatcattatcactagaccgattccaatgattaactggcttagttaaagctgctccactctacaatgta

SEQ ID NO: 83928 - DNA, 338 bp, Glycine max
cgggctctaccataggccatatattcattattgggggatttcaaattacagatttgatcataaaaatgatgatccagttactacacttttttctacccatccaaattaattgaaaacaacattcataggtattaagctaacactcagggtgtctattgtctaagcctttctacgcccaaggaatctggcaggactaaagtgcttaaaatcaacaatgctagaatggccatcaataacaagctcagcaacagcagcaccagtggcaggaccattgagaataccccaacagttatgccccggtggcacataacaccccttcacccctggaaccttttcta

SEQ ID NO: 83929 - DNA, 273 bp, Glycine max
ggcacagaagaatttggatataattataatttataatggtacaattacaaacgggaattagatttaaaagtcaagatggagctgctaccaactctactaaacagcaactatggaatagtgatataaacataaaagaactatctgcattttcttacagaaaatgagatgttacacctttgaagctatacccgccaaaaataagaaaaaagaaagccaattggtactcatagttttttatttaatatctggggtgtaatcaactttatggaccca

SEQ ID NO: 83930 - DNA, 336 bp, Glycine max
ggcacaataacactttatactctagttagaaaaaagttataatgtcggaaaccatgaccttcaaattctatgtcaaaacacataattatcttggaaataaaaagaaataaaattgatgtaataaaagatttatagatttaaagcccaaatctacctttgtatcaaaatgcagagttttcacacaatctaagtctgttttgcaaaccaaatacgttttgcaatcaacatccatattgcaaatcaaggaagccatgaatatgtctttttcaccctgtcacaagtccttgcacttaaatcgctttgttggcagaagaactgatctttttcctgcttttg

SEQ ID NO: 83931 - DNA, 188 bp, Glycine max
gggaaagaaaatccattgaagagatatcttgtcccatgacacatgaaacctactcatctttaaatatcggtattcaacacctctagtacttaattttaaattattagatgtccataggagaaccaccttggtctacagcagcagcagcaccttgatcagcagcagcagcaccctgatctgggggagca

SEQ ID NO: 83932 - DNA, 242 bp, Glycine max
ccgcaactccaatgtaagttgacagaccgactaaaagtgatatacaaatttatcatcaagttggctaccttaaatatgaaaaataaaaaataatttggagctttaccccttgaccgggggtttggcctgcctgactaacaaccttactttattggtgggaaacctaacttaattgggtttacgtctagcgaatcatacaaggggatagctagtaaaggaaaccatccattttaccctcagtt

SEQ ID NO: 83933 - DNA, 224 bp, Glycine max
ggggataaaaacctcactttcatcgaaacatatggaccaagaatcaagtcacattcaaagaaaatgaaatcctaaatcataaagccaatttttacagagaacacctattgcaaacttcatacacagcaagtcaacaacagacatatgttggaaaccctgctgcataactattctgtacaagggaactctggcttggaaattgccaaaacttcatcaaattttta

SEQ ID NO: 83934 - DNA, 62 bp, Glycine max
  unsure (1)..(62): unsure at all n locations
cgtacgtaagccttggatccctctagagccggccgctnnnnttttttttttttttttntttt

SEQ ID NO: 83935 - DNA, 272 bp, Glycine max
gggaaaaaggaagataaactcaagaaaacaaaactgatcacagagcatgaaaaaagtaggaaaatgtatacagttgaactcaagtaaatagttcaagcgatctaaatacttaattcaccatggcaccataagcatacctctcttgtagaatgatacatgttttgttttgcgttttcttaaaatcatacaaacttctgtcctgtcctctagtgaaagcatcaaaattggttccttttgtttctgaaaagtttgtcccgtcttgcataaatata

SEQ ID NO: 83936 - DNA, 312 bp, Glycine max
ccttaagatagccatttgaatatttattcaacagaaagagtactgcataataagcttaggttactagagatgatctaagaaagacattttaatatatattctaacagaaaaaacagagtagaataagcttaggtttgttgatattttggccttgtaatataagaaccaaaatgtagcagttgaatgcacaagctaaagctaatagtggagtggttctatatggatacacactattctgtaatataattcatactaactgagatcactagcatgacataaatcaaataaagctagacactggattcaaactaa

SEQ ID NO: 83937 - DNA, 187 bp, Glycine max
atacccatatatgaatagataccggtggggggggtcaatattgtaacctattacaccaagatgacatttttataaactattcatatgcaaacatatagttcaaatttttaaactttgaaacaccgcagatttaagaatcattactactaaaattcttcaacctaaatcccgcaaaatagagaaaacc

SEQ ID NO: 83938 - DNA, 171 bp, Glycine max
  unsure (1)..(171): unsure at all n locations
catgcccgcgtacgntaagcttggattcctctagagggcgcgctnnnnttttttttttttttttttttnttttgggggggggaaacactttttatactaatgtatccatgtcgcatgatcntttcaacaataatcctactcatactgcgctaagaatatacaaaaattaaa

SEQ ID NO: 83939 - DNA, 234 bp, Glycine max
agaaaatcacgtttttttctcatctaaagtttatctcaaagacgcaaaagatcacttgagggagagcttctgatcctaaaatgcacacttccacggacgcaaccaaccacaacaaaaccaaaaattgttgtctaactatttctggcaaggtctatgatcaaacaaccgtcatggattatcataaccgaattgataaacttttgctcacaaatactacctacaaccatttccttg

SEQ ID NO: 83940 - DNA, 219 bp, Glycine max
caaccatgtaattaaaaacggataggcggccacgaaacgattttattttattaaattgttcatacgaagcggaaaagacattgtgcatgactgggaactatttgagctgagaagcgacattacaatttgtgtggctaaagacctatatgccggactaccctttttattccctctaaattctgatggcccgggccatcttgctctcaggaggagagatct

SEQ ID NO: 83941 - DNA, 157 bp, Glycine max
ggccaaaaatggatcgaagtttctcatataattcgggtgttagaaagattaccatatataacataaaactttttcggccatttttttttattcagccctttgaaccggcatttttccctttaaaagtggaagaaataccattcccctgcccccttaa

SEQ ID NO: 83942 - DNA, 372 bp, Glycine max
  unsure (1)..(372): unsure at all n locations
acgtaagacttggaatcctctagagcaggccgcttgttntttttttttttntttttttnttttttggggctatataaacatcnaaacataccccacanttcaaagtggtggcaggtctgaaatttccacaaaataaaacaagactacccatcttgcttctaagttccaacaccaaactagtaatgtctgaaaagtaccacaaagaaacaaggctacctaccttgcttataagttcaaacaagccaaaataaggatgtttcaattttcaatgttccacaaacaagggaaggatatacccaccttacttctaagttcaaagaaaccaaaatgctagtagttaggtgatcaaataagcacagattcccctcatac

SEQ ID NO: 83943 - DNA, 327 bp, Glycine max
ccgcttaaaacatgagctttccttcgaataaagcggggaagttgtgtaatagagtcaaaattgaagagggtctgaatgaataaacatacaccaatctattacaacacaatccgataaattttctatctagattccagggcaagtacatgatatatgacaaaaaaaaaaatttcttctggcatcaggtctgattttcttcactgtagcttccttcacgagactcgtataaaagtcaacctaatgcatacatatacgctgacttccgtgtataatgaatcaaacgttgaccatattctgaaatagaccatcaaatcttgatatatttat

SEQ ID NO: 83944 - DNA, 67 bp, Glycine max
gggctgtatgaaaggcttattaaaacagactgggggggggtgtaaaagaaaggggttctatgaaaaa

SEQ ID NO: 83945 - DNA, 280 bp, Glycine max
gccggcccccaacgctggctttaaatttaaatggattcttttcataacaaataggcaaaccgattccccactcttgtcttaaaccacacagtatcctacattgtattacacacagcaaccttgcattattcccttattcagcccacttatttaaaaaaaaatggttaatcgggcttttgacccaccctcctctttatgctttttcccaaatgggaacaaaaaaaaaaaaccaatttttggggctttcactttgctattaccttgtgggccaacataaaac

SEQ ID NO: 83946 - DNA, 305 bp, Glycine max
ggctgaatcccctgatggtatattaaaacgtgaatttactgtatacacatggtagatgctagataattgttaaggcaggacaattttgggagagtggagataaatagttggtggagcgcgcgggtgcaacttcgtcaagtgagatctgagatcgagggtttcttagcaacacagaacagagcagaagaagcaacacaaagccctccctccctctctctctctctctctaggaagaacaaagcagaagaagcaacatagaatagaaccactgaacccactcagaaccaccagtgcttcaaagtagc

SEQ ID NO: 83947 - DNA, 272 bp, Glycine max
aaagcttgtttaaataacaaataaaaacaatatgggctgtgttattttcaaacagtgcttataacaaaaaatagacttattaaacattggacccttaaccctatttataaacattttttaatgcccacaccaaaattccctacttttgtaaagagacaacttatgaagactcataatatgccaattcttctactatcaatgctaaccaagtcaagacaaggttaaacaaagcctatttttacctaacattatcattatgagctacacctcaa

SEQ ID NO: 83948 - DNA, 334 bp, Glycine max
tttttttttttttgcatcacaagtggctgcaataaaattaaagtgactccgaacattttcctttttatgccctgtaaatctagccaacaaactaaaacacgtgaaagttgaaaactgaatctctactttctttacaatgatactgctcgaaagacattaacaaggcccagcagcaaatgaacaaagttaataatctctgccagtccaaattttttacaattcattcattccttaaccagattaacatcaatcccttttttattttatttactatataatggttttaatcctttttctttgaacctaggctgcgatgacaagaatttataatttt

SEQ ID NO: 83949 - DNA, 309 bp, Glycine max
gggcagattatggggcagcatgattagagatatacgggggtttaattaatcatccacacttgatgaaatatttacttaatttacagctcacagtggcagaagaaaagccattttaactagcaatagcgtgtccctctctttctttccttggtgtataagatagtggcaaaaatctcgaggatcaacaaatatcactggggaagaggatctaaaagcgaaccaatcagattcttggatatccttcttagagacctcaagattcttaatgcgccacatgtcctctgaccacgagaacttgctccaatgtgg

SEQ ID NO: 83950 - DNA, 138 bp, Glycine max
gaatcagaaaactaaagagggttttagctaacgattatggggtctgctagggaggttggagctatcgctgatagagcgtttatgtgccgttcatcgattagttcggacactaaaaaacccgttccgtacaattggagc

SEQ ID NO: 83951 - DNA, 316 bp, Glycine max
agatgtcagaaaaggagacagaggacttcagacctcgacttgcttatagaggggttgggaaaaacatcttcaatcccttgctacccatgtatgtaaaattataaataatggcttgccctcaacgcccaatacgctacatgtagcataaggtctcattcaactccttaaataatttaatatggaaatctttttaaaactaaagccctccattactgatcatgatgccaaagcactctgcgttatcgttccaccaaagcataatgttccgaatttacttatgaaaccttaagaaactcatgatacttcttcactttag

SEQ ID NO: 83952 - DNA, 190 bp, Glycine max
cgggtacgaaaagacaaccaaaggcggcaaactatgaccctagccgataaacataaagaccgacctctgaaatttctctcaactctctaagaacatagagtgctgacttgacggacattcattctcagacttatgatagttatatcaatttaaaagaacatcctgtcacaatgccgaaccggatccttaa

SEQ ID NO: 83953 - DNA, 336 bp, Glycine max
  unsure (1)..(336): unsure at all n locations
aggattattataacagaggtattggggggcgatatccaatttgacttttattaccggaggtttgatgcaatttttgtggctaatgcattcctttcacatgattttactttctgcacattatacatctctccaaattgacaaacatccaattgattaacagtaaacacacaccttataatttttaatgccgcggaaagtttgatctcacgccagtgaacttatatgttcaaatcttccagatggatgcattggaatatatacgatagttgatagaggtcgctcattttttttatgtgccagngaatatcttgttagaacatccgatgctggagcaaa

SEQ ID NO: 83954 - DNA, 122 bp, Glycine max
  unsure (1)..(122): unsure at all n locations
cccacgcgttcgaccacaagtnattggatttttaatcaaacccttaacctattgcgttgctggaaataaaaaatgcatttgtggtctaacacttttaattattttttaaaaaatttcttttt

SEQ ID NO: 83955 - DNA, 197 bp, Glycine max
gacaccaaaccaacatattctcattctgtccggggctcatatcatgtattagagacccaacccatccatatcagcgtcaacatgaagcactttatttacagctccatttgcaagaaatatactcttaaaaacaaaggctatatgccaaatcacaattactcataaccctctcaagcccactcccacaaaagtcttat

SEQ ID NO: 83956 - DNA, 94 bp, Glycine max
cgatttatggttcgtagcttaacgcttggggtagagcatgattttacttgtttggccccccccactgcaatgaacgttcacaccctctctctca

SEQ ID NO: 83957 - DNA, 277 bp, Glycine max
ggaattcattaatttcggagtattccatgatcaggtcactgactactggtgctcaataatgcataaaacttactaaaattgatcattatctactccctttaactgatatcagcgcttgtcgcacattctttgtattataagcgttatgctaccacaaagagcttagtaaatccatcttatagcgcacaacactcgctgcattatctttcattcaaggaggattaattacatcatcgctggccccaacacaaaaaatatgtcacactatggctcttat

SEQ ID NO: 83958 - DNA, 350 bp, Glycine max
accacacatgggaacagtaaagaaaagacttcagaccgatggttatctacttcgtgagggggggataaaagcatgctttgtgctctacatcatgtataaccgattgctattcgctacatataattatttttccttttatattgatcctctctgagaccactaatatgaccataatcttcgtttcatgagccaccaaacgaagtattaagaacgcagcactgaaaacgattgtaaaatgctgggaactgtactgcaattaagctatgtacttggagatgatcggatgaacatgtccgtgatggctaaggggatacaaaatcatcattaaacaagacacatatccaataact

SEQ ID NO: 83959 - DNA, 170 bp, Glycine max
ggagcgagcacacaaattacacgggttcctcatcttctatgtggacggtgagtgtgatttctagataactggattttacactgatctgtgtcgatcatcgcgtgcctgagtatgcacaaaccttccgcgactacgggctcacacgtgccttagaacacatggaatatttg

SEQ ID NO: 83960 - DNA, 362 bp, Glycine max
aagttttgaactgaacaacaacttgttcaatttcaatgggacatccatgacacaatttgctgtggcgtctttgcaagctgcagccatccatcaacttccaaatgctacctcatggttgtacctaaagggagttgattctggtaattgttcgcctgagcgtgtccccaatcacggtcttgctcaaatttctccccctcttcatagccatgttcatagtgagcttgatgtgtcacagcagggcaggaggcattacatgatctaggggagtccagggcctgtgagtcttctcactggtctctttgaagccccttctttgctatcagaaagtatgaggggaatctgtgcctatttgatcacctaac

SEQ ID NO: 83961 - DNA, 257 bp, Glycine max
gggtagtgtatgtcttaagacggggacataggtatactttacgcccgatatcatgtacattgaccaactcctacccacatacaatctaccttacgatgtatctcagagagacctctctcgtctcaaatcatgttaaaactcctttcatgacatacatatactcgtatttctctgcgcggactatatgcgaatttgctctgttcccacttgttgatgcaacaaccaatctacttacatatattatgattacgatgact

SEQ ID NO: 83962 - DNA, 263 bp, Glycine max
aggcgtcagacgactacaaaaggccgacgcaaggtgttttcaattagattccttatgtgccgtaggcatcaactggcgtcctttcaaacttctcaagtgccatgattgttcattatgatgcttcgaaaatcataacaatggacataacaaatcttctatacgaaatacacagatgagcgaaaagttgaaacagcaaggtcttcccctatgtttcaacatgagataatcaacatttgctatgacctttataggattcattctta

SEQ ID NO: 83963 - DNA, 337 bp, Glycine max
  unsure (1)..(337): unsure at all n locations
cctgncttcagatgacaaaagacgacagatcgaacatttacacatgccaattttggtaaggcaatggaactactatgaccagattcttctatacacatatcacatatctctccagtttgttgcattctaaattacttcactttacattaccatccttcactaccaatgacctgtatgatttataagatgcaacataagggaccacccctatgttgcgccatgagataataacataatctatcatcattataatcccattatatttatctacatatgctctgaggacactttattaactccacatattattttattgatcaacctctctttttttttt

SEQ ID NO: 83964 - DNA, 99 bp, Glycine max
  unsure (1)..(99): unsure at all n locations
gaacgngaacaaggcaaacngggaagggccggggaacacggcaaggccagaacagcacgcacccaccnccaagggccgacaancggggagcagacacaa

SEQ ID NO: 83965 - DNA, 372 bp, Glycine max
gaatgaaaaccagagtgaagcagtgaagaggggaacagtgatggagggcgggaacggaaagtgagcgcggaggcggtcacggatttccttcgaatcaatcgaaagtttcaactttttctgaaagggttactccttattctagtagtggcagcagaacttctacctctgttctcagtgacacggaagaagaggaagtacagccatcttccaattttgttggaacatgtccttacatgtgcccaggtaaacatattataataacaatatctaatgtatgaatatgaaatcaatttcataatttcatgttagcagagttgcaatgttggattttgtatgatggcatgtctcttttggtgagattggtaaagaatg

SEQ ID NO: 83966 - DNA, 318 bp, Glycine max
gaccttttgctgtttcactcttctttgagtcatggcatatcaattagatttagagctccacacaaaattgttttcacataccatggacatcacccgtatcttttggaatgccagtgtccatgtgatgcttatctctgtagtggccaatcaatctctgaatgaatattccatttatatcaccatctacatctcctcattgattgatcatgggtgctactgttatggcaccgacattgatattcatatccacaacagccacttactagctttatatgctgatgactaagatgagtggaagatcaccaatacctatggacc

SEQ ID NO: 83967 - DNA, 237 bp, Glycine max
aatggggctttcaaaaccgttctatcaaccccggtcaggtgggatttgttgaatataaaaataattcacgaaacactctctctaaactttaactgctttaatcttaaaccaaagttgagttcacctttcgttattttataattttgaagcatagacaactactatgttattccaacacatggccttatacgtattacacctattgccacctaacttaattaggattatactcaaacc

SEQ ID NO: 83968 - DNA, 290 bp, Glycine max
gcttgatggacgcttctgatgaagctctagaagttagacggcgagcaaaagactttgcccaaaaggccagacaagctgttctagaaggaggttcatctcacaacaatttaacggccctgattcatcatcttatacttctcaggcacgccaggcttctcgcttaatcaaatactcattaatatatgtatttttcgcatttagttgcttcttcaatggtcataaatgcatccacattgataaggaaaacctaaaaaaataaactggtatatgattaccctaaaaaaaaagaa

SEQ ID NO: 83969 - DNA, 212 bp, Glycine max
ccgaacatagcgggagcttttttcacgctttaggggggcgatctaccgcatgttcgaatcaagccttgcacctatggggaacaccgcccggcccaagccctcatttttattgacaaaaaggtgttctggccagctgccggactggtgagcatctcctgtgatagatacaaaaagtgtactgttactgaaacataataaaatgcctgtgcccc

SEQ ID NO: 83970 - DNA, 339 bp, Glycine max
  unsure (1)..(339): unsure at all n locations
ccccccgggnncccccccccaaaattcaaaatttttcacctaaatttttttcccccccccccccccccccaaaatattttttttttttttttcttccccgggggggaaaaaaaaaaaaaaaaaaatttttttttgggttgttgtgttttgggaaaaaaaaaaaaaaaaaaataaaaattttttttcttttttttttttttaaaaaaaataaaatttttttttttaaaaaaaaaaaaaaaaaaaaaaaatagggggggggaccaacccttttttttttttttcccccccaaaatttttttattttttaaaaaaaaaagaaaatatttttttttttttttt

SEQ ID NO: 83971 - DNA, 423 bp, Glycine max
gggccaaaacattgctggttttctttcaccgggggcggcagagaaaaatccgctgctggttccagagagaaaatatagaaaagtgtatgggatgcacatgcattcaaaaaacacggaagaaggtgagtgtggggataaaagatcaaaatatttgtatcaaaagggccacacaacttgctccaacctggtaagcctaacctatcagcaagattgtacattaccaattgatcccaaacagggccgaagaggcgttcccctccaatggcaaatgttagactccaagaactgagaagtgtcgcacatactgcaaacccaattgcagatccaacaacataggggccaatgccaaggaaggagtgggagtggcgaatgacgggccaaaagtataagcaattgacggcccaaaggagagggagaagagcg

SEQ ID NO: 83972 - DNA, 348 bp, Glycine max
gcggttaaaaaaagacttccccctcctcctaaagtagcacttttaaaaaaatgtgaccccattacttcctactcctaattaacaacaaacatttcaaccccaatcttccatagctcaccccaccccttctcttaatttaaacgcacatccaacaagaaaactcttttgagatttcttcccccttccccactcacgcattttaactcacccccctactcattaaccaaaactatacatacagttggttttataccccaacacattcaatctctattcttccaattaaaacatttgaaaaaacaaacccccacaacattatctatgataaccacattttctacaccctac

SEQ ID NO: 83973 - DNA, 306 bp, Glycine max
  unsure (1)..(306): unsure at all n locations
tttataattttttnnangaattcttaatccccaaacttttttttttttcctcgtgagttttataaaaactctttccccccaaaaaccttggaatcttttatttttaacctagttcggcctttccccttccttcaattttttcctttttccctaaaaccaaccaattccaacctttttttaccaaaccaaaaaactaaaattttcaatttttttgtttttggcaaaaaaaccattccctttttccttttaaaattgtacaacctaaaccaaacctattgctcttacctacccattcttttaatttaa

SEQ ID NO: 83974 - DNA, 133 bp, Glycine max
  unsure (1)..(133): unsure at all n locations
cagctcccaaaaaaacaatntcctccccagggggaggattttaataatcctgggccccacaaaaactcttcctctcaaaaaccttccaaataacgtggtgaggggggactaaaataataaacattctttaccg

SEQ ID NO: 83975 - DNA, 377 bp, Glycine max
gctccaaaatagaattgaatttcaataaatggacggaaacacaaatcttacaaaagatgggttacaaggatttacagcaggcagacaaaaaaaagctaagatgtcattacaataatacaaccaaagcatagaccacaaacaagcttttcagttgaccgcattatttttaattcaatgaataccccggacggcacttcctattgtaaaactgtgaacatacacaagggaagtgactcattattgaagagccaactgagcttttctccctgatcgaattttttgcagaactgtctgtaatcggctttgctggcgatattgtgaaagactagttatgaattcttcacctttggctgcttcatcactgtctgaagtttcac

SEQ ID NO: 83976 - DNA, 337 bp, Glycine max
gggcacaaaatattaaattattgtatacacaacacggcaataaagacattgtaaaaaaaaaaaaaaactgataaagacaagttcaaaatttatgtaaattgtaacagccaacaatgcaaatagacaaatgggacacttgcatggatcaattaatgtcaggacttggtgctgaaggtggcacaaggcctcttggaagcaactctgcgaggggttcgagccttttcatttgtcctccattttcaacttgactttttgagctttctatatctttcaagcgataaactttcctttcttttgtgaatgaaaagttcccgtgagagaaaacacgagacacaca

SEQ ID NO: 83977 - DNA, 363 bp, Glycine max
ggggagaaagggttaccaaaattaacctaaatgaggagcaactacccacggggatgttctaacactgacaaaaactaacaggggctttcactggatcagtttattaatcatgtcatgtgacaattttgtgatcgacaaaaatgtacagataatgctatttctccaattcgtaaatgccaaattgcgtaacagacaaactgaactatcttacggacaactaaggtgagtggtaatttacgaagctcgattgattagaggaaaaaaaaaaaaggaaactatcaacccgttaaagtatcatcaagtgaccaaatgctacaaaacggtgatatacccaacttaatgttgaaaaccttcatttatttt

SEQ ID NO: 83978 - DNA, 274 bp, Glycine max
  unsure (1)..(274): unsure at all n locations
acgtaatcttgtatcctctatagcaagccgccnnttttttttttttttttttttttttttnggacacaacaacaacataccaccctctacttaaagaatatatttcacaatttcaataatccacaagcaaacccaaatattaaaacatctaaaatatattataaatcccctcttcctataatataccttaccccctactaactacttataaacaccttttttatttttaccatattcacacacattaacagttccttttaaaaaacctattata

SEQ ID NO: 83979 - DNA, 209 bp, Glycine max
tttttttttttttagagcaactgtcagttaacaaaatttgacttatgggttggatgttacaataaataaccaccaatattaatgacaataagttcacatattctattccattgaattgaaataaaaattcaatttttttaaaaaaaaaaaaaaattaagagtttttctttcgaattaaaggaaatatttattttttttcttccaatcac

SEQ ID NO: 83980 - DNA, 295 bp, Glycine max
ataacaaaagtttatcctttctcttttactagagaaaacttctatcatttgattccatcctacaagtacttattaataaccttaaacaaattgactagttttcccacaagtattctacttaatcaaggaggatgaaatggcttgggggaaatttgcgatgggcatggcagctaaactcggttggggatgcccaatggtgagcttagttgtggccatggagaggtgtatggtggcgggcttaatggtggcaatggtggtgggctaagtggtgctggaagtggtgggtttagtggtg

SEQ ID NO: 83981 - DNA, 365 bp, Glycine max
ggcgaaacaaacgagacaacaactaatgtccttgagggtgattctaatgacaaacgagaaacactttaaaatattcaaaatacaaatacacccgtaaccattaaattaatactaatcccacttagatttaaaagactcaaagactaaaaaacaaaaatttcttaactaaacacattctaactttccctaatcaattgtacaactaatactgataatccaaacaattagactcagaacaacttcaaatgccattaagcctccacgtcaacacacttcttccctgcagtgcataatagccaaactaagccctacgggtacttaaccttccccacgcgccctacgaaacacgcaacttcacctttcgc

SEQ ID NO: 83982 - DNA, 381 bp, Glycine max
tgatccttaagcggcgtttttttttttttttttttttggcttaaagacacacacattctagagagtcttaataacaagtaatactctgcagattaaaaaagacagtagaacaattcccgaaaaaatgggaaacagtctaatctttaaaaataataacctctccatattcaccaactcccaaactgatcatcacctccactgatttagatacctacagatccacttctacttgaaattttatgctttaaacaatgaaacttaaccctccatgactcacatgaatataactatctcctacaatgattttacaacccagcttcccatactttgctttttaaccctatatatatggatgcctacataaccacatacctgtggtac

SEQ ID NO: 83983 - DNA, 481 bp, Glycine max
ccaggcaaagaatgcaatgcctttttaatggacagctgctgagatacatatatcattatcaacaaaatgacttcaaataccatatagggaaatttagtctagtgctgtataatgcctgtataatgccagcatctacaatccagcacatttgtaggcaaacttggatagggtaacaaaaaaaaacaataatatacaacgtgacacaaggatccccacaaacttatttcatctgtgaaataaaaggcatggataagacaccttgtattccacgctacatccaaaagctcatccaaatgtacaactgaaagaccccatcaacaagcctaagatcacttcatagatcaacaccctcatcaagacctttggaaccgatcatcacatttgaatcaatttgtttgtcaaacttctttttcctccttgcttcaaactcttgaaacccctccatctgctgaaattgatccattgatataggattaccatg

SEQ ID NO: 83984 - DNA, 456 bp, Glycine max
acgtaaacatataggtttatatctttgcggagcaaaaccatttatacatttttcgtcccctttacaatctgcattctgcagctatcccaattaaatttcagagtacaactctacagtgattcctttcctataaacaatttgaaaagaaaattttcaacaagactaactttggttggatgagggaattctagtggaaacgttagctaccctgcagctaatagccaaagcataattagagatgatattgaagttgaaatccagctcaggaatgcaagtgccacagaaatctggtacttttggcactcctctccaaagtggcagtgtcccagatcatgaaagtacaaaactgtaatgccagcagaggcagaagctgctgctagagatagtgttgctgttaaccaatctccaactacaaagaggctaattagtactgggtttaggaggaccttctttctc

SEQ ID NO: 83985 - DNA, 156 bp, Glycine max
acaacacaaaaaaccatctttatccccttcaaaaagccttttcaataaacactactttcttttttattactataaacaaatttattattaccttaccttaaccacctaattctctaataactttcccataaaacaattattttaaaaaaaaccaaa

SEQ ID NO: 83986 - DNA, 268 bp, Glycine max
aggcgtgagaacacgtccgaaaggacaacgcataggcttggcgtaacacacacacacaaacatttgtggtttatgataccggggacgctctcactgtgtgaagatgcagatggcgagctaaaaccaaccacccaaactgctggtgtcctaccttgatcgcgccgactaattgcagaaagctgaaccactacctgattattactgtcaattatatgctacgcaaccgtggtcgaagatctcctctagcgaacgcgcgattaccactaat

SEQ ID NO: 83987 - DNA, 287 bp, Glycine max
tccgagaggggctggatgggggactgggaactcgacgctatactatagttggatccagcgtcggcgacggacgaatcgtctgtcatagcctgagcctgctaccaaacttggatcagttcattagtgcctgcgtagataactgttcgaagcaacagccgcagcaacatcgcaggacgaggaggctgtatcttcatggataacatgaagatgataagcgatgatgatatcaacaacaagagtatacttgttgatcggcatgcagatagatccttctgatatgatgtacc

SEQ ID NO: 83988 - DNA, 344 bp, Glycine max
acggccgcgcagacacaacataccgaggtgtcgactgttacttgaccatcactagcagtgctcggccatcatggaggaagctgctactgctgctaatgcgttgaatgccaaaaacgacactatttttgttgctccatctggcacggtatgattgatactttctgcttcatccacaactgctcaccataaacaccacaacatccacacatccccagtgttggggatacttgatgggagtgaacaccggatagattcatccctgtctacggaccacgccaaaaaacctgatattactctaacatcaataaccttactgactcacacttataagtcgtcttcttact

SEQ ID NO: 83989 - DNA, 283 bp, Glycine max
ccacccgtcagaccacgcctgcatttttacctccgcacggcttcgaaaaaacgagagatggcgggtttggcctctggcaatgactaaagagagaaacagagactgaattttaattgaacactaccaattagccagcatgtagacctagtaaaacctgtaacgttcgttaactaacgattctcatggctttttcgtgccctgatcatgatctcactctcatttctctctcctttcaagtcaaggtgctagcccattacctgggcatcactctgttttatcgtga

SEQ ID NO: 83990 - DNA, 221 bp, Glycine max
ggcacaagtttgttgagatagctagaagcaataagatgaaaatgaaagtgcttgttttgtttgttgctacagttttggtagcatatgaatgccatggctcagactaccagaagttccctctccaaatgaaaactgggtttggtgggcaatacagcaatgaagtggcatgtgccagttggaggcttggcgtggaagcaaacaacgtagtcaagtggcaaact

SEQ ID NO: 83991 - DNA, 357 bp, Glycine max
gtcttaaagcaccacatactccggggcaagctcttcactgaaaattccatcattctgctcttgcatcaacggccttatctattccgtggcttactactacaacaccctgccataactaaccatgctcttcacaacattccactgttacacgctgacattctaattcaacctgctgcgtgaggtctatttcaatcaatacccttatgatcatattgctcgacaaatcatgatccttactcttcctttcacacacatgaacagtttcgaaagctccttgcaaccaatatagctatatcatgttaactacccaactgacaccccctcaacctatgatagtaagtacggtagcacccttac

SEQ ID NO: 83992 - DNA, 358 bp, Glycine max
ggttctagtgtatgtgattgttgtgactcgttcttcttcgtcgttatcttcttcttttgttgtttgtgtgtttgttttttctctcacctgaaaatgtcttgctgcggtggtaactgtggttgcggaagcgcctgcaagtgcggcaacggctgcggaggctgcaagatgtacccagacttgagctacaccgagtcaaccaccaccgagaccttggtcatgggagtggcaccagttaaggctcaattcgagagtgctgaaatgggtgttcccgctgagaacgatggctgcaaatgtggagctaactgcacctgcaacccctgcacttgcaagtgaggtgttggagagctaaagcttcaag

SEQ ID NO: 83993 - DNA, 283 bp, Glycine max
ttggggaactaaaaaacactatcgcagcgagcctgactcttttgttgtcttctcttctctgtcttgagtcaccatgttgagggttatctcacctgaacgatgctctgaagagcatgtacatggctgagaaaaagcgcctgcgcctactcatgattatgccatccttcaaagtaattaccaaaactctttctgcaatgcaaaaacccccatccataccatagtcatagtattgtcaccaccacaggcttagttcaatagtgcgtgaaatggaactgcccactga

SEQ ID NO: 83994 - DNA, 267 bp, Glycine max
ggagggcatcaaatcaataaagtgaaccaaatcaaaaggaaaaggagggcccacccaatgacattggggcccaccgataaaaaattggaaaaccagtttctcgaccccggtaacaagctcctcttaaatcctccttcttaagcgaaggacctcctccaactcctcgaccaattaaagtgttgcctatcaagggttgaccagtcccttattgactttttgcaaattgcactttttcattaattgaaagcattgatggcgaccaaactt

SEQ ID NO: 83995 - DNA, 354 bp, Glycine max
ggagagcaattgagaacgttcaaactccacaactaacaaagattatccaaagtgcgattcgcatggccaccaacattcgtagagcaacctatcgctttctccctgccatggacacagattctttctccgattccaccttcgaattccacgaatccgatctctacaactccgcgcgcgctaactctcccgaacttgccaaatccgtacgctcctccaaatttaacacctactctttttcttttgccgcccgcttcggggctccggggtggtttccgtggaccggcccgaccggtccaagaatcttggcgattaattccggccggacccgaggagggacctccacgaccaccacca

SEQ ID NO: 83996 - DNA, 283 bp, Glycine max
tccttcacgtgtcaaaaaacaaaaaaaaggattgtgcataaaagaaaaacttcaaattacgttgtctctacagaaagacacttatccacacagatgacatagttagacacttctcaccatggaaggaggagtatcctacgcgcgcatgccttgggtcaaaatacgtaaactgaaggacgactacgccaaattagagctacttgactactataccagcattttcaacgcgcttgtgatcgtaactatagatgtgctcacaacaccatatacttaccttataaca

SEQ ID NO: 83997 - DNA, 347 bp, Glycine max
ggccctgggtgtttatcttatctgtgtttcgtttcaattgcgcgaggagggtttttctatggcttggaggctatgccgaaagcggatcgaataagctcatgtgaacagaatgatcctcacaaagcagtaccgatgcatacactcagctagctgtcaatgtactaaagggcatttgactgacgatgcgatattcgtagtattgcataatggggatatgaatcgcacgctaatcgctactctagcatgtgtgtgcgaatggttcgacgatcttgccaagcgagatctatggaaagaggttggtcaaacatgagctccgaaagtgtggtgtgatctgccatctaatggga

SEQ ID NO: 83998 - DNA, 225 bp, Glycine max
ttttttttttttttatttttttcccccccctctaaactcatttcgcccttttaaaaaaccgtccctaaaaaaaaaaaaaattttttaaattctccccattcccttattaaaacctcttttaacacataaacatattcctaattttttttccatatacaaaattaacctttttcaatttaaaaaaaaattcacctcattttttataccttttcccattctttttat

SEQ ID NO: 83999 - DNA, 107 bp, Glycine max
cgaatgccacacaacgtcttgcaaccctgatgatgatgaaaagtttttgtggaacttgtgaaactctagtgtgtcacccccggtctttcgcagctccaccatgtgca

SEQ ID NO: 84000 - DNA, 480 bp, Glycine max
caacaaatgagaggagatagtgaaaattccatgcgtggttattcattataggaaagcgtgatgcggaaggacacggttggaatcaaatgtttactactgacaagaattcccccaaaatgattccatgtgattcaacctttggaaggagccggaatcccaacaaatatgatccatcccctaccaaattgcttagcttattttaccctaaaccaccaaataaaaaaggggtaaaaattaccccttccaccgatgttgactttaccttgttgagactttcgaaccccatcaaaaaagacaaaaatgactgatatcactgcaatttttcaactctgctgaaacattggtagcttttttcttccagaggctcctaatattatttttaaccctatacaactgtaaccaacccacccacaaaaaaatataactatcttttgttctcccaacaaagctttttactttttcatttaactaccttttccc

SEQ ID NO: 84001 - DNA, 323 bp, Glycine max
ggcccgaattcaaattaaattttgttaatcaggggttgaattttatcaaccagctttaaaattgtttacaatgattaggcacggatgaattgctaaagcatacggatttaaggaaagaaaattcattgaagaaatttcttgtgccatgacacatgaaacctactcatctttaaatatcggtatacaacaccttttggacttaattttaacttatcagacgttcataggcaaaccaccttgttttacattcagcagcagcaccttgctcagctgttgcataaccctgttctgtgggagcatcctgttcgggtgatgactgaact

SEQ ID NO: 84002 - DNA, 402 bp, Glycine max
cctcatcaactttatgatatttataaaaacatgagcgtctcaattcaaagaatggttaaaatatgttccattcctataggagataagaaacaaatagcgaaattaaatcacagagcctcttgcaatactttctagaattattttatatttggtccaaaaaacaaaacaaaaaaaaaacacaaatcaggggctatttgataaaaacaaatatggctatgcagaataattcaccaaaccagtccaacaccagaccctaccactgatactgctccatctagtacatccattgtgcatcctatcactcccgcttctttcagtttcttcctttcttctaagatcttcttttctgcttatagcgcaaccagctgccttccttgttaaattgataatacatgaccttca

SEQ ID NO: 84003 - DNA, 355 bp, Glycine max
aagaaaaacaaaaacatattaatcttaaaaaaggggagcaaattaaaaaattggtaactgagcaaatatttacaataacaaattccaaaaaaaatctgtaagggtattcttgtccgcttctactcactttcttcctgtttcaaagggccaaacatatttctttgatattcaattttccaaggctaagctgaaatatattttatatcactcctaaaaacaattccaagacgagaggatatttgctttgagaccgcaattgcaggattatccgccaggttgaatgacttctttttcaacatgaaccgcaaacgtaaccgttggtggctgcaagctcgttattctgcaatgaatatta

SEQ ID NO: 84004 - DNA, 431 bp, Glycine max
gggaattaaattatagggggaccaagtgggtaattggaaataaagtgggagaccaattttacaattttgcctaataataatgtatattcagctaacaaaccaaaaatttattaatgcacatactacaagcgatatttctagaacctattaactacacaacaatttaaggccaacgcagtggcaatttatatgaggtattatttcaaatttcacctgtctcaagaggttgccttgaggtatctccagaggcccaagctcgataatctttttcaagctgtgacacaaaacggggaaacataatcctgagtatttgttcaaggacttgagtcccacctgattcaattgcttgctttggtattgcttggaaaggaaaaggtatttcaatgcttacctcaattatagtgtctgatgtgagttgctgcatcaatgac

SEQ ID NO: 84005 - DNA, 428 bp, Glycine max
gggtcttaatgcaccttatatgacatcaccccacagccaagttcaaatttcagtagaaaaggacgcaaattgtaaccagacaccaaaaaaggcgagggagcacatttatcattacataattaaaaccacaacctaatgcctcatctcatctatgattcacctttgcgtagcatatacaacctactacatactacactaccaacatggtgtacctggatatatcgggatgataagtatgatcagtcccgtccacaatctctagcaaatgccagaacttttgaatggttacggtcaagatagtgacacgaatgaaggatccttcatcaaaaagtgctctactgattgacattaatgattgtttcgattttttatgaccaaaatccaatatggaaatacaaaatgaatattcttttgcttagttagctttt

SEQ ID NO: 84006 - DNA, 348 bp, Glycine max
actcaacatttcttttaaaactacttgtgaattttcatacaaagggaacacccaaaaaaatccaaactaagtttttcaaataacttaaattaatttgaagcatagtataaaactcataccaaaccataacaaaaattaaacaaacaaaactctcctcttgacataatctaaaaatattgtgcctcaaacaattaaattgtattctattacaaaaccccacttcaaagaacttgggatttcttgctttgttgtaacttaatctccggctcctttttaacaagttcttttttttcaaataatattaactctatgtggcacggaaataacatataaggattgattcttcca

SEQ ID NO: 84007 - DNA, 214 bp, Glycine max
  unsure (1)..(214): unsure at all n locations
cgaagctaaaaatataccacgacctttttggagcaaaaaaaccagtttttaacaaataaaaaaccttttgtgatttcactttcanggcttacaaaacccaaaaaattgttccggggttccaaatttaatttttattctcacatttttggaccccaaatcaattatatcccccgctttgggaaatttctccccgcgagggaaccctccaaatggg

SEQ ID NO: 84008 - DNA, 506 bp, Glycine max
catcttgaatcgttttcgaagaatctggagagtaataagtcgccagcctaaaaattcagcctggatctatataactcgtttcaacatgacgaaatcgagataacattgttaaattagggtagggcatgcacttcgaaacgcaaaaaaatccgccgcactacgttccgtcagaaagcaagccccatcttctattcttatcatttggtcacttatttcacttactttcaaaaagcgggactggcactagtcaatcatcgtgcctttagccaatgatggatttacaatcaccgcggtttttcggagaataccactttagcggcgactaaaactaaagcgtatggccttgtggaggtttctaaggatcgttaatcccaatggacaaaccttggatcccattagcgcgggcgccggtaatactctatcttagagctcataaaggtgctgggagcattttaataaagcgcgttcaaatagcatgagcttttgatacttatgagatcgatgat

SEQ ID NO: 84009 - DNA, 473 bp, Glycine max
aaaagctccctccagaaactacaaataaggaattgactatttctccaaaataagttattccaaaaaagcataagccacagaaagatccaggaacaaacacatgtttgggaagggttaattctggaaaataatcactttttttttggagaagctacaaataataaaatgactatttctcccaaataagttaatccataaaagcataagccaaagaaagatccaggaccaaacaagcagggactgaataaaaatagatatttcaaatgaaaatttttaaaatattatacgtttattaaagttgtctccaacttttataaaattaattctagattttgtttctgaagtttaatactaaaggcatgtttgggtaaacaacttaataagcacatgagagcttacaacatgagagtttattaacattttttattgtgaaaattacaaaactaagcttaaaagatcttattttgatatac

SEQ ID NO: 84010 - DNA, 469 bp, Glycine max
atatcattccgatttattagaacgacaattctgggtcatcattgaaggatgaaatagccaagatctgcacacaattggtataagtttgcattagagctgacaaaagttacatgaatttctaatgcctaagtagccacctcaatgctccaaataacaagaagacagcaaacccaattttttgtcaatgggcagaaaagctaggcactgtcaatatccagactccatagtccacaactctgattttttttttcgagtataagctacaacattgaaacttaaatgaagtgaattaatcaggagtagtgcaatggcaattcttggcaaaatgatggcattgaaaattgagggagatttaatttttcttaagttgagactatttctagaatgtaaagaatctggcctccattttaggatctacaaatgtcaattgttcactaaaatgcattagatacctgcattgaatgcctta

SEQ ID NO: 84011 - DNA, 402 bp, Glycine max
ggcgccgaaagcgtttgctttatattaattgggtcaatctattttaaaacaggacttgggaagaatcattaacttacagaaaattattacaataccatggaattctaacttacagaaaattttattttggaacttgctataaggggttgatgctataagggggtgaaaagctcgtgaccatccaatccataaagaggtttacttctgcaggcgtacttattcaagaatgtgagcgcacgggtttcaacttaaatgccgaatatacatgtgctctggaacatctgaaccaagactatttgcacctaagggtaattgaagctatcacttacactggaatgaaactagaacttgttgatgaatctgtttgtcaccggcggccacaacattaaaacatgttgggat

SEQ ID NO: 84012 - DNA, 260 bp, Glycine max
gcttaaaaacaattaaaaccataattttagggggttttttttacatgaacccctgtccttcaaatcatataaaaaaacacatttttattttacaaataaaaacaaacaactttgatctaataaaaaacttatcaatttcaacccacaaaaatccttttgaatcacaaaaaaaaacttttttataataaaattcttttttacaaacaaaacacactttgcatcataattacaaaactcaaaacaattaatcattaaatatc

SEQ ID NO: 84013 - DNA, 420 bp, Glycine max
gggaaaacaaaccagcttgtaagtggtagtaaaaattaatgaataatcatcaagagcatacacaagaagggatttaccctgtcatcaccaagcagctaagcatctacacatatctcagtaagtaaaagtaacatttttcatagttccatcttttcaccaatgtaaatcaacctctactctagtatcccaaaaaagagattaaattaagacactttaccaaataccaaatcaccggcatctaggagatataaggttagtccagtggttgcggaagggtgaaggaagaatggacaggttgcagtcgcaggttcaaatctctccaactgagatttctaaaaaaaactaaaaaatgtaacatttgtggataaaaaacaaaaaaccacgatctccaaaacctaaccaaatatcaataattgacga

SEQ ID NO: 84014 - DNA, 188 bp, Glycine max
ggatgaaaaaagcggattctattttttttaactctaataatttactgattcaaataaaaagggaattgactaattatatgggcctctaacaaatatgaaggctaaattacacaatgtaataaaacatgctggtacaacaaaattttgctgaaaagtgctatttttttttatcccacaacttggaaaat

SEQ ID NO: 84015 - DNA, 437 bp, Glycine max
cgcaggaaaactggttaaaatacattcttttgccataggaattgcattacaacgatcaccacaaaagaaaaaattgggggattgattagttgaaaaatgctagtgacaaccaaatgctatatcctacaagctacattttacaaggaattacaaaatacatagcgagcaaaaaattcagttcaagttaattctagctggaaggcatactccaggagattgttcttccaaaaaaattctttcacagttaaccagtttgatcacaaattcaggtacaaagcggtacttctgatgaacttcagctaagcttctgccaagaacatgttcaacccaatcctccactgcttttgtcttgtctgataccaaacagctgcaagtatctgggtcatgacctcatactcaatttcaagtataaactctgatcctaacattttttgaaa

SEQ ID NO: 84016 - DNA, 477 bp, Glycine max
gccctaaaccaacagtatcaccacttcctgggggattaccaatagggctactattacaacctcgtatattgccacaacatagccacaagcatgaaaagcacaaacaatacaataatcacatcaaaaccttgcacataataattgtcattatttgtgccgtatttaacgtcctttaatgaatgaaggtggggggacaatggaattaaaaatcaaattcagttctcagtttgagtccctcaaaaataaaatcgcaagaggtcatcaggaatccatgaaagcatcacttatgaatctggcagtgcatcatttatgcaggtctctggtgtataaatgcctatcctcgtctctaactttaacagatggcccaatgtacttcacacggtcaccttttcttagctggcatccagattgatcaaaagatttggcatcattagacttagatgactcagaattttcagattcaccagacactatctt

SEQ ID NO: 84017 - DNA, 278 bp, Glycine max
gggatactaaacaatactgcgttcctatataagcaatacatcttgccacttcaatacacaaaaggatcaacccaagaccattctttcaattacaaatcctatcaaacaaaaaaaagtctactactgattaaaatctcaaattgggacagaaaagagtcttagaaaagcgataagatagctaattcaagagctagtgaacttggtgacagccttggtaccctcaaaaacgcccttctgtcgtttttttgcaaccgcccacgcgtccgcggacgcgtggg

SEQ ID NO: 84018 - DNA, 296 bp, Glycine max
ggggggaaacaaaagatgcactaaactatgtgggtaacttaaccaaaaagtgataccggcaaaaccctctaaaacgaacaaactcaccttgtatataagcgggaccatctacttactattgctagatgttttcataactagtgaacctaacaaaaggtggggcattggggcaggatagctcgctgcccactatgatacgctcaatcgccgtaaatgttctcaccccgttaaccgccgccttcactaggacccggcacttctgggttattagttgcaaaggttccccttctgcttct

SEQ ID NO: 84019 - DNA, 503 bp, Glycine max
gccgcgtacgagctggatccttagagcggcgttttttttttttttttttttttttgttagcaaagttggcaagaaaaacagtaaaccgggacacaaataacaatgctctaaaagcgcagatgttgaacaaaaccaacccaaacacggtccaagcacacccacaaccttcatgtgaaagaaatggaactaaaaaacttgagatacaagaaacatgttttagacaacaaatagacccgaaaattttgacttttgaaaacagaaaccgatgtttcagcagattctaacaaaaacccagattaattctatagtcaaacatggtcctcaaaggctcaaacaaaaccatgagcaaagtccaacaacatgaacagaaagaaaaaacaacgtgctatttgttgccaacaacacaaacccatgtgatgtcatatcatcaatcttagagaaaggacagaacataccttttgttgttcaaaatcagaagcgggtcttaagttgattatatgttc

SEQ ID NO: 84020 - DNA, 435 bp, Glycine max
acaaaaacaagtttataattgatattttgattgaattatagagtttaattgatcagaaataccttttttaggtcctatgtcatgatacatactagttctatcagcagcattgagggagcaaaaaattatgaacctgtgctctattttagttacaaaagactcacggaaacatactagttctatcagtcctaggtcatgatacaaaatttctacctagttataaataagctacttagtatgcagtttcaaaaggtagagccaattggcctctaaattcaatgccttggagtgctgatagtgaacgcacgtcccaaactatcaactggagaagagtgtggtttatcaaaaaattcactttccaatgtatgttgaaatccaatcctactcttacataggattggtgttcaatgtgacagaacagcgtaaaatgatggg

SEQ ID NO: 84021 - DNA, 408 bp, Glycine max
ggtctaaaatatcaaattaattaatatataaggggccatagtgtaatccctctttttttttttttttgaatgggaatgaatatgtttggcatttggcaattacatcaagttatcaaataccatatctgaatgacaatttcgaaaacacatgcaactgggaatggggtatcccattgtcacgtatccctcaaaacctgatttgcagcccttgattgctccctacatttgaatgcaggtattatttatttgtcaaacagacacctaagagtgatctcataagcagaaaatatagcaccattcacaacaaaggctctagcaaccgcagttcctaaaccccgccatagcacaacgtatccttcctcttcaacgctcttccgaagacaatccaaaatgcctttgtatttccgc

SEQ ID NO: 84022 - DNA, 394 bp, Glycine max
ctcataaaattcttcattgatcgctaaaaagggatcatcatcatgaaattgggcatccgttgtaacaaatagtgaaagataacccaaagcggcaaagcctaaggactagttcaaagacatttcattgaaacccacccactaaaatttttgggggaacggatccaaggatgagtagaactaaaaaaaccccatttcattacatgggggtaaaaaagagattttacaaatttcctgggttccatttacaaattcggagcctaacaaaggaaatatcaaacgaaatcgcaatcgagaatgtcaaacctccgttttctggagcagaggggcaaaaacgacgacgttttccttacaggaatcggaggctgccacgtaagtgtcgtccgaaaccatgcta

SEQ ID NO: 84023 - DNA, 388 bp, Glycine max
  unsure (1)..(388): unsure at all n locations
aaaaaaaaaaatttacccacttattggtggtttttttcaaaaaatttggcccccctttacaacccataaatttacnaaaccctaactttaaaaataccaatttttattttaaagacatttattaaaaactcacccaataatattcataactgaacccttccaaaaattattataccttaaaaattccaaacaaatatacaacccgaaaaaataaaaattaaaaaattttgttccctaaaaattaaaattactcacattaatttacttaccctcaatccaccttttaaaacaaaaaaaacaaccttccctttttcaataaaaaattcaaaaacccacccctataactctacttaatattttccctcccacattttttttttttttaacc

SEQ ID NO: 84024 - DNA, 52 bp, Glycine max
tcggccacgcgtccgcccacgcgtccgcccacgcgtgcgcccacacgttcga

SEQ ID NO: 84025 - DNA, 127 bp, Glycine max
ggttggaaaaagaaggaacatcagcagcagcaacaacaacaacaacagttctagtagtagcgttcttgggttggatgtgaaggtgcaacagagccctgaagcattatttcatattaggaggaggatg

SEQ ID NO: 84026 - DNA, 355 bp, Glycine max
gaccacttcaaaacactcataacacaaagcacaaagcaaagctcatccttgagttaaaaaatggcagcagcttcttccatggctctctcatccccatccttggctggcaaggccgtgaagctgggcccatcagccccagaagtgggaagggtgagcatgaggaagaccgtcaccaagcaggtctcctcaggaagcccatggtacggcccagaccgagtcaagtacttgggcccattctctggcgagcccccgtcctacctaaccggtgagttcccaggcgactacggctgggacactgctgggctttccgcagacccagaaaccttcgccaagaaccgtgaactcgaagtgatcc

SEQ ID NO: 84027 - DNA, 276 bp, Glycine max
ttgtactgaaaccctgattaattttggggtgtagaatatgcactcctcttacacttccattttctcttagtcctcaatacctaataataattcctttcatctgaaaaccatcctaccttactgctttactatcctactcatccatttctccaaggctactcccaaaattgactaaactaccgtacaaactattcgcaaatactttagaaaacacttccaccttctatacaaacatctatttactacattatcttctgcatgatcaccttttctaat

SEQ ID NO: 84028 - DNA, 57 bp, Glycine max
acccttccgcggacccttgggcggacccgtgggcggacgcgtgggcggacgcgtggg

SEQ ID NO: 84029 - DNA, 207 bp, Glycine max
gaggactctgcagaaaaggcacacgggtccgacttcaaagaaatggacttgtctcaccgaaccctcaataactctaaaactctgctatataaccattccacaccgtatgtttttcattgaaacacaactacattttgataaccatggaggactcaaaatctggtgttgcagcccatgaggacagcaagggtgggggtattaccatca

SEQ ID NO: 84030 - DNA, 350 bp, Glycine max
gggggggaccacaaataacaaactactttgcgaaccccacattgaaccgcaaaaaagcaagccacctatcgcctttgaactccacataaggataaaccaaacacctgtctttgcgaaagcaaaacaatttttagcttaaactaaccttcgcctacaacaaattactcttaatatattattgatgccagaacaggctctctatatgcacaacctacagtaagcaaagccctttatctgcgatagagctatccaaagacattgaggactttctgcaacgccaccaaaaaacacctttcctcaaccatgctgagactgcatgacttggtgactgcagagacctaaaccagctc

SEQ ID NO: 84031 - DNA, 181 bp, Glycine max
tatttgttttaaataaattcattccttagggggaaactaaccaaagaagtgataacttttatcatcatacaccaccactactacattcaaatattatattatatcaacctttcttttttcgttttcaaaactatttatcacatctcataatccaaaacactaactgctacttctctatctt

SEQ ID NO: 84032 - DNA, 249 bp, Glycine max
  unsure (1)..(249): unsure at all n locations
gtcgctgtgaagccgcagctcctcgtggaagctcccaaagccaacgacgccatntcaataggccaataccaggaaggggaaggggtcaagcaccaggtactcaatncttttntcaaagctgatcaccagctccctctcatactttacgcacaacttaaaaatattgtcttctggaatggacattttaaacatccctaaaaagaatttcttcggcagcgaaaacggggggaaacggtgtcggttttgtgc

SEQ ID NO: 84033 - DNA, 130 bp, Glycine max
cagaaggggggaaactgaattgaatgacaaaagaagaaaaaaaaaaaaaagacaaaaagcggcggttctagaacagccaaagagactgtcgcttgcatacgacgacatacttcttgtataatgtcaccta

SEQ ID NO: 84034 - DNA, 270 bp, Glycine max
  unsure (1)..(270): unsure at all n locations
ggggacaaaaagaacagttaatttgggctcactacgttcttttatttatataggttggcgagaatagaaatttcccatgaggcttacaaataaacatagggcttaaaagttaaacgcctctatcatatgcatatgaactgtgccatggaaaaggatcaactgccagtgagtgcgtgactagacagattatgaaataccattcntcttanacattctaggacaatgggcgagctgaagacccaccattatcaggttcaggggacccctcta

SEQ ID NO: 84035 - DNA, 235 bp, Glycine max
  unsure (1)..(235): unsure at all n locations
gtacgtaagctggaacccttaaagcggccgcttttttttttnntttttttttttttttttgggaaccaaggggggccgccttctttcagtcggattcttgtagccgtacctttcagncgtattgacgcatgcgcacggacgtgtggtcacacccgaagttcgaaccggtaattgcagaccgaccactgtatgctaaacagatttgcataaaaggaggccgataacagcttgatag

SEQ ID NO: 84036 - DNA, 336 bp, Glycine max
cggcccaaaccctgcacatttgaattgccacatagaatggaggagcggtacaagcaataaatcaccacctagataagggggaattggtatcagagcatgtaccatttatcaagtctatacagtagttactaacattaaatacgatgtattcatgagtatcgagacataattcacccctggctgcatttatctatgcgcattaaaatccatgtgactgaagcaggaacctatatgtggaggatgaggatcctagctgctctcaaatagtatgtgctcttcttctaatgtggtcctatcttcgacaaccgagacccaactttctgcaatcttggcaac

SEQ ID NO: 84037 - DNA, 254 bp, Glycine max
  unsure (1)..(254): unsure at all n locations
agcagcgcgccgctttttttttttttttttttttttttttngggttaacaacacccccccatttctattcccggggtaatttaggaaccgcacaagcaaaaaaatcacccccctgtcaaaaactttgtcaccttctatttacaacgcaaaaactcaaaacgttgctaccccttgtctaagaaaatagatttttctcttgttccaaacaaaaataacccctccccctctttattattttcccataaaataccttt

SEQ ID NO: 84038 - DNA, 332 bp, Glycine max
  unsure (1)..(332): unsure at all n locations
acgtatagcttgaatcccctagagcggccgcttnnnngnnnnnnnnnnntttttttttttttgttttaaccccacaacccataccaaacctttcggggatttataaatttttaatggtcgctgacatatatttattanccgaacccctgccttcaaccctaccccccccccctaaagttattcgtgttacaacttccccaaatcaccccccccccccatttcaaattaaaattctcctcctataacaaccccacccctcaaaacccccttaaacatacctattgaaaccccccccccctaccgaagtaaccttctccccataattccgcttt

SEQ ID NO: 84039 - DNA, 185 bp, Glycine max
aaaaacaaccacctaaactcccgtaattggtgcgtttaaaaaaaacattttcacccaaacattactttaaaccctaaaccaaacataaaccaatttaaactttgaatccacataatacaaactttttatttttaaactccaaaaagctccttctaccttgcttaaaaagggttaaattaccctcc

SEQ ID NO: 84040 - DNA, 204 bp, Glycine max
ggcacagaaaaatgaatcgattgccttttctggcataattattttttcaaacaaaacctattttgggttccaaaaagaaaactagttattacctttcaactcaaatgcattgtccttcatgcacatttgctctgtgagcaaatttcactattctttgtgcacgcctggttttgatctttttattgttggcagagaaatgcaaac

SEQ ID NO: 84041 - DNA, 426 bp, Glycine max
cccaatccagaacatgattattacattatgacggtagattttaaacctttgctgttataatctccattttaataaactaaagtaatattttcttcatagcttagatttctaccttataaactatagtgatgcagaagaaacacttcaaatttctcaatactatcagggttcagtacacttgttgggaagacacactaaggggaagaaaagtgatttattatacaacagaacaaattgaaattaaaaaattaaagcctcgcagcacttatcctggttcagcagactagttcaaagaagaacgcgaggaaaagtgggtattcgagtttcacttgaaagtggagaatctcggaagcttgtctctcagatagaacaatcttgctctcctgaccttacgggggcttaccactctgatttctttgatgtttg

SEQ ID NO: 84042 - DNA, 74 bp, Glycine max
gggcgggtgaaccaaacatacacattaatgtgactaaagtaaactgtaaaagtcaaataaataacaacagaatc

SEQ ID NO: 84043 - DNA, 423 bp, Glycine max
ggattaaaatgacagcttctcataaaatcaaaagcctagaaacagtatcacaacaaaagctgcaagtatcttaattcctgtcactgctcttaacacaaaatactaacctgaatttgatattacctaatcacctatgaataagatacatttattaagtatcactttcttctgggttggattccagttccagtcctaggtgaatagtggtggtagaaaataaggtataattactgttggtgtttgtgatatctgcttgttcctgcattgaaagagcatgctcaagttgtacttctacttcccccatcgttggtcggtcatccagttcatactttaagcatcttattatgatatctataaagacttgccttcactctgtggcaatctttcctttgatattctggtcaatattcttctcaacaggct

SEQ ID NO: 84044 - DNA, 477 bp, Glycine max
gcgcagaaactattttctaaattctaacatacgtgtgcaatattgtaatgcatttatacaagcctgccgtataaatccaatgaatccactaaccgaactggactaaccagtttttttttttcagttcagttttttttacaaaatttaaaaaaaaaatggtaacccaaaaaataattaaactagaagtttggttcagtttttgtgaaccatgtttctacatcaacatggttcgaccaaacccatcgatgccgagtcctaatcactgtagattttgctgtctctgctgagagaaattggggggattctgttgtgtgttttgaagggtcaccaacccagattgtagattctgagcatttgatgccatgctaccaaatgcttgtgaaccatgttgttgctgctgctgtatgggcatcataccaccaggattgccacctcccatgttaaacatctgatcactcaacatttgggaaggatgac

SEQ ID NO: 84045 - DNA, 298 bp, Glycine max
  unsure (1)..(298): unsure at all n locations
tttttttttnnggcttagaacccattttctaaattctaacatgggggtgctttattaaaatgcatttatacaaacctgccgtataaatccaatgaatccactaaccgaactggactaaccagttttttttttataaattcaactttttttacaaaatttaaaaaaattttctttacccaaaaaatatttaaacttgaggtttagttcagttttttgtaaccatttttaaacatgaatatggttacaaaaaacccatcaataccaacccctaataaatgtagattttcctgcctctcct

SEQ ID NO: 84046 - DNA, 321 bp, Glycine max
gcttataacccaacggaatctaaataataacggggggttttgtcaaatactattctttaccctttacttttcacccaaaactatctttttaaatgagaccttgtccctttcttaagaagatcccatggactgaattccacctttgaaccctcaaaaccaatattcgccgacacattctccaattaataccctacaattacaatccgtttccttggattctcacctacataaacaacccttaataacataggatggtcagtcaccaccaccatgtatttccttccaagaatgctccaattcaccatttcgctctacaaaacc

SEQ ID NO: 84047 - DNA, 285 bp, Glycine max
cgcgcgcgtgcgcgggtcccctatagagcgggcgctttttttttttttttttttttttttttgggggagagcaggcaccattataggcgaaaccaaagaccgtattccgtaagagttcattactgcatacaaattacatgagcctcactatgcgaacttagaaaagcctacttccatcttcaataaatacccatcccatttcgatctgggacttacataaccacgtacattcgatgcctcaactgaccttaacctgtgcttgcaatttacaacaaacgctttgta

SEQ ID NO: 84048 - DNA, 381 bp, Glycine max
gagggggggaaaaatctccattcttttaatttgggaaagtaacagaacttacaactattgggaaatattggcttacaacatcccaaccccaaatacaatattctgaatgaaacaagcaaagcagccaattaaacttcatatcaaccatgtctatagcctatagtctatatgctacagtatctgacctgcttactctgacagatggcacttagagcagcttcagattatgccttttgctctttagcctctctagtcatgtctttccatgtgatgtatcaaaatgtcggaaaatctatgaaagttttacagcctaccaaaatatcagtcattcaaaaaatgcagcaaatgcaaaatactgtgtattaacagtcaacaaatatg

SEQ ID NO: 84049 - DNA, 308 bp, Glycine max
  unsure (1)..(308): unsure at all n locations
gtacgttagctaagancccccggagggcgcgcttttttttnnnnttttttttttttttnnnttgtttaaaaccaaaaaaaatactattagaatcgccccttttttaaaaaaatgttctctctcaaaaaaaaaaaaacatattttttttttccccccccaaaaaaaatccccccccttttttttttaataatttctttcaccacaaaaattataaccttctttttccaccaaccagggaaatgcaaattactatttttttggntgcccttttttttaccccccccnnnngccaccccctcctttcctcc

SEQ ID NO: 84050 - DNA, 379 bp, Glycine max
actgcaaatatttttttttttacaaaaaaaaagaagtataaccgatcacacctaatacatcttcaaaatcaaaggataaaaaaaatgctttttttaaagactaaaaagtaaacatttttatatttacataaaccaaatacatatttaactcaataaaatatcaacatgttaatggtacattagcaaaattctgaagcttattatgccttgtatttgtattagcatttaagtttcataattttatcaacattacataattatccaaaactatttctaataactatcctaagcatttttctgataggtaggacttaattatgtctacatcaatcatacgtactatgatataccccatgaaagaaaactcacccaaaaggga

SEQ ID NO: 84051 - DNA, 365 bp, Glycine max
ggttaagggcaagaagctttgttgaaacgattgagacaaataggacatgtttattacaatagaagaaacaaactttcattagtataactcattctaatctgtgttcggataacgttagttacttggacatttcaagatccggtctcctatcaatcacttcgctcgatgagtcttcaggaaatgcatcgggataagtagccataattttttatttcatacttctgcaagagagggttaaccaacctttaatgtaagatttcgtaaagtaaataaatatgaaaataagccacaaaaaagaaacataagagatatgtgtctttgggaggggggggaggatagcaagcacgggtggaaggttctttcat

SEQ ID NO: 84052 - DNA, 317 bp, Glycine max
  unsure (1)..(317): unsure at all n locations
gacaccaaaaaaccaataactttcaagctgcaaggctccattaccctaagcaacaatatcaatgaccggaaaaccctgaaaaagaagccattgccttcagcttctcctgctgatcagaagaagccatcaccgtcgccttcttccgatcagaagaaaccagtaccgaaggagcagagagcaaaggcagctggcactcctccaaaaccaaaggccaaagatatgaaggggagtcaagagaaaaagccacaaccacaacagaaagtgcctncttcggttagcgcatgaagcttgctgctgcgaaaatggttactgatcat

SEQ ID NO: 84053 - DNA, 228 bp, Glycine max
  unsure (1)..(228): unsure at all n locations
accgaagaggcagccaagggaatataangaanngatggaaagttccttgatggatgggttatnnnnaaaaatacgctaaacccaaaccaccggcggatgaaacagggatgaattcgcaaccccagcagtcatggggagcttcatcaagttcctggggtgcacaagaaatgaagtgatattgtgagagccccttcctttccccaggcctggggctcgtatcggatcgtg

SEQ ID NO: 84054 - DNA, 142 bp, Glycine max
cccacgcttccgtccggtgtgaagaaaccacagaggggcacgtgtgcgaaaacaccagaaagggggcgccgccccttgtttctaaaaaaaaaaaaaaaaacgggcgctctaaaggggccgctcttaaggacccaagcttacg

SEQ ID NO: 84055 - DNA, 121 bp, Glycine max
aaattgccagatcagaactcctggcgttaagccagaacattggtgaataccggttttggtgtcaggatgcaaatgaccatgtgtggtattggccacaaacaacatattcatgtgagttgcg

SEQ ID NO: 84056 - DNA, 157 bp, Glycine max
aaaaaaaaaaaaaaataaaacaaaaaaaagaaaaaaaagaaaaaaaaaaaaaaagaagaagataaaaaaaacaggggcggccgttttagaggacccaaactaacgtccccgtccttgcgacgtaaaaacttttttatagtggcaccaaaataaaatc

SEQ ID NO: 84057 - DNA, 274 bp, Glycine max
caaaggactggatgttacagtatatagatggttagggaaagtctatgcatttggtcttgatgagcatcatgtgatctctgacgccttgagcacccttatatagcttctggctgacgtatgctcataggcattggactctgtggcaatgccggaatatacaaaacaaactcatcttgccactcaaattgcaagggtggccgctccatattagatgccctttgtgatctcgaccatacactagaagcacgaatatagattgactgctgtagatgac

SEQ ID NO: 84058 - DNA, 335 bp, Glycine max
gagcgaaacagagagtgatttcagtgagtgatcggtgttcacttgatctcatcataatcgtcagcgtcaattgaagaagatgccgatcagaaacatcgccgtcggaaggcctgaagaggcgactcaccccgacacgttgaaggcggctttggctgagttcatctcaaccttcatcttcgtgttcgccggctcaggctccggcatcgcctacaacaagctcaccgacaacggcgctgccacccctgccggcctcatctacgcctccatcgcccatgcattcgccctcttcgtcgccgtctccgtcggcgccaacatctccggcggccacgtcaacc

SEQ ID NO: 84059 - DNA, 62 bp, Glycine max
aaaacttatactccttctgatccaaaataatacagtaagtagttcttctaaaaaaaaaaaga

SEQ ID NO: 84060 - DNA, 271 bp, Glycine max
tatattatgcagtatgttctatctgtcctttctgatagtagaagtagcagaaactgtctgcactgagtttcattttttactacgtcagtatgaaaattttgccgaccacgaccacccaggcgggtccagccatggtgttctttaaaattcttgggaagttcctgtcaaaaaaaaaaaacaaaatgactgaccttataaaataaaataaaataatcaaaaactaaaagttaagtattgtataactattttaaaaaaggggcggccgttttaa

SEQ ID NO: 84061 - DNA, 306 bp, Glycine max
agtcttccaggccacgccgtggccggcgccgccgcacgggcgacttccccgccgacgcggtcgcgctgccgccggcgcccatgccgttgcaggtgatgaccgaggacgcgctcccgtcgttcccgcaggcgactgcggcggcggtcatgaacgggggctgcggcctcatcgtggacccagcctctggtctgccaaccgcgctgtcatcagctgcggcggcggcaacggccgtgtccggcggcagcaccacggagaaccccatcctcacggcgcttgtcaaggagatggtacgcgcgatgctgaacg

SEQ ID NO: 84062 - DNA, 246 bp, Glycine max
aaaacttatactaatggtgagccataatggtgcagaatggggatattttaaagaacaaatgggttcacaaaatagatgttggccaaactttaagaatcagctgtagaactctttcatcctgacaggggagacttgtgtaattgactccaattgtaaatagcttgccggcgtttgcgctcgagagagcaggtaattccgtggtattggcgaagatactgttgctgcaccaaattcatagttgataag

SEQ ID NO: 84063 - DNA, 208 bp, Glycine max
acaacttcttctaactgtgagccataatggtgcacagttgggatattataaagggggtggggatttattgcgcagatagcgttctaattataccaaattacctctttcaccctttcattgcgatggctgactctattgtaagcaaatccaaacttgtatagcttgcctgcgcattctcttgcgtggagcgtggatactcattttattc

SEQ ID NO: 84064 - DNA, 391 bp, Glycine max
accgctcgtacgaaaacacgtaagggggggctaaacaaaactaatgactggagggactctatccgcggagagcatacacaatttaccactggactaactgccaacgttacgttgcaaagcctcgatctagggctggcttgggcaaactcaaacaatgcacgtccaaaatgccttttgaatctacatgagacatcatttaacgcaccgttatcaacgaccgagagacaggaacatcgagaggatttggattagtgagactggagataaagcactcattgaaagatgcgatcgaacgaacgaacggtcagaaacttgaccgatgacgcatttgtgtcacacaagctcatacccaaccgcatccgttgtatccctgctatcacggattgaggaa

SEQ ID NO: 84065 - DNA, 230 bp, Glycine max
caaagatggcggaactccaagagcaaacggagacggagagggcgttctactaaagcatccgcgcctgtccacccctgttgatgcatgtacaggaagaaccattggatgaagatggggaacaagaaagagagtgctcggatcactaccatatctgtggcaatctgtaatgcactatgaacagcgtggatatacttgatacaggaggaagagatgctttctgctgctaagat

SEQ ID NO: 84066 - DNA, 306 bp, Glycine max
aggcgtgcgaacaggcgtgaggggaaaacagaaggatatagctaaaaaacggttcactgcactgagatatgatataggacagactgtagtttacccatcacaacaagctgtactaactgtgcaatttagttcacactattggaatcagctacaaggcataggatggctctggtttgccgaaaccaacacgcatgtttaggacttaagtagcgtcagacgttgacactgttactcgacctggataaatatgaatggaccgtttgtgtttaaagaagataagagagattcttatttgctgccttagaa

SEQ ID NO: 84067 - DNA, 232 bp, Glycine max
  unsure (1)..(232): unsure at all n locations
tgaccaagcccgctcctccctcgcagacggttcgggatgcacgcggcggtggctcatnatctcgtggaggctttggccgtggtgaacgtggccgtggcagatgtggacggtgatatggccagaaccgtggcttcagtggtgacaatggcaatgactttcaaggaggttatggtggcagaggctatggggatggtgctgcaactggcggatctgaaagagaaagggagagaga

SEQ ID NO: 84068 - DNA, 156 bp, Glycine max
ttttgtcgatccagtgtcatgttaaggatactgtatgcataagggggtccatttctttggctcttaggattgtgtctgatactgttgtgtaatttattcgaatgctcaactgatgcccaggttttatgatacgttccggagcttaacttgttcagg

SEQ ID NO: 84069 - DNA, 261 bp, Glycine max
  unsure (1)..(261): unsure at all n locations
aaattttcagctttatatctcttcacagaaactctaacaactgttgctnccatgaagagataacatataacctgtttataatccttttctttttgtacaaagggaaagcaaaatatagtttaaaggccacaaattaagttttgttcctcccatagccgtagaacttttttgatgcaaatattttactgcacagtttaactgcataatcttttctatttatctgtaaacatagtgaataacacaggcaactttgtatggtac

SEQ ID NO: 84070 - DNA, 269 bp, Glycine max
ccagcggggactttcgacacctaataaaatgaagctcctagcaagaccgagttctcaactgatgagatactgtctggttttgctgtagtttgtggtgctaagatgatgcaccctcggtgcttacgtagtatacttctgtctggattcacctttttttcgcatattgtgttaatactctgtaaattatcaaactggcttcctcaatgctcgtgtaattaaatgaaccgttgagtgattaagctagaaggcaagatatactttctatggag

SEQ ID NO: 84071 - DNA, 203 bp, Glycine max
caccaacactggcactgaagtcaccaaggatccggatgctggacttgaatatggaaaagtatcttccactgaactggtacaagctgtccatgatatgctttcagctgcaggagtaaggatggatgctgagaaggaaacactctttgaggctactctttccttgcaagatcatgcttaaaaatctcaagttgctctcttggagg

SEQ ID NO: 84072 - DNA, 330 bp, Glycine max
  unsure (1)..(330): unsure at all n locations
acatagtagtcatgcgctgcgcgtgcagcttttctcttggagagaaaagctccaaagtgcccaaatagccagatctttataaagaaactagaggaggctcaatggtatctgagcgcatgcaacttttgtcttggagagaaaagctccaaagtgcccaaatagccggatctttataaagaaactagaggaggctcaatggtatctgagaagcttgccttgtgttacaccatatntttttttttgctagttaaattggctatgttcccattgcctgtgggatgtggactacattcggaaagtggattgtgctttaaagtgtagtccaattga

SEQ ID NO: 84073 - DNA, 243 bp, Glycine max
tggtgaagcaagagtgccctggacgagccattgttgggttatttggcaaagaactgctgcactgaatgagaggacaaagattgtagtagtacatggtttggtggtgaggtgttagtgctaggctgctagctgttagccatagcatcatttgcagtaatagcattggttttattaataataccaccgaatgtgacatgcagaattaatataatgttcaataagttccattcagtgattttcttt

SEQ ID NO: 84074 - DNA, 171 bp, Glycine max
cgacagactgagaaaccctctatgtgggactttcgctatcttaaaccgtggtattcttctaagaccagcccctgtagaattgtatgtgcgagtttctctcgagaccaaaattgaacgtgactgtgttaagcaacggttagatcggccatggcgtaacgtcccggccaacga

SEQ ID NO: 84075 - DNA, 213 bp, Glycine max
  unsure (1)..(213): unsure at all n locations
gtatgcagtgggggttgaatcctttttttttctgtttcttctctttgggagatactgaaaatcactttttctttgttgacctatgaaatctacttgctccattatttaatattttatttttttggtgcctttctttggatttgtttaatttgttagcttcaacaattaaggacanaattatttagtgactcctcatttttatatttattatat

SEQ ID NO: 84076 - DNA, 267 bp, Glycine max
agcctggccgtccgtgcaggcacctccgatgccggcaccgtcacattcatcgtcttttccgccgtttcagttgaggccaccgccaccaccgcagcaggatatgtctggcgcaggcggcaccaagtggcccggtggcaatcaaatctacaacccttttgcaccaacagctgtggcggcagctcatagagcggaggctgaccctgagtacgaggatctcatggcattagtttgcatgaaatagcgaagactggtggctgggccctgatc

SEQ ID NO: 84077 - DNA, 215 bp, Glycine max
tatttttttttttttttaaatttttaaatttttaaaaaaaaaaaatatatccgcaaatttttaaaattacaaaacactctcttccccatatattccacacaaacaaaatatttttacaactaacacataatacctcttatacattataattactatttacctatacacacacacacccaaaaaaacctcctattcacaattccttttctatacct

SEQ ID NO: 84078 - DNA, 425 bp, Glycine max
aaacattaattgctaatttggattatccaaactttctgcactttctaccaattcccccactttccaaacattaaaaaagaagcagccgtgaccttgaccctcccatccccagtccaaaacccttgaacttgctgtaggggaaaagaagaacactttattttaatgatgggggtgtaagacaaaacaccagagcgcgcgagcacgataaccgtcataagacttatgcttttggcttcacattcacagtatatgattattcctaatccaagactatggctgtttgaagttggatcttgcaacaccaaaatttcaattgcaagggctggaggagcaggttcggtcacattcacattcatagttatcagtggtcacacccatttcaatttcatcaaattgaacttgaacatgagcaagtgccattacca

SEQ ID NO: 84079 - DNA, 310 bp, Glycine max
  unsure (1)..(310): unsure at all n locations
aaaattactaacacttcgcttttttgttttttttaaaaactctcgcgcccaccatacagacaaaaaaactgattttaaaaattcaacttcccacactctcatgacaacatataaaccatggtaatttccatttgatgttaacaacaattaannggcaaaagatcccccttttaattaaaaaacgacctactttaattcataaatttaaattttttaagaactaaattgccctccaaagcacaaatttactttaactttaacgcaatgtgaactccaatcacatcatttcacatttttacaaatttttaac

SEQ ID NO: 84080 - DNA, 481 bp, Glycine max
gggaactcaaactctacctgaactatatatgtttgggaaagattccattacagtagttctgatctataacatagataaaagattgtctacaacgatcagagcaatcagatgcaatgcaacaaataaccatacatttacacgtacaactaatccacttgatctgtctcagaattgatacactttaagagggtgtacatgtaagcagaagcattgccttacaaatttagtggagaaaaagtttgaatcctttcacctggttcaaatgctaaaaataaggtatatttgcagtatctacggagagtctactccaaactaggtgctacctctgttggattggaatcaaacacatctgagtcatatgcatcaggctctttgaaaacttcactactggactctgcactagactccacatcagtctctgcactggactccacatcatcggactctgcatggactccacaccagactgacagatacagct

SEQ ID NO: 84081 - DNA, 179 bp, Glycine max
ctcaaaaaaaaaaaaaattacgaaaacctaatacaacagaacctttttgatcacaaaacataactctatccgacgaagttcaatctccattcactgtgtgcaaatcaatacactaacaatttattagattaaacactaaaaacacttttccatcaaacctcaaattaaagcaccaaaaa

SEQ ID NO: 84082 - DNA, 463 bp, Glycine max
cggtattcaagcccccaacaatgataaagttagcctttcatatcaatgagagacctaaaacaagaatggaaatacaaggagaagaagaggaaaaaaatggagaacaaggaagcacatgagcatccccaaaaatgtcttgttctcaacctgtaaatgaataatcctaataaattatccttctttttaactttttgcttcaaaatattgtcttaaaaagacttgtgcgattagcctggtatccgtgctaagcatatacacaaaaacaacactggtttaagtggttgcgagctaagcccatgatgcatgcttagcccaaactagtggcaaaggaaacaattggctaagcgcacaccttacgctaagtgcacactaaactttcaaatcttctcccagtagcctccaaatgcttgccgcgaggccttccaagctgcctcatgtgcactaagcttggtttgtcgcgcta

SEQ ID NO: 84083 - DNA, 382 bp, Glycine max
  unsure (1)..(382): unsure at all n locations
tttgctttaaatgaaactnaaaacaccacaattaggggaaatttgtgtaatttaaaagatgagtggaattaaataaaatttaaaagtgaaattatacaattgacaaagtatcaaaaattattacttattcaacaaaaaatataaaattattaattatttatacaaagattaacatatatacaccagtcaaagactatacttactccttctagccctacccaattaaataaaattgttcacctttatggactcgcaaaaaaaaataaatctgaactttaatgccccacagtaaacctctcgaacatattatgcaagagatatctaatgccaattcaatctacattaatgggattttcctgattgaaaccctttccacccaatt

SEQ ID NO: 84084 - DNA, 390 bp, Glycine max
  unsure (1)..(390): unsure at all n locations
ttttttttttttttttttttttttttttncacaccccccccccccacaaaaattttaaaaaaattttttaaaaaaaatgttttttttccccccccccccccaattacacccccccaaaaaaaaatccccccccaccccttcttaaaaaaaaaaaaattccccccccccaataaaaaaaaccccccccaaaaaaccacaaaaaaccccccccccctaaataaactttgccccccaaaaaaaaccccccccctataaacaaaacccccccctcccctcaaaaaaataatattaaaaaacaccccccttttaaaaaaccccccccccccccaaaaaaaaatatctccaccccccaaccccctctcttttcccccccccccccctccccaatat

SEQ ID NO: 84085 - DNA, 363 bp, Glycine max
gcaataaaccatgaactatagcataaaagtattgcagagatagtcatgaagacaataatactcatgattagagatagtggatatcgtaatttttaggcgacaatagattaaataacttaagaaatctctcaattgtttttcttaaagaagaaaaaaaaagacttataattgaataaagccaataaaccaaaatgtgtggatgtaactaagtaagcaatgacctgaaaagtagagagctactaagcaagagtgagctacatgttataataaccaggtgctgtatactcttcaaaacttaaaaaacaaggcctcttctttgttcgggaattattattttggtttccaatgctgacatgatatcat

SEQ ID NO: 84086 - DNA, 385 bp, Glycine max
agagcggccgcgagcgggcggttttttttttttttttttttccatttaaccattaactataccataaaaatattggggaaatcggcattaacacaatactactcattattatagatacctaatatctaaatttttaagcaacaatatattaaataacttaacaaatctctcaattgtttttcttaaataagaaaaataaagacttataattgaataaaaccaataaaccaaaatgtgtggatgttactaatttcgcaatcacctgaaaagtatagagctcctaatctagaataagctacatgttataataaccagttcctgtatactcttcaaacttaaaaaaacaaagacctctccttgtatacagaattattattttgttttc

SEQ ID NO: 84087 - DNA, 342 bp, Glycine max
  unsure (1)..(342): unsure at all n locations
atttatttttttttttttttttnaccatttcaaacaccatactaaatcttcgtaaattgttcaatttcccaataaaacatatccacaaaacattcataaaccctccaaaaaccaacttcacctatataactctacatttaatactttaattactttttcaaaaaacaaaaacaaatcttttcacctacattttataatatacaaaaccattaatcctttctatatttaaaccaattatcaccctttttcaaaaactcttttaaaaaataatcaacctcctcaattaatatctttttccataccaccccattttcccatatttcccttttcattcttacttcc

SEQ ID NO: 84088 - DNA, 307 bp, Glycine max
  unsure (1)..(307): unsure at all n locations
ccccaaatttttttttttattttttttttaccncttcccaaataattattacttctgcaaatttgggccatttccaaaccccttctaacacnaaataattacaaaaaccccattaatttccccccaaaaaaaattcaaacaaaaaacttctttcattttcatcaaccaaatccttcaaaaaaaactaacatttaaaaaaccaaaacattctcaaaaaaacaaaaatttatcccccttttcaactacaaagcttcaaatccccaacatacaatcatgataaaaaacccttatttttttccactttttt

SEQ ID NO: 84089 - DNA, 412 bp, Glycine max
cagcacacttggacaaacttgaatttaattacatgttggttaaaaacaagggtcccccgattcaacagaaactacaatcatgacatggctcattttcaggagccagtcgcccatatttgtcagcaaactagcttatgtattctgactaaaaattttacaaatcaaggaaggatgggaatagcacgcaaaacaggaacgaaaaataattatggagaaaatgatatttacacatttacgaattgacattatttgccgaagcctccaatcaataagcatgactttcttcctgtcgagtgcaaccctctaagcatggaggctaatgaatatcttgcatacactatcagcagaatgtacccctaccaatattttcagatgtattcacagcggagagggataaagcatcatcacggga

SEQ ID NO: 84090 - DNA, 333 bp, Glycine max
  unsure (1)..(333): unsure at all n locations
aaacataaaatttaattacctgcttgtttgtaaacatttaacccccccttcaacaaaaactacaatcatnacatgnctcattttcacgacccaatcccccatattaaacaccaaactaccttattttttcccactaaaattttaacaaatcaaagaagtataccaataccacccaaaacaaaaaccaaaaataattatccacaaaatgatatttacacatttaccaattgacattatttccccaaccctccaatcaataaacattactttcttcctaacaactacaaccctttaatcatgaaacctaataaatatcttccatacactatcacc

SEQ ID NO: 84091 - DNA, 298 bp, Glycine max
aaacaaaaaaccaaataacctgcaaaattgtcaaattttaaaacaccccgcgcctaaaaaaactaaaaactcataccattatttaataactcaacttcttttttaacaaaaaagaaatcattttttaattattaataatccaacaaccaataaaataaatctaaaaaataacttcacacccacaactaattacatttttatgaaaaccaacacaaacactctcacatatttttttattatcacaaaaaaccctacaattttccaaccaattaatatatttcaaaaattatcattaaaa

SEQ ID NO: 84092 - DNA, 197 bp, Glycine max
  unsure (1)..(197): unsure at all n locations
ttnnttnnnnnnngntttannaaaataccacaaacaattaaataacgggcttctgtgaatttataaaaaaaacggtcatcaattaatataaacatacattactcataattaaagaaatttctttaatagaaaataacccccttaattctactctacaaaaccctttaaaaataccaaaattatcaccttcaattaac

SEQ ID NO: 84093 - DNA, 569 bp, Glycine max
cacaagtcatccacaatatatttcacaacataagccaatactatcggcaaaataataatgtatatccttttatttccctttgatattacatcgggaaaataagcaaaagtgattaaaacaaaatgtaaaggatagaatagaaattttgggatgattttataattaggttccactaacacccaaaccttcttgtttgggtttcgaaatcctacgggtgttatacgaaccgcactgtaaacacttgtgaccaaatatgtgaaaagatactgtgctggtagagttacaatcattgcatagaattgaaacctgtcaaatacccaaacaatagttacattgtatattaagagcagcagcacggttataaaccagaaacatttgagaataaataaattctgacaaatttcatcatacccccctctcccctcctaccaaaatgaataaataaaatggcataaaaataagagcctctctgaaacaagcattatcataacaaagtatatgactctccacctagaaagtatatgcagaaatcttggttctgcctccataagccacacgattactaccat

SEQ ID NO: 84094 - DNA, 374 bp, Glycine max
cttggatcctctagagcggccgcgattgttcgattttttttttttttttttttcccacaaataaataaccaaacttaatttacaaggggaatttggggctttctatttctggcgggggaaattacaatgtaacccaaataaatacacctttaattttcaaattataaaaacaaataataactaattgcaaatacttctctgtattaccataacatcagaaattgtcttttaacacgaacttaactctatcaaacaaattatcaatggcaaaagaatcactcctgtacaattaatacttttaaacattattaaacataaaacattatttttcttagatttgttcactatatgtataacgcataccctaccacctt

SEQ ID NO: 84095 - DNA, 351 bp, Glycine max
ggaatacacaaaaaaattaatacagggatttttggtaaaaaataatatataacttactgattttcatttaactgaaacagaagaaaataacatatctatcatatcttactgggagtaacaagataaaaactaaaccttttaataacttgcagccctcatggaaacaaatgaatttatattttccttaacaataaggttattgaccaaaggaaatagaattggactttgaagcttcactttcacacaacaatcttttgattaagtgaaaaaaaacctgataataacaccaccctgaaatagataaacacttctcaagaaaatacgatgtaccctggcatgtaaaaaacactt

SEQ ID NO: 84096 - DNA, 320 bp, Glycine max
aaaacagatttctttttctacacaataaaaaaacttacggatcgttttttttcaccattgctccaccgaatcaaatatatatttctttcttaaactacttttaataaagaacttgttctccaatttatgtgctcttctttaatactacactctcttcccacgaggaaacaacacaacaatattatcatcacttaacccaactactcaactagtattctcataatgaatcctcatcattatactacatgcctaccttctgaacaccccattcttttcattaataataattgcttcttttttataacaactaccatcaacat

SEQ ID NO: 84097 - DNA, 306 bp, Glycine max
ggtgtagggtgggagtggtaactggtgcagctcgttttgctgctttgggtgtgcggtggttgtgtctgtcacctgaataacctgaaaatgtgtggctactgtggttactgaagctgctgaaactgctgcaactgctgcaacggctgcagaagctacccaaacttcacctactctgactacactgagtccaccaccttcgacaccttagtgataccagtgaaacctgattatgctgaagctgaagtggctgaaccggctgagaacgatgacaacaattgttgaccatgctgaccatgctgcccctgc

SEQ ID NO: 84098 - DNA, 334 bp, Glycine max
cggtgggaaaaaaacacagaaagggatctaaaaaaaatgagaaaaaattacggagcgggttccaacacgattacacgaccgaatcaaacccctcttttttttccaaactgcttttaatatagaactggcctttgattggtcttctctttaatacataccggtctctttttcatttgagggaacaagacaagaatctgagcatcgggtaacccaactgcacaaggagtcttcaaataatggagcctcatgatgaaactggatgccaagctcctgaacgccccattctttgcattaataattggggcttctttggaaaaacaactaccatgaacat

SEQ ID NO: 84099 - DNA, 367 bp, Glycine max
ggcacaagtttgttgagatagctagaagcaataagatgaaaatgaaagtgcttgttttgtttgttgctacagttttggtagcatatgaatgccatggctcagactaccagaagttccctctccaaatgaaaactgggtttggtgggcaatacagcaatgaggtggcatgtgccagttggaggcttggcgtggaagcaaacaacgtagtcaagtggcaaactgttcctgcagcttgcggagagtacatagctgactacgttctaggagaccaatatagatcagattccaaaacagttaaccaacaagcttatttctatgctaaatccctcaaactcaccaacaaagatgtctttgtcttggacgttga

SEQ ID NO: 84100 - DNA, 274 bp, Glycine max
cacccaaccaaactactcttttttttccaaacatcttttaaataaacccaccttctatcttctcccttttcattcatccccgaatcaaaagatagagcgcgccacgctaaacatgaaaagccattgctctggttcgactccctcagaaaaatctgctcttgatcttgaaagaaactgttgtagtcattctaatctgccctcacttaatccaccaacgcttcaaccctttgcttcagctggacaccattgtgaaaacagtgccccttacttctca

SEQ ID NO: 84101 - DNA, 414 bp, Glycine max
  unsure (1)..(414): unsure at all n locations
aaaagggggggggccacaccagcgtacngntnggnaaaaaaaaaacaatttgttttcaacaaaaaccacacccaactatgtattgggcgcacttcttatgaagcccccaaaaatatttgcacaaatatttttgttgttcccccaaaaaaaattttcaaataattatttttttacaaaaaaaaaaaagctggttttttttacttctacgagggagcaacaaacaagattcataaacaaaacaaccaggcagctttatcctttttttatataaatattcctctctaagaaggtgaagaaggtgtccattaccactaccctcaaaaagaattcatgttttaaaacacacacacccccctgaatgattttttttttcaaataaaccaaaaaaaagttttttaaccatttaatttttat

SEQ ID NO: 84102 - DNA, 342 bp, Glycine max
ggttctagtgtgtgattgtttgttgtggtaactcgttcttcttcttttgttgttctgtgtttgtgtttgttttttctctcacctgaaaatgtcttgctgcggtggtaactgtggttgcggaagctcctgcaagtgcggcaacggctgcggaggctgcaagatgtacccagacttgagctacactgagtcaaccaccaccgagaccttggtcatgggagtggcacctgttaaggctcaatttgagggtgctgaaatgggtgtgcccgctgagaacgatggctgcaaatgtggaccaaactgctactgcaacccctgcacttgcaagtgaggtgttgggagagc

SEQ ID NO: 84103 - DNA, 244 bp, Glycine max
aaaagggagctcaatgcgtatttaaactattcgtcatattcttatagagggagcatccattccttgtttctgaataaattaactctcttgtcaaatactataatattaaagctcacctatcaagttcaaatttgatattcttttacatacgaacttttatcaaatttttctattgctcaacaccttctaatcacaattatggactacactgctacctcgaaatcttaaatagagccttgttctt

SEQ ID NO: 84104 - DNA, 259 bp, Glycine max
aaaaggggagttttttaaaaaattgatattgtaatttgtgggaagggaaaacccgataaccttttctgttattgatcattatcataaactttacatgtaaaggttttggctgtaaatatgctatacatgtgctacattagagctacataaacgcgatcccattttgctatgacacttaagctgatcttctagttcacctttttgaagacccaattaactttgatactctgccataagcagggttcccactcatttaatg

SEQ ID NO: 84105 - DNA, 420 bp, Glycine max
gaaaaaaaaaacgagggggcgcacgcctccgaacggtttgaaaaaacaaaaaaattggtttatttttttttcaaaaaaaaaaagggcgctgggttgttttacttaaacctcttaacatatacccatatatatgaaaagatattttaaatattttacatatacatatcttttgtgttgagaggttctcataacaaacctctaatattttaactcttaaaaataatataaaatgtctcgcgcattttgatagtattgaataacacatctatatcatcctctaacaaaaaggaaaattttcaccacagacctcttttcacctctcatcattaatcaacaatgaatcccctcactgtgatactgatattgacaactcactcccttaatatttaccccttcacaaaaagaaaacttctttttttt

SEQ ID NO: 84106 - DNA, 326 bp, Glycine max
aaaaggatgcatgggctggaaatgaaaaaaaagcccttgagagggtgggcgttttggatgctatgtaagatgaatcaggtcttgctgaatatgacagaattatacatggccttattgatggcgggttagagaacgtttcacaacacatttgagggagctttgggtgacatgattttaacacttatattgttgtttttcaactttcgatacctcgtttcctacaacaaactttgagacaactgagctgtcatcactgccggcctcatattcgccttcatcgaacatgcattcaaactctttgtcttagtatcgagcgtggaacattt

SEQ ID NO: 84107 - DNA, 343 bp, Glycine max
gggagcaagagtgaagagcgaagaggatggctcccaagggtttaatctttttggctgtgttatgcttctcagcactgtcactgagtcgttgtcttgcggaggataatggacttgttatgaacttctacaaggaatcatgccctcaggctgaagacatcatcaaagaacaagtcaagcttctctacaagcgccacaagaacactgctttctcctggctcagaaacatcttccatgactgtgctgttcagagttgtgatgcttcactgttgctggactccacaagaaggagcttgtctgagaaggaaacagatagaagctttgggttgagaaatttcaggtacat

SEQ ID NO: 84108 - DNA, 163 bp, Glycine max
aatgggggaaccaaaggaaaccaaaaatttaggtttggggatgtcggccttgaaaagctctaaaagatattctcgcgtgcacaggtagcgctctgccatatcccacccggattccccaccctctatttctctcagcacgggtacatatcctctctctcccctt

SEQ ID NO: 84109 - DNA, 374 bp, Glycine max
gatatacaaatattgaaaaacgatttgctttgttaatttgatggcgttgattctccttttatttcttggtatgagcatatcatactacgaagttgatgcaaggagcaaaaatctaccagatatgcaacagagttttaccagatcactaaatttgaagagcattcttcctacaatgaacagtgactttgagtgcatcggtatatacaagcaaccagcttttaaacatcgtttattgaaaaaccacaaaatccagcttaatccgactttctcaaggtacacgatgcaaaccagactgccgttcatggaaaaaacttttcaaattcataattccaacaaaggatgtccttcaggaaaagtgcctattcgcatgataa

SEQ ID NO: 84110 - DNA, 330 bp, Glycine max
gactgcgaaccagtaaggactggcatggggacttttaaccgccgatctcctttgttttgcatcttctcatgtaaacagttaagaaacacacatcacggtggataatacttatgggtataaaatcccaacttataacattatgagtctgtagatttctgatcattattaatatataactttccattaagttttaagcttttttgagtttttatacggacaatttgcttttatgtgtaatttcaaaagtctccataaaattcagttgttctttgttttgaaaatactaaaaaacacatgtgatcagggcctactgatgcatatgagcatgat

SEQ ID NO: 84111 - DNA, 332 bp, Glycine max
gatcgaagcaaaaaatgaaaacccaaagtgcttctctcctctgtctttttctctctcttgctatccttttggctagtggcactgctgcaagtgcaactccaagaagcgcagtgccaagccaccatgtttcaacattcaacagaagcctttttccttccacttttctctttggaattggttcttctgcttaccacgcagaaggagcagcaagtgtagatgggagaggaccaagcatatgggacacctacactagacagcatactgaaaagatttgggatcatagcacccgggacatgggagctgattttatcatcgatacagggggacataaa

SEQ ID NO: 84112 - DNA, 347 bp, Glycine max
tgcgctctaacatacttcttcaaccataccgcggcgcgtgtcctttacccttcgctttcattttctacttcaaattctcaatgaaaccaattcagatcactccaaatcccaaatccgaataaaaaaccgaaatgacatcttccaatatacacgcttcctctaatgccccctctaagcaagtaaagctctcatccaccatcccccagaatccccaactctcgatttctccaaacacgactacatctcctcactccatatcctcacaaaacttaaacactgcatgtctgtgaaacccatacatgtgatctgttttatactcctactactccggaacaacatcaccgctc

SEQ ID NO: 84113 - DNA, 373 bp, Glycine max
gtgtgcgaacacaaccgatatgacctcagaagggaacacaaacacacacggggtgggtgcatacgatgatgcatgtgttcaattcattaatacttaacaccgcactactacatcatcacattattactctaactacctactatgtaacttttttcattagctagtacaaagcttgtatcacacactgatgtactcttcacctcactctgacatctataaacactaatggaacagaacataagacttgcctatttacttgccttatcacaaatcacctgagaacgtatgtatcttcttttgacgtctgcatggatgcatgatatcattggctgcccttcacaattcactaggagtatggacttgatacatcttc

SEQ ID NO: 84114 - DNA, 268 bp, Glycine max
gcaaaaaacccacaattcattaactgagcaatgggcataaattccacaaagcctgaaaacctaaacacaaaaaaacttactgtcacctcacacatattatataccaattttctgcatagaaaattactactaaacaccaactttcacgcttatattcaaaacgtatatatctttctgggaattaaccaacttcataacattattacaccaaaaaactaaaaacaaatcattcaatcaaactcaaacactattaatgatgtaatattcc

SEQ ID NO: 84115 - DNA, 238 bp, Glycine max
  unsure (1)..(238): unsure at all n locations
aaaccattaaaatnnttttaaaaaaaggggcaaccgccaacttatcaaattaatatgcatactcccttaaataatccataaaaatccatttttattaccaaaaccaaaattaaccaccttcaataccccggcaacgataatattccacaactacaacaaaatatcaagttctaacaaaattactgaattaaaaaccgaaaacaaaactatctcattctgatcaaaactacatatccaa

SEQ ID NO: 84116 - DNA, 319 bp, Glycine max
ccggacattggaataattctaaaaaaaacggattgggtactactgcgtgctgcaaaattatccaaaaccagacaagctaatccactttgaacccaccctgccacatgacatgtgcaagtgaaaattggtccataaagaaacttacaaaggtggaaagggggcaaaataagaggaaaaaattaaccgcctccctttgttggtggaagaattgaacaggtggatcaaacggggctataaagcttgaaaagtgggggcttggggttaaagttcataccggtgacgatgaccaaagggatgaaaccgtatggagtgacgacct

SEQ ID NO: 84117 - DNA, 286 bp, Glycine max
  unsure (1)..(286): unsure at all n locations
gatcctntagagcggccgcgttgtttttttttttttttttttttttttttaccataatngctttctatccaagaccaattcacgaaancgcgcgttattttaaagctatatggtcaatgaaacaaangttaatcattctacctaacaaaacgatataactcaaccatcaaaaatatccaaccaaacaaaataatttactacacaaatctttagctagttcataaaagacagaacacaagatttaatctattaataaacatttcttaaacaccgcaacttttttaca

SEQ ID NO: 84118 - DNA, 72 bp, Glycine max
  unsure (1)..(72): unsure at all n locations
gatcctctagagccgccgcttgtttttttttttttttttttttttnnngcgtaaaaactttcatatattata

SEQ ID NO: 84119 - DNA, 335 bp, Glycine max
ttttttttttttgggcaagatggatccttgatggttggatgtgcagtgcccattaagaaaaagaaggaaatttccaatggaaatgggagataaaaaaagaaggaagaagaagaaaaccgaaaccccccaattacatattacatatacataacaggtatgcgtatgttctctctgcagtctgcaactttcacagttatcaagtgtgaataaaatattttttttaaaaaaaaaacaagaagctaaaaatccctacctccagagaaagaagaagggacaaaaacgaacccgaaaaaacgtgaacttattttttttttttttcaattttgagagagaag

SEQ ID NO: 84120 - DNA, 423 bp, Glycine max
  unsure (1)..(423): unsure at all n locations
acgcaagcttggatcctctagagcggccgcgnggttttttttttttttttttttttttttgcaaatagaaacaatacatgcttttatattcacagaattggggatcttcagtggaaaaggaactaccttctgcaagagttgataagaagcaaagaacaccagtttaggaattgcagagaaaattgaaaccctctaaactaaaacactcccaccacttacaaacaagatttgaaaggagaaaaaaaaaccttggaaagaagaagaagaaaaaaaaaatggtatgtacaagtttaggtgtcaacatatgttgcaggatccaaaggtataacagtatctggaaaatctgttcttgggccagcaagagagtaatatgcaagaatatgagccgggtgctcaacaactacggggctcttttgctgattg

SEQ ID NO: 84121 - DNA, 238 bp, Glycine max
cccaacaataaaacctatttttaaagcgcggctgggtttcaatacacgtatcatattacatccatatctaatatttataatatacatatcctatcctttaacatcacataaactccttatttctcactcccaaaacataacaaaatcttagacctttttactatttgacacataacctcaataccaatttattttacataaaaccctaataacctatatactttaaatacataaaaat

SEQ ID NO: 84122 - DNA, 226 bp, Glycine max
ggcattgaaaaacaaaacttattaaccgcggtttgggctacttacaaacgacataaaaatataccacttttatattaatctaactatcattaaaatcaaaattaaaaataaattacccattaattttcaatctgaaaaaaccataccctaccaaaaactaagacacattataaaagtataccctttcaaagaataaatttttactttaagcactttacatccaaaa

SEQ ID NO: 84123 - DNA, 378 bp, Glycine max
  unsure (1)..(378): unsure at all n locations
gctggatccttagagcggccgcgnggtttttttttttttttttttttttttcaatattaaaacattatttatagaantaactgaagggaggcgattttacacatgtgttcctggttttttataatctaacaaatccttgaaatggaacacaacaaatcacgttttacaagctatcgcctaaaatgacttaaaaggctttgatcaattttcccccacatttaaagataccatgagaaccccctttcattcttggtgatctaaaagaaaacctacacacaccaaaatgccaccctttacaagatgactgcatgcgttcgtaaacttttgcaacaaaacccttaagggtgctgcttactttttttggggagcatccctaag

SEQ ID NO: 84124 - DNA, 322 bp, Glycine max
ggccaaagatgaaagtacttcaactattgaaccttggcttcaacacattaatcactcgtgttcaattacttgattttcaatcaatttaaataaaagcttgtagatccatcgagtttacatggatatcagctttttaaactgatgagtgatgaggattcggccggacaacatccttttcttttccttctaattcaagaccctagaatatcgctccccgtccccccctgtaagggggagatatgggaattgaagaattgatcagcagtgatgtaatcctgggtgagcttagagcagacatcagaagcagccaaacagggcctta

SEQ ID NO: 84125 - DNA, 297 bp, Glycine max
  unsure (1)..(297): unsure at all n locations
ccagacctatatatatatatcccgccccccccaaaaaaccacccgctcccctattncccaactacattgaactccttcattattctttccctcaaccaaaattcccaatttccacccaccctctgaaaagtacccccccaaccacaacctacatctcaacacccaaattcaccttcacatcaatccctccccacccacctaaatctttttcccaacccccaccatgcctccactaaaaccaccaccaacaacttccaccccctaaaccccccaccctcattccctaacccaaacccc

SEQ ID NO: 84126 - DNA, 434 bp, Glycine max
gcagtctgtactaaaattgatgatatgggggcggacatagctcccactaagctctatggggacaagtttgagtgatacctaacagacttctatgatctagtagttacgtttgcaaattacaacatcatcacaattacataccaaaccagtaaaaactggacaacaaacagttaagcaagttgttcattagttacatacccttctctcctcaagggcaagcctcttgtgtagccgctcttggtgattaaaaaattccaaaaacaaatccctcatgtcactagctatcttgaattcttgagttcctgagtatacaaccttcaaactgtcgctccttccactctttcctttttgtaatatattcgttgatgtattcacaaatcttcctattgatgctttaatttttttgagccccactagctttttcaagtactacc

SEQ ID NO: 84127 - DNA, 415 bp, Glycine max
agaaccaaacaattcttacatttatgaataaatgggtgcagggaagtatcttttgggtgtacaatggtggcaatgaaaattgaatacaagtccttatgcacctatcctaatctcctaccactaaggcaacctagtggattttgtaatagagtatataaaacatatagtgagaatttaatgcaatttttttttaacttttagtttgggatttcaattttaacaagcaattggtcatacaaaaatacaaaattaaaaactacttacattgttcttatgggaagaaatatggtaatttcgaccattatggaatagggaactggcataggttgattgcaaatcatctttagcatgataactaataaatatttcttcacgacctgatcgctttcttttaggttcaagggccatgtataca

SEQ ID NO: 84128 - DNA, 500 bp, Glycine max
ccggcataaaaatgagtcattcttcagcagacatggatacacacaccccaccttagtcaggcacacttgtacatttttaacaaaacatccctgacactggagtagcaaatgctaaaaacaacatgatggaatatcaaattgcatcagagaagacagagcagatgaaacaaaaaccgtttcctatctttaaaaatatgcaaactacaatggcaaaagcatgacaggacagggaatgaactcagcaagcaaatttgcatctatatgcttcgtatgaattgcttccatgctaataactaccaaatccaaattaaggtcatcagcaacatcaccaataattgctgttggcttgttgccatcaccaagccgctctagcaagttatagtccttcaacccaccttcagatagatgccaacggatgctggatagttgggtctcatgctcaggcagtgactctttctgctgtgcatcaataactacaacagtaatgtcagctccatact

SEQ ID NO: 84129 - DNA, 275 bp, Glycine max
gcccaagagcagacaacactattcatgggatacggattgacaaaacaaaacaatgtgatcaaaaaaaccaatccatttgtacaaactttcactcctcttctaaacaaatataaaataagtttcatagagaaaccctaacccttatcttttaacacaacacaaaaaaaccattgatttataaaagattgatttaataatagcccttaacgaaattaaaccctatgctggaggcacttcccataattgacttagacatcgactaataacgcgctttt

SEQ ID NO: 84130 - DNA, 388 bp, Glycine max
ggggagatggcgatagaataggcgactgaaattctgggctgggaaatgaacgacaaggtgaaggcagtggaaaaccacgggctaaaagcctcacaaaaactagtagaatccatgatgagtgaaaaagcacaaaacaaaaccaaacggtgcaaaataggggttttctcccaaaataagtttgatggagttgaaactccaggcacaaagatgcataaggtagacgatgcagtcactagaaatcacgaccagaaaaagtgtcagatgtgccgccaagcattgtcaagagaagttatttggcagcagaattggcacacgtgagggtgcgtgaaacgccgaattgggaagtggttgccaaaaaggactgctggaatggtggggtcaatggatg

SEQ ID NO: 84131 - DNA, 234 bp, Glycine max
  unsure (1)..(234): unsure at all n locations
gatcctctagagcggccgcgnggntttttttttttttttttttttttccgnttatcacaaaggactttaattcctaatatcgggccttcgttaactatcaaaagtcgatggccaaacaaaaaacttnnaaataatttttatccttaccacttnccaccctccccttttttcccccacttatctcacccttccgcacaaatttatcattttcaccaaccccttctatcatttttt

SEQ ID NO: 84132 - DNA, 366 bp, Glycine max
  unsure (1)..(366): unsure at all n locations
cgacgaagctggatcctctagagcggccgcggnggttttttttttttttttttttttttaaacaaacaaaccctgaggtaatcaaatcacaaaaggggtctggatttcaacattggcacttgcatttgttgtaatcaaaattgagctcatcagcaacccagaaataaacgcatcacagttcacagattaaaaaagcatcaccagtcctttacacatcgagattggcttcctccgggatcacagtcaaagtcaccaatttatcacccgctctttttactagtaccttaatgggcaccccaactttgtcccctaatacttcaataacctcctttaatctttcaacaggtctcccatcgaattcaataa

SEQ ID NO: 84133 - DNA, 324 bp, Glycine max
  unsure (1)..(324): unsure at all n locations
caaaccttnnaanaancaaatcacaaacggggtccgcattttttcataaacactcccgttttttataatcaaaatttaactcatcaccaacccacaaataaacccatcacatttcacaaattaaaaaagcatcaccattcctttacacatcgaaattttcttcctcccccatcacattcaaagtcaccaatttatcaccccctctttttactaataccttaataaccaccccaactttctcccctaatactttaataacctcctttaatctttcaacaagtctcccatctaattcaataacaccttcacccgggaagaaacctt

SEQ ID NO: 84134 - DNA, 235 bp, Glycine max
ggcaggaaaaataatctaacatttgtcaggggctactggaaaacatttgaaacattaatgcttatgttagaaggcaaagtttgaaaacaaagactgtgcaatctagccataatttactgtgcaataagtccttgctcatgccgatccctgatccctctgcatctcaatggaaacttaactagaccgagtttgatactacagccagtctcctaaaatattgtgctccatatgctgc

SEQ ID NO: 84135 - DNA, 201 bp, Glycine max
gcttgttcatgtgtggtgcattggtttcatggctcttttgacaaatatcttaccatatatctatgactttattttttttggtatacttgttagctagagggccctttttcatcccaaaaggttgacgcctgtgttatatgatattgcctatttttaaccccttttcttttttcttatttcctttttcatagatgttatttt

SEQ ID NO: 84136 - DNA, 317 bp, Glycine max
ggcacagcttagcagagagtgcttgaacctttactatatatatgagagtgcatattatgcttgtcgcttcaattttgattgcgtatgaatgcgatggctaaaactaccaaaaattgcctatggacatgcattctgtgttcggcggtccctacacccttgccgtttcatgttccaattgcaagcttggctctgtaccacacaacgcagccagaatgcctcactgttggatatattcgcatagaagacagtagcgaactggtcttacgtgaccaatatatatacgagtcgatcaccgcctaactacactactgtttata

SEQ ID NO: 84137 - DNA, 321 bp, Glycine max
tcctctcttttattccacattaaacatctccctctaaaccatctttcttacacaaacaaagaatcatcctctatcatctacacacaccatcctactctgcttaacatttccccaactccttattcctattattaacctcttcttcatctacttcctcaccacactccacattttcctcaaactctacctctccaaatcttgcaacaccaattgatcttaccaacctctttttcatttttaattctcatccccattccatcacttttaattccgtttttaattccctaatttttttaacactttctattttctttatctttt

SEQ ID NO: 84138 - DNA, 400 bp, Glycine max
ggaaacagagagtgatttcagtgagtgatcggtgttcacttgatctcatcataatcgtcagcgtcaattgaagaagatgccgatcaggaacatcgccgtcggaaggcctgaagaggcgactcaccccgacacgttgaaggcggctttggctgagttcatctcaaccttcatcttcgtgttcgccggctcaggctccggcatcgcctacaacaagctcaccgacaacggcgctgccacccctgccggcctcatctccgcctccatcgcccatgcattcgccctcttcgtcgccgtctccgtcggcgccaacatctccggcggccacgtcaaccccgccgtcaccttcggcgccttcgtcggcggcaacatcaccttcctccgcggcatcgtctacgtcatc

SEQ ID NO: 84139 - DNA, 349 bp, Glycine max
tctatagtataatcttatgatgccggatttgtttattttgtggaaggggttttacccataataaatgatttatatcacggagggaccatgttttttaccaattcttattttgaatttattctaatccgaaattttttgaagttcacaaaatgccttcttttttcttcttgttgagtaacaatctatgtccataattatgtcattagttgaatgtgattatttgatactagttgatttttctaaattcatattaagttgttcctattttgcaattttatttatgaaatgtcttttttgttaatttagttatacaacccaaatttaaatttttcttgctcgtgtttttttt

SEQ ID NO: 84140 - DNA, 54 bp, Glycine max
cccaagggtttaatctttttggctgtgttatgcttctcagcactgtcactgagt

SEQ ID NO: 84141 - DNA, 361 bp, Glycine max
tcagaagacacgaggggaacaacacgatgggttgggcgaagagatggagcaagtggtattggtgggtgcgtgcgtggccgtgctggcccctgttatttttaaaatcctaattgattccaatgcctggatgtgaatgggtgcaaagcaatgatttgaatcccgaattggatcactacccctgcttcgctcgatcgagaacttttctgggccagcaaccagagcgagaaggagcccaacatggaggccttggcggcccaatgcgtggcccaaacaccttccaaccactccctattctcccacaccgtcaaccaccgcacatacaccttcctcatcgacccttccttcgcctttttttcaattt

SEQ ID NO: 84142 - DNA, 347 bp, Glycine max
tcttccactctttcttccactctttctttccactcgttcttccactcttccgtaacgctgttttattactacagaggcggatactaaacactatttattttgtcttttttctttatcacatctgcattcaacaatacttataatgctatgagcaaaatatagaccttaattccgaattcaaatatatcactcaccatgtgaatccatgtctactcaatcccttttacctcttaacctatgttgtgaaatttatcaaacataatatttacatcaacataatatgttataagatcttggtaaacagatttcatacacatcatttttttttaactcatatccatttcatt

SEQ ID NO: 84143 - DNA, 351 bp, Glycine max
gacgcatcaaacactcaatagtagtgcgtcttcacttcttacattctccgccaccgccaccacaactaccaccacggatggcggcgacagcgactgctgaagcgaaaacctactggtgccacgagtgcgacatgagcgtgtccctgactctcccaacctaccctgtgctctgccctgactgtcacacccactttcttgaactcatggactccccaagcctttccgaagaaaacgacgccgaatcatccctcttagatgtcgtttttcaagacgcactcttactactcaaccctaaccctaaccgtaacactaagccacattcctgcaaacccgtttccctcgcctgcctcc

SEQ ID NO: 84144 - DNA, 365 bp, Glycine max
ggaacactgagcaggaccggctcttcagcttactactgggtgggagacgccacccctccggtacgtaatactaagactactatgcttatgctgtacacaccgtcaacaaccacattcttcgtttctccaactgctacggttacgctgctctcttcatgataaccttcttccgcatgactgtgctgtcatatactgcgtgctactctgcgtgttggttctactactactgaatcagttgcaaaggtaaatccatacgatcacaacggctggtaccttgtcttccattgacattctcccgctaacacgtgcgatggagtgtcttcaagcaccttcctgaacgcgaagaacgagcctgagcttctaac

SEQ ID NO: 84145 - DNA, 396 bp, Glycine max
ggcacttcaattgcaatcaaattagttcattctctttgcgcagttccctacctctcctttcaagatgcagatcttcgtcaagaccctcaccggaaagaccatcacccttgaggtggaaagctctgacaccatcgacaacgtcaaggccaagatccaggacaaggaaggaattcccccggatcagcaacgtctcatcttcgccggaaagcagctcgaggacggccgtaccctcgccgactacaacatccagaaggagtcaacccttcaccttgtccttcgtctccgtggtggcatgcagatcttcgtcaagactctcactggcaaaaccataaccctagaggtcgaaagctctgacaccattgacaacgtcaaggccaagatccaggacaaggaggg

SEQ ID NO: 84146 - DNA, 316 bp, Glycine max
gacgacacacggggatgcactgatccgcgcaattgataccggcactattcgacggtgtcatctgactacttgctctcactacttgctgagacctctcgcagctccctgtcaaaacttcccaacccaaactcataaatgaaacccatcgctgtcgtcgtcatttcctcacactgtttcatcatactgtttgatcctctcttcatacactcgctattatcactggttattatgaacggtcagaaagatctggctcaaagctaaggacctgccgcgactacctgaagtgactgatgcacgcgatgcatgcacgcgattc

SEQ ID NO: 84147 - DNA, 199 bp, Glycine max
gaggacaacggactggaatccacaacggttggcgatccctaggcattggctggaacgacccgtatcactgtgccataccaaagatctcatgctgcaccaacctttgaaccgcaactgtgtctgtgccgactgaacctgatcgcattctggtatgacttgaactcgcgcactgattatacaaagcagatacacccatgtg

SEQ ID NO: 84148 - DNA, 354 bp, Glycine max
cacacgcgtttgcagctgcgatattacgacataagggcgcatccaccacggttggcgttacctatgaattgggtaggagtacctgtctcactgttccattcagaagatctcagacctgaacagaccttggatcgtagctctacctttttctactgtaccttcactgcttcttttatagcttaacttgcgttcccggttcttgaaccattacacaatcccgtacggttgaaatacttctgagttgagaaataagaattatcaacatttaaattttcctgaccaattagaaatgcgtccaatatattattatacaaggagtccaaatccatcgtctggtgtatgtaaagaagcttt

SEQ ID NO: 84149 - DNA, 360 bp, Glycine max
ggagtgagcaagagtgaagagcgaagagaatggctcccaagggtttaatctttttggctgtgttatgcttctcagcactgtcactgagtcgttgtcttgcggaggataatggacttgttatgaacttctacaaggaatcatgccctcaggctgaagacatcatcaaagaacaagtcaagcttctctacaagcgccacaagaacactgctttctcctggctcagaaacatcttccatgactgtgctgttcagagttgtgatgcttcactgttgctggactccacaagaaggagcttgtctgagaaggaaacagatagaagctttgggttgagaaatttcaggtacattgagaccatcaaag

SEQ ID NO: 84150 - DNA, 267 bp, Glycine max
gggacacacaagtagacaagaaaaaggcgagttttcctagaaaactcccccttggctggccatgggttccctggtaaacatcaattgactgctcgattacccgctgaacgaaaacgatcaacccgtcttggtcacatagacttgcacttgcgcctccaaatttatgaggccctcacgtacaatcaaagtctgtggggtatctcaaactaaagttggcgaatggacattccccggacccactattttagcactgaggaggggatgagc

SEQ ID NO: 84151 - DNA, 222 bp, Glycine max
ttgagaagacaccacagggggcgatgaaggcagggtgggaaagcatcactagcgagtccggtaacatctcactgaaactcaaagcatggaaatcaaaaatggtatgctagaagcacacaacacacatgtcagatgtaaaccataaacctccttatatgttaactgatctcgaactgcgacggacatatgaatatgcagatacactcggcattctgtctgttc

SEQ ID NO: 84152 - DNA, 103 bp, Glycine max
taggggactcttatctcatcacaacctcgttcctttgctgaccaactcggttgttgtttttttctttctctttcacctatgtcttttgcttttctgtttcagc

SEQ ID NO: 84153 - DNA, 284 bp, Glycine max
acgcacacgcgtaagaacggctgtaagaggactacatatgggggttaagaacagtgcacaagcctcgtggttgtgttgttcctctgactagacttcaacatcgtgtccttctcggagccttatatcaccaaaacctattcactactctttcatctttttcctattctattgatactccctgcgatcacaaatctgtacgatgttcttcgttagctaggccgccaaatcgcacgagaagaacccacttcttaaaaccaaaacaacaagctgtgaactgcactgca

SEQ ID NO: 84154 - DNA, 388 bp, Glycine max
gagcacaaactttacccaacgattccatttactgctgctactaccgcccaaaagttatcttccgcaaattccaccctttcgattcacattctctctctcaaacctgctttctcaaacacccatgtggagagggtgaggagcataagaaacccttcaaaaggaaaaactctgaaattagggttttggtttcccccacagggagagaaggaaaaaagaaagaaggaaggagggaggggatgatgaaacggctgttgggtgggcccgggacgattagcgggttcctgtagaagttcggccaatgcgccttcggtgccgcttcgattgctattatggtcactttcttttgcttctctagctacaccgctttctgctatttaattgcatcaat

SEQ ID NO: 84155 - DNA, 316 bp, Glycine max
ggtgtgaggcgagggtaaggtctcgttgggtggggtcgtgctccgcgctgttcctctgtttctcgttattgtgttcagaccaaacccttgcttcgtatctgatccatgtcgaccaaacaaggtggaaaagcttagcctttgaagaaacccaagtctgataagaaagattacgacgagattgatgtggctaacattcgggagagataggaagaggataaggcgctggaggagttgatagcccaggcgcttcataaggcaagccttgaaagttctgtgctcaagaaaagtggaaagaacaaagggctttttatcatga

SEQ ID NO: 84156 - DNA, 157 bp, Glycine max
ggttttcttttctttattacacaacacactctggggaaaaagggggagttcttattcccttttaaccccttcattggtccgccattttttattccttgccggaccttcccaaccccaaggaagtaaagggggagcccttgtggaaaaagattcctgg

SEQ ID NO: 84157 - DNA, 335 bp, Glycine max
ggaacaggatatggaggtcgtcgatctggctgaagactatggtgctaacggggtcacatgtgaacatgaaggaacagtgttactgaagtataattataaggagtatactcggtattctctcacaagctggtggtgagtctttgatgatagactatgcagccgttactggccgatacagattactctatgatgcattgtaactttaactgaagatatcgaactcttttatgacatacggcaatgacatctgctttgataagttagtactctgccaggtagctgcaaccaaagaactctttgtgttgcttacaaagaagcattttgaggaattaatg

SEQ ID NO: 84158 - DNA, 357 bp, Glycine max
cggaatggaagggccgacccaaccatccgtacggccgggagagacaacacaacggggtgtgctttctgttattacacaacacactctgcgaagaatgaagagtttcttattccttatacaccccaccactgatcctcaatctctgattcacggcggatcatgaactacacatggacttgtacggtgaatccttccctgagactaattacatcaagaaacaacaccacaagcttttctactagcgccactccaacaccgtcttatcctggctcacatacttcttccatgactatgctttccagagttttgacgcgataatgcccctgcactatactcgtgggagcgggactccgactg

SEQ ID NO: 84159 - DNA, 381 bp, Glycine max
ggcacttcaattgcaatcaaattagttcattctctttgcgcagttccctacctctcctttcaagatgcagatcttcgtcaagaccctcaccggaaagaccatcacccttgaggtggaaagctctgacaccatcgacaacgtcaaggccaagatccaggacaaggaaggaattcccccggatcagcaacgtctcatcttcgccggaaagcagctcgaggacggccgtaccctcgccgactacaacatccagaaggagtcaacccttcaccttgtccttcgtctccgtggtggcatgcagatcttcgtcaagactctcactggcaaaaccataaccctagaggtcgaaagctctgacaccattgacaacgtcaaggccaagat

SEQ ID NO: 84160 - DNA, 119 bp, Glycine max
tcgcgtgtagacaacacaaatgggagagatagaagccccctctcaacatttgtgcctaactgtgcatcaaaatggcacaaactctcgcaattttcccattaattcccatcaaatgcacc

SEQ ID NO: 84161 - DNA, 145 bp, Glycine max
gaggggacccgagctagggtttctgagttatgggtggctccttgctgtagatggaacaaacctttcttttcttctctcaagtctctgagattctacatggctgctagaaggacaaggctccaccacctttctcagcccgctaatc

SEQ ID NO: 84162 - DNA, 341 bp, Glycine max
ggcacaagtttgttgagatagctagaagcaataagatgaaaatgaaagtgcttgttttgtttgttgctacagttttggtagcatatgaatgccatggctcagactaccagaagttccctctccaaatgaaaactgggtttggtgggcaatacagcaatgaggtggcatgtgccagttggaggcttggcgtggaagcaaacaacgtattcaagtggcaaactgttcctgcagcttgcggagagtacatagctgactacgttctatgagaccaatatagatcagattccaaaacagttaaccaacaagcttatttctatgctaaatccctcaaactcaccaac

SEQ ID NO: 84163 - DNA, 87 bp, Glycine max
gggggtcagagaatggctccatcgcggcatggcacactcccatggaggaccgcatgcaagatggcttaccaccattatgaccacacc

SEQ ID NO: 84164 - DNA, 294 bp, Glycine max
gggagtggcagcacagataggtttgtttccctccccctaaaattgccgcacccttcggtgttgtttctcgatgttattcgccacaagctggggacggagaatttgagagatctttcaatccagtatccattgatcccgacatctaatcttattctgagaaacgatcaccgtttcatctctcatctatctatcggtgtcatatctgtaagcaaacattttttttcgtttctgatgatcgacaaacacatcttccctacaaacaaccattctttatgatatgccgaactatgtttt

SEQ ID NO: 84165 - DNA, 296 bp, Glycine max
cacgtgtgagaacacgtcagaaaggaccacagaacgagactgatactgattcacatctcttcgggcatgaaaataatttttgattatacacatatacaaataattacgtggagaatttgatacacgtgaaccttcatataccagcaaccacttcgactattatcttattgacgaaggactcaatcatgaccactagcaacacgtcatctgagaggaagacccacctctcatcctacacctataacacaggacacagctctccataattcacgctgaaggactttccataattgacc

SEQ ID NO: 84166 - DNA, 177 bp, Glycine max
aggggtattaatggtgacaggcacggtgaagcgggtgacccatagtcaattgctaaagtgtgctatgaccgggatagtacaggaggaggtggaacgtagcaaaaaaggcgcacgtatgcttcgatgttcacaccaaaccatgacgtttcggccgaactggataaaatcaaatcttat

SEQ ID NO: 84167 - DNA, 141 bp, Glycine max
ggagagaagtctgttttaatggctggcccctaatcatatacaaaatattgctaaaaaactgcgtccgctctagaggatacaggtttaagtacacgagctttccatatgctacactttctataccgcaacctaacttcactt

SEQ ID NO: 84168 - DNA, 320 bp, Glycine max
gggaaacaagggaaccaatggcacgcaattccttgggtcaaaaaatacgagttttttgcgtaaatttatccaactatcttttaatatgtaatcacacataatatgttttttgcattcaaacgataaaaattagtccaataaattaccaatcaataattaattttaattgtgctaaaaacttttatctaacattcttactgcctattaaataatccagtggattactatgaaggtgctaccattaatttttgacatacaatacaacactgcttactatgtatatagcgataactgattcttaatacaatttcattcttttt

SEQ ID NO: 84169 - DNA, 102 bp, Glycine max
gggacacaagaaaaaagtgagcattaacaatgggcacaaaaattgaaggcatcctactcttgccttccatttgtctgcttaacatgtggaaattaaattatc

SEQ ID NO: 84170 - DNA, 425 bp, Glycine max
agaacatatattgcaaaagttaatagactgggcgtatacaaaggtttcacatattattactcacaaacaaatgatattatgattgagaaatataaataatttctaatagagcaagatcagcattatttttacctatatcatctctttgcaacatttgagcatgtagacttcttacactgcaagatctcccatgttcctgagccggagttccacattcctcaaatcacgaagatgttgtaaaatttcttgtagaagatgtaaccctttatctccttttctcagagagctgatacaatgctttagaaactctctatctgcctccagcacctgtagtctctcgtaaacattatccacctcatcctctaaagcaagctttttcttatccgaattaaccttttcaactgaattgttttgcaagtggggaa

SEQ ID NO: 84171 - DNA, 425 bp, Glycine max
  unsure (1)..(425): unsure at all n locations
ggggagcggnttttgtcgatctctaactaaaaaaaatcgactgtaatacgccctgctctatgtaattttctaaagatagtactcaaaaaaaccaacatccaatttacgctgcaataacaaaatatatcatattcaacatttgtgtttttcccttcctaccaaaaaacttaacatgtaaaacgatctatttttcttatctatatcaatagatctatctgtattctatcatttacagtttaatatatacatatttcaatatttatcaacattttttcatttaatctcagacatatattaaaaaaactataaaaaaaaacaaactctttataccttttttgtgataaatgttatttcttaaatacgcataaataaaccattgaaaaatctaatctactctttttgtaatacaagcaatcttttcatac

SEQ ID NO: 84172 - DNA, 115 bp, Glycine max
  unsure (1)..(115): unsure at all n locations
cggacacaagccaagcaannancangaacaaagaaacggacaacagcgggagggaaaagancaaagcaacaagggaacacgaaaaggaaaagccggaaaaaggaaagaaagaaag

SEQ ID NO: 84173 - DNA, 333 bp, Glycine max
gctgaatatcattacataacacccatgtttttaatggcccttccttccctcttaggcaaacaccctctaactttattttcagctttgcttaatcaatcactacacccttttaccccaacagtttttcattactgtgccaaatcgtttactcccctatcttttaccactgaaaaaatacctttttcataattaacaggcaccctgacgacactctcaaccactatggcaacactcttatgaaacaccaacttgttaccattaccaaccacattaccatactgtgacgtgcaaatcactgtgtgccttacaagaaaatttcctaattgtacaaac

SEQ ID NO: 84174 - DNA, 437 bp, Glycine max
tagagcgggcgcttttttttttttttttttttttttttttttgcacagcaaaaatcaatatattatatattataagggaattcagtactaggtgtactgaagatacaaggataaaagcaagctagttacaaagacggccccactagtaggaaccaaaagcaacccacagagccatacaaacccaacccctttaggagaaaacatcctttaaattggttgaccagaagttaaagtgcatttgagagtccttctctgcacattttagccaagaccaagtatggaacaaggtatcatccataacctttccagggtcaaacggctggttcttgaagatcatggcatttctatgatgccagatggagaaggatagagctaaccacagaaatttccatttgttgtttatactagctttgttgttccattgagtgaattgcaaa

SEQ ID NO: 84175 - DNA, 182 bp, Glycine max
gttttcaaaccaattatcgaagccccgcacgtgacctgacgtccgactgggtccaccacccttccactcacacctccttccttccccaacttgacacctttctttacccctcatcaactccctcctccctcttgcattcgttcgcgctgttccattcgcactcacatcgaaaaccgagccgc

SEQ ID NO: 84176 - DNA, 324 bp, Glycine max
aaaaacgcgaacaaaataccaaaagccgcctgtttttaaaaaacacgcggccacaaataaaccccgggaaaatcctgtggatcaatatgaaacaccaattgagtgtatttaccaaccaaagcataaaacaaaacgcggccacttatttaaaaactaacccggaaattacgaactctctcacacctttttaaaaatctaaaaaacccaggccaatgatttatctttaacaccttctcccttttcatttaaaaaacactcacatttgaactccattacagactgcgatgacctttttacatccaaaaacagaattgacaccccatt

SEQ ID NO: 84177 - DNA, 463 bp, Glycine max
gtacgtaagcagggagcccctagagcgggcgctgtttttgtttttttcttttttttttttttagaactgaagaggaactttatcataaacattgggggcaaaaaatatttatcatatctacaaaatcaaaatgagcaccgatcacataacaaaggacccttcaaaactttaaaagggtccaattcataaagactcaagaatcactgcttatattttgttcccacgaataccagcattcattaactgtttttaatccattgcccctagtggaactttatttacagccagacataacccggatatactcgataacgattagataaaataagaagcccctttgaagatgaagaaattgaaagtctccagagcaaagtatacgaatgtttccttggaatgggtgaaataacacccaaaagttgttcccaccactcactggcatgctgaaccatactttgtctcaaac

SEQ ID NO: 84178 - DNA, 101 bp, Glycine max
  unsure (1)..(101): unsure at all n locations
gattcatgcacagggtgttgcaagtgtgttttttgtacatgtaaactataatntaatgttgtatttttctgcactgtgtatgaaatgtttattttgccaaa

SEQ ID NO: 84179 - DNA, 187 bp, Glycine max
  unsure (1)..(187): unsure at all n locations
taataaaccaacaaataacttacaagaacagaacatcaacataaagaaggtaaaaaagntngntcattcgtcaaacaaattattaaactaaaaggaaaaaaaaaaataggctatttattatcgcttcacccgtagcttctgtaggatgggaaaaacatataaaactttttcaactctaccaaatttt

SEQ ID NO: 84180 - DNA, 361 bp, Glycine max
agagcggccgcttaatgaattggtcaacgcgcggtgtgagggggacaaataacaccgccctaaaacaattaaaaggtgaatacctcgtttggctcaacaaatttgcatgtttcttacgggttggtcacactaccatgtacttgaacacaaaatgacctatttaatgtgctaacaaccagttaccacatgtgaccagtaccgctcaacaacaaggacatcgaacctgatttaacgaacaatggtgttacagtaatttataaatttctgtgaacccaaccttatctttaaaatcaaaaatggacttaaagttgtcataacaaaagatgtccttattaattgctggattctgaagattctagat

SEQ ID NO: 84181 - DNA, 420 bp, Glycine max
gctaggaattcccggggcggctataatagaggactcctttttttgtcataccggaccctataacacccccttgctaagatcacccgggggacacttaccttgattcaagcaatttgcatgtttgtgattacatgctcacaataccttaaacttgaatacagaaggacatatataacctacgaccaccaaaaaacatgcttcaccttgccatggaagcaaaatatcagactcatttcacaaaatggctagacaataaattaacaatgtttatatacccaaccttatcatttggatggaaaaatgactcaaacttctaattacaaaagatctgctttttattaactggattgtgaaaattctaaaaatagatcatagcccaaactttattgacggcttacgttcacgacactttaggaactc

SEQ ID NO: 84182 - DNA, 280 bp, Glycine max
tgaaagcatatttatgatctaatgggtaaccaaaatttaataacatttacgtgacaaaatatttagaaaagaacaaggaacctaaacaagccaagaaaaaaaagactagcatcaaccaactaaaaggcaacacttatatgattttcttgtgaaaataaacaaactgaggcttgaaacatatcgtgtaagtaaactcaaaattgaggacgaaaattgtcatttacgggaatttttttgtaaaaaggaaccttaaaaactgatgtgttaaacgttatgaaaa

SEQ ID NO: 84183 - DNA, 304 bp, Glycine max
ggtgctgaaagcatatttctgatctcaattgctggaccaaaatttcaataacatttacgtgacaaaatatttagaagagaacaaggaacctaaacaagccaagaaaaaaaagactagcatcaaccaactaagaggcaacactaaaatgatgctcttgggaaactaaacaacctgaggcttgaaacatatcggtgaaggcaactcaaaatagaggacgaatactgtcatccacgggaatttttgtgtaagaaggaaccttaataacgggtgtgttaaacgctgtgaaaaagcacctttttgtacc

SEQ ID NO: 84184 - DNA, 292 bp, Glycine max
tggaaaccgttggaaggggttttcacacgggggtactcaacacggacacacggatgtttttgtacacatgcgcttacatcttatacacacaaatcaacatggagaacttgatctatgtatatactgctagtatggttgctactgtgcaacaaaggctttcgaacagaacacagttgatcaaaccgttctagattcaatgagcagctgctccctacaagagtgcggctggtggctctccctcaaagggatcaccaggcttcttcagcatctttaatgagcccatagacaacaa

SEQ ID NO: 84185 - DNA, 131 bp, Glycine max
ccgtccggttgcaaaaaaacaacagaagggtataattaaatttccacatgttaagcagacaaatggaaggcaagagtaggatgccttcaatttttgtgactattgttaatgctcacttttttcttgtgtcc

SEQ ID NO: 84186 - DNA, 158 bp, Glycine max
agaaaaacgggggggtttttgaaatgacggcaccaaaaaatatgaaaaggcggtcaacattcttgtgacatactggttggtggggagggagataactattcctccagcggaggcttctcactcacggggcagctatggtagcagtgacgctcctactg

SEQ ID NO: 84187 - DNA, 149 bp, Glycine max
ggagaaaatttagtgaacccaaaaggagagaactttctttggtttgtgtttcattttgttgtggttttctgtaagattaaatggctgaggttttgaccaaggcgagtttggtttcctcttcttcttcctcatggcatggggttggtcaa

SEQ ID NO: 84188 - DNA, 231 bp, Glycine max
  unsure (1)..(231): unsure at all n locations
gtcacaaaaagttaggatagttggatttgttctaagtttgctaatccatggagtgttgtttatgagttgagtctatgcttattgcttaaggaggggttagttttcttttttgtccctagttggttgcattggattttgaagaaatttaggcagagttctcggtcttgagtcagggatacagctctgacattacatacnattgcatgatgtttgtcttattttgggtactta

SEQ ID NO: 84189 - DNA, 320 bp, Glycine max
  unsure (1)..(320): unsure at all n locations
gataaatgaaaatgatcactgcttaacaatcttctgttctgtaactttttttcaatagaattttagaattgggtttgaattctggagttcattctgttgttctggagtacatctacaacttggtttacttcttgaaatagaagacctttgagaaataaaacgcagcctttgttaatatttttttggaggcgcgtgggacatttaaaactctcaaaggtatcatacctctgcaatcttattattcgtggccagttggttcgacgacaagctatttctgctttatattngtgtggaagtcaaatagttaaaatttcaagcat

SEQ ID NO: 84190 - DNA, 153 bp, Glycine max
ggggcgaggtagccagagagtgatacaatacagagtgcgttgttgctccttcgccacaactccctgccaacatgggtatctccagagattctatgcacaagaggcgtgccactggtggcaagaagaaggcatggaggaagaagagaaagtatg

SEQ ID NO: 84191 - DNA, 140 bp, Glycine max
tggtgagggaaaagagggtgcaaggtgcatcttctttttgttgttctctcaaactttaataatctcataaattagcagaccgaagaggaccaaacacaagaagaagattggtattcaaaaatcgtcgcgtcgcgtgggcg

SEQ ID NO: 84192 - DNA, 457 bp, Glycine max
gtgttttagacttcagggggtcgataagcgggtggctcgtgccttgtgtggattccaacacagtatgaaagcagtgctggtcacctatgatactggtgattcggctgaagacacttcttcatagccacaacatatctatatctatgtgtctgtgtctatagaagagcataaccatttccagtttccacccgtggttgctattactgatgtgtacatgctagaactgactcattgttcattacgtaaagtaactcttgactacaataatgctctcacattctctgcagaaatctacagaggcctaaccgatatctcgggccactatattagagttccagcttgcaattccacttataaaatggacccacaacgcatgacttctgccacagattatactgacaatgtaatttagacaaatctatatatcctatgcgcatatgaacgaccaatccctagt

SEQ ID NO: 84193 - DNA, 278 bp, Glycine max
ccaccccttccgaccggttgcaagaggataacagaagggggaccaaaaccttagtagtctctcagctcctccttcttcttcttcttgttcctttgtgcttagtccagtaattcagaacatgcccacttggtggggtaaaaagtccagcaagaccaaggaccaacagcaccaacaacaacaagaccaccctcatggcgccgccgccaccaccacccttcttcacttcaattttatcaagcccaaacccagtaagagcttcgactgacgtcgtgagaaac

SEQ ID NO: 84194 - DNA, 292 bp, Glycine max
gggggggctccttgtcggcatttataaaagacttcgcgcgccaagactcattcaccggcaccgtttgtgtcttctcctgggttagtgtctccccctctggagactctccccatgtctccgaagactgtgagtgtttatgagaaggtggcgtctttaatgaacttgcaactggggaaggtgaaaacttttccttcttcttggaaagtcaaggggccttccgggttcggatcttccagagggcccatgaaccgacccggattctttaaactttcgacaaccccgacccaggcac

SEQ ID NO: 84195 - DNA, 382 bp, Glycine max
  unsure (1)..(382): unsure at all n locations
ggttctagtgtgtgattgtttgttgttgtaactcgttcttcttcttttgttgttctgtgtttgtgtttgttttttctctcacctgaaaatgtcttgctgcggtggtaactgtggttgcggaagctcctgcaagtgcggcaacggctgcggaggctgcaagatgtacccagacttgagctacactgagtcaaccaccaccgagaccttggtcatgggagtggcacctgttaaggctcaatttgagggtgctgaaatgggtgtgcccgctgagaacgatggctgcaaatgtggaccaaactgctcctgcaacccctgcacttgcaagtganngtgttgggagagcaagcttcaagcagagatagcccttaattaggaataatga

SEQ ID NO: 84196 - DNA, 131 bp, Glycine max
  unsure (1)..(131): unsure at all n locations
naattctacnaaggtgcggcccgcaaccacacagtgatggaatacttaatgcgttgtggctccttcgccacaactccctgccaacatgggtatctccagagattctatgcacaagaagcgtgccaacttgt

SEQ ID NO: 84197 - DNA, 429 bp, Glycine max
attcttaattcactaggtttgataagaggttggggcaaaaccaaactatatccagataacagtcaactgtagttcacaacagcaaattggcagatcactcgtcactctcacaatagatttctgaattccaacagccgcatcttcaataagttacaacaaaatatacatatgatcaagccgccagcacacgatttcaaaaatgaaaggttaagtctaattgccggtcagcacgtgctcaagtttgacctccctgtcatgctgtgtatacccatgaggcactcttagaatatcttcttatcactcaaaaccaatttgaaatgctgaagtctcttagctttctaagatgtctctccatttcttctctgctatgctcccactcctgcttttctatgacaaggcgtggatcctctttttcactcgcatgtatta

SEQ ID NO: 84198 - DNA, 463 bp, Glycine max
  unsure (1)..(463): unsure at all n locations
cgggcggtttttttttttttttttttttttttttttnggttttaaagcctacattttctcaaccgggatctaatgaaacaatccagtttccttcagaaaagaaatgaacaacctacaaattgaacatttctgaatttaacaaaggcctaaataattctaagttgactacaggtgctaacttattcgtcaataaatgctctatatatgtattctctacagaaacagctaaaccaaacaaccatcaaaacccacccagtagggaaccagactttctcttctcatggaatgatatctccatatttcacaacattctgatgaacgcccctttccgacttggcggcaaaaccgtttctgtcacacttggtcgtttcccttgagaatattgtacttgcatagaggacaagttgcattcatctttagccatttcacaatgcaccacgaatggaaatgattgttgcaggga

SEQ ID NO: 84199 - DNA, 101 bp, Glycine max
ccgaaactaaagactgtgcggttgcacggtaataaacgttggattaagtgtgtcatcagctccgagccggtccaatgttctgtatgaatgtctggacacca

SEQ ID NO: 84200 - DNA, 252 bp, Glycine max
acaccaacaagacacccctccagtgagggtatttctcttaacaacccttatccacaaaaaagaacaaaatgctcaaataccaaagcttcttacgaaggaaaacactcctgcacattacctaaacaaaggtttttttgaatcaccacctttacaattcatatcttctaaaattaacagataaaaacgaagcctttgcctcaaaatgagataactttcatttacccctttttaaagtcaccctcaccgaaccct

SEQ ID NO: 84201 - DNA, 338 bp, Glycine max
aaacaacaccaaacatgactaccctccatggatgggatttctcagaacaaccttaaaaaaaaaaaaaaagagaaaacaaaattgaaaatttctagccaaagagaaacaatttttttttttttttatgtacaggtatatctcaagcggaaccctcaaaaggaatctgatctaaaatcgaaagaaaaagaagaagcaggggactcaaaaggagagaactttagtctaccctttttttgcgtcaccctcaccgaccctttttcttcttcttcttcttcttcttcttctcttcacgaatcactgtagtcacgccagcatatgagcattgtcacacaccgcct

SEQ ID NO: 84202 - DNA, 440 bp, Glycine max
aagcgaacactcaggagtttagcttgatgtgggagaaattgcctctgagcaccatgatttcactgcaacgaacaaacgctcaataccaagcagcatatgaaggattgaactcctgcacattacctcagcaatgtttttcttgaatcaccatgtatacaattcatagctgctaaattaaacagatctaactgaagcttttgcatcacattcatcttttctccagtatatactttccaaagtcatcagctctgtagccttaactgaggcgttttgggttccttgaataagtaatgatgcttccaaatccaacctcttgcatatctatttgtaggtttacccagtgtggaaaatctcaactagctagctacttggttttattatgccctgaagcttccattcaccaaatcccgcggtggcaaatgcctcatcccaagatttcc

SEQ ID NO: 84203 - DNA, 99 bp, Glycine max
gcgatccaaaaacacaggtaaaacctttggggaaatccaattgttacgctcctaaccaaaaagtccaacccaaaccctcaatcccttccctatgccaac

SEQ ID NO: 84204 - DNA, 218 bp, Glycine max
  unsure (1)..(218): unsure at all n locations
ctagagcgcgcgcgctttttttttttttntttttttttttttttcggaaagaaagactgtgcgcctgaacggtaataaaagttggattatgcgtgacatcagatccgagccggtccaatgttcggaatgattgacaggacaccatgtactggttgtaccataattttatttgccgaagaatgcctttcattggttggccctgagaagctaaactcgta

SEQ ID NO: 84205 - DNA, 151 bp, Glycine max
  unsure (1)..(151): unsure at all n locations
gtgccacgaaactaaggaaaaacgtgtagggagtggccattntgaaccttcaaaaccaacacggctaaatcttcccttgctaccgttagcgcagatgcagacatcccttagatgatgccgaacaaaagggttcagtaggtgctatatgtgc

SEQ ID NO: 84206 - DNA, 381 bp, Glycine max
ccaaaggatgaagagccccatactaatatgataaacatttaaaaaccaggccatacatctacaagaagagagaagatccaataaatgcctaaaaaggatcaaatatcaaatggagctttacagtagatacttacaaactatctgcattcgaatgtctccattttttttttttaaaaaatatgccatcctcttctatagaatatgttcttgatgcggtgttgaccatttaattatatacattcgtccttcaccaacctgaagttataaatatcagtagggctaagatcagagttagcttggacagtgctctattctggtgctattcatattccatactcaaggtggtccttctgcctacgtttccgattacccttcttttta

SEQ ID NO: 84207 - DNA, 391 bp, Glycine max
gttaaaactatattgaagatcatattatggacatttgtttcttagaattataatcaaggttaagcaaggcagttaaagagcaagctttaagcccacgtcaatcatgacaataattttgttcgttctagaaacatttttttgatgtatcctaaattagcatcaaactagattgtaacataataatattcaaccaagattaaccaggtaaagagcatttgctagtgtatgccgccacaaagtgctcctctcaaggaccatgaaaagctaatttgtactatctaagtcaaaaaacataactactatgctgatgtaatttgatactaaatatcacagtatttccttccatactaaactttcaagtgggattgattttgtaacatacaaaattctg

SEQ ID NO: 84208 - DNA, 97 bp, Glycine max
ggccttatgcaaataaatttaaacaaacccgcggttttctatttattttgaaattttacaaacttgcattttatttccaaccaaaaaaaaagccccc

SEQ ID NO: 84209 - DNA, 210 bp, Glycine max
gggccaaagtcaaacgcttataacaacgggggtggtaataataatattgcaacatttcacagatgtgctctactttcagctccaacaaaatagctccacacctgctgcgctaataatgccaaaacaaactacacccgctcttattcgcgagcaacctattcaaacctctgggctcacactcttacaatcaagcattttgttccctatatg

SEQ ID NO: 84210 - DNA, 352 bp, Glycine max
gcccgctttttttttttttttggttttttttttgggcttatcccaaaccctaataacattggggaggtttttattttttttagaccttttaaaaacccgcttttaattttacctcaaaaaaaaaaccccccaccctactcgcctaaaaattctaaaaaaaatcccccccccccttttttcgcataaccttttcaatacccttgggccaaacccttacaaaaaaaacttttcttccccaaaaaccagttttttcaaacctaccgaccccaaaggcctcccctgaaatttggaccgcgaccttcaattccaacacaattccccaaaaagagtccaatattaacttgggcttatt

SEQ ID NO: 84211 - DNA, 206 bp, Glycine max
aaaacaaaaaatataaaacggcgaatttatatatgggacggccccaaaacaaatcacaactatataaaccgacaaactgtcctaactccctataaacaccctaacttatccctacacatttatccttcaaaataaatattctaataataaaataataaactccacggactatcaaatttaaaaactacaaccttttgaatccataa

SEQ ID NO: 84212 - DNA, 273 bp, Glycine max
tggcgaaaaagaatttaggagactatgcggactttcttagttctgaatcgtcgtactttttacagaagcgaccgatcatgagtccttccaaaacacgtaagatggatgctatgtccaaaaacacccacggaaagtttgaaaatgttagactgtgctgaacgccgagcaggaccagtcacacacaaaggtgtggggtgctacctactcataaaagcgtacggatcacactcctacccagagaccaacactcttggccacccattaaaggtttaa

SEQ ID NO: 84213 - DNA, 374 bp, Glycine max
cgccataatcataaacagccaaaatggggtttacttttaagccgcctaagtcctaattcattgtggcattcttgctgatccagctggctagcacctaacattagcacctaccacaaccaacgccgggtgacattaaaaggacaaaaaagtgtacacactaactgcgggccccactgaaacaggtccatttggtccaacctgttatataactatgactcttttttttttctaacctgaaaaaaaaattcaaaaaccgggaagcgacggtggcaaagcggagtcgggctcaggcacgtcctcctttttccgccgaatctcgaggacctttcggtggtggttgggagtgcaactcgctggagaaagtagggctacag

SEQ ID NO: 84214 - DNA, 172 bp, Glycine max
gggggcacaaaatagactacatcatcctggtagtccaagatagatcttggtgtaataatataattaagcagggtcggtccatcaacattttttacatggttatttgaaaatgtcgagataagacttcacattaagattggattaaattgacattagaaaacccaaatcgaaa

SEQ ID NO: 84215 - DNA, 264 bp, Glycine max
ggcattcaaactggactacattactactggagaaatggtacaaagtatgtttgataaccgacgtttcaaaacaaaattaacacaatctcctgaaatgacattaatcctactgtctactggcaagcaatctacttagaatcttctttttcctttttgggctttttttctcctccatccacacaggcaatttccaaaccaatttttttttttttcccagtgatttaacctttaccctgatttcggccaaactggaagacaagtctt

SEQ ID NO: 84216 - DNA, 190 bp, Glycine max
ggaaccccagagccggccgtttttttttttttttgtttttttttttttggggttacgcacacaaaatacaacctactgttgcctatactggatggggcggttagcttaactgcaataactcttggctgcacttgcatattctctacaacagcaacttattgggctggatctattatttctggatgaactt

SEQ ID NO: 84217 - DNA, 245 bp, Glycine max
ggggttactcacgctaaatgcaaccttcgggttcatatactggttggggcagttggtttaaatgcaatgactgtgggctgttcttagcgaaactctttacaacaggaccataagtggtctggatctattttatctggatgaactttctgctgtggagccactgctgaacggactggctctaaaatggctggatgaacactctcgcctaaagcgaggccctctgtctgactgcgtacacaatcacc

SEQ ID NO: 84218 - DNA, 283 bp, Glycine max
aacaaaaacataaataacctctggacttccattgcttaatcaatacaataactaggtactgggctcgatctatatttattaaatcaactttttcatattctaccactgtttttttttctaaaataaataacctttggattcacctaattcttaaagcctcatcgctaaaactcccatttaaataatcaaaaggcttcctggcggggtgcttttctcaacccaaaggtttttgtatcttttaaaaaatatcttatttttagaaaatatccaaaaccctttgtgc

SEQ ID NO: 84219 - DNA, 399 bp, Glycine max
gctccaggccaaacgacagcctcactgagcacttgcattactataatcattcaaaaaagtgaaaaattatcatgaaccccagtatctccacgtaaagggacaacgttttcttgattccccatgtactacatataattatatcatatattgctatcctgacaaatcagacaatgtgctatatcttcaggcacccctaacaaatcccagtaagcactgcggaaagcaaaaaataattccaggaaataacaatccccaaacaataataataactaatagtaataaaaaaactaaccaagaacagatattcttaaacttcacttcccattcacactcgcaacataattaactaaagataaccctcaatttttttccaattattattataagactataatgggg

SEQ ID NO: 84220 - DNA, 228 bp, Glycine max
gggcccgccggactgcatcactatattgggggcaggaaaaaaaggaagcccccatgggcatttttagaatgcaaagcacaatgtgcgcagatgcgcttcgatctattgttccataactaataactaacgagcattaccaatgtagcaaaaggatttccatttcaatcatcctatgtgtaaagtttatttcctgacggcttgagtacggagcactaactgcgagagttg

SEQ ID NO: 84221 - DNA, 327 bp, Glycine max
cggttcaaaccaccatttaaaagaatggggggcttgtaagttgttcccaccaaaatcacccgaaagttgcttatcaacctccataatccctcacttcaaattgctattacccaaattaaaagacttacccactttccagcttttaactaccttaccaaacaaacacctttgatcgaacaaagttccttgccacgggaaataacattttttgcattcctcacaaggacttctgtaaacattgcaatgctacaatctattcacggaagctcagagctgcacaagatagtttccagtttttccacatgaaacaaaacataaatttcaatc

SEQ ID NO: 84222 - DNA, 382 bp, Glycine max
gggggatgcacagaaaagaaagcaaacggctgcagaaacttgaagagaatgttagtggaaatctatggatagtgcagcatttttaagaaactcatgattagtgacgataagtctaatcaatataatataattattgaggatttaaattgtggtttcatcgcaatccttaattgctggaaaatgggaaattgcagacaaacacatctgatgaggccataattgtgattgtgttcacgataaccccaaaaaccttgatgttgcggccaaaattgcagtcacggaccatttcttaaaactttgagtaataatatacacacgatttctcaaagacataataagtttaaaaagatgatatgtgagccgtagtcagaacacactcagc

SEQ ID NO: 84223 - DNA, 155 bp, Glycine max
gggctcaagcaacatatgataggaatagtgtacgtctcttgtttagcaactaattccatacaaagaaggatcaacaaatcccatattcttcacttacaaattgctttcaccaaaaagaaaaaataaacccacacttcaacataaaacatatttct

SEQ ID NO: 84224 - DNA, 455 bp, Glycine max
gggccataaaattaatgtttttaagcacggaataatgtacaagatgagcaacatcgttgaagctgaaggatcatacgagtacaagaagcaacaagatactgcactgtctgctactaaaatttatagcacatgaacaaaaggtgattttcaagttaaattacatttgtttatgaaacactatttgacgcctggtcactctagcaagcgtttgtgcttacaccaggcaatggcaaccacatacaagaatatggtccctgcagtgctaccaccaacagtccagaggaattgtgtcatcccagctttcagagttgctgtggtcaacatgactcccatttggaggagatggttctgtttgtcatccacatgatgttgatgtaatcctctgtgtcatcaacgtactcctcagcgagagagcttgataaggtgccataatctgacaaagaagcctcagagca

SEQ ID NO: 84225 - DNA, 240 bp, Glycine max
  unsure (1)..(240): unsure at all n locations
agcgggcgcgttttnttttttttttggttttttttttttagctaggaacatcccttctgatactgagggtaaaagacacaatggccggaaaacagaaagttcattttttagttgctcatgtaaaaaatttcagatgaaaggggtgagaaacaaaattggaggaagccgacctgagaaaaacacacagcaagggacgtggaatgttatggataatatacattatatgggcaacgctaaaaa

SEQ ID NO: 84226 - DNA, 330 bp, Glycine max
gggggtaaaaaacatttcccttccaattccgaaacaagtttccctttataaattccacatattttaaccttttaaacggatggaaattatttcgtttccatgataccaaataatacatgcacccttcaacttatgttaaaatgtattagcccccaactccggattaaaaatgaacacaatgacttgatcctttacattggtaagaaaaatcttaaatcaaaatctttgtaaaaataatgaccaaacccacttcttttttaaaaaaacaaaatttttgactaaaccaacttttagaccccaatccaattggaaaaaaacaacttggccttt

SEQ ID NO: 84227 - DNA, 191 bp, Glycine max
ggcaggtcaggccttctatatatatctgcgtaaatatttaattcccacacacgtacaactctatctgaaaattgcaaagaagaaggaaaataggaaagaaaggttaaaataaacagctagaggaagcaaaactatgacaactagactaacactaagaggaaattcagcataaatttttcatttattctctg

SEQ ID NO: 84228 - DNA, 107 bp, Glycine max
  unsure (1)..(107): unsure at all n locations
gtacgtaggctgggatcctttagagcggcggctnnnnnttttttttttttttttttttttgtggtatcatctcttatcagctatcgctaggattgcaaacacctgtc

SEQ ID NO: 84229 - DNA, 102 bp, Glycine max
tgggcaacaaaaagtcgtccaatacaattcccaaatggttgctcaaccagaaataaaacgagaaataaggatcaaaaaaacaaaacatgccaaattttaaca

SEQ ID NO: 84230 - DNA, 490 bp, Glycine max
ccgggctgagacatatcatttcatatacgagtacagaacaatgttagtagtccactactccacattcacattcacatccacaagactggagctatgccattacagttagacgccacaccaccaccaccaatctttatcatgtattctactactacaccaggttactaacaccaacaagctcataaattattcaaaactaaaacatactcataaaaacacactatgtgtgtttgatcgaaccctccttccccttacttgcgaggcagttatagtaaaaagcaagtaactatccaattccaactatcttgaggatagtttctggtgcaaatcatcagctagggcctgcctcaagttttccccaaagtaataaaacgatttctcactatccatgactctaggagggaggtccactctcatcagggctccttccacagctccggtttcaggttccctcgcaatctggcacagattatgcaacacacaacaagcc

SEQ ID NO: 84231 - DNA, 274 bp, Glycine max
cacctgaaaatgtcttgctgcggtggtaactgtggttgcggaagctcctgcaagtgcggcaacggctgcggaggctgcaagatgtacccagacttgagctacactgagtcaaccaccaccgagaccttggtcatgggagtggcacctgttaaggctcaatttgagggtgctgaaatgggtgtgcccgctgagaacgatggctgcaaatgtggaccaaactgctcctgcaacccctgcacttgcaagtgaggtgttgggagagcaagcttcaagc

SEQ ID NO: 84232 - DNA, 319 bp, Glycine max
ggcctacacgaagtgaaattgagagagagagatcgccagtctttattgggtttcatcaatggccacacgttacgacccgtgtatgactgtttcctctcacgaattcatgaaggtattacgacctaatatgctacatgcgcactgctagatgggcctttcttgttggactgggtctagtgaaactgattattctgaggagtcggctacatatgatcctgcttggacttctgaactggctgactaaatggcgatacagatctatttctcacgcccatttgatatgtgacctattcacaggatctatagagtaagcaggata

SEQ ID NO: 84233 - DNA, 298 bp, Glycine max
  unsure (1)..(298): unsure at all n locations
tctaccctttcctagtaggtagatttcaaattccccagattagcanntttataagatatcttttacccaaaccccttattaggaccagaaaagacccacttcactctttctcttcttcccatccctttctctatgcctcaaatatatatnataataaaactctacaactggccaaaaaaatcagcttttgctccctgacacattagtatataatatatagnttttatgtgttgtgtagcactttagattactacttactagagtgaaaagcgagaggcanaanagaggaagggagaga

SEQ ID NO: 84234 - DNA, 380 bp, Glycine max
gtgtacttgaagttgcacccaaatgtcctgttggtgtcaggagattcgagattcagtgcggacttatgaatcttgaacagacacagactgatttttctgttcactctgcggcaggaaactttttgactgctattgagaagagcgtttgttttttactatttctataagatctgtactatggtgtattagggcactctcgtctctgatgttgcctcctgtgtacgtataacacgatattacctaaatcttaaagctgacactagatctgtcgtcttccgtgctggctttctctacatttactctgcttttcaatatcttaccgaaggacatttttaccctgctcatatttttgttcgagtgttttatattctttactttgc

SEQ ID NO: 84235 - DNA, 154 bp, Glycine max
  unsure (1)..(154): unsure at all n locations
aaaaaaaaaaaaaaaaaaaaattattaaaaaaaaaaccccncccccaaaaacccgcccatttaaaaaaacaccaacaccacccccaaaaaaaaaaaaaaaaaaactcacctaaaatcaatacactctaccccctataaacaacatacaacactt

SEQ ID NO: 84236 - DNA, 162 bp, Glycine max
gccgggagaagacagccgacagaagggctagtgtgtcattgttcggaggtgtgactcggacttcgtgagatgcagccctatggtagcgtctgagagtgatatcacccgaaaatgtctagctacaagtcctaactgtacatacataagctctttcgattactg

SEQ ID NO: 84237 - DNA, 385 bp, Glycine max
ggcgtgcacttcagtttacagctcccgaaaatttgtccttcagaggtcgtggtggttttggtggtggcggtgggttcaggggtggtggtcggtgtgtcaggtgctttggatgtggcggttgaagcagatgcatttccctagtcctcaaatgtaaagtctgaatttgtggcacaaatatttttaaacactaaattgtgtgaaaaaaaatatatttaaacatgttatttaaattaaatttttctctactttccagatacaatgaaaaagaaatgactttttgatcatgaacggtggagggactaattttgttccatcacatttttcaaacggattcccattaaatatcttatccttttttttgttacacataatatcttattctttt

SEQ ID NO: 84238 - DNA, 247 bp, Glycine max
  unsure (1)..(247): unsure at all n locations
aatgccgcacacccctccatccnaatccccnnttgttttgtcaaaaaccataaccaatcacttcaacttcacatataaaattccttcttctttccatctcataataaatgtcatcaaagattctatatccaaatcattcaatccaaatttaattatccttctatttttttatatttctactttttacattcctcattataaattatattctctacacatatacacataataccctacctcctataaa

SEQ ID NO: 84239 - DNA, 253 bp, Glycine max
ggtcataatttgtggtagtggagagcagtatatggtgtcctctagtttaagcctatgataattgggcttttgtgcctaaacaaagacctttcttagcagtaactgagcagttagcagcagcaccgttgtttctttgtacctcctccgcacacaaccatcaataaacatagaagaagaaggacctaaccacctcaagagaaagataggtcaatggatcaatctttccttgtaatgctctccaatctactccacc

SEQ ID NO: 84240 - DNA, 169 bp, Glycine max
ctatctcacacccatctcatagaaatatcttatttcctattatttccaccccccctcattttctccatccaccaccacctcatttttaataattccttacactcatctaactctcatccataacactatctctaacaacaactctattcaatttccaatcactctatat

SEQ ID NO: 84241 - DNA, 306 bp, Glycine max
  unsure (1)..(306): unsure at all n locations
ggaatcctatagaggggccgttttntttttttttttttttttttttttttggacaaaggcaccaaatataaatatgaatttatgtgtaaaagtatttgatgtttgttcatatacacacacaacgatggcaacaacaaatttactgaaaaaccagagaaaaaaattataagatataacgtatacagcgctcacagataaatatattctgatatgaaaacagtgcactaatatttagaattatttattcccaaggggtaaattaaatttattacaaggcggtcctaccaacaaattgatcatacatga

SEQ ID NO: 84242 - DNA, 344 bp, Glycine max
acaagaaaaaatgttccggcattccctggtggagacagcttgggaaaccaacatagtagttgtaaggtgcatacacaggatgatctgagtgcaaataaaacatgtctttgaactgaagagggttattacttgtacagtgtaagtactgaacaaaccttagtgcatgtaacataacaccatggaaaattaactactactattactggcccacacgtatctggagagatatcattccagcggaatttttagatactgatggtggcgatgcatcacaagcaggacagacaacagtaatacctggcttcccttggcgacgcacactatcgaagaagccgaaagggtac

SEQ ID NO: 84243 - DNA, 316 bp, Glycine max
acactagatactggtccttcggcctcctatgttttgtgctcagcttataatatagccagctcgctagttcaaagaaaataacttccaacttatttaaaagaaagtacagacggggcgaacggcttttaggttcaaatttaaaatactctccaaatgtgtgtgtaacagaacattacctcatcaagaataggttctagctccctgtgccgagcttcagcaagatcaaaaccattcttgcggagctcctatgatgaattgatccagcagaatttaccacaatacaggacacattctttggtgtgcaactatatgaacg

SEQ ID NO: 84244 - DNA, 382 bp, Glycine max
gaacaattggttcaccacaaccatagaataacaaatgggcaacacataagcattgcctcatctaaattttctttacaaaatattaagtgtttttgcacctcagaaaattcatcttgaattataaaagtcatttagttgaagatactggaatgaattgttggcactaattcagttaactaactctatccctgtcaaaggaagcccggcatgaagttgaagaacgacatcaccaacagccttagccatggatctataagaatgctctgtaacgcctgcaacatgaggagtcatgataacattcttaaatttaaatatctgatcatcagggttaaatggctcagtccaagcaacatcagtgcctaaccctcctaaatgacctgat

SEQ ID NO: 84245 - DNA, 289 bp, Glycine max
  unsure (1)..(289): unsure at all n locations
gcgtacgtaagcttggatcctagtagagcggtcgtttttttttttttttttttttttttttgcaagggtccaaatcatatttgatgatgtcgttacaggggtacttaaacatatttgatcccattatcacaacattttatactttaatgaccaagacgatgacaagtccaacaaggtggtggacgccgattacgtcgcagatttcttctttccagtatgactagttcttccacgtcatgatcatgttgntgttctatgttagtattttcaatgttggttgttgtagctg

SEQ ID NO: 84246 - DNA, 214 bp, Glycine max
ccaccacaaagtctttctgcaatgactaatgtattgcacccgcaacatgttatcattattacgctatcacagtgacataactgttacgcgccctatacatcctaatcaaattggtcgggcggtgtcctgctgaacagtttacaacatgtaatttcgtgtgtgaacagaacttcgggttgtcaaacattactaacgtgttcggtggcccgttgtt

SEQ ID NO: 84247 - DNA, 349 bp, Glycine max
gggcaaggacaaagagttattacattaacaaaaattcatggtattacatggggatattattacatcaatatgttaatgtcgtcaacagcaataatgatacagggtaaaactgatcgatgttagtatttagtgataactagaactgtagtgacttcataacttaactaagcctaagacatttagcaaatgtcttgaatcattcaggggacagagtgctataagcagcaattgtcactgtcaccctgctgaatgcaaattaactggttccacatactgagatctaacgtcttcttttggcttcggggggacttcatggcactcacctttccaagctttacagaaaacttgc

SEQ ID NO: 84248 - DNA, 440 bp, Glycine max
  unsure (1)..(440): unsure at all n locations
agctnggatcctctagagcggccgctttgttttttttttttgtttttttttttttggaaagaaacaaatagttgatactaaaactagcttcaaggtatcgaccaggtcatgttattccccaaacgtgattccaaaaaacatcctcattaatgatccctagacagagacactaggcgacagatgtgaattatcatttcattgtcttataacacgatatatgtgctacactaaactcaaaatggattgatgaagacaaatgacacgtacgtactgacaacatgtcgagttaaaacgttgattacccaacagtagaaattactttccttacaagctgacattcaccattcattcatacattaattttatttaacacccacctgatgggaacaaaaaggaaaaaactttgttttggtccttcgatgatacaaaatactgttcat

SEQ ID NO: 84249 - DNA, 310 bp, Glycine max
acctaaaaaaggtttttcttaaaccaatttcccggaaaaaaaatccaccccttccagggttaccagttttttattccaccccatcaccttcttttttaattattgaggggatatttttaaaaaaaaaaatttttgatttgaggggatatttccccaaattttcctaccagcaaaatctttttttacctggatgatattcctttttattgaagttaaggaggccctttgttgatgattttgaatccctaacctttaaggttccagaattgttaggcaaaggtggccaattccagattcgggttttttcttt

SEQ ID NO: 84250 - DNA, 343 bp, Glycine max
cggccgcacagaagatcaagattgactttaatttcgcccccaaaatatgcatttacaatatggctacaacggtgaggtaaatggttggggcgcttggcgacagaaacaaatggaaaggggggagtcctgataaacagtgaaaaacatgtgaaatcctgacaaaacggtcacagtgggttgtgaaaaataactagaaagaacggctgtacgttaatctaaaagaattaatatttaagcgcataacatggtgttgagggattcggaaaaaaattttctgtccaggcgcaagaatagccatgggatcaaaattggcctttgtcttgactaatctgcaccacttatc

SEQ ID NO: 84251 - DNA, 339 bp, Glycine max
  unsure (1)..(339): unsure at all n locations
ccttccaaaaagtataattcattcattatatacaatattacaataagcagaagcgacattgcaaaactgcaaaaatacaagcaatgcatgcttctttccctaaaaacaacaacaaaaaacacataatcaacaagaaccctaataagttaaactttccccccttttcagattctcccaaaaaattgtgacaagaaccacacactacctcatcccatccaaatcagattcatcattattagcatcaacaacaaaccctttttttttcattctattagccanccgttttaaccctcatccttttcctcgccccatccccaaaacgaccaccgttcgccgccg

SEQ ID NO: 84252 - DNA, 276 bp, Glycine max
ggccagcaaagataattatattcatatatatgagaaaagtaccagaggtacttgagatacatataattggatggccataatctggatccaaatcagactaaaatagagtctggataggaaccataaggcttcaccctgccatgaattaaaatgctaatacaaaaagccttgtctgatattagtagaccattggttaaaaaagtactgcaaagcctttctccagatttgataaccatgtccacaaaaggaaagaagcatcatcaatcaatttgttgc

SEQ ID NO: 84253 - DNA, 354 bp, Glycine max
gtgcgcctcaataccagaagtctcagactttaagtcatttgcaggccgcttatgaacttttatcttctttggcacaccatcaacattaagtttgtgatgcttaacttgcttaacctcatcagatgtagccaggaatccctgctctatttgctgaaaatcttcatgtggtcctgatggtgttaaatttccatcattttttacatcaatataagttttgctctccatattggtagactgagatgtctcattaactatgtttggcaatgccatctccccagacaaatgaggcctacccatgcttttactagcaacttcaactggttcaatactcctggtcatttctggggatgcatg

SEQ ID NO: 84254 - DNA, 528 bp, Glycine max
ggcgaaagtttataacagttataatgatgctctataaatatagaactgatatgttgtaataaggatggcaacttgtaaacatcctcatatcttgtctctgcaacactcactaatcaatgctttctccttcagtttagtagaaaatatatgcaaaaataaagaaacctggaccctaatcatgctttctccttcagtcatcatcctcaggatcaatcaccattctcagctgccttctagatctggcattgtcaggaaatccactaacagccacttcatcttctgaatctgctaagtcatccatttgctgatgttctatttgggaggaattcatagaatcaacacgattatccctttccaaagcatctgttttgccttcattgaaagaatcatcgcccattattctctcctgaatttggatattttcaagctcaacttgctttgaattaagagaggatcttctagttcttttgagagcagagctgggcatttcatcatcagaatcatctcttgacaatgcattcacattga

SEQ ID NO: 84255 - DNA, 497 bp, Glycine max
gggtgaaaatcataagaatgatatttctgattgattgaccgtttacaccaatgcctttaggtatcacaaagtgcttattttaaatttgctctcgcatgcttttctcttgggattgggattcaacgtggatgttattgtcaaggtggatagtgactttaggtttcacaaagccatcttcttcaccgtaatgttcctcctttgtcagaaaaacatactccactttctcaccatatcttttaaccagaatcaagtagaaagacatgccaaaaatggtgactacaatcaacaagaagctgaactgaatgttcaccaaggagatagcacgatgaagtgactcatcatcactgcatctcactacatattcatcagactcctcaagggtgcatgaagcaacctttggcttggaacccttggtgtccaaagcaagaaacccatgaccataagccacacaccttggaagattatgctgacagaacgcacaaagcagaccaagaagc

SEQ ID NO: 84256 - DNA, 279 bp, Glycine max
gcggtcaatttttttttttttttttattattatttcctttttttttaaaaaacatactaattcgcggcgggttatccagatcatacaccttcccttcactcaattcacatccacttacatttaaacgcaacagaccactctgtctcctaacttaaaaagattgatacccctaataaatgacttaactcatacctcactgcattttccataactttacactttccattcttataaactctatccctacaacattattaatgaatctcccttcccacattt

SEQ ID NO: 84257 - DNA, 297 bp, Glycine max
ccgcaaatgaagcaatcgattgctttcttaatccaaggaacaaaaagtgccaaccattccaaagtagaatgtaagagcattttaatacatgggataatcatcactcttaaagctactttagacccaattcacaggccatggggctacctcattgggttacccttcctaccccattcctttttttttctctacataatttgcgctccaactttttctcattttcttttcatcctcatagcagcagtaaagccatgggtgtgtaatgcaatatgaagtccaaatgacccaatcattacc

SEQ ID NO: 84258 - DNA, 362 bp, Glycine max
  unsure (1)..(362): unsure at all n locations
gtgtttttttnnnnnnggggaaacacacccgaacatatatgttgggtttttaaaaaaacttttttgcgtgaggcccctccttgggagggtccccccaaaaataactatctacaatcattattctttctacatcgtactcataaacatcccaacactgcggttaaaaaaaaacaacaaaaaaagaagaaaaaacccccaaggggaaaatttaagatggctgctggtagtgcctgcaatgttctcctgttcggttctggcaactaacaacgatggtgttcttttttttgtactaggatttttatatatactattaattaattaacgncatggcataaaaagcttggtccccccttctgtcgttt

SEQ ID NO: 84259 - DNA, 436 bp, Glycine max
  unsure (1)..(436): unsure at all n locations
agagcggccgcgtcgttttttttttttttttttttttttttgctagtgaacatatggagtctgtaattttgcacaattgaacatgacaagttaacaagatggatccttgatagttggatatgcaattcccattaagaaaaaaagaaggaaatttccaatggaaattggaaacaaaaagaaaagaaaagaagaaggaagaagaagcaaaccaaaaccccccaattacatattacatatacataacaggtatgcttatgcttaagctctctctgcagtctgcaactttcacagttatcaaggtgtggataaaataaaaacaagaagctaaaaaatcccacgtctcttccagagaaagaagaagggacaaaaacgaaaccgaaaacgaaaaaacgtgaactttttttggnttttttattcaattttgagagagagaaaa

SEQ ID NO: 84260 - DNA, 211 bp, Glycine max
acaagctgatcctagagcggccgtttttttttttttttttggggcaaatttttggtgtttaaatctatctatctactacttttctacatgggttttcccaacaccacaactgttctcttaaacaccttctttaacttaatattttatccttccatcattatccccttttattatctattttttacataactatacaaactcaaataaaata

SEQ ID NO: 84261 - DNA, 274 bp, Glycine max
ggccgcttttttttttttttttttttttttttttttcgcgcatggaagacccgtacgcttgccatcagctttttttgtacaatcgctacatcactatttgaactcagtagggagagagatacaatgggagattctctaggtattttggacatcgccacttattcactcgtgagcataagaaaattaacgccgctttatcacgtgtatcacacactaagtctgggatggcaatctgagttaacaaatgacgatgctgattcatctaaacaagcca

SEQ ID NO: 84262 - DNA, 402 bp, Glycine max
gccagaaaaataaaatcaatttgcattaaaatattggatcaaaattgcacaagtgaattgcacttccatttaaaaaagaaagaaaaaatcagattaggtgtaacccaaatactcttttccccccaatctccaacactcagagtgttcctcgaatgaaactacttaatctacatcatcacatgatacccccaaaaaagtaaaaaacaaaaacttagttcaacaaaaaagaaacatgacacaatccctttcaagcaaacaacacagtttgattagggatggtgttggtgctggtagatctatgaggaggaattggtggcctactacccatgaaattagtagtagcactgccccttctaaaagaagaacatgaacctcttgaacttgttgaatgcaccattcccc

SEQ ID NO: 84263 - DNA, 306 bp, Glycine max
  unsure (1)..(306): unsure at all n locations
cccttagcttggatcctctagagcggccgcttcgnttttttttttttttttttttttttgggggattttattacatggagtcatggaatactcatatacttttgcttcttacagagacggtaagacccaaaaaaaaaaagtcttgttcttatcctaatatttttggttatattttaattaccgattttttcagaaaagaaaaaagaaagaagggaagtgcaaaattttttctatggcttgtccttgagaagagaagctaatccggtgaccaccttaaccccttttttaacacttcttactttcacc

SEQ ID NO: 84264 - DNA, 367 bp, Glycine max
aaaaaaaaaaaaaaaggggtttgtaaaaaaaaaaaaaaatatttaaaaaaaaaataaaattataattaaaatttaattaaaaaaaaataaaaattttaaaaattaaataaaaattattaataaaaaaaataaataaataaaaatatgttaaaataaataaataaaaaaaaaaaatattttataaaaaagtttttattggttaaaaaaattaataaatatatatatagttgtaataattataaaaaaaaaaaaaaagatggggggtattaaaaaaaatatatttataaatatataataatataaagaaaatatataaaaaaaaaaaaaatattataattgaaaaaaaaaaaaaaaaattaaaaaataa

SEQ ID NO: 84265 - DNA, 377 bp, Glycine max
ccgagtagcaaactagttttccttgtaatatagagcatggaagggaatgagaagcagaaaaaagtgaccatacaattttcctaactactttaatgaatcccctcaaatgatccattgtatcaccctaaggtaaaattcatatccacaaaaatgccaaaagttggcctgatatttatcaacagttccaagaccataatgatcaaattctacaaacttctgtggaagggaaagaaatataattgggggtttgaaacactaaaacgtatgaacagactatgcttctgattgtatttgcctgccagattgaagggcatcttgcagggactccacagcaccatcatagttcaagaagcccataaaccaaaattcatgattgt

SEQ ID NO: 84266 - DNA, 512 bp, Glycine max
  unsure (1)..(512): unsure at all n locations
gtacgtatagctnggattcctctagagccggctcgannttttttttttnnttttttgtttttttttcgattgagtctctacaacacctctaccttactaagggtatggtgcgctgtgaagaaaaagtgagctctccacaacaaggctcaccattacaaaatatcctatacttcctttacatgacttctccctcaaaatgactccatttgatatcacacctaagtgtcaaaattcaatatccacaacaaatcgccaaaagcttgtcctatattttcaatcaagcagttccaaagaacatagatgatcaatattctacaaactctctctggaaagagaaagaaatataattgcgcgttgcccttcacatccatatactcaccctctctttccatccattcgatcttgcttcaaatcaacacccattccatagggactccacagcaccatcatatttcaagaagcccataaaccaaaattcatgattgtcaaccgaaatcaccttgatgtacttt

SEQ ID NO: 84267 - DNA, 453 bp, Glycine max
ggaaagagtcgtgtcttaaattattgatcaacaaacatatacgttccaatcaagcttagagctaagaagattgtagagcagcaatgactttccatagaaaagaagtattataaaataaggggagatgaaatgaatccgtagtgaaattcaacgtgcggtacccagaaagagacattggtaggtatagcctgcaaagtagtgcagccactccacgatctatggtatttcagttcatgttgatgcaaacaatgaaataaaactaattgaattgagtgtggtttagaattaaaattaccaagccctcttgggcagagaggaagaggaagaataatagtccatataccaatcgagaaatttcctcaagccggtttccaaatcgatgggtggggttgtagccaagctccttcttagccaagctaatatcagatggggtgaaaaaaacatccccattgg

SEQ ID NO: 84268 - DNA, 267 bp, Glycine max
ccactctccataaaaccacacattcttattcacccttactacctcaactctcaaggcagggctttttctttcactcaaccactcttcctctctccttcacttattcttctccttctcctaattgctctctctgcttcttctattcctcccacttgtttttctcacaaagtttttgattctcaatcaactcatgctatgaacaaccctcctcatgctaaaaaaagttagcctagtgaatttcgacttcttaaactacacagtacatca

SEQ ID NO: 84269 - DNA, 337 bp, Glycine max
gagctgtgtggatttcagctctacaccaatcgctgctatcctctggagtgcagaaaggagaagtcgactgatgataacgtacattggatgtcatgcatatatacttctgatctcaagaaaatagtacccacattttaaaactcatgctatgagacatgaccgcatgttactaatcttgcctattaaacagtctttgcagctaataaaaaattgaacaaaattgtcctgatgatgtgaacaagataaattcaacatgttcaacatgagaagatactgaggattcttaggatgaagaaaacaacttcgactatttatccaataatctagcatcaaacat

SEQ ID NO: 84270 - DNA, 61 bp, Glycine max
gacagcatttttgaagtagtttgtgtagactggaagaagagttcagggaaaaaaaacaaaa

SEQ ID NO: 84271 - DNA, 199 bp, Glycine max
ggacatatgttgtcctgaggcgtggatagaaatgccaatttcgctcccttgtcttttcttgcacctggacacaatattttgttccgaatgccttatcccttgtatatcacttaaatattaatcataataaaataatgatatacgcgttttacgtctttttcttaagctgaacccactgtgaccatcttgcctggattcc

SEQ ID NO: 84272 - DNA, 380 bp, Glycine max
ggttctagtgtgtgattgtttgttgttgtaactcgtgcttcttcttttgttgttctgtgtttgtgtttgttttttctctcacctgaaaatgtcttgctgcggtggtaactgtggttgcggaagctcctgcaagtgcggcaacggctgcggaggctgcaagatgtacccagacttgagctacactgagtcaaccaccaccgagaccttggtcatgggagtggcacctgttaaggctcaatttgagggtgctgaaatgggtgtgcccgctgagaacgatggctgcaaatgtggaccaaactgctcctgcaacccctgcacttgcaagtgaggtgttgggagagcaagcttcaagcagagatagcccttaattaggaataatg

SEQ ID NO: 84273 - DNA, 360 bp, Glycine max
gatacaacagttgtgtgttggtgtttctttaccttttgtttctgagttcttcgaacaatactactacatttcctttggtggacaaagaacaccatctaattaaaactcctactcagtgttgaataaagtttagtgtctattaaacttttctcgtttctcttgtgttggcgtaacaagcactatgttggagggacatcaacttttgggctttggcttctttgtaattggtttatggcacttcttcaaccacatcaagctccatgctcttagttccaagtcctactcatcaaccctatggtttcccaccaaaatatccagatacttggagctccacttcatcatggcaagctgcacaatctt

SEQ ID NO: 84274 - DNA, 370 bp, Glycine max
  unsure (1)..(370): unsure at all n locations
ggtggttggccccggtgcgcggccgatcccatcgcgtcgccaccctttctttcatttttcatcattccaatccaaatccttccttccttccttccttccatgccaaaaccaaaaccctaatcaataatcttctacagaataacaatgatcccctcaaatccctaatccctaatcccaatgccattgaagaaagaagcaatgatttcgaatccagaattgatccactacgcgtgcattgctcgatcggagacgatcctggggcagcaccagagcgagaaggagcctaacatggaggccttagcagcccaatgcgtggtccaagcccctcccaaccacaccctcttctnccacaccgtccataaccgcacct

SEQ ID NO: 84275 - DNA, 103 bp, Glycine max
  unsure (1)..(103): unsure at all n locations
atttctntngaattaatttgataagaatttacttaaaaagctttcaatcacaaccacccactccactcttatcttattatcatttacttcaatttccaacaat

SEQ ID NO: 84276 - DNA, 347 bp, Glycine max
  unsure (1)..(347): unsure at all n locations
aaaaaaaaaatttttttataaaaaanannaaaaaannataaaaagaaaattaaaaaaaaanaaagagnctaaaaaaataatttataaataaaaaaaaaaaaaaaaagaaaaaaaaaaaaaaaaaataaaaaaaaaaaaataaaaaataaaaaaaaaaaaaaaaaaaaaaaaaaaaaaaaaaaaaaaaaaaaaaaaataaaataaaaaaaaaaaaaaatttaaaaaaaaaaaagaaaataaaaatatgaaataaaaaaaagaaaaaaaaaataaaaaaaaaaaaataataaaaaaaaaaaaaaaaaaaataaaaaaaaaaaaaaaaaaatattaaaaaaaaataaaaa

SEQ ID NO: 84277 - DNA, 375 bp, Glycine max
gttcgcaattttctgtttgcgatggaagaattaaagcttccagcttttgaagctgctgatcttgaaaaggataatctcgagatgggatcggcagcaaaagtggttgattgcattttggcacttaaatcgtttcaagagttgaagcagatgaacaatcagaatggatacatcaaacacataaaatctcctttgcctatgagaatgcatacaagagcagctgcgttctcctctgatgcttgtaggcacttggatttgtcttccaaattggaaaaaatgcctcccgctgagtgtaattttccgaaaagagaagaaattgtggaattacttgccaagcaactggttgaccgtatgtttgatgccaaagaaaatatcgat

SEQ ID NO: 84278 - DNA, 176 bp, Glycine max
ccacccttccgtccacgcttcctaccacccgtcctcccactctttcttacggttgcaaaaagcctacagaggggggtgtgttccggattgactttttctcctgttttttttcttttttccgctggctttcacacatttgactgaactcttattctttttcctttttacatcaactc

SEQ ID NO: 84279 - DNA, 205 bp, Glycine max
tcctctccatactccccactctaaaaaaatccatcccattcaaccaaattacctctctctcaatcacttcccttcccttcacccccaaaattctatttcacaatcctaactcctaaaccaacatataaacaacccacaaatccccaaactattcccaaattccacctacctaacttccactccaccaccaccacctacacaacca

SEQ ID NO: 84280 - DNA, 454 bp, Glycine max
atctgaaagatttgcattattgatttccgtaaaatgtacaaaaggtgctaagctactgtgtgtacaaactatatatagcacagagcttagactaatcctaggactaaaaatattcaattgaaactaaagagaaatggtattccatatgcttggtcttggcatgcagtataagattgcgagagaaacaatattctgattgtcataaaaaacagagtaggttgagtaacaaaaaggagctagcaattcgaaggagagtttgataccaaagtagctcaatagtaaattgagccaaactacaatattctgctttttcagctgtgcttctggctacaactgtttgtttcgttgaacccccagaaattgtagcaggtcctaaatagacatcaccccatgaagtagagcaatggtcatcaggatcagatgctcaatcagtgtcacaaaaggtacatagcac

SEQ ID NO: 84281 - DNA, 94 bp, Glycine max
  unsure (1)..(94): unsure at all n locations
ttnngnnnnnnnngggagaaggacaatttactttctacttatattctagggtatacctcaaaatggtgtggcatcatccaccctgatctggtgg

SEQ ID NO: 84282 - DNA, 221 bp, Glycine max
ccttggcgccgctttttttttttttttttttttttggcacacctaatttgacaattaattcagggaattatgtcgatagaacgaacaagacgtggtgtgaaatcaagaaccatattagatgaaattaagagggcggcggaagatatagatgatatagctagcctgggtaagtgcacattcatggtcaccattaattagcttgctggcctttttctttatta

SEQ ID NO: 84283 - DNA, 286 bp, Glycine max
cgaagcgaaaacaacttaaattacaattgatggggagttgatgagaaacccaacccgcgaaaactactttttgtaacagaatgacccgtgcaccattgtttaacactaacacccatggcaatgcaattaccttaatcctacctttaaccaaacgttgaggcctggctggattggtcatgggggatcatctcgctaactactgctgcttagacaaaaatcggataacggccacggcgcgtcctatcttcataatctgccattaagcgtcctaattaatgcactattt

SEQ ID NO: 84284 - DNA, 212 bp, Glycine max
ctgacataaactaaaaattttttttgtttggggtcaattccatcccaagataaacatttaatgtaaaacaccgtaatttttttacaactaaacccaacagggggagttgagtttttgatgttttttggccgccctaatttcttttcacaatacctttttctttgggatcaacatttgaaaaacaactttttcccatgcaaaacaagaaatgg

SEQ ID NO: 84285 - DNA, 437 bp, Glycine max
ccgaacccaaagctttgattattgaaattagcttaacagattagaatgccttgcacgaatcccagggagctatttaaaagagtcactcaaagtactgggccctattcaatactctggccataacgaataacattgacaacataaataaatgcgaaatttctaattgaaattactaaggaagcgctgcttatttgccctcttaagccacaccaaaatccggaatagcccaatgtttattaattcctctcatttgagtatcttcctcttgagctgcttattagcacaagcctcacaatgcatacttatcttaagttctacagtaactggttcactagcctgagaagtaacagcttctggtataggttctccttctgctgcttctggcagtggagatataacttgggctcttttctttgttttctttgaaattatgttgc

SEQ ID NO: 84286 - DNA, 441 bp, Glycine max
ggccaaaacataaatatatttccttatgtgatattgatattggtgctgatctctattcacaattcataagtggagtttcactaatccaagtgataaaggtttatattaaaggtctgcataggttactgaagtaaaagtgtaaaactctgattttcgattggagaataatgctaaaaacacttgcatctgaattatctcctttttttcttactttttctacttggtttggggggatttacttacaataaaacctttaagattaatagaggggtatttgtttctatctttgccacgatcaaagattaactcttcaagctgagggatatagtgacctgaaaaatatggacattaaaaaggtggttatgctaataatgtaagcgacagagaaatatcattatgaaggtaaacactaaccaccatagctttctcctgatataaaaa

SEQ ID NO: 84287 - DNA, 496 bp, Glycine max
  unsure (1)..(496): unsure at all n locations
tttttnnnnnnnnngggagcatgcatctatcgaagcttcactattggcatagtgatntacacattaataagaccacttggaatgatggacccatctataaatgataaacaaacaaatgacttgactcaagatgtgggattacatcctttaatatacagccatgctgatttcctattggcctttgacaacacccagccgacccattaggaatagcacctacaactcatactgatgccccaagaccttatactcatacaacgataaacgcgattaatcctccgcgtcagcgcatctacaacggaaagaatccagctttgcttgtgttccacggagtctcattctgagcttagccatctccttgttgttttttaggccacccacgggcaattttggcctccatatcggaaagcttccaattcagctccttaatatggactttggccttcgataactcattctggcaattccttttgcagaaaatccattcttttatgtt

SEQ ID NO: 84288 - DNA, 101 bp, Glycine max
gcgggcactgctttggcacggcacaaccagaagacgttggtctttggcttaaagggacggccccccctatttatcccttcttgactgttcttgcagccagc

SEQ ID NO: 84289 - DNA, 427 bp, Glycine max
  unsure (1)..(427): unsure at all n locations
ccacgcttccgcacggttgagaaaacaccacaaaggggggttgggggatgtatcccacctggtaattgagaaaaggtttctccnctctcgtggggtgagtgggagtaccatatagggctgcagggtcatcgttcttttccccaccggccatgggaaactaactccttctaaattccagtctatgtgggaagattgcaaaactgggttaaagtgggttaaagtgacaaactgctactnntctgatgatttgcctgggaatattggtcatccgtgtatatctgaggtcaacgaggtttatgaatctaatagtgatagaactgaaatggctagctctattcgagggccatgtgaagtcctcccatctgataaatttaaacaagagaatgacaggcgatgtcagttacgaaatgaggaaagttctagagtg

SEQ ID NO: 84290 - DNA, 360 bp, Glycine max
tgtgttttttacccacttccaaaaagaaaagccgatgggtgtttcactacagtcttatcccctttaaggttttggattttgacccaacctttgacgtatcgaaaccttaacttatggatcaaggctgaacaatctcattgatagaaccttttgtcttacagagccaagttttatgtctcaattagacgatcaaattactactgcctttgatccttttgctgatgcaaatgctgatgactcagctgctgcctcaaatgaaaatataacatattcacctacatcagcctaattgaatgaaaatcctgacaaccactcatgcattgaaaaaagaatttagctataacatgatacttaaagatg

SEQ ID NO: 84291 - DNA, 107 bp, Glycine max
gttctattcttgaattgaaccttccatatttcttctcattcacccccttcctttttccacttttgaattgctttcctttcaaaatttatttacaaaatcatgttttt

SEQ ID NO: 84292 - DNA, 115 bp, Glycine max
tacattactacagatgcgagaagatttttctcgcgtcacttctcatccttcatacgctgctttctttatatcgtaggacctttccatggggaagacacaaagaatgggagctcat

SEQ ID NO: 84293 - DNA, 253 bp, Glycine max
ggtactcaagtcattttttacttctgattaatcagctgttatattatctgataaggctagggcatacttatgatgcttgctatgtcgtggcgggacatataatggctcaacacgatgctcagaatgtggggtagaacaatgtcgctggctgatgtgacaaatgtcgctctgaagacgaatgtcctcattgaatcttctaaagcgaatgacgctgctgtgagatacaacgactcattggtcttttacgacgaat

SEQ ID NO: 84294 - DNA, 365 bp, Glycine max
caactccataacacaaggcagaaagcaagctcatcctagagttttaaaaatggcagcagcctcctccatggctctctcttccccatccttggctggcaaggccgtgaagctgggcccatcagcccccgaagtcgggagggtcagcatgaggaagaccgtcaccaagcaggcctcctccggaagcccatggtacggcccagaccgcgtcaagtacttgggcccattctctggcgagcccccgtcctacctcactggcgagttcccaggtgactacggctgggacactgctgggctttcggccgacccagaaaccttcgccagaaaccgtgagctcgaagtgatccactccaggtgggccatgctcg

SEQ ID NO: 84295 - DNA, 254 bp, Glycine max
tatctttcttgggtgccacaaaggttttttctatgatgaaactaagacagggtcctgcacctgctcactagtgaagcaccaactctgctctcaggaaatcaccatcttacctcaggtcaggccacaccactgtaagtgcccctctctcagccccagagtgagccaccaactcaacacagccctgttaagaccccctcacgtccccagagtgaagccccaacaccactcccaaggggaccctcttctctgtgctc

SEQ ID NO: 84296 - DNA, 244 bp, Glycine max
acccattcgtacggccactcatacgtactgttgcgagattttttttaaagggcccataacatctcctgcgagggaataaaacccaatggatcttaattcctctccttccaacaacacattcctcttgaatggaacaatccccgtttctttcacgttcgcaatctccacccagcacaaaaataacccttcgtcgtctttcatctacgactactcctatcccatcaacctatccacatgcatccac

SEQ ID NO: 84297 - DNA, 179 bp, Glycine max
tactcactaactcacggggagagcgaaaaaaaagaagaatgaatgactccctaaagagccacaaagcgaacggaaagctgtcgcccgagactcggaaagatcacaagtccgacacagggctgagcggatcgtcaaacaacggaggccaccgcgggaagttcacgtggatccgccaccgc

SEQ ID NO: 84298 - DNA, 286 bp, Glycine max
gataagacaacctttttttacgatcattctgtgtatgggtctggttagttggagcctataaacgcttttatgagatctcatccgattactggtaggggactacacacagggacttcaatttaatgccatacactatgaccctataacattgaaaatctttcactctcttgtgtccagtgatacgataccgcgaggaattttgatacgtcaaaacatggtataagcatgggaagaggaaggtattgaatttaaatttggcacaaaggaagggttgggtggcaaaaag

SEQ ID NO: 84299 - DNA, 255 bp, Glycine max
ccccctaatcccctttcatttcactcaccgtcacctgcaaggcgactacacacaaggactccagttaaatgccatacactatgaccctagaacattaaaaatcttccactctctcctgtccaatgatacgataccccaactaatctttatacgtcaaaacattttataatcatctgaagacgacgttattgaatttaagttgttcacaaaagaacggtttcattccaaaaaaaacgatatgctcttttacaaatc

SEQ ID NO: 84300 - DNA, 186 bp, Glycine max
taaaaaacaccacaaaaagttgtcatcacaacttaatcaatctaagcgcgcagtggattttctatcccaaactatcattattaaacatttccaacaatttcaaatgatcttaattatcgaactaaccatacctacaactataagacttactaatcaaataattcttttaccaaataagaaaattta

SEQ ID NO: 84301 - DNA, 202 bp, Glycine max
accggaattgaatggccggaccgacccacgcgtgcgtgcaggagaaaacacgacagggaggggatgtcacgtatcacctttcaagacccctttctttggaggaacgcttattcacccaaattttgcctttctttgtggaggaccaccaggaagattattcccatattaccaccaccattattattaatatatttttggtggt

SEQ ID NO: 84302 - DNA, 288 bp, Glycine max
aggcgtgaaaacaccacagaggggtatggctagaagaacacgactgctgggcatcgatgggggggccttatctctgtacctaattccataggcttgtctttacaccgtgacaaaacagctaccggctggggagtacagacaaagaacggaaacatgccgccgatctagacgatccaagcttacttcctcttacatgcgaactgataggtgtcctatactaacaactaaatccaaatgactgaccttatttaacaacagggtgactggaaaaccatcacttcccaactt

SEQ ID NO: 84303 - DNA, 200 bp, Glycine max
tctgtcatgagaccatatcacttgggacgcctttccacatgcatactctcgcatcatacattttacttccacaaattcctaccaattacaacctaacccttgactacgccaaaattcaaaacttggttacacttcttccttatcatcttctgttgcccgatcttctgcctccaatattatattatatgacattgatcacc

SEQ ID NO: 84304 - DNA, 256 bp, Glycine max
ggcaactaagaacttattcattatattttatgagatatagggatatatatatatatatgtatatatatatatggaactgatttgataaccctagatgggtcttacactagtaattaaggtagcatgactgtaaataataaggtaatatgatagtagcagagaggcatgggtggatggcgtggcatattcagtccttattattgggagcttctgatgcatagtaattatggtaatgaatggaaacaccaggagcact

SEQ ID NO: 84305 - DNA, 272 bp, Glycine max
ggaaaaggatacaagcactcattattgcgagacgagcaaaaaaatacgaattcaattatattaccaaatatatcgaagtttaaggggctttcaccaagccaccaaaattaatgatgcaccatgtcatcatcgggctttatgcgtcttacaaacataaaagggtatatcttgatgaagccatcaaaacatcttaaagcatttgtcgcatcaaagggactttgtgttttggacactcaaaatggttgtgaacacttttcttacaacattttatt

SEQ ID NO: 84306 - DNA, 237 bp, Glycine max
tcctctagcgcttccgcttttttttttttttttttttttttttttttattttggaaacaccaacaccacgggcgggtggttttaactatcctataaaatcaaatacactcccaatgtataacaatcctaacttcaaagttgactaagaacatttcgtcataatctattaaattaacttccaaattaaaacaaattcttccctaataacctattagcttctacaaatataaaaattat

SEQ ID NO: 84307 - DNA, 386 bp, Glycine max
aaaatcccttgggtccggaatttctaatggatggacgtatggttatccaaagagtaaacagtaggattttaacaggcgggatcattggttgcaacagcattttatcccaggcacaggaggtccaaaacataaaaaaatctctcccacttgacccctaatcacttatttttgcctaaccctctctactctaaagctgttcttagtccatatagatgccatagattccaacaaaactaatatcccaggtcagcatgctccagcaaaatcgccaacaagcaattaggtgtctgtccacaatttctcagatgacaagttgatattacaactgatacagcaacagcaaacaccttcatcacttcacaactggtaatagatatatgctcttt

SEQ ID NO: 84308 - DNA, 180 bp, Glycine max
ccacaaacccacatattgatttcactagggtattccgtacacaagccagaaatcacagtcctaaaaggatggcagacggagctatcattaattacaagaactgactttatatggaaaatatttcatctatttcagaagacaggtctgcaaagaaaacctaactaaatatcctgagttgaa

SEQ ID NO: 84309 - DNA, 226 bp, Glycine max
  unsure (1)..(226): unsure at all n locations
catgcacgcatacgtgggctcggatcctctggcgcggtcgntnntttttttttttttnnnntttttggaataacccatccaacttttttttggaaatatttggattggggttttggcgaggttaacccccttagaattccaaccaaatggtttggggaaaaccccgcccttcttgggagggcaaaaagcttgccccaacttccaatccaaaaccaaacatttggcc

SEQ ID NO: 84310 - DNA, 178 bp, Glycine max
ggcgggggccctttttttcgattgaaaggagggggtgttaacccttggaaaaagaccccccaaaacctttggggaacttaattcttttttaaacaaggggaaaactttttcagtggggggttaaacggccgtcttttcattatttccgggggggggaagcaattttttaagtttttta

SEQ ID NO: 84311 - DNA, 334 bp, Glycine max
aacgtgatacgaaaacgacaaagaaagcatgaattttataaaataatgacttcaaaaataaaaattgcattgagaacacattattaataagctagaccaaaggcctcctttcatcattttctccagaatttggcagagtccccaactcttcatcattagtagattttgcaccaatgttccttgcagaagaggttaagaccctcttggtcttggtgctagtgaatttgctatcaggcagcatcttcaatggtggtccccatagctatgagggagtagtccactcccatgctgttctgttaatgggttttgaaatatcaagtatgacaatagcaat

SEQ ID NO: 84312 - DNA, 293 bp, Glycine max
  unsure (1)..(293): unsure at all n locations
ggcccataacaattagattagattaatactaaaaatcaacagacaaagaggcctatcttaaatggacatgtgggtccttttccctaattactgcagcttaaacaaaaaatggaaaacggcaacagtcagtcagaacaacatcaacagccattaagcctccacatcagcacacttttttccaggagcgcagaagagccaaacaaagccgtacggatccttaaccttccccacgcgcccaccgnagcacgcgtnttcaccttccgccacttcaccatccgcaactgcaccagcgc

SEQ ID NO: 84313 - DNA, 358 bp, Glycine max
caaagcaacaaaacattttgctttgaaggaaatatccactccttgcatattaacattggttacagggagagtaagtaaacaaaaataataatagtaatagcaatgctaaatgctaaatgctaataccactaagctaacacagattgagccatctagccaatatcaccagcaggagcatgatactaagaatcaagagaataggaacaacatagtgacaggcaagaattgaagttcagtgatgaaacccttttgcctcacaaggatttttgttgagtgaaagacaaaccattgttggatcccataatctgtggccatattctggtgccgctgatgttgctgttgctgttggcactgctgc

SEQ ID NO: 84314 - DNA, 292 bp, Glycine max
gaataaaacaaaacattttatacggaaggaaaaatcatttcttggcatataaacaactattactgacagtgtaaggattgccccctcatgttaaaaaaagaaatgctaagtgctaaacgctaaacctacaacacaaacaaacttggagctattgggcctattttttcattgaaattcatgatgctacaaatttataaactcgttacaacgcccattcgggttccatacgaacttcatccttttacccaggggtgaagacattgttgattgtgaatggaaagacaattcactg

SEQ ID NO: 84315 - DNA, 133 bp, Glycine max
  unsure (1)..(133): unsure at all n locations
ccgcgtacgtagctccatcctgcgacgcgtcgntttttttttttttttttttttttttcgggaccaaataccccccctttaaaaaattaaaattaaaaaacttggtttggttccacaaaatttcatggttttt

SEQ ID NO: 84316 - DNA, 119 bp, Glycine max
aacccaaccccgccacgcaattatggttccaagttcccatcaaagctggccccccaggtttcctaaaactcaaacaaccccaggccttaaaaatcttgaacctcccggcgaaaaggggg

SEQ ID NO: 84317 - DNA, 213 bp, Glycine max
gggcccatgcgagacagggaggacgaatgtgcttcttgggtcaacaaacaattgatgttaccgaggtacttatactacccctaaaggaaccttgggactgtggactttggacaggaatttgtctgactcttcccaagaatctcagcgattgttacttctgtttaaaggaatcaacagactgccacttggggaagagaacgatcttgtctaaaa

SEQ ID NO: 84318 - DNA, 382 bp, Glycine max
ggagaaaagtttaaattaattaatgcaaaattaaagatggttgtacaacaagcaaatgaaatgatgcataatttctctcaggcttcaatgctaacctatcagaaaaatctggtcaagtggtcgtggaacacacgaaagtagagttatgtggttgtgcgccaattagagttctggtcaagtggccgttattctttatttagttaattataaaagtgcgaaattagtggatgaaaacttcaacaggctctaattctttcgctttcctctcctcatagctttccacatagtctcgtggacagattccaaaatacaaaaagcaaggcattaatctttaggcaagttgtcatacctaaagttcagcatatccattactccattctta

SEQ ID NO: 84319 - DNA, 297 bp, Glycine max
  unsure (1)..(297): unsure at all n locations
acgcgtacgtgggttcctatgaggcggcggtttttttttnttttttttttttttttttttggccaaccggggttggttttattacccaggtattcggctttattttggaccattttgattcaattcaacattggaaaccacccggaacttaaaaaaaggggtggaattggggggattcttaccaaacaaacctaaaattgcttaagaccccactgggggaaagtagaatcagagacacaaaattgttaaacaaaacagcttggtttcatgtatactagaacattctttacattaaaa

SEQ ID NO: 84320 - DNA, 172 bp, Glycine max
tttttttttttttttttggccaccacccttgattatttttccccaaggggagaggcttggtcttaaccaacaaccattaattcagggtttaaccgagaccggccccacaccttatggacctttaaaaaaaaattaaggaaaatggttcttcaggtcacgagttaactaaccc

SEQ ID NO: 84321 - DNA, 271 bp, Glycine max
cccaaacatcaatatactacttttccatatgaaaaattgaatttaaacattacaacttcatccgtgtggcacactggcacgtgctaacacacaacataccccaacagcatgaagcatacagctgcagtgcatattacaactcaatagcccgtggaaggaatgtgcttccgtgtacagctcctagttagcaatatatgtacaaagaacagaatccaagtcatagatgatatgacttaaactaacacttcttatctgaactatctgtcaatga

SEQ ID NO: 84322 - DNA, 321 bp, Glycine max
gggccaccaaccaaaaataatactcaccaaagtgaatagccttgttctcaactaacaaccatgcagtcaggggatagccaacccggacccatcacctaatgggcgttctaaaccctattttgatggaactaacttcagctgattacccaacccaccccaactaaaccgaccaccatctttaaacttcaccatacaaacctatccacccccttaaccctaaacggatccctttggccaagccttggaatcaacgtcaacaagcggactcggctaaaccaaactagttcaccctactttccagtttgaactcaaaccgaaccc

SEQ ID NO: 84323 - DNA, 212 bp, Glycine max
ggcttggggaatgggttcaaatagggcatgtaaaactcccaatacataacataacacgcaacaaaaacgatagaatccagaacactgagaatataaaaaaccatttaaactaatacagttcagagagattaaatcaagaaccaaaaataacaacagatcttaaaatcctttaaaaataaaaataccctaaaaaatcaagcggtgagaacgac

SEQ ID NO: 84324 - DNA, 248 bp, Glycine max
ccagccaaaaaaaataaaatttttttaatacttttaaaaactggtccaggactcattatttacctttcatgaaaacaattaatcttaacaacacacaccagaacaaaaattgcgttaacatctgatggtgaaaacaaaagcaattgattgcaaacagcgacaaaagatggccaccagctatttggatatattccacttgagaagcttcaaaatccaatttgactgccccctgcttttttattccactc

SEQ ID NO: 84325 - DNA, 235 bp, Glycine max
ggcagtaaaagatgagggtaaagcattgcattatagacctctgtacaaacatccttcacattattaccttcggaaagattaaaacagacattggcagtcaatgttatttagcatgaaggtgtacatcaaacaactgtagcatcctcaagccatgctctacaatgtatgatgaggcaatccaccggtttttctatgatggtacaactcctaaacactagacaacacaacataagct

SEQ ID NO: 84326 - DNA, 378 bp, Glycine max
ggctcaacataataccattacatgtaagaaaaagcatgtccaaaacacattactacaatgaaacaatagtatgttaaataccatacaccataataaactagctaaaagtttataccattcaacaaaggatgtattagatgagaattgtcagcatcaaatatgtattttgcctgacggaagcacaagtatcagaaaaatcctccacagctatagcaatagaaaccaagccgctcacttacgggttcacacacatcaacacaaacatttactcactacacatgtcaatatctcctccgggggctcctggaacgccgttacgaggtgggctagcattctttcttctgactgactcgttaataggtccactgctgaaggccc

SEQ ID NO: 84327 - DNA, 319 bp, Glycine max
gttttttttttttttttttttttttccccccttcttcttcttctaaaaattccttacttggcacaaccacattttcccttatttttttgcaattcaaacattacaggggattaaaatcaaaccctaatagtagttttcccccaatcttaaaaagctgaaagaggggttttaagttttaaccaaaggaatgtgcaaatgttaattcaaaagaccctaacttttccagacaaaaatggggagtgcaatgatttggtggcacccacaactttgcatgcagtcaaagaaaatgagcttatattagtcagacatgccccaacgg

SEQ ID NO: 84328 - DNA, 253 bp, Glycine max
gggggggaaaaacaactcttttcacatttttggaaaaacacggcaaacaatttctcatccaaaatcaattgcatttcgaaaatgatttccaaaacaagtgctttaaaaaccaaaagacagaaacagttgagagatgttttcttatctcctgttttcttcaggtgctcaagggataacttttttcgaaaacaacaatctactcatgaaacaaacattcaaatgtgggttcaggagacagaaattttagaaaaca

SEQ ID NO: 84329 - DNA, 121 bp, Glycine max
ataaaaccaaccaacaacaggcccgtttatatgtgatgtgccccccaccccccaactcttcaaataaacccttattaccttttaatttcatacttctttattaccaatatttttattcacc

SEQ ID NO: 84330 - DNA, 315 bp, Glycine max
ggttaaaactgccctttaggaagaaacctgttgtaataacccgaatgggacggtcgagacccatttgcagcagcccctattttcactgaagcgaaagccggttctgattaaaaaaaaaacaatgctatcagtagtaccaaggaaagaccatgtttggataaagcatcagctacttggttggcctctctgaataatacgtgattccaagaaagaacagatttgactagtcgggcggactcaggtggggtgtctaagcagccatcctttatcatcttaatgactaaaaagagtgagattctaccatcagatgattga

SEQ ID NO: 84331 - DNA, 242 bp, Glycine max
aggggggagcaacccttctgatgctgtttttagtacacacactggtccgcatacaaacgcgtctgtgttcatgcaatcatgcatacattttcaaatggggggtgagtgaggcaacataagaagacgtctgcgggcgaaaaacaccgagcttgggaccgcaaaagctatggataatatacacactgaggtccacacaaaaaatctcttacatgatggccaagaattgaatggacttatgcatg

SEQ ID NO: 84332 - DNA, 192 bp, Glycine max
ccatgaatgaaatggaacatcttagtattagactaaccaacgtaacatacgtgtctagatgacaatacgaggaattggaaattttaatcacaatccgctcccctaacatgacaagacaattatctcatatctttcttttcgatcagtttcagcaacagtaacaagatgcatataaaaacaccttcacatggg

SEQ ID NO: 84333 - DNA, 273 bp, Glycine max
  unsure (1)..(273): unsure at all n locations
ttnnnttttttttccatgaaagaaangaaacatctgaggggtatattacacaaccgaacacccctacctagatgacaatccncggaaatgcaaactttacttacaaaaggggggacgaaaatgggtacaaaagaagaccactgtaggcaaaaaactccgagcatttgcccccaaaaccactgacatttaaagccccaccgggctaaaacaaaaacattccctcatgctggccaagaattcaacccacttattcctgggccaccaacaggaccc

SEQ ID NO: 84334 - DNA, 298 bp, Glycine max
ctttgcatgctatacactcccgggttcgggccttctttcagaccagttaggaaatacataaaaaaaaaacgcgttttgtcgtccctttctgagcgtaacttctttgtttcgacttgacccctaattcgcgcccattcccccacatcacatccctctttttataaattccaatccctttcccagtttcaccaaaacctaaacctaaacctaaacctaaacctaaacataaactgaatttcccaaatcccctttcccatttttcaccaaaacctaatactcccaaaccaatcttcgatca

SEQ ID NO: 84335 - DNA, 350 bp, Glycine max
  unsure (1)..(350): unsure at all n locations
gactcgttctagtgtatgtgattgttgtgactcgttcttcttcgtcgttatcttcttcttttgttgtttgtgtgtttgttttttctctcacctgaaaatgtcttgctgcggtggtaactgtggttgcggaagcgcctgcaagtgcggcaacggctgtggaggctgcaagatgtacccagacttgagctacaccgagtcaaccaccaccgagaccttggtcatgggagtggcaccagttaaggctcaattcgagagtgctgaagtgggtgttcccgctgagaacgatggctgcanatgtggagctaactgcacctgcaacccctgcactttgcagtgaggtgttggagagc

SEQ ID NO: 84336 - DNA, 107 bp, Glycine max
  unsure (1)..(107): unsure at all n locations
tccggtgcggttggaagagaccaccggacggggcccgtttcaaatntcgtttccgtgcctgttcccacaaaaaagaaacaccttttactttttttacttccgtctta

SEQ ID NO: 84337 - DNA, 81 bp, Glycine max
gggttaatgtgaggtcttcgcctattcccaattccaaattcaggaaattttttaaactggacatatttgttttcacctttt

SEQ ID NO: 84338 - DNA, 140 bp, Glycine max
cccaccccttggttggggggccaaacatttctacttcggaccaaatggccatttacaaggaatttaccccggccccggtggtcgggaaaatcgggccttacaccggctttatgacgccggcggctacacccaaaaccttc

SEQ ID NO: 84339 - DNA, 329 bp, Glycine max
gggtgttgctggtactctgtggtgtgttaaaggtctacaatacacctatctaaagctgaaggattgacacagtggttgctttggcactcattttttaatgtatatcggagatcatcggtgtagcaagatcattctgaggtatttttttaagctttatgtggaaataagggttattgtataactggggtcgattcttgatcaaagccgtctaatcgctgtggaaaaccgggccaatggtagcgtagccgggattttgagaaagccgttgtgaaatatgtaattaacctgactagatatcataagggctagattgaaactgcttgaaatgt

SEQ ID NO: 84340 - DNA, 396 bp, Glycine max
gtgaaaaaacaccacagatggtcactttcaccacttaaattctttatcataggcgtgggagtccaaatgcgtgcaacttaaactaattctcgatgactcccttattgacacctatgttattcctgctctcaaaactcacactcttcatacataattctatacattggttgttctctcttcctaacttgctttatctttcttttactgattattccatatcttcctttctacctacactgatgctaccataaactgtgttagaacagcaacatgatactttgtcacatgtaatgattaagaaggaataatcttcatacaacttattaaagtcaccttattcccagctactggctaacacattactctagatgatgaggcatttaactatacttagac

SEQ ID NO: 84341 - DNA, 168 bp, Glycine max
ggggtttggttttaaaaaaaaaagacaaaaaccggcttgggggggggcttgcctaaaaagggcctttcaaggcttttttattaaaagctggtaatttgtggatgaagagtaataaggttcagattatgttcattttttgggggaggcacctattccaaactttcggac

SEQ ID NO: 84342 - DNA, 110 bp, Glycine max
gccatccaagagcctggtttggaccaacttaatgtgtatgtacggaatgggggttacaagccccgaaaagaaaaacagggtgctaaacttttcctcaaaatcaatgtcct

SEQ ID NO: 84343 - DNA, 56 bp, Glycine max
ggtttcagccacagtttcggaggaaaagaaaatagtcgttcaaaatggcccgtcca

SEQ ID NO: 84344 - DNA, 104 bp, Glycine max
ccacgccttcctaccggttcgaaaagaccaccgaagggggtgccttacaatttccaaatcctaattggttaaacccaaatctcatttcttcatcggtcgaatct

SEQ ID NO: 84345 - DNA, 225 bp, Glycine max
ggaggagcgagggaccccaaggccaaaggcttaaattaaaccttttaattttaagcttttattcttatttggttacttggttaacctttaagggtttttgggatcaaaaaaccaaataagggtttaacgggaccaacattggacccgcttggggtttccgggccatccgccgcagaacggttattggcgggggcgggaaaaacgccgggaaaaaaaaaacccctt

SEQ ID NO: 84346 - DNA, 82 bp, Glycine max
ccgacgcgtgcgcgcgtgtgaaaaaacaccacaaggggattgagactaaacaccaaatccgtaccggatccttataaaagaa

SEQ ID NO: 84347 - DNA, 52 bp, Glycine max
ggggaggaagcccaaaccacaggggcttttttcaaattttttaccaaggggg

SEQ ID NO: 84348 - DNA, 151 bp, Glycine max
gacacccaaagcggttttatttttttggagaatccgaaaacccggttaaaaaaggtccaattccccttcccgaaccaaattaaaaaaataaaccgccgaaagtggaggttattggccttggccttggccttggccttggccctggcccttt

SEQ ID NO: 84349 - DNA, 214 bp, Glycine max
aaaaggggcccatattcggttccctactcaatccggcctttgattaataataaataatagccacacccacccacccaaccttttgtcccacaaaaaggtacaattattttcttttcccctaacaacccctggggtcactttattaaacacacccttattttattattattttaaacaaaacaccctctctttaatctctttttctttttccttt

SEQ ID NO: 84350 - DNA, 179 bp, Glycine max
gggttgcttcaatggccttaatgaggccgaacctgttaataaaatcaaccgtcccggttgtaatgcttgtggtgttggttttttacggttggataatggcggttttaataagtccggcctttaaccttaaggccaaatcttcctattttttgaaccgctcccccaacttcctttaaggt

SEQ ID NO: 84351 - DNA, 228 bp, Glycine max
gggaacccaccccagaacttgagccgattaaccctggggctggtcttgaagacattttaatgccctttggagagaaaaaccttggctttttacatttgaatttggaccaaaccaccaatgctggtttaagaaaccattcgccagaaccggggtttattttacaagaaccttcgaagctttaaggctgtcattttttgaggggtcccaaaacttcccagaacttttttc

SEQ ID NO: 84352 - DNA, 298 bp, Glycine max
gagcgaaacagagagtgatttcagtgagtgatcggtgttcacttgatctcatcataatcgtcagcgtcaattgaagaagatgccgatcagaaacatcgccgtcggaaggcctgaagaggcgactcaccccgacacgttgaaggcggctttggctgagttcatctcaaccttcatcttcgtgttcgccggctcaggctccggcatcgcctacaacaagctcaccgacaacggcgctgccacccctgccggcctcatctccgcctccatcgcccatgcattcgccctcttcgtcgccgtc

SEQ ID NO: 84353 - DNA, 217 bp, Glycine max
gtcttaaggttgtttccataattggaagggaagggttgggtaagaccactcttgcccgtaggactttacaccatcaatgcactgcggttcctgctgctggttttggtcatcatacaacaagaatttttacctttaatttatgatctattgattgagatatggaactgaaagtcaacgtgagaagttgggtgtcttgaaccatgaagtagcctcaacc

SEQ ID NO: 84354 - DNA, 129 bp, Glycine max
gaagctcaagtcaaaaaagaggggaaggataaaaggctggttgccaatcttcattggacaaaatttttcgcggaatatatcaagatgccgattaaggtaccagaagagccatggaaaaagtcatttggt

SEQ ID NO: 84355 - DNA, 241 bp, Glycine max
cggttgcaaaagaccaccaaagggggaatttgattaatttcttaagccttcttttggggaggaggagcccattgcttgccaggctggtccttagggttccggttaaggttattgggggtggttggttgaagtgggttgggttggcctcttaaggttgggggagttggttcccaagcttgtccttagggttcttgttaaggttaatgggggtggttgggttggctggttaaggttaatggat

SEQ ID NO: 84356 - DNA, 374 bp, Glycine max
ggacttaaaatttgcttctcttttccttccttcactgtttctttattctttttagagaaaatcaaaataacaatattatataaaatattgcacctttattttgaatgttcaatttctattgttttggtgcgaacttgaatgaattgaactcatagtttcatattcatttaccttctgatactttcgtttcattcttcaatgttgcatcggcgtggaaactagggcaaccatgtcgccggtgaggacaatgacggtggctgcggccgacgtcgcagtgtcatccgacggggaagccgagtactcgtttgccgtggcgtacaacggacctcccccggcctacgatcttccccgggcggtccctatcgccgccggaa

SEQ ID NO: 84357 - DNA, 70 bp, Glycine max
ggagtttgttctaaattacctaaatgccactgccattggagttctttctctaatccttctttggatgttc

SEQ ID NO: 84358 - DNA, 330 bp, Glycine max
acacaacactacagatttttgttgttaacctaactaaccaatcccccgctgcgctttaacttaaatctacatacccaacaccaaaataacaatattataccaaatatatcccctcaactcccaattatccaaccccattctcaaggtcctcacctcaaaaaacctaactaataatattatcataatataactctcatctattttttctcacttctaattcttatacctttcaactcatcaccaacatccatataaaattacatatcattttcttaaaccgaactctaaattctacaattaaaaattttacatatcaccaaaatccataac

SEQ ID NO: 84359 - DNA, 218 bp, Glycine max
gggaatggacgcggggacagtaaccgttgagtacattcccgacgggtgtttggcttgtattttcaagtttgttcccggcggttccttctaatgtaaccgttggctcaaggtttcaacctcaaaatgcctttcacttatgttttcataaaataactttcatcaattttttttcgcttcgattcctcgtcctttggagctcataaccatgatagtgtcaa

SEQ ID NO: 84360 - DNA, 370 bp, Glycine max
aggacattaaggggtgcattctgatctgtgcttacgcgtcacggtgggctagtgaaaattgataaacaaatctttatgtctttttgagttgtgcgttgtgatagtgtgtgagtacaatgcaagacattatagagggagtattcttcattgacatttctgtttcgtcataataaaaatcgtattcctgtctctaacccaggaagcccttattattatacgcaaatttggccaagagatatatactacaccctgttgtggtcacactctcacatctacgagtgcctattgactcagtacgtactgttgctggatttttgtaaaacaccagacttgctgttgaaaaaaaaatcaggacattaactgtttacat

SEQ ID NO: 84361 - DNA, 336 bp, Glycine max
ggagtgagcaagagtgaagagcgaagagaatggctcccaagggtttaatctttttggctgtgttatgcttctcagcactgtcactgagtcgttgtcttgcggaggataatggacttgttatgaacttctacaaggaatcatgccctcaggctgaagacatcatcaaagaacaagttaagcttctctacaagcgccacaagaacactgctttctcctggctcagaaacatcttccatgactgtgctgttcagagttgtgatgcttcactgttgctggactccacaagaaggagcttgtctgagaaggaaacagatagaagctttgggttgagaaatt

SEQ ID NO: 84362 - DNA, 88 bp, Glycine max
ggttcatcctttgattatatcacatactcaccatggaggcttaagttggccaccaccataatacttattttctccgtaatttggctta

SEQ ID NO: 84363 - DNA, 128 bp, Glycine max
accactcgtacgagccgatgggagaagacaatagacggggacacttatcgtgaactaatattgcaattcaattatgccctgaccctgtgttaagaacctgtgatgagaagcaaagcgaggcagagatg

SEQ ID NO: 84364 - DNA, 202 bp, Glycine max
  unsure (1)..(202): unsure at all n locations
aaccagaatgggtagtctccattgtgagaaacatncctggaagccgtgttggaaaggttttacttcagacacanaattagtacaacttgctgtacgaagataacattgtgtgatatgctgtgaggggtttcaaagggaggaacttanntttgcaagtaccttttagacaggnnncaggggttagttnntttgtacccgaact

SEQ ID NO: 84365 - DNA, 115 bp, Glycine max
gattgttcccttacttcatgttgggtgcttttggagctggtggggtactaccaactctcatcttgtttctttcataccccctggtgtggttggtgggtgaaaaccaactttgttt

SEQ ID NO: 84366 - DNA, 334 bp, Glycine max
  unsure (1)..(334): unsure at all n locations
ggacttgtgccttgaccgacacttccacatcctatgtgtgagagtgaagtgggaaaaaacatattagattcaccccacaatattattttatcttcctaggttcccagacaatattttgtggacattattctttggatctgggatggccccaacttctataaatggtactggttttcaacctggtctttattaacaatatattcacacttccaaaggggttaaagaattaaaccccttttggaaaccttggccgcacaaccaggaacaaaggacctttacaggggggggaaaaagctagncatattttaccgggattggtttttttttttttttt

SEQ ID NO: 84367 - DNA, 63 bp, Glycine max
ggcctccgtcacttttctcagctgctgttcctgcgcgtgaacaagcctcaagtaagccaaaac

SEQ ID NO: 84368 - DNA, 189 bp, Glycine max
cccacgcgtccgaggcttgcaaaaaaacaacagaaggggggttttttttttggtcttccggggcggggttaatttctttctttggccttttaattttcaacttccaatggcaagcttgtgggccccggaaaccggattaacgaacaacccccccatttacaacgggttcaatttttgttcaaaccccaa

SEQ ID NO: 84369 - DNA, 354 bp, Glycine max
  unsure (1)..(354): unsure at all n locations
gggcttcgttgatcggtttgtgactcctccttctcctcgtgtgcagtgaccaggagagggttaattatgaacgacttaatgatctcgctctggatttctatgcgaggacatccaggtaatgaatatccttgtcaaatgttttgctgagaatttgttgatgctgttggttgtttactgttcaaagtggaaattaaaatcttattgtatatgtggataacgtttccttctaatataatggtaatgatgtatgtcaaattaaggccttgtaacttgtttggttntatgtttagggtttagggttgaagccttctaacttttcatgttttctaaaaattctgtctcctgaacccacat

SEQ ID NO: 84370 - DNA, 96 bp, Glycine max
ggtacttggttatgaacatcaaatattggctggttatgaacgtttgtaaattttgtcatcatggcagggatcatgctggtgggaaatgaaaaaata

SEQ ID NO: 84371 - DNA, 267 bp, Glycine max
caattcaactcataacaattcataatcaaattccacattcaacattctatatcaatttttgattttcattcttctattgatctatcttttcgcataaaaccaataacccaaaatttaaccttttaatacaacaactctacctctctttctttacattaatatatttttctattatttatatataatttacattcaattttatttttcttaatacttttcaaccttacatatcctttatacactcaattaaaattcctttccacaaat

SEQ ID NO: 84372 - DNA, 282 bp, Glycine max
acttactgtgcaacccaaccacagacgatcacgcgcccattttcccatctatccttcttccaccaacataacataaccctacctacatggccacactccacatcaaccaaacaattcacagtctaacgccgccgtttacattcaatcctactaccgtgcccacactatctcaatctctatacctgaaaatcaccgccgactataccgaatcctattcaatatacatcctgatccacttgcataacactttgtaatatattcgctccaatcacctcgttaaac

SEQ ID NO: 84373 - DNA, 397 bp, Glycine max
ggctaaacgtggaaaattctataacaaaattatttgtctaatcatccataactttaacctaaaattcgaatgggtataattgacgtcactcgctaaattataactacatatacacggacaaaaatgtgcccatactacgacaataaaatcgacgacaaaatttcctaccaaagattaagaagtgatgagcatcatgtatgatgaaaaatagtttatgctaatctcttggaatgcttgatagaagcatcttcaatgtctcatatgtcataaagacaatgcccaggcttggaacaaccttgtagtactcaggcaaaatacctctatacaagcctcgtaccccttcattctgaattatgtgcttgaatgtcccaaacaaactggtattgtagacacgtgc

SEQ ID NO: 84374 - DNA, 160 bp, Glycine max
ctatattctctaacaccccaacaaaaacaccttattcggggtttttactaaaatatggggcgccccaccctcttaactcaactctttaattactatccatccactttatgctataccaacaccatattactttctagtatacaaaacccttccacctaca

SEQ ID NO: 84375 - DNA, 371 bp, Glycine max
ggagagaatttctccatgaatgaaaaataaatgttacagtgcattatttaaatgtgtatggtaacgattattgcattgatgaagtatttgaattggataagtgatgccttagccaagtgtagcacacattcaacaattcaacaaaacattagattttacttccccagaagcaccaaattgaagttctggtataaaaaaaaaaaaaaattgtaatggagtttcccaccgttgaggccgccggaaatgaaactgaatactagcattattgcggagatatcagttatataactgcctccatttgctgaatataaattcatgccttcaaaatttatattttgtgaaccttactgtgctgagagataatcttttca

SEQ ID NO: 84376 - DNA, 115 bp, Glycine max
caaaaaaccactacttattattacggtgaggttttataaatactagaagccaccaaatctaccttacttttccattcaatataataacaatcattaaaaacacaacaattaaaac

SEQ ID NO: 84377 - DNA, 261 bp, Glycine max
gcgaaagaaaccagcttagctatatcatctatggggggacatatgacctggggcgcttaccgaaaattgattccctgaccctaaaaaaagacatgtgtggtgtttttctttttaaaacaaagccttcattccccaaatgtcatggaaaatatctgtcccgatctctaacataatactgacatacttattgtgctggcacatgatttgtgcacaccacctccggcggaccttggaatgttacatactacctgtgggcgccca

SEQ ID NO: 84378 - DNA, 165 bp, Glycine max
gaaagcaccaaaacccttatttaatttttcccttggggttcgggttccatattggcaataatgcacccttcaaataacccttttacacaaatgacaagctcatgccccatacaaaataatccacatcccgatgtctcaattacaatagtcccgctcccatcactg

SEQ ID NO: 84379 - DNA, 195 bp, Glycine max
acaacaataaaaacaccccaaaaaataaaacccccaaaccaaaaaaaacaaaccaccaacccataaataccccccaaaccaaaccaaaatcccaaaaaaaatatacaacccaatccaccactaaaaaaacacacctttaaacaaataatctcatcacaacacacaaactaaacccccccccaaaacaccaacaca

SEQ ID NO: 84380 - DNA, 390 bp, Glycine max
acccaaaaaacggctcctacaaaatttaatggtacttatcaaacaaaggaaactagcttctacatgggttttccaccatataaaacatacgcaagtctataattcttataaaagattaccgaagaaatggaacaccctcttttcaactatatcctattttctgccgttgacgaggaccctgggaaccaggatttcccgcattactgccatacatgttgcgaccctgtccaaccagagcttatccatatttttcatatccttgggcagctttcccatcttatccaccaccagaaccagcgcctgcattaccattacactggtttggatctgccttagcctagccgttttaaggactgctaccccatgaaagacacacattttgttcaccca

SEQ ID NO: 84381 - DNA, 255 bp, Glycine max
ggaaggctgcccgccgcgtttcttaatatccggaacgtgctcggtgacaaatttgaaacgtaaacactacgggcacaaccttatatgttaccaatggcgaacaacgatggttcatagataacaaactgccctggagcttatcctattgatacatgcccccctttctttacaaatgctcgaaagcagattgcgccctgggccttaacagaacagtccctgcccttcacttgatccccacctttctgattgtagggg

SEQ ID NO: 84382 - DNA, 75 bp, Glycine max
  unsure (1)..(75): unsure at all n locations
ttatatcctctagagcggccgctatttttttcnatctattttttttttatttactctacaaaccatcaataaacc

SEQ ID NO: 84383 - DNA, 381 bp, Glycine max
ggctctactaaatgtcaataattccttttaagatgcactcatcacttaattactaagtgcaaaactttcaaagttaacgatggaagtgaaaaaaaaaaatcaaaatatctaaagaattgtcgctcctatattctgttttacatccaagtccttaggcttgctccaagatacatcacaaacatctacatcaaagggaaaggagtgataaggggaaaatcaaaactcatttgtccaagtcatcctttttcctccacaaaataggagagcaacctttgaaatttgaacttctatttgtttttgtgagaggatggtttattttcttcataaggatactcaggtggagcagaccacaaaccccagagaataattgtgtgaagacaa

SEQ ID NO: 84384 - DNA, 436 bp, Glycine max
gtaaagaaaattgtgaatttaaccttggatttggaaaatatatatagttttggaacagaaggaatagtaatctctcttctatccaacccatccacatcaaaatgagtgaacattacccattttcctataatttaaacgctccaatttgagaacggagtatgatgtacacaaggtagtttggggcgcataactcacttgtaaagtgtgtattccttaatcaagattttttttttaatcacatgtatcgcctcttgctgtcaccaagttttcctgataccattaccatgtacaagatccaaccatggtcttgtgcatgcaaaattcatccaattgtcatccacaactctgaacagccaagtgggatatgactagaatctaaaagccaatataactcatgaattaaagttttacattagtgtcaatgtaactttgaaaa

SEQ ID NO: 84385 - DNA, 402 bp, Glycine max
gtaccaacaaataggaccgtaacatttaatatgtctaatggaaacctaacagggcaatacttacttgttgaagagactaccttactcaatacgaacactttaccaatgctccatctgtattcaatgggccacagaaactatacgccacttgttccaagccaaatgtgattgcccaattcacctacacctgaccttcatacgaaaacctaactttaactttcacttttaaggaattgagggctaaataagcgagcagcttatacacatctcatcttgatcttttcctgcaaacaccttgttctgcttgtgataacaatttatagccctcttgtctgtgagcacctgaagattgttgtccttaatgttagcccaaatccaattgaggacttgagtcttagccat

SEQ ID NO: 84386 - DNA, 122 bp, Glycine max
  unsure (1)..(122): unsure at all n locations
aatttttttttataaataattttaaantttttttaaggggaaaaaaaaaaaaaanggaagaagatttgaaaaaaaaagggggcttaaaaaaaacaaaaacacaatgtgagntagattacaag

SEQ ID NO: 84387 - DNA, 400 bp, Glycine max
gccccatatgcaagcttgacctttataaagcggacgcacgacgctgcggcatagacctaaaactgggtgtgctcaacaaaaatgtaatcggggtactcacgatcccaacacattaaaacataccgatataaatgacacccgcccccttacatcatgaaccgaattctgggaacaaaacactcaagatgactgccaagactacaaactttgttccataaacacgcttcctataaaccaaaacacaaagtcaagaacccaacatttatcgtaaccataaaaaacgactttccacgaagaaccaaaccgcacgattaagttctcttactaggaatccttggtgaccgctgattctgctggagccttattctcacactctttgatgacttcgaccacaactttt

SEQ ID NO: 84388 - DNA, 416 bp, Glycine max
gggttcaactctaattacaatgtggctattcagtaaagtggttagatgttaacagaacaatatcatagaaaaagaagcccaaaatctccacattatacaagccaggcatattcgcatgctcatattgcctgtgttgggcaaacttacagccccaagtgggagcaaaaaaagataatactgacaaatgctgttattacatcctccagcatgattctaattttccatcttcaacttaattggcttcttcaaacttagaatgcaagacgtccacacggattttataagggagctgcatctgaatgttgattattcagcaattaagaatgcagatttgttgggtccaagcttatttctttgtcacagatgctgttgagtttgatccacctccacgctgaacagctcgagggacaaatgac

SEQ ID NO: 84389 - DNA, 263 bp, Glycine max
ggttaaccaaagcacacgtaattcaaagttaggggatattttacaggagtgtggcgctaaatttatgaaaaagtctatatgcaagtatctgaaaatgtcttcatcttattgaaaagtgataaccaattatttgcaatcaaaatgatgtttttgtgtcaaacaatttaaggtattaacttggccacataatttcataacaatattcattttttcttcatgattatctttgtctattttatcaaccattaacaattatcatactt

SEQ ID NO: 84390 - DNA, 255 bp, Glycine max
caaacaccaaccttcaaaaattacccgaaacttttctcaatttgagggaccccacaccacacctatcttaacctcataaccacttataatataacgcctaactattactattatacaccaacaaaacgctcatccaaacaaaaaattaagcaaactatcacttatataaaatcttataaacacataaaaatatcataaccaatcaaaaacaaaaccctaatttttcccaaccaacaaaattacatgtttacaaca

SEQ ID NO: 84391 - DNA, 61 bp, Glycine max
ggccctaaaacccacctttggatcctggttctaaagaatggttcccctttccgggcggggt

SEQ ID NO: 84392 - DNA, 57 bp, Glycine max
ccagtgtaacaggagctgctggtatgctgaaccaccattcctttaatctcctggtca

SEQ ID NO: 84393 - DNA, 260 bp, Glycine max
ccaaacaccaacagttaaaaatttcccgagacttttcttaactttatcgatcccacttaaatcctaccttaacttcttgaccactgataatataacgccttactataaccagttaacaccaacaaattgctcctcttttcaaaataccaaacaaactataaccccctttttcccttaccaacatgatatttatgctcataaacaaattaaaacaatcccctaatttccctaaactaatttaattacattttaacaacaaa

SEQ ID NO: 84394 - DNA, 273 bp, Glycine max
tggcccattcattcggtgtcggtccactccccttaatttacgttattctactcgtacgctgattaaaacaggacatgagaatggcatgagcataggggctaaacagataacagttcgtgtaccttgcgaagctgccagagcaggcagtgcggaacgaagagatggaggatttcatgcataatgatgcggtggagtggactccagcgactgatacttactgtggatgatcataacctcctatcggtggcctacaagaacgagaacggttctctg

SEQ ID NO: 84395 - DNA, 374 bp, Glycine max
gagagcggagcttgaactcgaatagagttcagagtacgcactttgcgaccagcgctctacgaaccctaaatccccgcacgctgtaaaatactcgccggatctagggttattcagccctcgcagcggtggaagtaaccttagctcgctgagatatggaatagcggatggaggcggatcacggtgagtacttcaacgtgctgggcactgcgcgtggcgacgaagaatacgccgcgtacggtctaccgattatcaaacatcgtgaagaagcttcatcgccgagaaattatgtacgaccgagaccgcgctttcttcatgactgacgcgcatgacaggttacgcaacattcgttcgcaggaagaatctgagccacatga

SEQ ID NO: 84396 - DNA, 248 bp, Glycine max
caggtccacaaagacgacagatgggggctgtcgagtattgtgaccaacaacctctgacacatgcggcatagggacaccatctcaaaccggcgaagcttcttcgagttctgaccgacgaccctgtctagtcccgtattgcgagtggcctccgaccggggaccttaagcgcaggtaactgctgactcctaatacaaggatctagatgctgaatatattgcgatggataatgtacccattggctactaaaa

SEQ ID NO: 84397 - DNA, 251 bp, Glycine max
cttcgaaaattccaacaaacgggggcaagaaaagggggggatctttatccgggccctgttataatggatgcatacaataaagatgatatatttgcttcgatagtgatgcacatgtccgtcaccaagatacacacctggctggacgaccactgtaacatgtctaacatgggtgttgcattatacaaaaaagaacctaatggtggctatgatggtgcctcctgatctggttgcaaacaaactttatgcaaggc

SEQ ID NO: 84398 - DNA, 199 bp, Glycine max
ccccattcattcacttaccaacaccaaacaaacaactccctgctccttgctaacactcctataacctctcccctctttctctccacaccataaaacccaaaactcacacaacccgacccatcacacaacacaaaatcaccctcttgtattcccattccacttgtttctatcttctttctctttcacatctccaaaaatg

SEQ ID NO: 84399 - DNA, 296 bp, Glycine max
ggggtgagttgctggatatctattgtgctctctgcggatagactggggacgtaaaataatgattatgttatttggtttggcactcttagaatcttctaatctttaatcttttttatgaggcttcccttcataacaaaaccatacttttatgatgaggtcttctgcttcttttggtttgagcatgatgcgtaccatttgtattacctgctgaaccctttcttattattcttagacagtcagtaacagttgtgggatgatgtaacaaaagaaagtctccaaatagatgaaaaacactc

SEQ ID NO: 84400 - DNA, 265 bp, Glycine max
ccttaattataactttcagaccatttataagcctggggagcaaacaccttcacaattaccactttaacataaacaccatactatcaaataaaaaaaacccaatgactatccatcttcgatatttaataacactgtctatctattaaaatccttttttatcatttacatgtctggcactccctactactataaacacgaatggttttacactcttatttttaacaattccaataccatcaacttcgatcaatttcacaattttttt

SEQ ID NO: 84401 - DNA, 463 bp, Glycine max
ccacgcgtccgaccactcgtgcgttctgttgccaaaagactacatacgggcgcgggtttcaattgtgatgggcaatttcaccccaataataataaacaaagaaaggtggtgcttagtattctatgtcgacacccaacaacatcaacattaacaaccctactgcgaaaccaggaaccctaggacgtggcgtatgtgcatctcctactccgcccaagtcccaactctgccacaacatgcccaagtgcaaacagtgtgacaatgtcccttcgttcaatgtgcccctatgaatgttgcaagagtcgctgttctagaaatcaaaacccctatcatatccaccgtttgcaccttatactttttttttctttctcacatcacataaaaacaatccttgttctttttcctttcccttataataatgatatttcttgcgttgcttctagcccgtttattaattgaattatca

SEQ ID NO: 84402 - DNA, 265 bp, Glycine max
ttttttttttttgggagaagaaaccgacacatcacagacaaacaatccattagagatgggaaaagcatatttgtttacaagctgatggcactctaggataaaaaaaagaaaaagaaaaaaaaagggtattcacaaatataagtacctaaaatccaactgcgctacctattgctttcatattatataattaggccactaatctgcagttgctttgaaagttccataaaattaagcaacctatgccatcagatatctttcacttccc

SEQ ID NO: 84403 - DNA, 400 bp, Glycine max
gtacaactcccacatttccactctttctttttggcaatttcagttctggaacacatttttgcaaagcaagggaatctgtaatcttgtgtgcttggaataagaggttttataatgattcattccaaaccaaaattaggataatattgcttcatgttctactttgatgctaagaaaatttcactttcacaagatgagacttaaacctaacaattatgtagctaaatttctctcctctctttccgtcttgtccttgtagtaaatttgaaacttgcatgttcgcttgctaaagagggaggcaagatcttttgagctttgcaccaaacgctggttcttaaaaggacatctacggaacataaaataggttttacagaagctcaacaacaagggcagatgcaccacc

SEQ ID NO: 84404 - DNA, 387 bp, Glycine max
aaagaatgtgtcgattaaacatcaagggaaaaaagggggaaaatctctgaggggttcctaatttttgtattttgtttcgagttttgcaaaaaataagttgccaatggcatacatgtaggagatatattcattttgaactaaaaccaagccacctttgtaagaaaaacttgtttttttcactagggacctctttttctgcattttgtggtcctgaaacttgtcaaggcaattgcattaatgacttaaccagctcgcctggatttggcgaaaccttgttagctttaaaactttttgttttttacgacattgacactgacttcaatttaatgggtttacacgcatatttatagcttagttttttttaacgaaccttattcctttgattta

SEQ ID NO: 84405 - DNA, 477 bp, Glycine max
ccctatagcaatgaccaccctaattggctaactcttcaaatgatcaagcttgcaataggacaaatgaatatgttcaacgcaataaatacaattaatatgctcaagcctcaagcagctaatacaaagggacagggactatacaatatcctgtcttgcaggcaggggatgctttccaaaatattaccacaaaggaccaaacaatgaaatacattatacatctgaaacgaagctttcttcctacttgcaggattaggaaaatgagaacacgtggcttccttgaacaaatcgaagttggtaaatgctggattacttgtattcttagatgttcagataaataactttaatgtataatacatcagggcttgactatccagtcttcttccttttgaaggccggatgtatcattgcatcattgtatgagtcaaacttctcaattcttgcaatgcagtctttcatccttttcaaaacaattggcat

SEQ ID NO: 84406 - DNA, 391 bp, Glycine max
ctaatgccatcaaaatcaacaaaatgcaaccctaattcatgatagggaatattatttgttatgatcacaacattgacaacaggaattaacctccagcccgaagtcaatagagtcggttcgccactgctcaacctcaaaataaatgtagtatcttttttccctttaaatctaactggaaatactattctcagtgtagcaactactcagttggacaaaccatccaagcacaacatcgacaatggaaattttaaattcaatggacctatcatgtgacctacaaatcttaacttcaaatcaaaacatgtcacaaccgagataaagtgattatatacagagggcacagcaaaatgaaattatgcatcaccagagccagtaatatatgaaactacta

SEQ ID NO: 84407 - DNA, 126 bp, Glycine max
cacaaataatagaagaccgtctattgaaaactccatatgttgggaagaaaatggttctcaaaagggtgcccaaatagtttaacaaacaaactatcagaaaaaataaaaacaaaactgaaaaacatg

SEQ ID NO: 84408 - DNA, 240 bp, Glycine max
agaaaaaaaacaccccttatttcccgccgccttttttaaaaaaaaagcggctctccaaatgatccccatattctttaaaaaacaaacctgctgttcaactttctcacaatgggactacaagaattaattatgcgatgaccaaaaaattaataatttacatctaatgaagaccccggtctgcactttcaaaatgatcgaaaaaaacgctttaccaaccttcaaaattctgacccccctcct

SEQ ID NO: 84409 - DNA, 374 bp, Glycine max
gggggcggggggggtggaaatcttccaattttgcagggttacaaccggggccccagttattaactttttacgatggatccaaaaggggctttggggcttacaaaaggggttccaattaacccctaatttttgccatccttttaaaatggcaaaaatcctgggccgggggaagaaaaactctttaattaaaagggcccttccacccaaaaaggttattatggttaatccaccttaacccaaaaatgcttattttaatttaaaaaaaaaccttttcctttttcccaatttttaattaatggtgggtggaaaataataaaaggctaacttttaggacccacctatttttaaccccaaaccataaggccttttttttt

SEQ ID NO: 84410 - DNA, 441 bp, Glycine max
cgccaaaactccaaattattacgtcaaaatttacacaaaatttcacagtttcacctacggtaaaacgagagcaagtaacttgcaaagtgctaggtgctgatgttacaaaggggctaggatcttgtcgtcagctctgatgagaaacacatcaatttgttacttatggaatagaacttattcttcctgaaagcatttcaaaccctgctgtttggaggcattgggagaaccccatcaaagaaatcaccaaaatagccacgaggctcgtgtactagccttgagatgatatctcttagtgtgattagtccttccagattcccgtcattgtcagcaacgtagaccctatgaatcttctcatggtcaagcagttgaatcaattctttgattgtgcaatccttattgcatgtaatcaggtcacctgacattggaaaggccccttcatgc

SEQ ID NO: 84411 - DNA, 159 bp, Glycine max
aaaaaacagctcctataaaatttaggcgtacttatcaaaaaaacgagcctactttcaaaatgtttttttcaccatataacacatacccacactctataatttcttataaaagattaccgacgaaaatgaacacccctcttttcaacaatatccaatttt

SEQ ID NO: 84412 - DNA, 187 bp, Glycine max
cgggttgaaataaaaaattgatattgataaacatgggagaaagtggatatgtacacattagcttaatgcttaaccaacaaccaaccccaattgtgctgtctttaccccaacacttttgcctctgtcaacacaaaaacccattcccactctatttaatctcacaaccttccaccgccgtgaacatttt

SEQ ID NO: 84413 - DNA, 440 bp, Glycine max
ggccaaatcagcctggagaaaaattgtggaatctcacacgtggcaaaccttaacaacctcattgtcgctagctacttcaaaaccccaaattttggtcactcgtattcattcctccgatagcacaaacttacccagtgggtgaggtgatccaaattggaactttccattcccattttgtatattttcttgttcccctcacaccacactcaatttttcggctctctctctctctctttttttttgtcggataaaataaacagaaagaagaagaaaagaaaaagaaataattaaaaatgagagagtatgagtaggagtagtagctagctggatatagctggaagacctactccctcaagaagcgtttcacaatcttcacgcttggttccaacacctgtctctcccatacatcggagcctgacgtcagcaccccccgaaacgcc

SEQ ID NO: 84414 - DNA, 313 bp, Glycine max
cgggagcgtttttgaaatatacgagtcatagaacgtatgtgttatacaaagagtgccccttgctccttaaaaactgtgatccgccgccgtaacatgtaaccacatctaggctacttgatgatcagcacggaaattatctcaccacctttgacttgctgtgacatataaaattgcgaagagactcacctactattatcacgaagagaaggaaaagtgaatcacctctgaacactatgtcttacacactaccgtgggacttaagtgattatatcactctttgccatagatcacatcaactttggccaatggacat

SEQ ID NO: 84415 - DNA, 484 bp, Glycine max
aaaagaatgtgtcgattaagcatcaagggaaaaaagggggaaaatctctgaggggttcctaatttttgtattttgtttcgagttttgcaaaaaataagttgccaatggcatacatggaggagatatattcattttgaaccaaaaccaagccaccttgtcaagaaaaacttgtttttcccacgagggacctccttttctgcatgttgtggtgctggtgctggagaaggagatagcaaaggtggcgtaacaagtttgactggatttggcgaaaccttgctagctttagaactttttgtgtcgaaggaatttgtctttgaatttgatatgatgggttcacggtcagatttagagcttgactttctctcacgaactttatgcttcgtatttccttcactgttttgttcactttcaaccggaggcctcccgtagttatggttcaaagcttcgaccaaagaagcggttttttggtcttgcatcaattgat

SEQ ID NO: 84416 - DNA, 210 bp, Glycine max
caacaaataaaaccataacatattagagcgctttttaaaacctaacagggcaatactaaattgttaaaaagtctacattactcacaacaaacactttaacaatgctccatctgtatttaatgtaccacataaactaataagccactatttcccaagccaaatgtaattgtccatttcacctaaccatgaccttaatacaaaaacctaact

SEQ ID NO: 84417 - DNA, 320 bp, Glycine max
atcaaacacaaacaaattcttttttccgcggactttttaaaaaaaaatctctaacactaaaatttaatcaaattccataatataccaattaaaataaaaattaataaacttcaaaacccatttttactataaccaccatcatttataaaaccttcttttctacctttaaaaccaaaccccataatttttttctttctttttaaaataacccacttttttttctcatcaatccccaccaaattattccataacattatcttttccttctctaccatcaacctccccccctcctttcaattctctccttcccattttttaca

SEQ ID NO: 84418 - DNA, 239 bp, Glycine max
  unsure (1)..(239): unsure at all n locations
ttncttctcaaacagcttcaaaatattaaaagcggcggcttttaaaaaacaattgctcccaacaaataacaaaataacttttcaataaaaccttactatttaaaattattacccaataccttctcaacaatatataatattatttattcttattttttttaacatccaccttaactttttaataaatattatatttacaaattttccctcttctttttacaaaaatttaacacccatta

SEQ ID NO: 84419 - DNA, 106 bp, Glycine max
ccgccaaagacattccaagaatccaacgtagacaaaggtcatgcataagaacaacaaatattacggaaacatgactcaatataacaacataaaagcaagccaatat

SEQ ID NO: 84420 - DNA, 286 bp, Glycine max
tttttggacaagcattgactcggttcctaatcagctagattgaacaatctatttacaacccaagtcaaaagggaaagaaaaggtataaaaactataactatgttccactcaagtcaccctgaaattttggacagaaaaagcatctaagttccacacagaagcaaggggttattttgatacagttgagctatcgagaatgaacctgctgctaatttctaaccattttaattgaagtgaggtgttgctgcaagggagtgcttaacagtttaactgaagtcatgttttg

SEQ ID NO: 84421 - DNA, 441 bp, Glycine max
gggaaagcccccaatgcgtattaataataaatcgggatatttcctcttgccagcaagaatgtcttacaacataagggatgcaacacccttgactcattggaacatcatcttagaacttttgataagtaataataaaacttaaactcttccatctccaagggttgctccataccttaagaaatgtttcaaataacgagggtcctttagttaataataatacatcacatgacacccaagtcaataatcctgacttcttccacaacatatgcctttgcttttcaaacattggacgataaagccatttgagggtaaccttatacaagaacatctcaaagcaaggcttagtgagacattgtatgcagccaccacctaatattcaaacattcatcccttgcaaagccccactgtttagaagcttcatcccctcttcactcatctgct

SEQ ID NO: 84422 - DNA, 394 bp, Glycine max
ggcacgaaaaatatgataacaatgaatattgttgtatgcgtaaaacttgttacatcacttcgcatatgtaatgttctttagaggtttttgagttggggcggtttgccccttcctttcaccaaaagaaaattgttacaccacttagtaacttacaaacacaattgacaattgacaatattaatcacaaaccttcacctatggaaaaaaaatctttatatatattttaggtgcaagctgaacaaatcaatcgcccaatatacctgtaaagaatgaaatcccgctgcaaatcccttcaagtgtaacaacaaaaacaacaacaaaaatatatataaccaggcttcctagcctgaaacctcaactagcacaaaactggtttgagaaaaaataatccaat

SEQ ID NO: 84423 - DNA, 447 bp, Glycine max
ccggctaaaatctatcaaactaaaatacactaacatttgtaactaaaatatatcaagatttataacaacatcaaaccttctaaattaaatatcgaagtcttcgcatgtcttatgcgggctagccacggatttagcctgcaaagtccacaggctttacggaccgggcccaaatttgcctataattatgcgggttctaaaaaaaagaggcccgttatttgcacggtccgcaaacttagggtccgtccatttgaagagaaagagggaggaaatgggaagaaataaacagtaaattgatgtgagacccacacttttacactctactttaattcaaaactttcatctcaattcactttctttccactctactgaacagacacttaatggaccggtccgcagaccttggtccaatggtccatatacccacccctaaatacagtacatggaaca

SEQ ID NO: 84424 - DNA, 430 bp, Glycine max
  unsure (1)..(430): unsure at all n locations
agctnggatcctctagagcggccgcttgnnnnnntnnnttttttttttttttgttcggctactgaagctcatcaagcatatgttctcagggaaagtaaagatggaagttctcatttaaagtgtttagactcaccaacaaaaattcatgtgttactagattttacaaagtaaaaaggcagcaacacatatgttctcatttaaagtaaagatggaagttcctctagctcaaagtttattttaggtctcacgcactgtagtggtcagattttaagagtctgtttggatctaagacgaaaagtacttttgagaagttttctgtaggaaaaaagctctatttttctcaaataagtagagaagctctcataaacacttatagtcttgtatccaaactaacaggcccttaagcagtgagctcctcctcccagtgagt

SEQ ID NO: 84425 - DNA, 277 bp, Glycine max
  unsure (1)..(277): unsure at all n locations
tgggaactgaatctccatattgttcaagttacttttgactatgagactatnataataacaacaacaactatggtcactacaaaatatgcaacaaccaaaaaaaaaaaaacttaaaataaaaaagaaaattttaaatctaggttgagtttggaattttggtgcttataatttataataaaaaagaaaaattgtcaaaaatgaagagggaatgctttacccatggagttgagattaacacacaaaccaaccaaatcctgtcgatacggcaaatacgacc

SEQ ID NO: 84426 - DNA, 479 bp, Glycine max
accaaatgaaacaaaaggacccatttatgagttattctcatacatatttactgttgtttcccgggaaatggacaatttcaaaatgccaatgtaaagtaaacactttttgttgctaaaacagatacacttctattcaaatattaaatacatattagccaccattttgtcatttgataatggattgcagattcagaagtctagagcaaaatggagaaaactagggagaagaatatgttgtcatcagaaaaaaaaaccataagcaccaacatggtttgtggtccccaaattgcccaaggcttcttgtaaagaatattcagaaacagactttgaagatctatgcttccagataatgacccttgtatgctactaataattcctctgcattttctctgaaatgtggtatatacttgtccaagaacaccttctcagacaagcataacaaatgaatgtaactcgggaccttcttgcaaagttttttt

SEQ ID NO: 84427 - DNA, 465 bp, Glycine max
  unsure (1)..(465): unsure at all n locations
gcgtacgtctggcatcctctagagcgggccgctgnttttttttttttttttaatttttnngggcggaaaaatcttcattgatcactaaaaattggggattatcatgaaactgggcatgcgttgtaacaaatagtgaaagataacccaaaaagcctaatgactatgttaaagacattttacttgaacccacccacttaaatttttgggggaatggattcaagattgagttaaaccaaaaaaccccattcctttacaggggggcaaaaaagagattttacaaattcctgagttcatttacaaaattcagagaggctaagaaacgaaaacaggggaaatctgaatcggaatggcaatcgagaatgtcaaacctctgctttctggagcaaaggagcaaaaacggcgacgttttccttacaggaatcggaggaggaggcggaaagcatgttaacgaattcttgaagagag

SEQ ID NO: 84428 - DNA, 280 bp, Glycine max
  unsure (1)..(280): unsure at all n locations
acnaaacacagccaaaaacctcaaggcgcccaatttaaaatctgacgtgtaaattaaccaaaattccaaaatgccacaattctttctatcatggaaattaaaatatatcaactccatacatataccacaataattttaaagccttttaccccttctaccactctttctacaaattctatccaaaagaatgaaattcacatcctttatacaaccaattttcattccttaactaacaatttcacaaataacttattcaccaccatctccatttgtttttctc

SEQ ID NO: 84429 - DNA, 170 bp, Glycine max
ggagcaagagtgaagagcgaagagaatggctcccaagggtttaatctttttggctgtgttatgcttctcagcactgtcactgagtcgttgtcttgcggaggataatggacttgttatgaacttctacaaggaatcatgccctcaggctgaagacatcatcaaagaacaag

SEQ ID NO: 84430 - DNA, 197 bp, Glycine max
  unsure (1)..(197): unsure at all n locations
caaaggggttttgaagaatctgacatttcaaaacaacagggggttggtacctaccccaattcattcactcaccaacaccatagatacaagtccttgttagacgcacacactgcgaagcactatcccatcttgctctccacagtatcaaacccacaactttcacaacaccgcccaacacgcangacaaaagcgcgctc

SEQ ID NO: 84431 - DNA, 114 bp, Glycine max
ggacatcactgtcactgtatttgcgcgtccttaccttacttacctctttgtctgtctttccttctctttttcattttgaaggcaaattcgcggcctcgagtcttttctttttct

SEQ ID NO: 84432 - DNA, 255 bp, Glycine max
caggtggaaacttacaacgccatgggataaccggtggagattgtacatttgactgacttggcaaattaattgaatgatcggatccccacatacacaacaaggcgtgactgatagaaaaaggggcttaacgctacgatgtgctaaacctgagaaggatccaagtgacaagggttgaccacaggacatgggctggctcacagaactgcctagactacggttggttgctataacgcaagctatgatcacgaaccatgc

SEQ ID NO: 84433 - DNA, 389 bp, Glycine max
ggaaattgggtgtggagaagaagagcacgtccaacgccaacggaaattcccgctctctgattcgtaaacaaagacagacgtggtggtatttccaacgattgatagatggatcaagggaggcaggtattcacagtggaccttcttgaacgatctgctgcataagggcgtggagttatcacttgcatggctgatggaaatgatgcttttgagattcgaacgagcactggatgcgtggtatggcatgaatgagaacctgcgaattcaaatgagattgatctctctgtgggtcgtcccggagaccagtcaatccatagggtttttgttgatcctggagggagtcactgtattgccactgtagtgggacctggaggagctgaaactttttatac

SEQ ID NO: 84434 - DNA, 201 bp, Glycine max
tgttttattctataataatcattataattcgcgcgatttttattcagagcattggacattcccactcctaatatactttcttatacaacttcttatactcattaaaactgagactctgtcacttacctttaatcaaaaggctatatatcctcttcaacacctcttctcaactttttctacaacattctcaaacccacctat

SEQ ID NO: 84435 - DNA, 282 bp, Glycine max
tttttcaatcacgtgttcaaatttactgctgggtcccctgttgcctcatttgccctattcaaattcagttccccttcatgtatctcttaaaacaaaacagaactgaactcgctgactgaaactcgcaaaaattagcggtttgcacagattgcactgtccaaccacgttcgatcgcgaatctctctcttcacacaaatccactttccttacttacgagcgaaccactctccaacgatatatagttgccccttccatttccttcgccttcagacaataccccaa

SEQ ID NO: 84436 - DNA, 181 bp, Glycine max
  unsure (1)..(181): unsure at all n locations
gattcnnttggaatggggtctttggncngaacaataaannnaaaaaaataagannaaaaagataaaaagagccggcccgcttctttagaggagtccaaacgctttacgtnnacgcgtgcattttgcgacgtacatagctttcttctataanngtgtcacctannaattcaattcaactcgc

SEQ ID NO: 84437 - DNA, 177 bp, Glycine max
  unsure (1)..(177): unsure at all n locations
gcnaaaaaataggtgggtatattacttaaaaacaaaaaaaaacaaaattattattcaacactctttattcctgaaaaaaaaaactattaataaattttttccaaaaaaaaaaatctttcacaacttcttactactttaaaatttttcatattcccccattttataaaaaattttttt

SEQ ID NO: 84438 - DNA, 298 bp, Glycine max
cggaaacgggacaacatactgtccacagggaaataggagggcctttattgcttaatgaaggaaatatattcgtttacaaaaaaagtaacccctctcactgtatgtcatcggcataactcatgcaatattttgagatgctctatcacaggcgacaaagtgtttcaaacatttgattttgccaattagaacactctcaagcatatgaggtcattagacaggatgattatccatagctcttggcatgaggattgactggacacattccacccaacatcaggcttctttctcttacaaacac

SEQ ID NO: 84439 - DNA, 376 bp, Glycine max
gggaggaacaatcatttgaaaagatgaacggtcgaacaaatttttcacttaaaagactgttcacatgcaatagtcaatttcagtgtgggagtgatggacaattttgaagccatgcatgtagcttaaactcttagttttgaaatggttacttagtcaactacaatgccaaaatctccatcatgttaaaaagcaacactcttcaattagcaatggtggacgtaacaggagccagtaaccgtgaaaatttattcatccatcagaaaataacccatccacggcatgctaatactaagccaaaagacacatagttggcataaaattaatcctcatggtgacgggaacattgttaccctatcacccaactcttcaatttaca

SEQ ID NO: 84440 - DNA, 372 bp, Glycine max
ggcagccaacatacgatattcaaattagttcagtggcgtgtatttacaacacatcattgcaataaaattgaagcagagcaactaaataaagaacattatctatttgagttaaaactggtgaaaagtcattgtaaaataaactaacatcaacaatttactatacaatgtagctgctagatgtaccagcttggtcagatgcaactgtgccctgcaaaaaatacataatccctgaacaagctaatgtacaaattagagatacaacatcaaattagcagcacacaatgcagttgtgaatgaatgtgatgtgtaatctaggtataaagcaggggggggggttggtttgggtggatttgggtcaaaaattaaactttt

SEQ ID NO: 84441 - DNA, 223 bp, Glycine max
tatttttttttttaaccctttttaactacatatttctttcataattttgggttattaataaaaaacttgttatcataaacaaaacctacattccattcttcactttctcaaaacaaatatacttctcacctcatcacaaaaattaaatttttattattaacaatctaaatctataacatctcattccactttactgtttacatcctcttcattcaacataaaa

SEQ ID NO: 84442 - DNA, 188 bp, Glycine max
agccgcaaatacacttaattaactactaacacaaggggggacctcttacattctttcttagtcttttacaaattctacaaactgttcaacgtattacaaccccttaacttaccaataaaccccaaaaagtaaaaccaccccattctaattattaaaaggtcttctaaacccctcttctggtgaactta

SEQ ID NO: 84443 - DNA, 263 bp, Glycine max
gggaaattaataaaacattatgtttatactaaacatgggaacaattaaatttccatgtgatacaaccatagaagttcaactccaattatttaaattaccccccaccataaatatcttaaatttatcaaaaggcactacttaattaatgcatatcacaacaccctttcatagcttatgtacaacacatccctctacctctaacaaataagttcttcactgcgttttttttccaccccggacataccttgttatatcattgtata

SEQ ID NO: 84444 - DNA, 266 bp, Glycine max
atgacaatcatggccgtgcttacccttgcgaaggaaatgaacatgagaaaatcttaatcttatagatccctagaaaaccttaataaactcatctacaatatcatagaaatggactcataacttcgtaatttttcagcagatgcattattctttttgccccgaacgaacaagagcagctcccttcaaccacttatgcatccaaagcctgtgctgctgatagttggtgtagactttcttttgttctgttttttcctgcttattagctc

SEQ ID NO: 84445 - DNA, 386 bp, Glycine max
gggcaaaccccagggggttggattataatttgggcccaaaaaccaaaatctttattttaaaatatttccccaacctaaaaattaactaattaaatcgttcttttaaaacccttccccaacctaaattaactaaataaaccgttactttaaaatcctcccccaacctaatttaactaaataaatcctccatttaaaatccttccccgacctaaaaattacctaatttcataaaaggtattccccatttttcaaaatttaattaaatgaattccaagggtctaaatttttttgcccccaatcctgtttgttgggttggcttaacatttacccttgcaacctctttaaattaaatcctttttctggatagcttaacttttggatgaacc

SEQ ID NO: 84446 - DNA, 300 bp, Glycine max
aaaccccccgggggaagttagccaaggggggattttttcacccctttttttaggtggacctttaatttgaatctgccttgcccccaaaaaattttgccccgcctggaagttctgggccaggaattttaaatattccccagccggcccaaattttttaagctccagttccttaaaactttgaatttaaggaaaggatttttttccttttggtccaaagaaaaccaccaaccccccccaaaaggctgcacctgcaaaaggggaattcagcgtttcccaaatccacctgattcggttttgaaa

SEQ ID NO: 84447 - DNA, 160 bp, Glycine max
  unsure (1)..(160): unsure at all n locations
anaaacacgcgcagatgtttttaaaaaagaggcaacaaacccctcatcaaaaattaaacttaaatagcatttgcccatgccacaaaaaataaattcccccccatcaaaaatacataaagaagattctccccttttcctaacacacaccaaataattcccc

SEQ ID NO: 84448 - DNA, 349 bp, Glycine max
gggcacatacaaaaagagactattttattcaactaacaaatacattttgagaagcgaaacattgttaaaccataatgattaaatgatcaggattaacatgtcaagcaaaatcaacatgtatttgcacgcatgaaaataaaatgtgaagactagacagtataatgatttactgttgtgtcttcacattgacacaaaagccaggacagtaaaattaaaaaacaaatcataggacaattgaactgaaacatgattccaaaaggagactaacaagcacatgcttaattttttcaaggtaaagattaaacaaaaggccatttgggggtgggaaataacaatttgtcccaaaggg

SEQ ID NO: 84449 - DNA, 157 bp, Glycine max
acagatgaaaaataaaatttcataattacagcgggcgtgattacaaaccattcagcagacatagaatcacttaaggtagggcagcgtactttctcaattattttattataacaacccccaattttattttttttggttgggcaaatacattattttt

SEQ ID NO: 84450 - DNA, 239 bp, Glycine max
  unsure (1)..(239): unsure at all n locations
gnaccaaccagagagggttttttaaatgaaggacaaaaaaaaaaaaccagaaacccaaaattcaaaatacccgaacttaaaacacaatcccccaaattccaaacacaaaaaaaaaaacaaaagacccacccaatatcttaacacccccaacaaaaaaccaaaacactttaccttaacaaaacgctatacctaaacccctaattcaaaaaatctcaaaaccacccaactctccaaaattc

SEQ ID NO: 84451 - DNA, 68 bp, Glycine max
  unsure (1)..(68): unsure at all n locations
gcacgcgtacgtnaagcttggattcctctangagccggccgctnnnnntttttttttttttttttttt

SEQ ID NO: 84452 - DNA, 165 bp, Glycine max
gggaaaaaaaaagtgggttttttaaaaagagaccacaccaaaagaaatatttaaggaaattaaaaaacacctttgacccaaaataaaaaacaaatctcaagaaaaaaaaataggctaataagtatattccctggtgctaaaatagattaaagaaacaattcacaa

SEQ ID NO: 84453 - DNA, 196 bp, Glycine max
aaggaaagcctcgaaaagggaaaacaacattgttcagggcccttccttgattaagtattattcctcaggactttttttattaaaaattaagggccacctaaaaggttggtttgggagctttatcattattccagggattaggcagcttaaaagtcctagtccctttgttgctttccaggaggtcacttcattggtc

SEQ ID NO: 84454 - DNA, 220 bp, Glycine max
gaaaacaaaacaagtactctcaaaactaaattttgcagggcccctacctaactatgtgataatactactgatcttctttcataaaaattcaccttcaacatacattcttgattacccttcttaccaatacctcaaaattttggtaaattttaatgacatgagccctcaaaccaataacacaaagtttcttcatctgttttctacattagaaatgaacata

SEQ ID NO: 84455 - DNA, 340 bp, Glycine max
gcgcagaatgatattaatatccttactaagtggggaaaataaaataatacattttgaaacatatatttgattctacataggatgaattaataatgtatggggatattatggaagatatcatatacatggttagaccagagaacttttatcaattccatcttaagtagcaaatactaatacacatccccacaattacctccgcacaaaaatgatagtcctctaaacactttggggggaggggaggggtggggttacaaatttgatcttaaaatttaaaatctgctttagccacgatgaaggtagccttactccgatgactaaatcttaatgtattatcacc

SEQ ID NO: 84456 - DNA, 395 bp, Glycine max
gccaaaattaaagagggcttcattttcaattgcgagacattttacaaagtcatctgcattcttacattcaacaacaatttccaaccctttattaatacatcgcttagttctgtcatagatcccaaactgcttaatgagacataagttttaaaatgtctgtaataaatacattaaggttaccatataaggaaccccctgcatcaatcgctctgagacacataaccttaatttgtgttgccctgactctgacctcctacccctattggctcaaaagatacatcaacctctaaactcgctattctaacttttctttggccacaataactacactgtacatctctgatgagattacccaacaccgatcctatcactcatacacaataaaactactcttt

SEQ ID NO: 84457 - DNA, 216 bp, Glycine max
cctccagagcaaagggaagggaagaggttaaatggggtttcatttcaaacatcagttacaacagtatctgttaaaaacaccagacaatgagaacaagtatgttactaaaaaaaaagggtataaccgtataagtccacctcttcaccccatatacaaattccttatctataggccattcctaaaccctacctctcaaaacatcatcaaattggtcgc

SEQ ID NO: 84458 - DNA, 307 bp, Glycine max
gcatgcacgcgtacgtaagctggtccttaggcggccgtttttttttttttttttttttttttggcaaagagacggggtttattctactctcatgtatcatgcatatccgaccaactaaagtgccaaatttttctctttatgtatacacaaacacaacaataaggtagtaacataatcagctgcagggccatggggaatatcttaagggagatatacatgccggagtgactgaatcaaagctgagtgagtgggtgggaaaaaaaaatatcaggcattgcctgccctggagtctcatgtttgtacaggc

SEQ ID NO: 84459 - DNA, 261 bp, Glycine max
acatcgataaaaagctcgatttctactcgagtgggataattcatacataaaccatatattagtgtacaaagcaccatacagattgaagtagtgtactagtttgctatttcattcttcacacaaaataaaacaaaaccacttatgttatctacacagccaattagccctctatcctaacttgcacatctgccactgttacagaaactcatcctaatttgtcaaggtcttgactacggacaccaagctgttgaactcattgaa

SEQ ID NO: 84460 - DNA, 235 bp, Glycine max
gctggatcctctagagcggccgcttttttttttccatcccctttttttttttgcaacaatgatgatatccatcaaaacaaaaacagaggggggcgaaaaaaacggaaggttataattttatatactcaaataaaaactaatggactatagaaaacatataaactcaaaactcttcaaaactactttaaaacagtaactcataatgccagccccaaaaattctttcaaccaatatc

SEQ ID NO: 84461 - DNA, 317 bp, Glycine max
aatgcttgaacaaccaaacaaaacattattaaattacattaaaaacaaaacttttacaacactccttattactaacaacttttacacaattattttatttacaaaagcatcctccctaatttcagtttttctacccaaataccttgttacttaaactaaaaacattaaacactctttattaacacagtacaaaggtcaaaatgcttttttcccttcaactataaagaatttctcctaccaagcattatcaaaagtggaatcttaaccaatatccacatcaataaccactttcttatcctatgaaacaaacgaaattt

SEQ ID NO: 84462 - DNA, 296 bp, Glycine max
  unsure (1)..(296): unsure at all n locations
gcaaccaaacttttgggtagtaataaaaatgatggcctaaanaaaagttcattcccactatactaaatatgtttatatacaatacttaatcggcctcctaccaagacaacattcctgaaaaagctgatcacattttcaccaccaaaagtgttttccgggatgaaacatcatacaccaattatgtgaattacaacaatttcgagacattgtcctctttctaattagctaaacctcttgtaccccaccagcgccaccaccaccgcacaagatgtttttttctgttccttcttccattg

SEQ ID NO: 84463 - DNA, 180 bp, Glycine max
ggcccaagcatccatatttcatctcacctatccgtgggggaattcataaaaggtacacctctcataaaaatatacacaccaccctaacctttttgaaggttctattacccacttctataaattcattcctagcataaaagttctttcataaacgtttactaaattttacccattgacaca

SEQ ID NO: 84464 - DNA, 198 bp, Glycine max
gttataaaggggccaccatttcattggggttataagcttccgagctaccttttcatttccacgtaaaaagtgccatcagctttccctaattgccaaatcaactactcatgtatctccaacacaagggcaatcgggtgtgcttctctgagataaacacacagataatggggcctgatggcgcgtgctgatatcataacc

SEQ ID NO: 84465 - DNA, 246 bp, Glycine max
aatctaaaacatcggctgctgtaaacggacctaactacactgactggagtggtgaatctgctgtgtgactctggccggaccatcgtcgctacagttgactgtgatggtcattacttcctggcgcctcttctgttttgcctttgtcacgctgccacatttataaaactccttaatgaacatctggtacacccacattcatatgcattaaatactaaggctcctagacttgacaaagactatgaccta

SEQ ID NO: 84466 - DNA, 318 bp, Glycine max
  unsure (1)..(318): unsure at all n locations
attccnggcggggccacgcgcgcgaccacgcgcgcacaggtgctagaagactacacaaaggggccctcacaaaccgggcaaatgctggctttgctgagcatgcccaaatctaaccgctctgatactaaaggactacaacatggcgaacagaaacggactgcttattgcctcctaccaactatacggtctagctagttcctgctaagcacagcagctgcaatggtggcatctttgagataatgaccccaaaagctcgtgcagacatccatatgaatcttcccgcacttcaaaagttggactctatacttatccaaacac

SEQ ID NO: 84467 - DNA, 274 bp, Glycine max
  unsure (1)..(274): unsure at all n locations
aggcgtcggccggtggcggangtggtagggtcgcctttcacgacgggagcatcgaccgactattcttctggtcgaccgtgccgtctgatattctgcacccgccttgctcctagcactatttggcacttgtgttagtgccggggttgcatcagaagctttggcccctccactacgaacacttggcaagggcacctttcgcggtagtttgtcaccgccgatttggcttgcctccgaatgggcactttgagcttaccatcttatcgaggatgggggc

SEQ ID NO: 84468 - DNA, 185 bp, Glycine max
cgctatgaaacgttccgagggctctaccgattccggtcacaagcgggggaccgggcttaccaggtggcaccacaaccggagccgcctattatcaggcggagacttgttggatttactgcctatttgcagactctagggagctgactcgtgcctgtcgggggcaatgagctcctacgtttgaattc

SEQ ID NO: 84469 - DNA, 141 bp, Glycine max
tgctctctctctcccgattacagtggactcttttctctgcatcgggtcacgttcacctgaaaagataaaacgcttgtattttggccaccttgattcaccattcagctagacagaacaccatacacagttgaaactcctcca

SEQ ID NO: 84470 - DNA, 309 bp, Glycine max
ccacgcgtccgaacacttcgaaaaggccaacaaaagcgggcgagaagaagggtggatcttaattcggcgccgggtggtattggtgcataacgcgaagatgatataaagtctacaagattagagagcgaatagtctgtctctaatgcacaagcctggaggagtgaccacttaaatatgcttaaaatgggtggtgcattgaacacaccagatcctgatcgtggcaagaagggaagccaggaattctgttgcagacagactctatggcattagggccatccttgttcagcgcaaatatgagagagatatttt

SEQ ID NO: 84471 - DNA, 325 bp, Glycine max
agggggagcctttaaaaagtctacatttatctatgttgcatctctctctcaatctaacgatttcgccattcaacagcgaactttccggctccataatcgccatcaacgctcccatttcctaaacctgccaaggatccagctaacagttgttccccgctgacaagttgctgccccacagagctgtaaagcaaactgttagatgcaccaacacaggcaccactaacgaaccattgtttcagctcaatatataacgaatccgatactctgttcatctcacacctactgacaccactttctgcttaccgcgaaagccatttcagcacat

SEQ ID NO: 84472 - DNA, 152 bp, Glycine max
gccagtggtccggctcaagagtttgggtctctctcacttgagtgcttataagctttatttccctctccagtctgtctaagtgacccttctattccttatttataactggtgaccagcactatacacaatgatcatagttcggactatataat

SEQ ID NO: 84473 - DNA, 56 bp, Glycine max
ttccccttgcttccaacgtattacttttttggtggggccacctaaattcaattaat

SEQ ID NO: 84474 - DNA, 177 bp, Glycine max
gcccacgcgtccgtccggttgcaaaaaaccaccaaagggtgccaaaccaactcccccttagcgaggtttgacaccagtctgcatgcttctatctttaacactctctctctctatttctacggcttttgttgtcaaatagaatgagttatttcttttagatgtgtcactagctttctc

SEQ ID NO: 84475 - DNA, 131 bp, Glycine max
taagataataaggtctggtacaaaagagaagaggatggatctctttatttcctttccttaacctattacctctctacctctcattttaaaacctcaatcaccaaacacattatcatctgacattcattcct

SEQ ID NO: 84476 - DNA, 306 bp, Glycine max
catgttgagttgggttttgataacctctcttttttttttttttctcaattggttagagcattgaaagaaaagaagcccaaaagagaagggccattagaaattgaaatcccattgaatacctgaaatgccagagacaaccctcatagctttttgcttgattttgggtttatgtacttccaccttcaacacaactttttgttacaggaaaaacaaatacttgttacaactttacaacacttttgaacctcatttcgtaccaaaactatctaaaacgagagcccatggtaaaactccaactcttggtta

SEQ ID NO: 84477 - DNA, 322 bp, Glycine max
ccggaaagaaggctaaactcaagcttgaatttagtattgaaataaaaaaaagttggaacttagaaccatatccataaaaacattcaaagactacaatacatttgaaggattgatcacacctctgtaaacatctggtaagaaaggcaaaacattctgaaaattgacgacaaatttctccaaaaacttttccttgggtatgcaaataatggaactaatgtacatgttagcacaccttttgatttcaagattttgattactgagaatctagggataattctcttttccaagctgtgcgctacaacttgaggatattcagcaatag

SEQ ID NO: 84478 - DNA, 324 bp, Glycine max
gggagcctccgaggggccggcgcttttttttttttttttttttttttttttttgagggggaaaaaaaatggttgtcttgggcgccagtgtgctttgaaaacaaaccttgctaaattgcgtaaaaaatgcacacttttattccaagcgattgacttttgactaaaattaaatgactgtccaattaaagtctgatacctgtaacatgatacatgggcttccaaagacgcaaacattgctggggaccaacttggcgctgcccgtaacattacaaattgcttgagctagatttttgcctgggctctacaatgataaatttatgtctta

SEQ ID NO: 84479 - DNA, 318 bp, Glycine max
atggcagtgcgctacagctatgaagtcttttgaccataacttgaacagaattattacactcctaaataaacttactggtgccatagtcaacaaatatacataaccttagcaagcaagcttgtttgtacacaaattttcactaaagaaaaagtaaaaaggtcaaggctcaaagaattcacgacggctgggaagatatgatgcaggttctgtacagatattaggatctattgtgattttggcttggcaatcttattccgcgtagaaaatatgaaccccagcacggagtaaaaaatagcctgaatgcaagaaaccacgaag

SEQ ID NO: 84480 - DNA, 109 bp, Glycine max
gaacagggcctaaagacatcttgtattgggaaggacccgtgcagaccataccagggcattccacgttgatggactgcccatgttttttatgccaaatcccaacacaaaa

SEQ ID NO: 84481 - DNA, 313 bp, Glycine max
aaaaagaaaaaagaataaattattgtgcctttttgttgttacaataatgttacgaacgtaatgaggtttaaatgaggtttacctcttgtacactatccctcccttgccactagtagtggcatagaaaattactaatacagaagatacatatttgttggggtatcaaataagacaaaaataattgctgatgtagaagcacatttacagttcaagctatgctaagatgctgcacagctgtccaagtttgttctggctctagctggacacttccaatcttagcattttcaacgcaaacaaaatctttgtagcatgc

SEQ ID NO: 84482 - DNA, 225 bp, Glycine max
ggtaaaaatactatttactattcacggggctgttattattttataacacgtcttacaataccatattaagctacccacatctttcccattgtcacccggaaaaggaaaaaaaataaaaattaattccttatttccagataagggacacagttttagcattcttacaaaaaaaccagctccactacagcatttttattctggcatacaaccacagaacaaaacaaa

SEQ ID NO: 84483 - DNA, 317 bp, Glycine max
caggaataatacttcttatggtagactgtgtttattatagacaaacataaactggctgccctagagggttaatagaagctattattctacgtctctaaatgcccactactttacttttagattctctatggtataacaaaatttctgaagaagaaatagatatttggctcttctatatgtatcatgcttaagggctgtgttaattgcaatactccatatcataatgtctttatggtgctggattctttggaaaacaacgcaatcaacttatcctttgtcagctgatcaggtccttgggatttaactacaaatgtatg

SEQ ID NO: 84484 - DNA, 192 bp, Glycine max
gggcttaaaaactggttcataacggggttgaagtgttccaacaattactgtcacataatagttaatgaaacaagtgcttgttttgaggaacacaatagtaaatccacgcatttaaatttgaagtgcttgggagatacacattttatttgcagcacacgacattgcattgtgaaaaacagacccttgggggaa

SEQ ID NO: 84485 - DNA, 126 bp, Glycine max
ggcaaaaagattagaagttatgcgggggaattcacagaaaaatttaagtttaaataaataaataaaaagttaaattggagatctaggagtaaaaatcccaaaaatttgttgaggccatacgatctt

SEQ ID NO: 84486 - DNA, 325 bp, Glycine max
gggcctaagactcaatctccattggtgagagatggaacaaagcactgaagtcttgaaaagtcctcgacagctcatttagtaaatataccccagtcaggtcaagttctgcttgaaataaatttctcatttacattaatggcacagacaatcacaaaaaatcaagagtcacacttcacaacaatggtgagtaaatcaagatatgaccatgtaatggctcgttctttagctaataaggaaaatgctgattgatatttcgcaacgttcaaaaacagtatgccaaagctaaaactcaatccattataatttggccaacagatgaacgaaa

SEQ ID NO: 84487 - DNA, 93 bp, Glycine max
ggggattaagctagctttttaaattgatgatgtcacaaaaatgtattaagaaataaattctatttccagatctctaacgccacctcgtgttta

SEQ ID NO: 84488 - DNA, 309 bp, Glycine max
acccccgactaaggataaaatttgaagatgcataaatcaagcaaaataagaacaagttccaagcgttagttccgaaacacatacaacaaattaatttatcaaaatttggaacaagttacgaaccagtgtcataaaattttgcttaacaaatgggagagtagcttttgaatttttggtgtagttacagcttaaaacttaccaacatggctattcctcccacacttggaccttcaattgccttaaagcaactaactgcttccccattggctgagctttcactaaacagatgtgaagaaaatattccatttt

SEQ ID NO: 84489 - DNA, 315 bp, Glycine max
cacatcccaaccatttttttgtataagatcatctaaattccttcaactgtgttacaatagacaatattattacgttggtggtaataaacaaaatacatacccttgtcatgtcaccaattcagtttctagataatacacttactgaaactaatatcagtaatgtgaaaactacaacacaggtaaaattgcaagagtaaaaaacctatgccaaaggattctggtgccagatccatgaaaattaatgacacactatttacccccatcagtcttttgggcgggcaagccaaagagagctaagggcacgcaacctagaaa

SEQ ID NO: 84490 - DNA, 95 bp, Glycine max
ggccaagtggattttaatctttaaaaatgttccgttttggccccctccaaatgggaaaaaccggtggcggggatatatttattttttttaccaaa

SEQ ID NO: 84491 - DNA, 169 bp, Glycine max
gtagtaaagatagcaaagttttgacagggacctgaaaaatcagatgccaaaacgattaaacaagagtttccctgaaaactaagattacatttgtagaatttgttgctttataacactagagcctatgtccaccttcctcactgtgtagactactttttttcatttctgt

SEQ ID NO: 84492 - DNA, 160 bp, Glycine max
tttttttttttttggcatactgctcaatgaatagatcgggattaacaactagtataaggcaatagcagataggtaattcatgttacatcagtttcagaaggaagatggttgtacactaaagcatgataaagctcttgcacagaaaatatgcacggaatat

SEQ ID NO: 84493 - DNA, 322 bp, Glycine max
gccagggcaataaaatccacaagcggtttcattgaatcattcgtttctttcaaaaaggacccaagtcccataatctcatgacaaactgcgagatttacaatgtcaccgacgaccgggacaaacagaaacatcctgctaagaaactccaaactattgaatgcttctcttttagagaatgcaaaggaaaaaaaagtgcaattttacacataaaaagcacgcaaactgctatgttgattgtcactcttagaatagttttaatttctccgggatcaagtccttcaagaccattcacatcttagtaacaattttcttcaataaccat

SEQ ID NO: 84494 - DNA, 361 bp, Glycine max
  unsure (1)..(361): unsure at all n locations
aacccttccacgcgtatgtaaattggatcctctagacggccgcttttttttttttttttttttttnnttttttttgaaanccattcaataaccaagtaccttctgaatatccaaacacaggtttaataaaacagtaaaataaaagattaatcttccaaatgaaatatcagtacaacagtgtcaaaacaactatttaaattgtagccaaaattaggaacaaaactaaaagctcagcgttttccgccttcaacaacaaatttgggacctttgggcatagcacccttagaaacattgcctttccctcctgctataagcgaattggaagcaacttctgctttcttaaccttcttctaatcctttg

SEQ ID NO: 84495 - DNA, 199 bp, Glycine max
ctcttcgctatgggcacgccgggaaagtcaattgatgaaatatacttttaatatatatatagaggatgttagttgagaagaatacagggatgtgccgagaaagtgaaaggaaaaagatgaggacaaaccggtctggcaaactcaatcttcaaagaactgccgcggagagaggttccttggagagcgttcttggcggctt

SEQ ID NO: 84496 - DNA, 174 bp, Glycine max
aataagtggaggaaaaggaagcagcaccagttcttttaatatgcttaacaaaattagttcttaaaagacaagcagcaaaacaggctgtgtcatgatgaccattcaaatgtaacatacctaaaaagccgaagctgctggaccatctgcaagctcttgctcaaactacaaaaactc

SEQ ID NO: 84497 - DNA, 82 bp, Glycine max
ggggggggttttttatttaagttgggccgccctttttccggaggcgaccaattcccaaactttaaaaaaaaaaaaaggaggc

SEQ ID NO: 84498 - DNA, 89 bp, Glycine max
gtgggagaaaaatctcaactcttaagggtaaaaaacaaattttaactttgtttttgaaaaataaaaatcccattttccggaaggggggc

SEQ ID NO: 84499 - DNA, 131 bp, Glycine max
ggggaaagaaactgctttactacaaaatggggattcaatcttttgtgatgagagatgttatggaagggaaactttttcatttttcacgagcaatttctgagggatgtatgccgaaactttcctttttttta

SEQ ID NO: 84500 - DNA, 236 bp, Glycine max
gggggaaatgcagcaagctgggcatatacctttaatggtgatgaaaaaggtgtgcgaataaaggggtattccgggcaacacaaattttaaggaaacctgcgctcttttgtgttccttagaggcgctctcttcctttccacttttccaaacacccagggggtttagcaggttcattggttgcaccgggtggaaccattccgtaacctggggacctggccaggaaacttttccttttc

SEQ ID NO: 84501 - DNA, 315 bp, Glycine max
ggcaaccacctaaggtcattaatagggggtttaaggccaaacgaaaggcctttaaaatttttaaaaataaaaatccccccgtaccctttgaattaatcctaatcccccttagatttaaaaaactgaaggactgaaaaaaaaaaaggttttaattagacccgtccgacctttccttattaaattttccacctaaaccggttattccaaccatttggactcaaaccaccttcaagggcctttaagcttccaggtagagcaattttttccttggggggcaaaaaagccaaccgaagccttccgggtccttaaccttcc

SEQ ID NO: 84502 - DNA, 236 bp, Glycine max
gggcccagaaaaacattcattattatttgcagcatgcaacgctcgtcccatatattgaacaagccattctctttcttattattcaagaagaaagaaaaacatgcaaacatgcatcgcttacttattgaactaaactatcccttgcgttgagctcacaggaacattgacacaattggagttcgcgctcatgataaaaccctactcaacctcacacgatattgaatgtgtaccgggcc

SEQ ID NO: 84503 - DNA, 200 bp, Glycine max
ttttaaaccggccgcttttttttttttttttttttttttttttttaggggttcaaccggcacatttgattgcattttttttttaaatcattcccacttcgtctgtaaacttaatgtttcctgttctgacttccaatttcattttatttaaaaacaagttagttttttgcacatggcaagcctccactctcacattttatt

SEQ ID NO: 84504 - DNA, 259 bp, Glycine max
  unsure (1)..(259): unsure at all n locations
gcggngacgctcattcattttccggggtggattgaaatcagaaaccgtctatgtttctgagaagagcaattttgaatcttctccctaaccttcaacgaaaacgccgtaatcattcttgtttgacaatccaatttaatgcatattttactaaagctatgattcaccacgaatgtgattgaaacatccagttcttaagaatggaagattcatcaagttcacttcatagaaaattactcagagtttgactctagaacctgac

SEQ ID NO: 84505 - DNA, 295 bp, Glycine max
gttcaaataatgaaagaagttcctagtgagagaacgggagcggcgttgttccttctttgctcattgctcattcacatacactattctctctttctcgcaaactctcaaaccctgaaacctttttctatgatgttgtttcgttctaacaccttcactatggtgggacgaagaacctggaaaacaacaccttttttatttatttggtgaaactgagacataaacgtgtttttcctcggagacacacgcatccttccgattacttgaacatatggtttgctcggaatgttccttgttc

SEQ ID NO: 84506 - DNA, 136 bp, Glycine max
cacaacatgatcttggacgccagcttgtcacttgtgaagcgctccacctacgtataccgtattaacctggtctctctaggcacttgcattgagaaatacatccacagttgcagctttcacctgaccatacatgccc

SEQ ID NO: 84507 - DNA, 374 bp, Glycine max
ggcacaagtttgttgagatagctagaagcaataagatgaaaatgaaagtgcttgttttgtttgttgctacagttttggtagcatatgaatgccatggctcagactaccagaagttccctctccaaatgaaaactgggtttggtgggcaatacagcaatgaggtggcatgtgccagttggaggcttggcgtggaagcaaacaacgtagtcaagtggcaaactgttcctgcagcttgcggagagtacatagctgactacgttctaggagaccaatatagatcagattccaaaacagttaaccaacaagcttatttctatgctaaatccctcaaactcaccaacaaagatgtctttgtcttggacgttgacgacact

SEQ ID NO: 84508 - DNA, 341 bp, Glycine max
  unsure (1)..(341): unsure at all n locations
ggttctagtgtgtgattgtttgttgttgtaactcgggcttcttctttggttgttctgggtttgggtttgttttttctctcacctgaaaatgtcttgctgcggtggtaactgtggttgcggaagctcctgcaagtgcggcaacggctgcggaggctgcaagatgtacccagacttgagctacactgagtcaaccaccaccgagaccttggtcatgggagtggcacctgttaaggctcaatttgagggtgctgaaatgggtgtgcccgctgagaacgatggctgcaaatgtggaccaaactgctccttgcacccctgcacttgcaagtgangtgttgggagag

SEQ ID NO: 84509 - DNA, 193 bp, Glycine max
tatgtttgtttcttctctcacctgaaaatgtcttgctgcggtggtaactgttgatgcggaagctcctgcaagtgctgcaactgctgctgaggctgcaagatgtacccatacttgagctacactgattcaaccaccaccgataccttggtcatgggagtggcaccttgttaagctcaattttagggtgctgaaa

SEQ ID NO: 84510 - DNA, 126 bp, Glycine max
cccacccttccgtccggttgcaaaaagacaccagagggggccccccaccaaagttttaatttttgttaattcctttccgaccatggcttaaccggcttccaaccccaaaagggccagaactaaaaa

SEQ ID NO: 84511 - DNA, 83 bp, Glycine max
acaccatgcaggcggggctgcttttccagccgtgggtctcaaaactgaactacgccgattcactttttccaatacctacccaa

SEQ ID NO: 84512 - DNA, 145 bp, Glycine max
aaaaagccaccgaaagggaagagcaagagcaagagcgaaagcggcagaaaaaatggaaggagaaaagggttctcaacagccacagttggtgctcgcggacaagctatttcttcttcggcaacccgatgtgcaagacattgacaag

SEQ ID NO: 84513 - DNA, 239 bp, Glycine max
gtccttatagatagtacaccctaccgttggtggggccggttctttacttggaaaggcgggttactgcctctatactcgagttcccatatctttagacacccatgtaaaatttatttctcactctcaacactgacgcactttccttcttgatattggtgtgattacaacaacgatgcatgatataacctttattttgcattcgaacacaccatatgaattgccctgaaagctcattcaaa

SEQ ID NO: 84514 - DNA, 259 bp, Glycine max
gatcccataagagacacaatcaagtcctatatggttcactgacatgtgtagaactatctgcaattacacacaatgaagaaagtgctgacagcattggcgctgatgctaagttgttctgcccttacagcgaccgcttcagatgctatgccaccagtgacaacaaatgcagcagccgacgactacaattgttcacaagcgatgacatacacttgtttgtgtcgagcggagattacctcattggcggcgatgctgtaacttc

SEQ ID NO: 84515 - DNA, 261 bp, Glycine max
gacaagggagtgtttaccattaaacaaaccctatcttatgtttctgaccgagcataggcactggcaccctaaaagccgtgctccactataaggtacctgtttatgattactgcgattgcaacgtattcgaagtctcagctgtaccacatgaggtgcatatcggccatcaaagtctaaaacggtggcattcttgccttgcactattccaaaaccaaggcccaagccccggcccagaagccgcccaagttctaccccgcggac

SEQ ID NO: 84516 - DNA, 265 bp, Glycine max
tggaagttcgggccggacgcacgcacccgtacgaacagacgacagccagagacttgtttttttttattcaactcatataattgggagcagaggtcaatgccaaattgaatttccattaacggtggcgttgtggttagaaaacaacagaactccaaaagataacattctagcgttttgctattttgagaattctaagctttcgatttgaatatcataacacattgagggatatttgtactaacttccacctaggcagctgtcaata

SEQ ID NO: 84517 - DNA, 76 bp, Glycine max
cctcgtcaacaagcacaagcccaaacccgcgaaactcagggctagcattactccagggactgtgttgatcctgctt

SEQ ID NO: 84518 - DNA, 269 bp, Glycine max
gacgtgcaagacacgaggggagactaattttacatgaatttcttaagtatgttgtgactgtctaactgattacacattcttgcaacattttagaccaaatccacgttgtttgcaaaaaggatgcttcgtatacattcattatctagaccactcacagccctctttctgacccttgtccttcacaatccgaacagggtcagggaagcacgcggcgcgcaaaagaacatacaaggcttcaccgcgcttgagcgacgactgcctgaccaagc

SEQ ID NO: 84519 - DNA, 462 bp, Glycine max
  unsure (1)..(462): unsure at all n locations
gattctgtntgaaacttatatacgcattaacggggggggtttaaaaataaggggggcccctagtacaatcgcaatcactctaacgtttgtatttgttacaaagaaacctttttttatttcacttacagataaattacgcctgtgagaaagctatcactgtggtaaaatatcccttatttttccataaagagatcccaattcttttttttgatatagaagcgcgcttttttggaactgtcatataattaatatagctctcaattggtatagaattcgacgcgaaccacatgtttatgaaaatatatttatgtttaattagccatatatcatatctatcttaattcccattttttactatttcaagtgaaacattgaatattataatactttttctaaaatttttcaaacatagatattgtttattgtaataaaaaatactaaattagtttacaaaaccaacta

SEQ ID NO: 84520 - DNA, 346 bp, Glycine max
  unsure (1)..(346): unsure at all n locations
aggcgtncgaacacctccgagagggaccctacgggggcttcagatccaaccaattgcatagttaccaggaacaccccgcttgcctattcagatctatgtaactattgaactgtgattgtggtcacggtcagcacctccttcgatatctataggatgaacgaccgaggggcaagagcaagggcagcggaaagccttgaagaatgatgtcacgacatatgaccgcgtattaatattatctgatgctggctccagacgaagatggatgggaacgcatacatcgcacaaggaggcgctcctacagacctgaaacgatgttaccgctcacaacatgtcgacactggtactc

SEQ ID NO: 84521 - DNA, 130 bp, Glycine max
gattgttggcttgtgctctgctcgtgcctctagggttatcatatctccatttccatttcctctctctcagtttccaagaatcttaagctatgggaaagtcttacccaaccgtgagcgctgattaccagaa

SEQ ID NO: 84522 - DNA, 77 bp, Glycine max
cacatttgtacacacacacgaaaacgcggttgatgactcccgaccctagacaccttataggggacaactagctggct

SEQ ID NO: 84523 - DNA, 363 bp, Glycine max
gacgtgagagacgacgagggatcggggctgagaaaaagtcgtgagaaagaaagcatgttcaacactaagtgccttaaagttgacccaactggacaagacttaagagctaggcagcagaattttatatcaaactagtgatcaagccatcatgagtggaatggggcttggctttgtgtaattcaggggtggagagcaatcacaaataatgactaacaggtaatttatgcaggatcaacttccatgatatcgaggttatgccatatatagatattagctgagcatgcactagctgatgcttcattgtgctggatgggagacacacgagaggtttctatgtggggtttggcattgactctaagctct

SEQ ID NO: 84524 - DNA, 267 bp, Glycine max
cagggggtctattgtttgactggttgttgttgaaactcgagcgggttctttagatgatctgaggttctgtaaaactattacctcacctacaaatgtcttgttttggaggtaactttagcttcaaaaagattatgaaggagcggccacattttccgccgctgaaatatctatccctaaatgacctacactgagtcgaccaccagcgaaaccctttttatcggagagggtcctgcaaaagctcaaaatgaggatgcttaaaatggcatg

SEQ ID NO: 84525 - DNA, 332 bp, Glycine max
gaggccgatgaaatggcactcacatgattgtacatagtatatatgcatcctttttcaccgtggtatatattgcatccagagttttttcggaagctaatagaagagttcagaacgtgagaagacttacaatataaagatggccttcacatgattcctacaagagacaaactgttagctctgctaaatactccacaggatagccgagagaacttttagctatgactgtatatagaacattattgtggcgttctagtatgatccaaaggttgcttgtgttcaacatcatagcgaatattgaaaggttcatctctatcttactgaggcgagaccta

SEQ ID NO: 84526 - DNA, 337 bp, Glycine max
catgctcccggccgccatggccgtagctggaatttgatgagggcaagcttggtcgacagcctaggctggtaaaaaaccggcgggttgacgggtgtgggtactatatgaacaaactcgtggcaatgaacccggagggtgtagatttatgcccattaacaaacccatggatatgaaaatggatgcaaacccgtgccctaatagggttaaaacccatcgggtttcgggttgcgagtacccattgtcatctttaacaggaagtgagtgatgggcctattgtgcgtatgcgcttctcggttatggttcgcgactttagacgggtgcacatatgggccctacc

SEQ ID NO: 84527 - DNA, 204 bp, Glycine max
gccacccctggaagattcatttatcacttacaacaatgcaacacttccctctctagaaattcttttgatgatctcaacgacgcatattaaatgctttatatgacttttgaaccacacataagggatgtaatgaaaaatctttcaaagaagcatcaaacactgacttttactgcgactatgccatggtcgattgaatgaattatc

SEQ ID NO: 84528 - DNA, 233 bp, Glycine max
gcgatgattgttccccagcacgctgtttcggcggggttgttactgagcggagacgctagtacaactatattcagggctctaagtattcataaatcgatgccgatactgcttcttatactcctgatgatggagactggcgcctcgttagttattggattacaacattggtgacagatacaagatctattgtagcggcaaatacaccttctcatttgctccaaaggcatattgga

SEQ ID NO: 84529 - DNA, 318 bp, Glycine max
gggaaacaaaaacattgtttggtccttgaaaattggcaaacctccaaaacaaaccaattccattggtctgacgcagagccactaaatcctgaaccttaactctaaacaacatgctcttgaaaacagactttccaatagtgaaaggagcgaaagtaatttactctgtcgaagtcacatttatcggcttcaaaggatgtatttttacaactgaacatacacaaataggggtgacattctgaaccaccattttgaaatacatgtccccatcctgcggacaaagagggaacttttttgaagctgactagtagctagaggtaa

SEQ ID NO: 84530 - DNA, 238 bp, Glycine max
ggcaaaaagcaacagggtgtgtattaacatgagacaatatactatgatgtaaaacgttaacattaacaaccggttgaacttcacaaaatataaaccaatcgaacgagtaacaaaacaccaagaggttttgtttgtacaaaactccataatctggtcacctaaaaccattcttacattacatttttaggggaactgtctaaaaattcaaaaacttttcaaaatgaaaaattgacaaaag

SEQ ID NO: 84531 - DNA, 222 bp, Glycine max
ggggggggtttttctgtcgcggggacccaccgccgaattcctggcccgtccctggaatcctcccacctttccctatagcggtccaattttacctataggaaatcaatttcaatcctgttttcataatgaaaattgttttcccctacaataaaacataacatcctaaccgttaccataaaattcaagcctggggttaaaatgaaaacctaactcacataaatt

SEQ ID NO: 84532 - DNA, 199 bp, Glycine max
attgggggaaagggtttgtttaaatatttttaaaaaaggttttattgggaaaaaaattttttttttaaatgaaaataaaaaaaaaaggtgaaaaaaaaaaaaaaaatttttttttttaaaaaatttaaattatgttaaatttttgaaaaaaattaaagtttgaataaaaaaaattaaaaatgggggggttatttggggg

SEQ ID NO: 84533 - DNA, 347 bp, Glycine max
gggcccaaaatgaaatgccgtatttttaaaggtcctaaattttaaaaccaaattcatccaacttgtttggtcattgatttaaaaccagactaaattcctccttaaaacaaaactttgacaaactcaatgctttagtgttaattgaaaatatgttctggactaaaaaaagctgattggactccaccaattaatcgaagagcctgaaacccatttcataatcagattcttttttctcctccactttttcctttttttttacctaagcagccggagcagtaccaccgccacctctaccaggagcagtggttacggtaacggcaccaccgcccccagaaggcaccgaggcc

SEQ ID NO: 84534 - DNA, 215 bp, Glycine max
aaaaaataaaaaaattttctaaaaattaaaaaaaaaaaaaaaattgaaaaaaaaaaaaaaatgatttctttataataaaaaccccacaaccccaataaatggatttttaaaccaaaaaaaaaaataaattaaacggacattttaaaaaaattggatcaaaatataaatcaatgaatggaaacttccctaaaccaaattttaaacttaaaaatttt

SEQ ID NO: 84535 - DNA, 357 bp, Glycine max
gaaggcggcatacatattaaaaaaaaaaaaacaagcggggataaaatacaccttccacaaagaattcatttttttgaatccacccccaaggaaaagcaaaaaacatacgattactccaaccaaataaaaataaaccacctaccgaacgacgacttatgattcttccagctcaccaaaaaaatgcacgaagcccaaagtaaaaaaaaaataatgcgcgggaaaacaccattaacaaacatttttttttttacaccatacattactcgacaaccacccacgaggaaccagcaaccttccttgcttttattactgaaaaaataatgctcaaaacaacccaccattcaaagatgttttttc

SEQ ID NO: 84536 - DNA, 398 bp, Glycine max
gctagataatttttgggggactaaaaagaaaacatttattgacagaaaaaataaacatgtgtataaacaatgaaatacaaattgcccaaaggaataatcctggttactttacataggtaaaggggatggcccctctaaaaaaaaactgttgggaaggggtacaaaaccaactttattgtctttagacatactaaacctaagataaacccatatttgcacaaaaaataccttgaaaaaaatgtggctccaaattgtgtgagaatatatgtacacatgtgcacctacatcaatgaaaggcatctagcaaaacaaagtttgaagaatttttaataaaaaaaaaatttgatcatacgttaccagtaggtcagatggttaaacagaaccctactttaaaatta

SEQ ID NO: 84537 - DNA, 255 bp, Glycine max
ggggaaaaaaaaataccccttcctaaaatttaaacctttacaaaatttttgccaataaaagggaaaactccttgtttttccataaaatttattgaaaaaacttttgcgggcgggataaaatgggttcaatttaattttataaaaaccagtctttaattttttttttaaggggttgaacaaggggaacaaaaaccccttttagggtcaaccaaagtcggcccaactcatttttttggatatttgggggggaaaaac

SEQ ID NO: 84538 - DNA, 375 bp, Glycine max
acccacaggaattcggagtatttatttaaacgaaaacttccattttcttcttacaaacatattacattttctaattaacctataataaaaaacattcctacataccctagatgttgaaaataaacgtctaacatatcttaattaaacagctggtaaacttgtttacctacttttacaattgataaacctcttgttaccacaatttactacataacactaaatgcacgaaattatcgatcttcctccaggagatggtggaattcttgctctaataagccaaactccaccatcaattgctaccttgtataaaaaccagggattaatcttttcataatacccatgatcttgctggaaataccaaagtcttggttaacc

SEQ ID NO: 84539 - DNA, 199 bp, Glycine max
ccaacaacacacacgtttttttttttaatcgtaacttattaatatcaaaacttcaattcatctctttttccaaatcaaattcatttaaacaaacacacatcaaaacctctattttaaaaaataccatctaacaaaactttattcaaaatctcaaaaacacacttacatgatccttctctaaaaaaaccgcatccttacc

SEQ ID NO: 84540 - DNA, 244 bp, Glycine max
gggatatatccctcaagcactttttaattacaactggctcttcttaaaaaattttcaccttttataaatttataaactaatttatatatatctaactaacaatttaatctttttattttatacatcacccaatacaaacactataataaaccccctccccattctaaaattgattgtcattccattaatcacaaaacacaattttttttacataaaaatactaaatcccaacaatatttaattc

SEQ ID NO: 84541 - DNA, 258 bp, Glycine max
ggaaattataacaattgggtttttacttaccctcgcaaaagtaatgaacattataaaagcacaaccttatagaaaccgacaaaacacaaataaaattatgtacaatatcatataaaaggacccataactccgttatttttcacaagatacattattgtttttgaacggaacgaacaaaatacagctgcaaataaccatttatgcatacaaagcctttacttttgatcggcaaaaaaaatttgtaaagatctgtttttt

SEQ ID NO: 84542 - DNA, 392 bp, Glycine max
tttttttttttttttttttttttttttgggttttttttttttaatttttttttattttttttttttttttttttttataatcttatatttaaataaaaaatttattattttttattatatataatacaaccaatcaaactaacacataaaaaaatacccaagacccataaaaaaaaaaaaattttaaaaaaaaaaatttaaaaaaacctatgctaaaaaaaagaaaaaatttttttctttaaaaaaaatatttcctgaaaaaaaacaaaaaaaaaaactaaccctaataaaaataataaaaacccgcgtttccaaaaaagaaaaccacacaacataaatatgttttgtaaacccccccccctataaaaaaaaaaaaaactccttcccccctt

SEQ ID NO: 84543 - DNA, 382 bp, Glycine max
gatggaaacataaagaagcggaattttatttttcaactttgtgacaggattttaaaacattggattaatttctgaatcctaaatgacaagaagaagaatgataatcaatcaaccagtccactaaaatcttggaccatcaagttaaaccagaagattttcaagtgatcaactttgtggccagtattagatgaacaaatattatatcttcccatcccctattaaatgttattaatcaagaaaaaaacaaaaagaattacggtcaactaagaaaaagataagaagacaaaagagagataattttttatttaattaattgacagttttaaaattgagacaagagatataattttatttaattaattgacaattttatagttgagac

SEQ ID NO: 84544 - DNA, 329 bp, Glycine max
  unsure (1)..(329): unsure at all n locations
gangcaaacataacgggcgttaattttttttatcaacttcttaacacgacattaaaacattaaattaacttctcattcctaaatgacaaaacaaaaacttataatcaatcaaccattacactaaaatcttctaccatacatttacactagaacattttcaaccaatcacctttctacccaatattacataaacaaatattatatcatcccatcccctatcaaattttattcaatcataaaaaaacaaaacgaattcctctcaccttacaaaacgatatgcagacacctgagccataattccttatttaacccattaacatttttaaatt

SEQ ID NO: 84545 - DNA, 263 bp, Glycine max
ccctatagaaaccccataaaaacccggaaaaataatccccatacctaaaaccttcactaaattccttaacaataaaattataaaaaacatactaaaccaaagcataaactgttaaccctgggaaacctaattagtttcccaactcacaaaaaaatccatgccaataaataaaaaattaaaaacctggaaaccctaaaaaccaacaaaattaaaaaaaattccaaaacacctacttcaccctttaaaaaaataaaaccccaaac

SEQ ID NO: 84546 - DNA, 196 bp, Glycine max
  unsure (1)..(196): unsure at all n locations
atggnaacttaatggggtggttttttttttttttaccctccaaccattcttttattcattcttctaacctatgcattttttttctcatcccaaacttttttaatcttttatccaacatacccaaaacttcaaaaataatttttttttaactcatcttcaaaattttttttttttccccaacaataaattaacattt

SEQ ID NO: 84547 - DNA, 219 bp, Glycine max
  unsure (1)..(219): unsure at all n locations
ctnggaaccaccaaacaagggggttttttacaacgaaaccacatataacactagaaacccgataaacatttggttccaacatacaaaccattctaaacacaaccagaaactgcaaacaaaaagcttatcacacaaacaaaaaattacattgccgagatcaaactattaaaagccaagtcaaaaacaactccctttgctttacaaattacctaagtccac

SEQ ID NO: 84548 - DNA, 376 bp, Glycine max
agatatagataaactgggtggcccccacaatcatacacccttgcttgtccatcatccaaaattgccactaaaaactgcttaatctctattaccgtcaacgtaatgattaaaactaacctcctttaaaagttgcacgatccatatttctcacggtaaatttactggattccccctagcaccacctatttttccctatgtgacttagcttcatatcttaagcacgcatcccatgatttccgctttgcatgcgctttaacacgagtacaccctaccataaacaaactcatctacacacctgtgcattaaattcttagatttttcctgaaggtctatgcttatttcactataatatttttctacctgtttttgcaccaca

SEQ ID NO: 84549 - DNA, 211 bp, Glycine max
  unsure (1)..(211): unsure at all n locations
cgtaagcaagcatccattctatcgaccgccctctttttttttttttttttttttttttttnnggggacaaaaaggcggccttttttttatcaggcattaaacaataccaccatcaaaggccctataattctctacactaaaactcacatgttttcacaactacaataacctctaaagaatatacatcatatcctaaatctatatccattct

SEQ ID NO: 84550 - DNA, 389 bp, Glycine max
tttgatagaaatcattttgaactgggtgggtaaacattcactaatttatcgtaaatataatgaagttcatcaagatttcatcagagagaaaaagatctgtgagaaagaaaacatgttaggagaagtgttggaatttttctaggactgctaggtaggtcactgccgtgttagcaaagatcctaaaactaaaactactattaatgggaagtacaactaaaagtgtaaaagatacagtttctgattttgtttccatttatggagtcaaagaaattaaaaaggaaaattaatctgattgggaggaagaagtccaaagcgaggcagatagcaagcgcctagatttccaatccattaccaacttattactccctaactactctaccctatacccg

SEQ ID NO: 84551 - DNA, 354 bp, Glycine max
aatatattcaattttctaaaatactttatattttaacataaaagtcacacaaaccctaaatatttaacatatatataatttatcccaaaccaaactttttaaaactcaacaacaattttctccctacaccaacctccccttataattaacttgactaacaaacacataattattaccaactctaacatattcctttttcacatgcccccctaaacacataaattgatgattctttttctaagccttttcttctacttcaaaatcaaaaccctaaccaacctaaaccctctctcctttaatccttaaaccaaccttaatattcctactcataatggtcaccctcttttcattaat

SEQ ID NO: 84552 - DNA, 284 bp, Glycine max
  unsure (1)..(284): unsure at all n locations
nnnnnnnnnncacaattttaatngcaatgaatatattgggtgcaaaactaaagtagggggatcaaaaaaaatattcaaattggcataaatgaacttgaacttaacagaccgaaaccttcaaaaaataaaaattttcaagaacattaccattccatgctcctgctataaggcttacaatgagtatgagccacacactcaggttaccatctctattttatgaacaggttagtaaattaagaaagggtggacaccccaattaacaacaacggcttcatcaaaacaaa

SEQ ID NO: 84553 - DNA, 264 bp, Glycine max
aattaaaaaaaaaaaataaaaaaaaaaaaaaaaaaataaaaataaaaaaaaaatcaattaaaacaactctttcaacacataacaaaaaaaaaatcatttgaaaaaaaaaaaaaatttaattctccacacatccaagtaaaaaaaataaaatttcaacaaaaaatttaacttaaaaaaaaaatcacttcttaaaaaaaaaaaagaactccaacaaaaaaaattatgcctaaaaattcaaatacatggcaaaaaattacatcaaaa

SEQ ID NO: 84554 - DNA, 238 bp, Glycine max
ggcaaaaaaaaaagctgttaattttttcaactaaataaaacttacactcaccaaactatatcactcattacattctaactatctattaataaacccaattaatcattactcctctgctgtataacacttttctaaacacaattaattcaaacatattacaacttattcagatacaagttacaacatactctttttctacctaccacctctttgctttatatcccatgatcataacaca

SEQ ID NO: 84555 - DNA, 314 bp, Glycine max
aaaaaacaaaattttataaataaaattaaaaattcaaaaataaaaacaaatacaaattattttcattaaaaaatttaatcttaaaaaaattcactctaaccaaaattaatttgtgcaccataattcaagacactttaataattaagaaatatataaaaacattacaaacagaattcctaagtcccaatagctcatacaattgggttttacttctaaaaaaaataattgccaaacttaccttaaaaaaaaaaaaatttttttcttaaagcaaagaaaaaagaacatccatttccatagggacaaaacttgggttt

SEQ ID NO: 84556 - DNA, 397 bp, Glycine max
gccgaaacaaaataaagggggatactttaaagtatatcatcacccacttcatccatgcatgacaaatatcatttaaaacaaacatatacccacagattctgcaacacactttcaaaatttaaatatataacttggaaacaagataacaagatcaaattgaactccaatttaatatatatagtaaaaactcaactcactcttgacaattctcataaataaatgcctacatattctatgagccaaaagaacttaatcatttcaataacacttctattacacttcaaagatagcttaaaacatgcttatacacaaaaatctaacacctgcacctatgaaaaaataactctctattaatcaaagcagcctactttgatgggataaatatcatgaccaacat

SEQ ID NO: 84557 - DNA, 306 bp, Glycine max
ttgggcggccaatcaagtttttaagaatcaattaaaaaatcccctttattcaaaaagaattttcccttccccttttccaaccccccctttaaaccagttttttgaccccttaccctacctttgtccttttggagggaaaccttttttggtggtggcccccttcctgttcccctaattgaatttccaccagcaatttgccctcaaccaaatggcacctcttatataacaaaatgcgcccccacaaaaaaaaatattccctattctttaaaagccttgcttttgcttggcaccaaaaccttccttcct

SEQ ID NO: 84558 - DNA, 401 bp, Glycine max
ttttttttttttttttttttttttttttggttgtttttaaaataatttttttttttttattaaaatttttttatttaaaaaaaaaaattgggaattaaataaaaaaaacacctttctcaaaaaaagaatttcttaattgtatgaaaagaacctccaacaaaaaataaagggagatttattacaattgatatccaccaaacaaatggaagggtggtgggggaaaatccattcctgccaaaaaattaaaaaacatcgacacaaaaaaataaagccgaaggcctttaataactaaggaggcaactaagggacaataaccgtgtttcactaaaaatccgctttccaatcgggaaacctttgttataaaaaaaatgaatggatcatcaaacccccattgagagacc

SEQ ID NO: 84559 - DNA, 218 bp, Glycine max
aattctttcaggcataaaatcaagggtggattgtactattccggggaatgcccaccccccaagcaattaaaagccacaatttacaaaaactttttcccgaaagggaaagtttaccacgcttaccatgcaaaacgcgcattgtacgagcaaacaaaaaaggtccccagtctaatcctgggagggcctggcggactaaaagtcctattttccgagatgcg

SEQ ID NO: 84560 - DNA, 350 bp, Glycine max
aaaaaaaaatttttagtttatttttgtttttgaaaccccaaaacttatttaaatcaatttcattttatttgataaaatttttaaaattttcttactaacctggaaaacattattaaactgacccttagtcccggattaaattaatgggaattttttcttattggaaccatttttttcaattaccttttatttttgaaaaacaatgggtccataaattcaactgctttctaaataataccgtccattaacaacccttattttggaaaaaaaccaaaatttctttttaaaaccaccctttttaattttttttaaaacccatccatcttttcccccttttgaaagaacctttt

SEQ ID NO: 84561 - DNA, 279 bp, Glycine max
  unsure (1)..(279): unsure at all n locations
gtcccaataaaacattaggttaatattgagtagcaaaaataattaacagntaaccccgtttaaaatttattttctgggctaaaacctattacaatagctagaagcatcactaatccccattttagtagggaattttaatgggcactttggaagccttaaaaaggaaaaccagaccttgccttggtgaaccttttaactgactccaatgctcggaaagttggaaaacccatctcggcatggagttgtatacatgtcataaccatccgatagcattcttta

SEQ ID NO: 84562 - DNA, 185 bp, Glycine max
ttttttttttaagaaaataaaaggggggggcataacattttttgttggttttttcttaaaccaaaaacaaagggggggggtgaagagagccattaaggccttaacgacccccaggaaacaaagggcaaggccatggtgagaaaacgggtgaaccctttggtggaagacgccaaaaccggggaacc

SEQ ID NO: 84563 - DNA, 139 bp, Glycine max
  unsure (1)..(139): unsure at all n locations
aaaattacaacaatatcttaaaaacaagatttaatgaaagcgaacataacaaataaaaaaaatagtttcacataacgacacaagcggaggggtttaaaaatntaatctcaactttgtaacaacctaagtgaaaattgca

SEQ ID NO: 84564 - DNA, 377 bp, Glycine max
aaaaatataattagtgggcattaactaaatttttttttttttattattttttttatcaacaatcattaaaaaaattttttaccccctttacaacaccctataaaaaaaaaattttattattccaaataaaccaaaaaaataaacctttattaaacatatttacccaatcaaaaccaaaaaataaattttaaaaaaaaccataataaaatttacccctttaaaaaaaaaatctttccaaaataaaaaaaaaattacaaaccccaaaaattttaaagttaatctccttaaatcacaaaatctttttaaaacaacaaaaaatattatttcttctttttccccctataaaaaacaaaaaaaaacggcaaccttttaataaa

SEQ ID NO: 84565 - DNA, 407 bp, Glycine max
taaataataactaaaaaaatcaatcgatggttaagtgcgtcgtgcttagtagcaattccataaactgtcaagaagctaccaaaactttgaactagtttttcccaacagggattgcatactaggaactcaaatactacccggtactattccaagcattcaaaaacatttcaagcaacgggaaccacctcaatatcatccgccaacacaacaggaggccagatgaattcttcttcctacattggagtgtggatcgtgacatgaccaggaagggtagttacatgaccctgtttgcctttatgatcccaatcaaccatgatcttaacctagataccaagaacaccctgtcttagtcacacatgtgtcactggtgagtcaatgttatccttgacaggctgtccacaagaaat

SEQ ID NO: 84566 - DNA, 134 bp, Glycine max
taatccaaaccaattccatcacaaggtttttcatcaacaacactctagaatatgaatactcgccatcaaaatctctatcactccattttacattcgtgtctctagatgaagtcgtcgtgccttgacactgaaca

SEQ ID NO: 84567 - DNA, 212 bp, Glycine max
cccacgcgtccgaaaaaaaaaagcaaataaaaaaaaagataacaaaaaataagtgcgctactctggtgtaaaaagagcgcacctccatgtacggcagatcaacgcttaccttaacgttcatgcaacgtcaattctattcaatggagtgcccgaacttgaataaagtgcgggatgaaaaaaacatcacgactcctaaataaattggcttgaca

SEQ ID NO: 84568 - DNA, 206 bp, Glycine max
aacaaacatccgtaaaaaaaaaaacaaaaaatttataaaatacaaaaaaaaaaagcgcaacagggtataaaaaagcccgcccgaactacacaatcataccttacgtaaactttcatgcaacgtcaaattctattcaatttagtggccgtgcttctataaagtggtcgcatgtttaaaccctcgcgttttccaaatatatcttcttt

SEQ ID NO: 84569 - DNA, 431 bp, Glycine max
  unsure (1)..(431): unsure at all n locations
ntccgggccagtttcgtcccttacgatcccaattctgtgccctagcaatccaacacgcgcgagtgagtcagtgttattatagcgcanacaagcaaggaatcgggcccgcgcagtagaaactcgaaaggaatcagtgtttgtgtgtttcgcatattcttctccgttttagatttgagagagaagaagaaggaaaaaaaaaaaaaaaaaaaaaaaaaaaaaaaaaaaaagggcgaacgatatacaagatccaaagcactgcaatcgggcggggcggctggtatttaggaactaggctgaccaactggtacatcaagagcatagctcattcattgagttacatagataaacttaaccggccaggagttgaaccaatgaggctggcaaaaccgtaacgtcaaccaagataatagcgtagcggcatagactctttt

SEQ ID NO: 84570 - DNA, 526 bp, Glycine max
ggcagttcaattccaatatattccattctctctgtgtatttccctacctctcccttcaagatgcagatcttcgtcaagaccctcaccggcaagaccatcacccttgaggtggaaagctctgacaccatcgacaacgtcaaggccaagatccaggacaaggaaggaatccccccggaccagcaacgtctcattttcgccggaaagcaacttgaggacggccgtacccttgctgactacaacattcagaaggagagtactcttcacctcgtcctccgtctccgtggtggcatgcagatcttcgttaagacactcaccggcaagaccataaccctagaggttgaaagctccgacaccatcgataacgtcaaggccaagatccaggacaaggagggtatccccccggaccagcaacgtctcatcttcgccggaaagcagctcgaggacggccgcaccctcgccgactacaacatccagaaggaatcaacccttcacctggtccttcgtctgcgtggtggcatgcagatct

SEQ ID NO: 84571 - DNA, 84 bp, Glycine max
cccacgcgtccgaaaaaaaaaaaaaaaaaaaaaaaaaaaaaaaaaaaaaaaaaaaaaaaaaggggaaaaaaagaaaaacgatat

SEQ ID NO: 84572 - DNA, 163 bp, Glycine max
cttattttctaaaagccaaacctgcgaggtgtgtattttatgcataacttgcttctcgggtgcaacctaaataagatgcaatctgccaatcttcaaaaatggagcccactatatttcatgacaccagttccttcctacatgataaaatgcctactcgtatgct

SEQ ID NO: 84573 - DNA, 308 bp, Glycine max
aaaaaaaaataaaaaaaaaaaaaaaaaaatttttaaaaaaaaaaaaaaaaaaaaaaaaaaaaaggaaaaattaaataaaaaaaaaataaaataattattattttaaaaaataaaaaaataaataaaaattaaataaaaatgggttcgtttttttttagtttcaaattttttttcccctttcttccaccaatttacttttttttttttgcccttaaatttaatttccttgccctattttttatacagatagattttttaaaacccttttttttcccaaattaatatgctttgaaaaatttcccttttta

SEQ ID NO: 84574 - DNA, 350 bp, Glycine max
  unsure (1)..(350): unsure at all n locations
ggaggacaaagttgcaatcttcacgccaccaccagcgttcccgagtctgcaacctcgccccgtgttcgcggaagcctaagaatgatctaatcgatcgtggaatcgtatggcccctccttattcgagttctcaatctttttattttctttctttttcttttgtcttttattttngttgcctaagttgacgttgtgatatttagaaagtgggtttttagggaaggggtatgaggataatgccggttgaaggggccaaatagatattttttatattctcttattagaattgaaacgagattttaactgaaccctttttttaaggatggcatatgtatattgctccatataatg

SEQ ID NO: 84575 - DNA, 73 bp, Glycine max
  unsure (1)..(73): unsure at all n locations
cgggngcgagccacgcgtccgcccacgcgtccgctttnnnannannaccntttctctctttctctcttcccct

SEQ ID NO: 84576 - DNA, 304 bp, Glycine max
  unsure (1)..(304): unsure at all n locations
tccggatccggtcgccacgcgtcggccaggggcctctcatcaggctccgctcaacaaacggccaccggcccaagtncgtataaccgcattgcccgcaccggctcgacgccgtcatcgccaccgccaagaaaccgggcgccgttagccgcttgccgctcctggccaaccgtcttcttcacattgcaggtgggcccgacaaacgtaaaccttctcgcttaagctggtcggggaggcttggttttaactgatgctaacttaccgaccttattaccgcgcgcccgaatcgtgcgtcgtttgagcggag

SEQ ID NO: 84577 - DNA, 501 bp, Glycine max
gaatctccaacacaaacacaaacgggatttcttcctcttctctctctctcgtcactctctcttcttcttcttcttcttcttctttctcaaccagccatggttgacttgttgttcttctcactcactataaggagcccatgaatatgaaagttgttgttgtgagcatggagaacgagaagaagaagtgcggttgctgggctgtcctcaaacgcggcgttagaggtgcgtgcaaaccttcttcagcttccagagactctcctaacactatccctcgtactagtctcgtttatgatgcagcaaccgagacaagatacttgaatgctagcaatagagaactatgccctccaaatgaagctcgattatcttctgataatcctgatcccccatctcaggagaataaggttccttgccagctccttcaatttacatttcaagaactaaaggctgcaactgggaatttcagacccgatagcattcttggggagggtggctttggttatg

SEQ ID NO: 84578 - DNA, 365 bp, Glycine max
  unsure (1)..(365): unsure at all n locations
tcgtccacccgtnagaacagctgctagaagaccatagacgggctggcatgacaacttctttagggggtgcttaatgaaaggccagaggcctctcactcaatgatcctgacaagtactctgcctaaaatcaatcctgagaaaaacctatatgtactatcatcatgatacatgaaacaccacgctatgaaccagataatctatgtctcgtgacctacgtatgcataactctttatatcctcgcatactcataacaatcatattgctctgcaagataagactattgattaattgtacaaaccattggctagttccaatgtgcatattgtttagcaatgtcccaattcatattctatttaaatgagcta

SEQ ID NO: 84579 - DNA, 294 bp, Glycine max
  unsure (1)..(294): unsure at all n locations
acacccccacggatgcgagaagaccaccgaggggactattttaacataaaactagaacaatacaacggggtcatttatagactcaacagcaccaaactcctcaacgcctcctccaaacaactataaaaaaacagtatcttagtctcactgatccaagtcttcctcttcaccttcaactaccataccccctccccagacttcacctaccaccgncacctgcactcccagtaacaaatcctctactggtaaaactccttcgcctcctcagaaaatcaggttcgacactactccacc

SEQ ID NO: 84580 - DNA, 412 bp, Glycine max
  unsure (1)..(412): unsure at all n locations
tttaaaagaaaaattccaccttgcaactattaatatgaancaaagaagaggggttttggtatttcggccaaaacatccagactcacaaaaggtacttcctgagtccaatctatgacagaaacaatcacaaaactcaacaccaattttataaaaaccaaaccactcggaatgatcacgtagcaaaaggcaaactccaacatatataaatataactctttatgtacccaaaaaaatcaatccacaacccatctggccccgtgatgtacataaaaccacccatttcaaaaacccaagacgctccaaacacactctatttaccaatgctggacctagccagaaccaaagacattttcttgaccccgaacagattgactgtgaaactggaggaccttattcactatactgataaacc

SEQ ID NO: 84581 - DNA, 408 bp, Glycine max
tttaacagaaaaaggaatatatttctatcatctaacacaaaactacaggcgtctgttctataacacgctcgaaagaatcacatataaattgaacaatgactgccacaacatccaacccagacacaggcaagaatgttacaacagcacgactaaatccactgagtttctgtggtgaggtcaatatatgaatcaaatggtgtctcgggacacatcacgccagaaccaaaaatcaaacatagccactattaccgctacaagaggatcatcaacagtgttagaagcaagggagttgccaatgaaaaaccatccctgaaaccactactgcttggatacactgaacgaagagagcattcttccccattgaaaaataccttagtgggaaacccatctccatgagctacattgatt

SEQ ID NO: 84582 - DNA, 338 bp, Glycine max
gctcaactccacctttatataactaaaaactccaaatacatggcggaatttactgcaagcctgttctatcttatacaaaaaacaaaacccctcatcccatctttactaaaatatcaaatccgaaccgcttggcatgaaagctatgattataataaaaacacagcagttttaactaaaatctgcatgtcacacaatgtaatgcaccaataccaactctacatgattaacattcctattcgtaaacatcataattacacactccaacagtaatccatgattaattatgcatatagcaatcatttccctccttaaactcaaaatccaaattttatttcttt

SEQ ID NO: 84583 - DNA, 167 bp, Glycine max
tcctctacagcggccgccgtttttctttcttctattgttgtttccgcacctccacacccaaaacttttatatcataatggggaaggaccctccattccatgataatttagaactactcaatcatatgtatctacatgtgcttaatgaaataatcccatatagtcacc

SEQ ID NO: 84584 - DNA, 210 bp, Glycine max
ggaagaaatgaaatttgaactttttagggattacttacactagaactattacttgtgggctaacggcgtttgaaacccgttatcatgactggacgagttacacattcaaacttaaataaaataaagaaggagagtaatagtaaacaccctagttaatacttacaactgtacctgccacatacaaccctaagtcagcttaacatttaactt

SEQ ID NO: 84585 - DNA, 226 bp, Glycine max
cctcacaacaaaacacaaatttttcctgtactgggtggattttattttctttttcgacactatctaactctatattacaacaactcatgtctctgaaatttggttatattcccccttcacgatcacaacccattaaaaaatctatttcttaggacatcttacgttccttagaaccatgtattccatactctccttcccaaaaaaaagcatttataaaaacataacc

SEQ ID NO: 84586 - DNA, 527 bp, Glycine max
  unsure (1)..(527): unsure at all n locations
cccgtcgtagctggatccttagagcggcgccttnttttttttttttttttttttgtgtccttggagaatgatcaaggttatcggggtattacatttaattagagaacctagttatattttgagttgaatacaacacttgtgttggcaatcacttcttttggaaaggaaaggcaacgcttatgagtttttcctccaaaagcattcgtgtagttatggcagccatgttattttgtacgtctattggttcatttggggtacccttccatctatgttagcgaactcttcctgtaatctatctgctcgtacttagacgaaattctatttggaacttcccaaagtaaactttgccaagctagctttttcaagaagcaattgttttgtctacttttgaagtactttcgaaccttcataggataataaccggactgcattctggtaacttaattcaacaagctcttctttcgtaatttctagcatagatgcaacataatcaagtacattatgaatgtttgcgggatgattgaatg

SEQ ID NO: 84587 - DNA, 249 bp, Glycine max
atcctcccaaaagaagagtgcaccacccccagatgatgttttagattttattaagacctcttcccccttcttattcattcaataaccccgcgccggccaaaaacctgaaaatttttattgtcatatttcccccttaaaataccattaaccctctaattgatatcccgaagccatgcgagaattttatccccttccgtttttttttaaaaaacccctcaaatccattcctttttggcttcaacctttaaa

SEQ ID NO: 84588 - DNA, 227 bp, Glycine max
tataagtaactcatgtataattacctgttgaaaaaaggaaataagcatgatgcatctccctgttcattttgcatgacacatcactgaaaagcttctggacttacttgacttggatcaatcacaaccccatgaactggttctgaccgggcttaattttttcggggtcttacaaatggggaaaaaaattgttgaacgccctttggaattgggaccctctgtgggggggc

SEQ ID NO: 84589 - DNA, 268 bp, Glycine max
aaaaataaacacctttaccatgtttgagggacacctagtcatacaaaaatgggtgcacataattagtcttgcaatccataacttataaaagaacaagacccatgcacctgatccaaattctttatattttatctcagcacttgtagaaaattcataccattcactttgttcatatgagcaaaattgcagagacaacatttgttgcttaaatgcaattctttatctgatctcctgctccttggaagaaaacataagaaagagcctaatc

SEQ ID NO: 84590 - DNA, 358 bp, Glycine max
  unsure (1)..(358): unsure at all n locations
ctctttttctttctcttttttttttcccttaatttcttcccctttcctggaggggttccttcttttcctttttgtgtcnaaaaaaaaaaaaacaatttcaaaccataacttccccctatatgaaattaacttgcaatctcattaattcacacccaaaaaaccagaacccttttttgccaaatctcttatgcataaaaaaaaaactatcttacactgaggggccctttctcaatttggggcccccaaacaaaaaacctttccccccccctattttactttttaaaaaaaaacccctttttttttccctttgaatattgcccaccaggccccccaatttttaattcccacgttcccatcc

SEQ ID NO: 84591 - DNA, 117 bp, Glycine max
gcaggcaatgaaaatctcatcatatcataccagggaaaaccttcccacatttgactcctactttataacaaagccatcggacagccttgaaaaccagaaaaaatgggatttagtttc

SEQ ID NO: 84592 - DNA, 375 bp, Glycine max
aattgaatgctgcagctcatggggatgctcccgatcaaccacgtgggttttggttatttggatttgagaaaagaaacaatggttggttgcgcctgggtgggcttgtgcccctaaaagcttttgacagtgcttacacaagcgttcactttacagaaaaatgagcatggaacagcttcaaagttgacttgggactatattacttagaccaattggtaaagtaaaacaatcatccctatatatacacaaacctctaactgagcagtgccaatcagatggggagatcagcggttgtatcaccaggcagaccattgatgagctgtttgacccatcttcaccattttattcaacatgcgctcagcttcttaactcacacag

SEQ ID NO: 84593 - DNA, 439 bp, Glycine max
tatttttttcttttttttatttttattcttttttttttcctcgggggttttttttttttttttttttttttttttcttttgggggctcaaaatgggggggctttcaaacttttaaatagacccctttctttttttttcccgaaaatcccccccttcctgaaaaaacctttttgggacaaaaccttcttgtccccaatttacttttttttgaaaccccccacccccttggggaactttatttcccccccccaacctattcacgtggtttggggaaactccccaaaaaaagggggaaaataatccacctccccaaaaccttcctaaaaggtggtttgacttcaaaaaaaaaaaagaatcttccttttttttaaaaaccaacggcttattaaatttaaaatttccaaaattttttgccccccccaatttaagggtgtgaaaa

SEQ ID NO: 84594 - DNA, 417 bp, Glycine max
attataaatctaatctaattctgtaggagaaaaacctgcaaatatgagaggcataatcctccaacattccccaggaggctttatatagataaaagattagagggaaatcaaaatcttttcctcttcacccgtgaaatatcatcaaaactgtcatcactccaaacctgtccaccaccaccaccaccatgcctgaaattctcttcttgttcatccatatttcttgttcttctaagtggcacattagctggccggcccttgattcttctgtcaaagtccctttcccttatgttgttgcctcctctttcatgaaaatctgaatcatctgaacagaatctataatgtctaagtccgtcttcagcattaaggtgaaaattctcaccaacattgttattatagggaggcctgaaagaacgcaca

SEQ ID NO: 84595 - DNA, 249 bp, Glycine max
ttaacacaacccaagctttttatcataagatgcatgccaaaacctccgagcgtgaactatttaactatagcgtcttttgatccattcaaacaacttattaccaaacatgttttagggattcctatcataatccagttacaaaccactataatttctgatacaatacttaatttcaatttaatttgtaattgaccaaattaaaataagatatctaaacatcctattttttatagaacaaaataaaatcct

SEQ ID NO: 84596 - DNA, 382 bp, Glycine max
aaaaaaaaaaaaaaaaccctttggagccccctttttttcccccaaaatttttctccccaatccttaaaacttcaaaatttttttttttaaaaataattttaaaacttgggaaaaaaaaagccataacttttttttaaaaaaaaatttttttcccctaaaaatccaaaaaaaaataaagccgaaaaataaaaatttaaacccccgggtccctaattaaaaacccaatcttattttatttggtgggccccaattccccctttaaaaaaaaaaacctctcccccctttttttttttataatcccacccgccaaaaaaaaagttttttattttttccccccatttttttttttttttttcccaaaaaaaaccgcaacttttttttt

SEQ ID NO: 84597 - DNA, 250 bp, Glycine max
tgaaacgagcaatgaattttttttacatattttaattgtttcacaacggagttttttttttttttttaaaccaattgccatttatatgttcatgaaccgagcaaggggtaaagtccatttaaaaaaaaaataaagttatatcccaactgcaaaacatttttcaaggaggggtttttttcaatatttaaaagggggttggccaatacaaaaaaacacgcatgtaacagggtctttttaaccccctccataa

SEQ ID NO: 84598 - DNA, 387 bp, Glycine max
  unsure (1)..(387): unsure at all n locations
gtacgtaagacttggatcgctctagagcaggccgctcgntttgtttcattttnttgtttttcttttgggaaataaaattactcgatcatgtaatatcacacaacgcttgacagtgaaaatttctgtaaacatacatctaatagtgcaagttatgaataaaatttataaactaaactcaatttcagaaactaatgtgagaaaaataagcagattgccatctgagtcaacaagtctgtaagtactttcttcaagcgtcacctttaaatttggtttcatacatctgaggtagcatatagatagcagatatcattctgcctgcaaaccaccttgtgtgcattgcacgttgagcagcacttgctgcttccactgtttcaaactgcaaataca

SEQ ID NO: 84599 - DNA, 343 bp, Glycine max
ccaccaaaaaaaaaaattttttcccccacacccattcggaagcaattcccttttttttttccccaacccaatttttttcccccccccccccctgcccccatttggggtaaccccaaaataaacccccccccctttggcccctcatttttttggaaaaaaccgccctagcttttttttaaaaggggtttataacaccccccgcacaacataaaccccaccttgtcccaaacccgaaaaacccccttttttttcttttttccaaaccttcttttttttaacccctttttttttttgaattacctttaccccccccttttcctcatccctttttacccggtttttt

SEQ ID NO: 84600 - DNA, 428 bp, Glycine max
ataaaaaaaattatatgtggagtctacttcatttatagcaaagtgtgtaattatcgtaaatttactatataatatgcatgttcaatcaaagtttgttcaactttgtcctttccttgaattgtcctccaaatctatccgtttaaaaaccaacatttaattttcaatccaaaaaaattttaaaaaataaggtttatatatatttttaatctcacaaatttaaagtatattatttttagtttctcaaattaatatttatttatttaatctttcaaattcgtgaaaatatatttttagtccctactaagtctggactaagttttagcaatttaaatatataatttatgatcattttcaaccggtactataactaaaaaatattttataaatttaagagacttaaaaaataaaattttattttggacctaaaa

SEQ ID NO: 84601 - DNA, 207 bp, Glycine max
caaaaaatttaagacgttaaggatcttaaaacttacatgttcggggttttacctaatttggaactttaggttgacatttgtactcctacacacttttctggctcataattttgaattccggaaaaaatgtaaacttgaagaaaggttaattttgggccaacaatgatagtactaggttttggctaaattaaagagacttaacttaaa

SEQ ID NO: 84602 - DNA, 376 bp, Glycine max
  unsure (1)..(376): unsure at all n locations
aaaacacgggccactgttttgtttgtgctgcccgtgcagagcaggcacactggtctagtttgtttaattgtggttcaagagaacattaaatgaagagggtaagactgtacgagccttgaacttggcataaatggttaggttcctatctaataccaattaaaagcttcaggatggtgatgaatgatgaattgatattaagagggcattttatcatgctacttgagtaactgttataattaggaagttttcggcatagagggaaagaatagaataaggagactctgaagtatcacttggtagnggatgtatacatatgtatattgtatatgagaattaagcctcctgttatatacaacatgaactaatcaaaacaatc

SEQ ID NO: 84603 - DNA, 231 bp, Glycine max
atttaaagaatttcattggttaaacagaaacgcctgaattacaaccaatgagaaaattctgctactaataatgccttataaagtgtgtttactggtgcaaaattcacattcatggccacctatgtatttgagaaggttaaaaatcatgtataaaccaccaagtcaagaacattttttcaagataaaatacccacccttctgtgctagcacttatttctacccatttctaca

SEQ ID NO: 84604 - DNA, 353 bp, Glycine max
tcctctagagacagccagcccccttttttttttttttttttttttttttttttttttttttttttttttttttttttttttaaaaaaatttttttttttttaaaaattttttttttttttatttttaaaaaaaaaaaaaaaaaaaattaaaaaataaattaaaaaaaaaaaaattaaaaaaaatttttgaaaccctaaaccaacccctatcccaagtcccccccttaaaaaaaaaaaaaaaaaaacccccccaccccgtcaccccggaaaaacacaaaaaaaaaccctcaaataaacacacaaattccacacaaaaaaaaaaaaagctcccaaaattcctcataaaaaaatat

SEQ ID NO: 84605 - DNA, 150 bp, Glycine max
aaaataaaaataattatttaataaattttttggaaaaaaatgtggttatttgataaaaaaaaaattaattttttttaaaaaaaatatttatgaggcaattgaaaaaaaattgttattttttttttaaaaaagaaaactttaatttttgat

SEQ ID NO: 84606 - DNA, 376 bp, Glycine max
cccttgagttagcgagatatatatctttttcaacaaggggaagaacaacccactatatttttccttttaataaaaacaaaacaacttgcttattcaaatctaacaatccgactcttctccttacatatgccacttcatccccaaacatggccaatttctttggtcctttatttactcaaccaacattacctgtccacattttagattttcaaccacttgttaaaataagactacacatactttgttgcctatccagttttcatagggagaaacaactacccaagaagtaatttccttagttcaaggttaagactatccttttctcccacttcatgacatatccaaatcctggctgcagttcataaaatgcactccc

SEQ ID NO: 84607 - DNA, 207 bp, Glycine max
ttattttttatggattttgtgttttatattttatttttctttggggatatttatttatttattttttttattattttttttatttttctttttcattttttaaaacaaacataaaattctataaaaaaaaaaaaaaactcatgaacatttcatcataaaatttttatacccacataaactcaacaaaaagttataaacggtctctta

SEQ ID NO: 84608 - DNA, 446 bp, Glycine max
ggcatatttgcaacacgtgaatatgatatcaagctgccatagaaataggggtcctagccattaagtcaaaagggcaggaaggcagaaaaaaatgaagtataaaattaatgattgaatcatcaaatgaacacaagccctgctaattattagatgtccccctcaaaacgcatcagtcatcaaccatattggctgcgtaatgacccaagtttctgccctcagataacaaccgttgcttattaagtaatttagtcctaaccttgtgttgaactgaatttggagacttaaacattctcttcttaccactagacatgcgatgttcattgttattaagatatcttctctctggttagaaattaaatacatcttgaaggaactcatttttctgaatatgcttgatgaaccctacccctaaaaaatgcttgagaatagttaaactgtttcatttg

SEQ ID NO: 84609 - DNA, 198 bp, Glycine max
gggccgaggcaaagatatcataattaccctaatgggataatggtccacaaactcttaaccttaagttcttggaaaaattaaattagagtggtggcaaaaaaaaggaccccaaggaaccttgggttggatgtccaggtcaaagccaggaaaggaaaaaaaaatcttttttacttatgccatgggtggtttggccccttt

SEQ ID NO: 84610 - DNA, 97 bp, Glycine max
aaaaaaaaaaaaaaaaataaaattttaaaaaaaaaaaataataaaaaaaaaaaaaaaaaagaaaaattaatgaaaaaattaaaaaaaaaaagaaaaa

SEQ ID NO: 84611 - DNA, 326 bp, Glycine max
ccctccctttttttttttttttttttttttttgtttttttcaaaaaaattataactactctactgtgtttttttttaacaaactttcaaccttaaatactttcaaaaattaaattatattttgacaaaaacaaagaacacaaacaaacattccatacaatgtccagtcaaaaccaccaaattaaaaaaaaaaactattttactaacgcatgtgttgaaatgtcccaatttcttttcctatatcaaaccatcataatcaccacttatctaacaactccacgaggtcactcttttttatttttaaaaatcctttaaaaccacaagtct

SEQ ID NO: 84612 - DNA, 297 bp, Glycine max
caagagaagacaacattcacctcacagggggtttctacatcacgggggtaacattctcactccccttataaaaaaatctcatttgcaatgcattctgaaatctcacttgctgccttttaaaagtcacaaaaacaacatatcattccatattgggtctataataacaacgcaaacctaaagattaacataattttgaagcaccacacaaatgatttatgacctccaaataatacacaaacctcaccaccaaaaatgctggcaactgcagagaagaatacaccgtttacctttgaaaaa

SEQ ID NO: 84613 - DNA, 344 bp, Glycine max
  unsure (1)..(344): unsure at all n locations
tcctctagagacagagcgcagccctttttttttttttttttttttttttttnaaaaacttattcccntaaaataaatttttcctaaagaagatttttattacatatacaacacccttctcaaagacttattcattaattataacttattcccttatacattatacttctctttctaattaaaaaaaaaataatctatttgctttatttacacttcctacacctttaaataaattaccacatttatttttttatttttcttcttttgttacaataaaaatttatacctttttgtatttaacacatacatctttcaaacatgtaattctattttaccatatatttt

SEQ ID NO: 84614 - DNA, 220 bp, Glycine max
  unsure (1)..(220): unsure at all n locations
taggatcctccagagacagccagccccnnntttttttttttttttttttttttnnntttttataaagnnggagnncccttttttcccaagtagtttttcaaancccaagacccccacaaataccatttttttaaaactttttaccacctttcccaacctccccccattaaaaaccaaccctaccccctaaaaaaataaaatttttttccccccccaatct

SEQ ID NO: 84615 - DNA, 160 bp, Glycine max
gaatgacaaatttagagtacattcttatgagggtttgtaacttcatgacttggtaaacatgttcacacccattatgaaaatatttcatttgatttacattttgaaattgcatttgcttcctttgaaatggctggaaaagccgcattccattccagattgg

SEQ ID NO: 84616 - DNA, 272 bp, Glycine max
attcgtgtgtttttttttttaaggaagaaaacccacattaatttcaaaaaataaatttcccggaaaaaaaacccccacaccccctccaaggtttttgaacattaattttatcaaaaaaacccaaggtttttacaaacgcaccgtttttattttttttttaaaaaaatttaaaattgtatctcttttggaaaatctcccctacgccaaattacttcggaaaaaacctgtcctcaaaaacttgggggcatgaaaccaaaatcccctttgggggg

SEQ ID NO: 84617 - DNA, 181 bp, Glycine max
aggaaaactttaattattttttaaaatcccccttttggccaaaaacccatagttttttttatccctatcaaaaaactttttaaatattcctttctagggtttttttttttaacattaggttttccaacaaataattcattttttaaatcccccctttaacaaattaacctttttttttacc

SEQ ID NO: 84618 - DNA, 447 bp, Glycine max
ttaatacaacttaactgtttcatttcttgaaggtcaattgagtgacaaccatgtggtaagagaattacacactgacacttctacgtaaatatgttacatacagcagcttccatgctttttccgtcgaatggggacttcaattcacccccattcaatcaaacaatataataagcaaccctaaaaatacccaaaactgttaacttatgtatagtgtcacgatggggccgaaatagccaaggtagattgcttcttctgcaatcttcccttaagttgcctgatctttgcttccactcttgcagtgaacccaatcttggtttcctgtctggccttagaacgctcccttgtccacatgtgttgatcttcaatatcctttttgtagtacttgatttcttggataatgtgatggtccatgggattgaaacatctttggaaggatatgtgggcaaa

SEQ ID NO: 84619 - DNA, 397 bp, Glycine max
  unsure (1)..(397): unsure at all n locations
ccctttttgttttttttttttttttttttnnctggcgcccaccagaatacaacccttgccccgagaggttttttaatacaatgaggaactcacaacttctctttttttttaaaaaaaaaagttatgtctcgagtttatcttaaacttttgaaaggtttattttaaccctttaaaagacaagatattgttaaagcctttgacctccaatagattcaaacgattttttattgataacatacctgatttatgtgctgggtttaactttggttgcacttggttacctctcaacacatcaaaagaggacttgcccatttaatgaccccatgaaactttatttttcaatgattatatcaagttccagcacaaaccattggatgaactttacttttacaattgt

SEQ ID NO: 84620 - DNA, 153 bp, Glycine max
  unsure (1)..(153): unsure at all n locations
acgtaagacttggatgcctctagagcaggccgctcgnttttttttnttttttttntttttttnttttaaatccaagggtaggtattctgaattatttctgttttgggtgttgtttcttgtaaaaaacacaaaacacagggcatttgtggtgtg

SEQ ID NO: 84621 - DNA, 169 bp, Glycine max
  unsure (1)..(169): unsure at all n locations
taagctaggatcctctagagaagccagcccttttttttttttttttttttttttttttttttttttttttttttnnttttttttttttttaaggggttttttttttttaaaaaaaaaattttaaatttaaaaaaaaaaaaaaagaaaagaaataaaaattttttttttt

SEQ ID NO: 84622 - DNA, 347 bp, Glycine max
aacataatttatgctaggattcttggacaaaattataaaacttctcgaagagattttacactacaaaaatgtcaccccaactaacccaatgtacactacctactacctactcatatgcttttattaatacttaaaaaacaacagacacctcaatattctttgccaaatcaaccaactgacagtcatatccctcctattacttaagattgtcgattatcacaaaatcaatatgggaaatttatacaaccctgcttccctttatgatcccaatcaagcataagctcaacctttactccaaaaacaccctgtattattaagacatgtctcactacttattcaatgcaatc

SEQ ID NO: 84623 - DNA, 93 bp, Glycine max
ggcggtaaaatatgaccattacttaaatttgaggtcgatgaccaactcgcgtagattgagctacaatcgttcctctggcgtgcgaaaaacacc

SEQ ID NO: 84624 - DNA, 367 bp, Glycine max
tatgaaccaaaccattcttgatccaccttcttaattaaacttactgcggccctctttatatatcttaaaacattccactgatgccatatcctacaaaaaccatatcaaacttcaacacccttctacactactcccttaatttaaccactacttttcacacatattaagtatatcgctactttttccaccttctctttacataacactcattacaaattacctccttcgcataaaacaaagcatcacaactctaactttgctttcatttaaaaacataaaagccctttttccttgtcttctacaccaagacaacatttttaatacatcactgtgtcatctcacttttctccctcacaacttcatctat

SEQ ID NO: 84625 - DNA, 267 bp, Glycine max
  unsure (1)..(267): unsure at all n locations
aaacaaacatcaagcccattaattcatttcgcatgcgaggttttataaaacacaaacagcaatttctattttttctgacatacactaaatacccattcctacccaaacaacttatcatctattatcatgataaaatcattctaacaatctctccagagagctacaataatntttctgtttgttccacacaataatacttttctttcacaatccaaggttcatcatccttattaaacttgttcctcaaattcttaaacatctttttaa

SEQ ID NO: 84626 - DNA, 148 bp, Glycine max
gttttgcactttaaagtaaggaagaccgttcacaaactaaacggggattattaagatttgtggatgaccttacaacaatcccctacagggtagaaagactttacatttttctctccacaagtgattattgtatgtaaaatgaactaat

SEQ ID NO: 84627 - DNA, 364 bp, Glycine max
gtttaatattttcacaggtcaatatggaaaaacccccttttaattaatggtccattctgggattgggatgaatgcggtacaatttactctcacctcctcctaactttctgccttccctcattctcggtctcacaaacttaaagtaatatccagaaaggaatgaagaaaacctgggctcttcttcttatgtgttttttcttgtttgaggatggtgtgctttaaactagaactaatgagatatatcctggaaatgttgatcacactctattggtttaaactaattataataaccttctagaaattgctaatttggttctatggttcttatctggggaataggctcctgttatcaccctttttattc

SEQ ID NO: 84628 - DNA, 123 bp, Glycine max
cgtaaatgcgctttcttttcttataacaatcatagcttactacgtacacacaccagctctgaaagctatcacagatggagttatcaacatctacatctctgatttttaaattaataaccgaat

SEQ ID NO: 84629 - DNA, 436 bp, Glycine max
  unsure (1)..(436): unsure at all n locations
cccacgcgtccgtttcttatgtnaaaaaaaaaaaaaaaaaaaaaaaaaaaaaaaaaaaaaaaaaaaaaaaaaaaaaaaaaaaaaaaaaaaaaaaaaaaaaaaaaaaaaaaaaaaaaaaaaaaaaaaaaaaaaaaaaaaaaaaaaaaaaaaaaaaaaaaannggggggggccgttttaaaggaaaaaagtttagggccgggggaatgaaaatttttatttttttttttgggcccctaaaataaatttaatgggcgggggtttaaaaacgttggaaggggaaaaacccggggtttcccaaattaaatggcttggggaaaaaaccccttttccccatttgggttaaaagaaaaaaggccccccccgttcgcctttcaaaaaaattgccaaacttaaatggcaaagggccccccccttttaacgcccaataaaggggggg

SEQ ID NO: 84630 - DNA, 400 bp, Glycine max
gatttgtttttgtatttagtttctattgttgttaatataaacagggagtgctttagatttcatcatattacatatataacataatgtaatacatcgcactacacaagtgaatacttcagagtctccttattctattctttccctctatgccgaaaacttcctaattataacagttactcaagtagcatgataaaatgccctcttaatatcaattcatcattcatcaccatcctgaagcttttaattggtattagataggaacctaaccatttatgccaagttcaaggctcgtacagtcttaccctcttcatttaatgttctcttgaaccacaattaaacaaactagaccagtgtgcctgctctgcacgggcagcagaaacaaaacagtggcccgtgtttt

SEQ ID NO: 84631 - DNA, 452 bp, Glycine max
ggggactaggagataggtaaataatgttgattggatatttaagtagaagtactgatgggacgggaggagcagtgacggaggtcaactcgctctaaacttttccttccgttcactcgcctcgctcatcctcgccgtcacagtcacctccaccgatcatgttctagacttctctctctctctcaggtcctctctctctcaggacagctggagatgattcaacaaggtatagattctaaattttgtgagtatagtctgggcaattgtaaaatggacttgcctaatcgtgataaacaactgactgttgctgtgaagacagcattgagagatctgcaaaatgataataaaatcatggtgccaacctctgttggaagctcttcatttttaaaggataaagatcctggtactgattctaatagagtttctggcaccaagagacccttgtctgactaccc

SEQ ID NO: 84632 - DNA, 118 bp, Glycine max
  unsure (1)..(118): unsure at all n locations
cttcatgaccataatcgactactgtttaaatctgnnnaaaaaaaanaaaaanaaaaaaaaggaaaaaaaaaaaaaaaagggcagacgntctaaagatccaaacttacatacatntggg

SEQ ID NO: 84633 - DNA, 250 bp, Glycine max
gactttcatttgcattgagctcgagcgttacatcaggtacatcatgagactcaacagctccaaactcctcaacgccttgtcctaacattattatcgagccacaattttatatgtactctttccagccttactctataccttgaacttcccttcccctgccccagactttaaattgcaccgcgccttcaatcgaatttccgatagccgatcccatactcgctgttaatctgatgggagaacagaagtccgc

SEQ ID NO: 84634 - DNA, 246 bp, Glycine max
gggacgcttggtcgttctttttttttaaccctttaaccccaccccgggccccccccggggacacaacccggaaatatggagccggaacaaaggggggcacaaaaatggcaaaaaaggagtcctaaaaaaaatgtggataatctcagaaatacacagatcccgggggaaaaaagttatacggtaaaaactccgcaaaaaaaaaagagcggagaaaaaaaaatgtaaaccgggggggcccaaaggagg

SEQ ID NO: 84635 - DNA, 304 bp, Glycine max
  unsure (1)..(304): unsure at all n locations
aaaaaggaaattttttatttaagaaattttttttttaacctactnngcnaaanataaaggcaagattaaaaaatttactattcatcccacaaaattttccaccggggaaattttttaaaaggggtaataagttgaataattggaaacgtttttttcctcgccaacgactttgccgggttcctccaccaattcggtaacttccccaaactttggccattaaaaaacattaaggccttgggaagcggcaagggtccccacccctggcccgacccgtagaccaacccattcctccacccggaaattc

SEQ ID NO: 84636 - DNA, 305 bp, Glycine max
ggaacaaaacttttttttttttccccttttggggcccacaattttatttaaaaaaaaaaaaactttggtgttgacaaaattatttgtttaaacaaaaaaaaaaacctttacttttataaaaattcccaggggaatgccctttgaacttaaaaaaatgttaaattttcccttttgcttaaaaaacaatgggtttcataaaaaaataactcggataaaaaacaacaaccttttgtttttccttttttgaaaaaagctttttttttggtgttggggtgctaaccaacccaggggtcttttaaaagttt

SEQ ID NO: 84637 - DNA, 350 bp, Glycine max
  unsure (1)..(350): unsure at all n locations
gcaacacnggttttttttatcacaagcgcaaatttcaaaaaacagagcattccactcaattctcaaaatttatctatccaaacctacatctcaagttatataactacccaacatcaattaatctaacacttacaacaaaatctctcaatctaggaaactcattgaaagtaaaataaccattaaaaaattccaatatcaaaaaaaccttaaaaacaagacactatgtaaaaaaactcatttcccatatccaccctagacatcatcccaatccttttacactttaactccactaactatcataactatattctttcaatcctacacttgcctacctacatttctctaattta

SEQ ID NO: 84638 - DNA, 294 bp, Glycine max
  unsure (1)..(294): unsure at all n locations
gcgtacgtaagcttgaatcctctagagcgccgcccctnnntnnnnnnnnnnttttttttttttttttnnnttttttttttttttttttttgggtttttttttttggggggataaaaaaaaattttttattttttttaataaaaaaaaaaaaaaggaggggttaaaaccaaaaaaaaatgggaaaatccccccctttaccaaccttaaaaataatgaaccgaaaaaaaaccggccaaaaatttctaaaaaggggccctttaagaaatgcccaatccaaaaaaattcccaccccct

SEQ ID NO: 84639 - DNA, 204 bp, Glycine max
  unsure (1)..(204): unsure at all n locations
aaaaaaatagaaaaggttgtttttttttttttaaaaannggggagtggttattgggaaaaaaaaaaagtgtggtttaaaaaaaaaaaaaggggggggtttggggggaaaaaaaagggtgttaaaataaaaaaagaagaggtggtnngntttattnatttgaataaagaatggtttttttttttttttaaaaaaaaaagggggtt

SEQ ID NO: 84640 - DNA, 494 bp, Glycine max
aagaccaaatgcattcattcaatacttggctcagtacatggtctcaaatgttcattgatttgttgcctctaagtaatatagatcttatggaatacaagaagaagctataaacccaggaaaactgaaattaaataccaagatttccttatttatcaaacagaatacttaggcaaactttgtcccacatttgctgaatacattcagcaaggctcagtatttctcagaagcttcaagtaaccgtttccactgtttgcaagagaatttgcaagacaattactctttatccaacgattattactctttatctgcatcaacctttgaaggggtttcatcatttttagcagctgctgattctgatgggccatcatcttcagtaggctttgaagatcatcatgggagtagattctgatggtcagcagtggatctggtcagtactgaactgctttgtcggtccaacttacatactgtataattgattcagcttcaggctaact

SEQ ID NO: 84641 - DNA, 431 bp, Glycine max
  unsure (1)..(431): unsure at all n locations
gcgtacgtaagcttgnatcctctagagccgcccgcccttttttttttttttttttttttttttttttnnnnnnngtttttttttttnngggtgtgttttttggtgggtttgggttttttttttttttntttttnnnntccacccccccccgggttcccccgctttttccccccccccccccccggccccccattttccctctttttgggcccttttcnncccctgcccccccctttttctagccgtnttccggggggacaaagcccccccccccaaattctccaaccaaatcaaacccaatgacaaacggcgaaagcccgggggcccaaaaaaaaaaaccacaaacccactattccttccactttctcaccccctaaaaaatgggaaaaccccacttcccccccctgtaaaaaaacaaccccaccccccaa

SEQ ID NO: 84642 - DNA, 302 bp, Glycine max
aaaaaaaaaaaagattttaaattaaaatttttttaaaaagtttttttaaaccattcattttattaaattgaaaaaaacttttttttttaaaaaaaatttttaaaaaaaaacccaaaatttttttttaaaaacccaataaaattaaaattttttcccaaatgggaaaaaaaaaaaccctaaaacttttgaaagggaaaacaaatttccccctttccttttcaaactttttttaaaaaaaaatttttttaaatttttggaaaaaaaccttcgttgggaatggtaaaaaacccaaaaagtttttt

SEQ ID NO: 84643 - DNA, 368 bp, Glycine max
actaaacacttggttccttcctaacatttacctgggacccaatagtggtcaacatgaccatttacaatcacaattcagctacttaatgctcattgtaaatcacaaccttaccagaaaatacttattagaagtttacagccaaaaataagtctgttacggttaagcgcctaacagtgacaacttttcttgattaccaccatccttgtattttttattgccattcacttcacaggtgcaacaactaattataactggtgagccaggagagtacaacaaccatgcattgcattcacttgactgaacttttgtcatgtcttttaaatcggggttgcctgatctgtattggagggaaagatcacagatccacg

SEQ ID NO: 84644 - DNA, 429 bp, Glycine max
aaaaaaaaaaaaaacgttttttttttaaattttgggggcaaaattttggggggaaaaaaataaaattttcccaaaagggggaattcctttaataaaaaaaataggggtttaagccttaaagggtttatttttggatttttgtaaaaaattcccggttgaatgtttgggggcattatagggaacctttttttctgttaaattaccagggaaaattgtccccgggggaaaacccaagttgggaaaaattctgggggttgtaattaaaacgggcctaaaaagtttttgggtttgcacaataaaattaaagggggccattgataggtttaatgggtggccccaaaaccttgttttatgacagggcccatttttttcttccagtaccaaaggggttttttgaaggaaaaaaaaggtgttttggcccccgttttt

SEQ ID NO: 84645 - DNA, 527 bp, Glycine max
  unsure (1)..(527): unsure at all n locations
atngatacacattttaaaatttttgttattttttaaatggttgttttcttttttttttttaaaacaaaaaaaaaacttttttatattaaattttggacccaaaattttaatattaaataaaaacaattttcccaaaattttaaattcccttaaaaaaaaaaaaaattctttaaccctaaaatgttttatttaccaatattttgaaaaatataccccttaaatttttaattcaattaatttaaaccttttttttttaaaaattaacaataaaaatttccccaattaaaaaacccaatttttaaaaaaaactttttttattaattaaaacaaccctaaaaattccttttggtttacacaaaaaaatttaaatatccccacataaaaaaatttaaatttttcccccaaaaaccccctattttattataaaaaactcccaattttctaaatataaaaaaccaaaatatttttttcttttaaaataaaaaaaaaaatttttattttccccccaccccctttttttagacttt

SEQ ID NO: 84646 - DNA, 440 bp, Glycine max
cacacttttggtggggtgggtccaaataggaaactgaaaagtccacaaagtcctgggccgttccaaacaaactaaaatgtgaactaaactggctaggcactggacactggctatgaactaaaagcttatattggtgccaaaaattcagtgcacttagtttccactacaaatagccaaaccagatatatcatgagccccagcaacagagtgcagatcagtccaagaatatgacctccaaggaggatttcgtgcggttgaagaagacagttgaggcatcgatgacctattaatgactcgcggatgaagaggaagaagagggcatggaggagatattgaagtggagcttctaccctttcactacagcttagagtgagacaagatgttcctcctagacctatgtatgagggtcgctttgatattccaccaatatttgcgcaact

SEQ ID NO: 84647 - DNA, 149 bp, Glycine max
  unsure (1)..(149): unsure at all n locations
gcgtacgtaagcctggatcctctagagccggccgttttntttttttttttttttttttttttttggccaaaaacccccttgttttgattgggttgggttgggaaattaaattccccaccaggcgccaaccagaaccattttcctttggt

SEQ ID NO: 84648 - DNA, 70 bp, Glycine max
ggggggaaaaattaggggaaatttttgaatttttattaactttaaaggggaaataaatgcattttttttt

SEQ ID NO: 84649 - DNA, 170 bp, Glycine max
tttaaattggtttttaatatatattattcctttcaaagagacaatttacaaaaagagaagggtcccctccaaaaaactgtattttatatggcttacaaaacaagataatcaatgtcttattaactgattaaaatgttatttcatgcctaggccaccaacatggattattt

SEQ ID NO: 84650 - DNA, 484 bp, Glycine max
tttttttttttttttttttttttttttttttttttttgggtttttctcttgggggggccctttaatttctttcctttaccttcattttttccaaacccccgtatacaaccggaaataccgcacggggtaatgagggccaacgctttttccttagagaggggcttttaacgcacaggccaaaacaaaatacaaaccggaaccataaagaaaaagtcttggggtaaaaaatgaaaaaaaaaacccaccctaaatgaaaagggggaactcccgggtttccaattgggaaacctaccctacaaaattggttaatgaatcacccccccctctggaagaggaaaaacggttctacggccccaataaaattatccttcaaaccagggaaaaaggccatttttattttttcccccccggaatgtcttttctagaaacggaaaaagcggccaaatctaatttgcctaaaccggccaaaattatgaatgttgcc

SEQ ID NO: 84651 - DNA, 350 bp, Glycine max
  unsure (1)..(350): unsure at all n locations
ttttatcaattcttaatcaatttttaaatagaaattgagagttgaacagtagaagaaggtgtacangacactttttaattttaagaaaaaaaaactcttagataaacgaacagcccctaagctttacattttttttcaagaagttaaaaagaaggggggagggttgagcaaaattgatagggcttatataccaagaactcactttaattcatgaacagtgcccaatggcattttttctgccttataatttcccaaaacttgatcattaattaaacttactcatttgacagttttaagcggggaacaatattcattgattggcgttccataatcataaacttgcatgcata

SEQ ID NO: 84652 - DNA, 308 bp, Glycine max
  unsure (1)..(308): unsure at all n locations
ggggggaannaaaaaatttaaaaaaaatggaaaaaaaaaaggggaaaaaaaaaaaaaaggggaggatattttaaaaatattgggaaaaaataaaaaaaaagaaaggaaattgggggggttaaaattttttaaaaagggggaaatgttttttatttgaaaggtggtggtgggggaaaaagggttgttgggggttttggggtaaaaaatttaaggggtttaaaaaaaaaaaagtttattgttgagacggattttatgggggaagggggaataaaaaatggggggaaaccccccaaaaaaaaatgcccccc

SEQ ID NO: 84653 - DNA, 191 bp, Glycine max
aagggataacccaacatttcaaaacatcttgcaaatactatcataaacccaaccaataaaatacactatcctacaactactattgcaccactccagacaaaaagtcacccagcacactccatgttataattttcttaaacaagccagaaactattaacctacgagaaccccctatcggcaaacacacgatt

SEQ ID NO: 84654 - DNA, 272 bp, Glycine max
gtggaatatggatgtaaattattttattttttttatttaaaatgaaaataaaaaaattataaaaaaaaatttgttagggaaaaaaaaaaaaaaaaaaatttttaatttggatttttaaaatggggcaatattataaatataaaaatgtatgatgggaataaaaaacaaaaaaataagggggtggttttttaaatgtaaatattataagcattgtaagtttgctcccatttaactttagatattaccgaaaaaaagggttttccccccaattc

SEQ ID NO: 84655 - DNA, 411 bp, Glycine max
  unsure (1)..(411): unsure at all n locations
gcgtacgtaagcttgaatcctctagagccgcccccccttttttttttttttttttttnnnttttttttttttttttnnnatatttcttttggtggcttttnattgggggaaacttttttttctcattnnnnngaaaaaaacaaaaatccctctttttccaatactaaaatccataccccaccctcaaaccaaagccatcctaaaacaaaagcacattcccaccccataactactacaccaacccatgcttgggtttcaaaaccatcccccctataactcccaacccaaaactaatactttgcgccatacaaaaaaccaacccccttttctcatccacctacttcaacaattgcctgaatgcttaaaaacaccaaaaccctactgtttatttaaaagcgcaccaatccccaa

SEQ ID NO: 84656 - DNA, 150 bp, Glycine max
cccccttctggccggttcttgcaagcggaccctttttttgtttttttgcaaccctaccgaccccttggttcaccccggaatttccgacccggtccttgaaggcttccaagttttccttttgtaagtgattaaaactggcctataatggca

SEQ ID NO: 84657 - DNA, 174 bp, Glycine max
ttttttttttacaccactgataacagcttatttatttgtgtataagtgttacaaaaacagacctgtaccaaataaataaaaaatgaaggtcggggcagctatccggagacatacaagatgaaaatttgaataatcacttgcttggccaatttctcatgaaatgagatgaagcat

SEQ ID NO: 84658 - DNA, 262 bp, Glycine max
  unsure (1)..(262): unsure at all n locations
ctagagaggggcccgccctttttttttttttttttttttgttggccccnccccaaccagacaagacttcggggacacatcggaccagataaaggcgccttacaagatgcacaaatgccaagccttattgttcttctacggctactaacaactttacaactgtcattcattatcagctgccactcagtaatcatgctatacatttaccatggcaaagcatccaaatttactcgtccttgcgttcacccatgtcttaagaccac

SEQ ID NO: 84659 - DNA, 268 bp, Glycine max
  unsure (1)..(268): unsure at all n locations
cttcnttttttttttttttnnnnttttgcccaaaaaagggattcatggttaattggtaaatggaacacctgtacaggaaaattttcggcttatggaaaaggttaaacccttttacttccgatttgttcatttaacaaacaaccgttataaaaatttttaccgtaacttggacctccgatggctttggatggggtaggaggggtaacgaataaaaacagaaccccacttcattaataactctaaaacagtcccctgatgtcactactgt

SEQ ID NO: 84660 - DNA, 107 bp, Glycine max
  unsure (1)..(107): unsure at all n locations
caaaaaaaannnngtaaatttaaaaactttttatattaaaaaataaaaatnnggncgttttttcattaaatttactttaaaaaaaaaaaaaacnttgttggtttaaa

SEQ ID NO: 84661 - DNA, 362 bp, Glycine max
aaacagaacattttatctttgccaatgccaatatttgggaggtacaaaaaacgggggggaaaacaaggggacaagtctaatgatctcattcatcgatccctgggtcccccaaactatagtttgttataaaaggattatttctttacacataaccaaaatcccagacccttagatacattttgcatcacttgcaactttaaaaaacatcatgctggtcgaacaagccataattttatgcctgcccaactagcaaaacttttcatgcttgaactaaaactgcccgcgctggtccaattttacattcagaaagtgagcaccatatgcatatcccccatgggaactataggatccacccatggcct

SEQ ID NO: 84662 - DNA, 121 bp, Glycine max
  unsure (1)..(121): unsure at all n locations
ggtacaaatacccttatttttggttttttggggggacccgggggnngaccccggaacccccccccggggcccccccggggaacaaccccggaaaaagggggcggaaaaaggggggggaaaa

SEQ ID NO: 84663 - DNA, 372 bp, Glycine max
tttatgcacaaacaaatgccttctctctttatttctataggaattaatttgcaaggatcttacattacatacacgacaatctactgctatatatatctgggccatatttaaataataaatacctaaatcccaaatatgtaaatatctatgttccagaaattgtgagactctcaaagggatatcgacacaattatcagttatgtttagtccattcaagactctgtttaattccatgcccttgaatctatagctaggaataaggtagagtattatgagatttacacactcacacttttttatcaatcaatggaattagactccttttgatggtttgggggttgttgtaattcctctttcacgaaccatcacggg

SEQ ID NO: 84664 - DNA, 156 bp, Glycine max
  unsure (1)..(156): unsure at all n locations
gggggttggttccccaaccaaaatggataccaaaggaattggnnccaaaacccacccccccccaccaaaagggcgggttaaaaaattgcctattcatcccgaaaaattttccaccggggaaaatttggaaaaggggggaaaaggggaaaaggggga

SEQ ID NO: 84665 - DNA, 511 bp, Glycine max
tttgtttttttttttttttttctttttttttttttggtttttttttttttttttttttttttttttttttggggccccaaactttttattttttccccatttgggggcccccccttggattaaaaaaaaaaaaactttggggtggccaaaattatttggttaaaccaaaaaagaaccctttcccctttttaaaattccccgggggaggccctttgaacttccacaaatggcaaaagggcccttttgcttcaagacccatgggtttcattaaggattaactcgggtaaaaagcaacccccttttgtttttccttttttgaaacgagcattttttttggtgggggggtgcttcccccccccgggggcttttccaggttttgacttaaccaatgggctggcccctgggaaaaactaaactttttttttaaaaagggccctaccttttttttttcctcaggggatttttcccgggccccagggggcccgggggtttgttttttttttttttccac

SEQ ID NO: 84666 - DNA, 217 bp, Glycine max
ctggaatccttaaagggggcggccttttttttttttttttatgaaaccgggatatgccatcggtattgggcgccttggacccaaacatttaatttttattttttaccaccaaaaaccgacttttaaaaactggccaaactaaataaccgtacccggccaaaactaaaggggaaaattatcacgccagtataactggcttatgccaaccaaaaataaa

SEQ ID NO: 84667 - DNA, 499 bp, Glycine max
tttttttttttttttttttttttttttttttttttttggggtttttttttttttttttttttttttttttttttttttttttttttgggaaaaaaattatttttttaaaaaaaaaaaaaaaaatttttttttttattaaaaaaaaaattttttaatttaaaaaaaaaaaaaaagagcccaccctttaaaaaaaaaccccccccaaattttttgaaaaaaaaaaaaaaggggggggtaaaaaaaaaaaaccggggggttttataaaaaaaaaaagggggggcaaaccaaaaaaaaaaaagggggttttttttttttttgggaataaaaaaaaatttttttttttttatcaaaaaaaaaggggggtgcccccacccctcgggtccaccaaataaaacccccaaaaaaccctggagcccccccccttttaaaaaaaaaaggcaaaaaaaaaaagggggaaaaaaaatgcccctcctttccctggaaaaaataattctcccgg

SEQ ID NO: 84668 - DNA, 82 bp, Glycine max
gggataaaatcttctgccattaaaattgatatcgtttagtaacatgtaacaatcttttttcaactggggatacccatttttt

SEQ ID NO: 84669 - DNA, 200 bp, Glycine max
  unsure (1)..(200): unsure at all n locations
ttttttttttttnttnnttttttgggcgaaaagggcggttattccacttggccctcaaaggggcctttacgccgagaaacccccttctctttaagaaacaatttttgaataacccatttaactggaaaacagagctagaaaccttttttaatatactccctcagggcggacccacgaaaaaattccaactctttttaagg

SEQ ID NO: 84670 - DNA, 195 bp, Glycine max
  unsure (1)..(195): unsure at all n locations
tnnnttgcgaaccaaggtggcaatttatttaatattaatttgggtataaattaattaggggagccttgaaccccaattttaaaaggggtttcaatcctccctaaaacattatttttaaccaaagtccaaccaaatttggaggcgcggtaccccaattcctcaatttccccttatcacaaaggcaaatccggaggt

SEQ ID NO: 84671 - DNA, 329 bp, Glycine max
  unsure (1)..(329): unsure at all n locations
agggggggtttttttataaatttatattnttntnnnnnnnnnaaanntaaacaggcaccccaacatcccccaaaaattcccaccaacaaaccaaaacaaaacaaaattccccaaaaaaaaacctaaaaaaaacctttctatataattttcaaaccgaaacacggagaaaaaaaaatccccccccaaattccaaaaaaaaaccacaccaaaatccaaaagtccaaacaccgggggccaaaaaaaaaaactaacctaccctttttttttccccattaccccaccctttaaaaagggaaaaccccttttttcaacttttttaaataaaaccc

SEQ ID NO: 84672 - DNA, 389 bp, Glycine max
  unsure (1)..(389): unsure at all n locations
ttttnnnnnnnnnnnnaaaaccaaaaagcccctcccccccccctttgaaacaaaaggtaaaacccccccccccgttcccccccccgaaaccccccctttttcccaaaaacccccttgaaaaaacccccccccccctgtttccccccccccccaaaaacccaacctccccccccacggggaaaaccccccccccccaaacctttggggggggggaacccaaatacccccccccccccccccccccctttttgaaacccccaaattttgtggaaattttttaccccccccccccccccttggcaaagtgacaccccacccccaaatctcttttcctttccccccccccccgcggggtcccccccccgtaaatccccccccccccccccccc

SEQ ID NO: 84673 - DNA, 103 bp, Glycine max
  unsure (1)..(103): unsure at all n locations
tnnnnnnnnnnttagaagcaaaaaactgaaacttcttattattgatattagaaattaccatagtcatgttcaacattgaagcatgaatatgtacagaacaatg

SEQ ID NO: 84674 - DNA, 134 bp, Glycine max
ggggggggggacggtagggtgtgtaggtaggcttcgcattctgtagagcggccgcccggccttattttttttttttgttttcaaaagctccggcaagtgtagaacaaatatacgtgcattatttatatcatatc

SEQ ID NO: 84675 - DNA, 62 bp, Glycine max
tggatcctctagagcggggggttttttttttttttttttttttttttttttggtaccaaaaa

SEQ ID NO: 84676 - DNA, 145 bp, Glycine max
gggggaaaacccaaaggctggatataacaatataccacactctaatcaggtgggtacacatatgacactgagaagttcacaaaaaactgtgccgttacaaacaaactcaaatgtgaactaaactcgctaggcactggacactggc

SEQ ID NO: 84677 - DNA, 179 bp, Glycine max
ggaaggttaccggggtgattagggttaaaaggttaaaccgtggatggcctattttggggtccttatccacggtggaaatttcaacagacctgggcacattttaaacttaagaaccttaaaaaaaagggttaaggatccattttttatttccaggtccctggttggccaataaagccaaa

SEQ ID NO: 84678 - DNA, 207 bp, Glycine max
  unsure (1)..(207): unsure at all n locations
ttnnnttttaatataaaaaaacacccgcaaaatttgcgcccgcgatttttatggaacttttactatcctatgggcaaccttatacaatacctacacaagaatattaaaatcttttaaaaaataacaataaaactttcaccaccctaacagttgcaactataaattccccccccaaaaaaactgttatctgtacagaaccattttaac

SEQ ID NO: 84679 - DNA, 511 bp, Glycine max
  unsure (1)..(511): unsure at all n locations
tttttttttttttttttttttttttttttttttttttttgggggttttttttttttttttgggggaaaatttttttttaaatttttttttaaatttaaaaaaaaannanaataattttttttttttaataattttttttttttttttttttnnaaaaaaaaaaaaaaaatttccaaaaccctttaaaaaaaaaaaaattgaaaaaaaaaaaagggggcttaaaaaaaaattttttaaaaaaaaaaaaannngatgtttttcaaaaaaaaaaaaaaaaaatttaaaaaaaaaccccgggaaaagagaaaataaaaaaaatttttggaaaaaaagaaatttttttttttttttaaccttaaaaaaaaaaaaaaaaaatttttttaaaaaaaagnnaaaaaaaaaattctcccccaaaaaaaaaatttttgttgcccccccccaaaaaaaaaaaaaaaaaaaaaatttttttaaaaaacttcctaaaaaaaattttttttttttttattttagc

SEQ ID NO: 84680 - DNA, 295 bp, Glycine max
  unsure (1)..(295): unsure at all n locations
tttnntttttttttttanccacanannaaccnaagcaacagcaagtttatttgaaagcaaaccaacccaccccannccgggcggggcagagaaccaaaagagagagcggcagagaatcgccgcttagcagcacatagcatctacattattcctcaaaataacatgtttgtcagtcccaaagagcagaccaacaccgaatggcccgcaataatgatattcatatatagagaatcagggggacatgggtgatccaactttgtaacaaaataaaacattacatttcgagaaacaccct

SEQ ID NO: 84681 - DNA, 263 bp, Glycine max
tttttaacttaaaagacaaatacacgcaatattttataggagaaggccaactttgcaattgaagactcccaaaaggctaactctaaaagtgcgggtcagtatcaattattgtgtatggtaatggaatcaaactttgatatcaacagctggacctccaataattaaacgctccttttatcctgtgaacgaacccttccaataatctttaggaaaaatttacaatattcatttttattattagaaatcacccttcctcgaaaata

SEQ ID NO: 84682 - DNA, 390 bp, Glycine max
cttaagaaccccaaaaatcaaaagggccggcaaacaaaatgggcaaaccaaccaaaaaggggaggctattctacaactatggccccaccccaaaaaaaacccacatcaattgagggggtcaaaatgttctaaaaaggggcaaatgccttttcttggaacgccgccgctggggccacaaggggtggtgcggccttgggggtcaacacctcaaggggtttacccaaaaccaagtccattgttgggccggatcttatgcgggaggccggactaaccaccgggggcaacccccccgagaaaaaaaggccccccccttaaaaggggggcggggcccataaatatattggtgccccccgcaaattaatgaaacccaccaaacaataaaaccccccc

SEQ ID NO: 84683 - DNA, 281 bp, Glycine max
caaagtgaaattatatctcaaccatatcctgaagcaaagaatataatggtgaccggagaaaaacaaagatgttgaaatatccatgtgacaagataattaccaaaacgaacgttttaaaaataaattaaacgcctcattggcacggtcttcaacatacaaatccattcttcagggaagcacatactaactttgtgccaaaactaaaaaacacgattcgcatctgaaaacactataacgcttaacctaataaacgtcaatagactatactttgacaaaaccat

SEQ ID NO: 84684 - DNA, 187 bp, Glycine max
cctcaacctttgaaacaatgtgtttgggcccgagaatggaaatagggggtaaaaatttaagcggtttattcaaatttaaggttattggggggagggagaaatccacatgggaccctcacaacttttttattttttttctccccctcaaacaaaaacaagatttgagggtaatgcggttttttttttt

SEQ ID NO: 84685 - DNA, 368 bp, Glycine max
aggtgaaaattttttgtttttgagccgggggcaaaaatttaatttttggttttggatttaaaataaaagaattgaaaaaaaaaaattttgggtttaaaaaaaaaaaaaaaaaattttttatagcccattcgataaccccccacgccgaaaaaaaaaaattttgtgaaggggcttccccccaaaaaaatgaagagggagaatttttttcctaaacccccccgcccaagtgtttttcctccctcccccaaccaactatttcaaaaaaaaaaaggtttgtccccaattccttaacctcccccccaaaagttcttaccccccctcccaaaaattctcgaaaatccacagggggggcccccccctttttcaaa

SEQ ID NO: 84686 - DNA, 346 bp, Glycine max
  unsure (1)..(346): unsure at all n locations
attcnaaaaatcatttgggggctttttttacaaataaacaaacccttttcattgcaggaaacaaaccaaaataccctctttttcctttaatttatgccataccccacctctaaaccaaactccatgctaaaacaaaaggactttcccaccccaaaactactacaccatcccagagtgngnancaagaccaaccccccttttgctccctccaccacactaattcttggcgactaacaaaaaaccaacccccgtttttacccctgactccaccaattcctttattgctaaataacaccaaaacccttatcctcatccaccactgcaccaaaccccaaatcttaaaaag

SEQ ID NO: 84687 - DNA, 395 bp, Glycine max
  unsure (1)..(395): unsure at all n locations
ttttaaaaaaaaaaaaanaaaaggggccgctttttttntaaaaaaaacccccacccccnccccttttttaatactatatatataaaaaaaaaaaaatttattaaaaaaccaaaataaaaaaaattttatttttaaaaaaaaaaaaaaaaaactttgcccaaaaaaaaaaaaaattcccagcttaaaaaaagcaataaaaaaaaaaactcaaggccgaacacctaaaaaaaaaagagtgggcccaatctaaacctttgaaaaaaaaaaaaaaattttaaaaaaaaaaattttttaataataaattgaaaaaaaaaaaaaaacgaattattttcttggaaaaaaaaaacaaaacatcctttaatttttaaaaaaaaaaacttatgatcccatctccc

SEQ ID NO: 84688 - DNA, 191 bp, Glycine max
acaccactgataacagcttatttatttctgtataagtgttacaaaaacagacctgtaccaaataaataaaaaaagaagggcggggcagctattccgagaaataccagaatgaaaattgaataaatcacttgcttggccaaattctccatgaaattgagatgaagcataaaaaaaatcgatgaaactagtag

SEQ ID NO: 84689 - DNA, 204 bp, Glycine max
ggcaaaaaagggaatacatgtttaattattaaaaggaacaccttacagtaaaaatgtttggattagggaaaagattaaacccaattacttcccattgatggctttacaagacacccggtataaaaaaatgttcgtaacaatgaaatccgggtgcgtattattggggaaaaagggttaagaataaaaacagggacccccttttat

SEQ ID NO: 84690 - DNA, 320 bp, Glycine max
gggggcctgcctggtgctaaatttattatttttttcataacttccccgggataaatttgaaggattaaaaggtgggcgcttcccctgccggtttgtttactaaaaaaatgtgggtcccctggggggagggaaatcttatattaaaacctctaccctttaggggggattggcccaaacccacttacaccgaccatttaagggtgggacccgcggggaccacatttattgggccccggcttacaagttttattatttggatttttgtttccgccataacgttggttttggctttccatggggggaatttttgattggggggg

SEQ ID NO: 84691 - DNA, 252 bp, Glycine max
tttttttttttttttaaaagaacaagcaaactggtatgctattcttataggagaaggggaacacaaattacattggatcattcccatatgaaaaaaaagaaaaaaaaaacactattttattctacaaggcaaaaccatcctcgggtatttcactacgttacacttttttctatgccaaaacttgtgtggcataatccttgcctccttggctttggtgccctaaaccacaaaactaatggaagggtggggaag

SEQ ID NO: 84692 - DNA, 367 bp, Glycine max
  unsure (1)..(367): unsure at all n locations
ttttccttttttttttaaattatcttttttttttttttcctcttctcataatagaaggcggggtcaaggggcacaggatcatccccgcccgaaataaaagaaaaataaaagactgtgtttttttcggggcaaagccatggaaaattttacaataaatttcgctggccaaaaaccaaaagttgtatggtataaccctaaatacttggcttaaaaaccatagaccccccaactaatgaaaggccggcccctttggatactaacctacccacaannnnaaagcgaaacaggcggccattggcgaagacaaccgatcctaaataaagaccccccccccccccggcgttgtaccgctgcctgggggtttagg

SEQ ID NO: 84693 - DNA, 141 bp, Glycine max
aaacagaacattttatctttgccaatgccaatagtttcaaagttacttaaaacatgtaagaaaacagggggtagggcaaacgatttcatttatggagttttgggtccccccaaaaattgtttgttagaaaaggattatttt

SEQ ID NO: 84694 - DNA, 66 bp, Glycine max
  unsure (1)..(66): unsure at all n locations
cccacgcgtccgaaaaaaaaaaaaaaaaaaaaaaaaaaaaaaaaaaaaanaaaaaaaaagggggaa

SEQ ID NO: 84695 - DNA, 203 bp, Glycine max
gggtcattgtgtacataatgcttcctttcacagacgtttctccctcccccaacgttcatgctttttttctccccttttcttctcttacctctctcctgaccttccttcttcctttcatcttcttttttttccctgccactccccctcccctccaccttcttccttctcctcccttccttcttcaccctgcgcagccctccgcc

SEQ ID NO: 84696 - DNA, 126 bp, Glycine max
gccacacgtacgggtataatataaattgcacccttttctgcgactctctctgtgacacagaccgcacactgtgtcacacacagtgtgcagcagcagcagcaggagcagcagctggagatgaagatg

SEQ ID NO: 84697 - DNA, 216 bp, Glycine max
  unsure (1)..(216): unsure at all n locations
nnanaaaaaaaaaaanaaaaaaaaaaaatttttaaaaaaaaaaaaaaaaaaagacaaagggaggaaaaaaataaaaaatgaagtaaaaattggtgcgtcaggggcggccgttctaaagtgtaccaagctttcgtgccccttcatgcgaaatcaaaaaatctttcataatggcaaataaatgtaatttcctggccaacggttttaaaaagaaaaacc

SEQ ID NO: 84698 - DNA, 150 bp, Glycine max
tattattttcaaatggctattttcacataaaaacccccagtggggcatctttgtcgggggactcatttctttggatatgtgtgtgtgatagaccatcctgatcgaccacatatttgcctcacaactcaaagtgactcctgtccaaacaat

SEQ ID NO: 84699 - DNA, 117 bp, Glycine max
  unsure (1)..(117): unsure at all n locations
cgaaggcacaatttgtcagtggaagaacttttaaatatgacataattggtgctggttgacattcttctgaggaactntctgaagaaaagatcagggaaaaagtaagcaggttgatgc

SEQ ID NO: 84700 - DNA, 108 bp, Glycine max
atgattttcgtgatgataccacctcacgatgctcttctcaagggacatattccaacttgaattactattctgtggatgatcatcatcaagagtacaacgtgccatctt

SEQ ID NO: 84701 - DNA, 259 bp, Glycine max
aaaaaaaaaaaaaaaaaaaaaaaaaaaaaaaaaaaaaaaaaaaaaaaaaaaaaaaagggggggcggaaaaaaaaaaacaaaacaaacaaacacacggcgcaaaccggacgcccacccaaaaggggccaccaaaaccaacccacggacgcaacgagaaacacccgacaaaaggggaaaaacccaaaaaacacccgaccgaagacaaaaaccgcacagccagcaaaaacccgcgcgcgacccaacaaaaaggcccggacca

SEQ ID NO: 84702 - DNA, 190 bp, Glycine max
caggaatgaattggtatgcttagaacaatttcaggtttttatttattgatgaacaaggagatattgaattactataagaaggctatacgatatgattctcagctggtggaaacttacactattagatgtaagatttaagggatatgaatttggtgtaggattgaagcgtgtagattgacatagaggccta

SEQ ID NO: 84703 - DNA, 60 bp, Glycine max
tcgtaccggtgggaaaaaaacaaaaaaggggtccggttgcaaaaagacaacagaaggggg

SEQ ID NO: 84704 - DNA, 60 bp, Glycine max
tccgattagtttagggaaaacataaatttttttccgattgccttgggaaattaccagggg

SEQ ID NO: 84705 - DNA, 366 bp, Glycine max
ataataaaaaaaaagcgtgaatttttaaaaagcatagggccccttaaaaaaatatttttttttatttttattttataaaccccacaaaaaaaaattttttataaaaaaaaattttcttttaaaaactcctttcccccaaacaaaaaaaaaaaaaggttcttttttcaaccccctccccatattaaaccattttaaaatattctcccatttttaaaacaaaagtctcccccatttttccttccccatatttccccccccgtaacctatttttttctttataaataacataattttctccactccacctaaaatttttttattaaaaaaaaaccctctttttttctttaaaaaatattcccccctaaa

SEQ ID NO: 84706 - DNA, 346 bp, Glycine max
cccacaaatataataataatactattatttactgaacagaaattcaaatgtaacagcaagaaaaaaagcaattaaaaaaaaaaaaaaggtagatgtacaacgaacgtgtgaaaagaaaaggtaacgagaaaggagaggcagacccagaaggtttcagtcatcggaatcgtcgccgccgaagatggagaggcggcggttgaacaagaggaagagaatgaggatgaggaagagtgcgacgccgaagggggagcctcttaggcggtggatggtgtcgggttcgccggtggagaagagggcggagacgaaggagccccgatcggaggagaggaactgaatggtgagaagg

SEQ ID NO: 84707 - DNA, 187 bp, Glycine max
attaacaaaaatagaagttggaacatcaacacaatggggaattttttgaccacatagtcccatacaagaataacattaaactttttggggattaaaccttatttcatacaaactttatggggctcttttttaacaaagtatatcaccacggtttaaaacaattaaatgattaaaaacttttttaaac

SEQ ID NO: 84708 - DNA, 233 bp, Glycine max
gggctctaaccacagattccactaaaaacaacggccggtgttttccgatttttacaaggtaaattcaaagctggcaacgtcttttaataattcaaaattatagttggaggctaagaacacattctttctcatgcactttctgtgattgattaacacttattgagcatcacaaaattatcagagaaactgctccaataagaactgagccccacatcatctgtgagtctaaataa

SEQ ID NO: 84709 - DNA, 545 bp, Glycine max
atgcattacttgcaaatttcatcaaaatttcaaccagtacaaaaaatgagagttcaattaacacccgcattctcggatacaaaaggatgggaacgaagttagcaaccctccaaagtaacattcacagaatcagactcagtgatgcatattctaatttaggagctctactctgcaaggcttgacttgacatgggccagtgcatgtttcagtccttgaatttgaagcagttacacaacctggcccagaatccacgagatgctactggtgcttgttgctcaagtggatcaacaaagtttgctacttcacctaattcctcaaatgaatccaccaggttttgaagccttgctacaaattcaataagaagcgacgtaaatgttgtgagagatagcgaactagcactttcgtaagtttttgattcttgaccctctttggctacgggatttgatttgttgtaaatatgagcaggccaagatatctgtttcctaaacatgttttgagaggcatcggttgcagtctcagcagggctatcacctaggcttacattt

SEQ ID NO: 84710 - DNA, 427 bp, Glycine max
  unsure (1)..(427): unsure at all n locations
aannnaatnnntntnnnaacccttggggggatttttgaaaagggggacggaatttttgacccgtacattcttgccttaaacctttacgaaaaccaactttcctaataataggggtaataaagcttttcctaaactattttctaaaatttcttctttaaaattttaccgctaacataacccaaaacataaaatccaaaacttgaattctaaaaaaattgtttccaaaaataaactaacccacttaattgcggaaactaaattgaaatcttttgtgtgaaaaaataaatgcaacctcaaataaattatgcgcgccccccccccgattaggcactttgaaaatttttccccccccaatttttattttaacaacaaaacgggcaaaaaatattttttcttatacacctccacctttttttttttttttaaa

SEQ ID NO: 84711 - DNA, 203 bp, Glycine max
ggggtagaataagggttggtttttggctccttcgcagactttgtatttgtataagtattttgttttcaaggagggtcgattaatttattttcctatgagaatgagaattggatatttgagggacctaagagagaaagcgcgtgtgatccccctatcactggcacagttggccacactgcgtttttagtgccgaaagatatatg

SEQ ID NO: 84712 - DNA, 168 bp, Glycine max
ataaaaataaccatttaaaattttattccatatttaattctacatattttaaaattatccaaccaacattctaaaatcttaaaaactcatatttatcaaaaataaccaccaagcaccatctattgcaacattttttgctttccacatttcaattcaaataaaacccca

SEQ ID NO: 84713 - DNA, 562 bp, Glycine max
  unsure (1)..(562): unsure at all n locations
tgttttnanncaagtttcaaacaacaaaagagattttattaattggggtttttataaaaaaaatcaaaccctacacaatcaattgtgcaaattcactaatttatcttttaaaaagtttattttcattttttatgtttccaaaaaacaaaaaatattaaaccaaacgaaaacttttattaccatcccacatccttcttttacttctccatattcctaaatgatctaatttcataccaatatcagttcaaattttattgtaaaaccttaataaaacaaatcaacttattaatctttaaattaaaacccctaacccttgactaccaaaattcaaaactccattaaccaaaacccttaaaattaaaataacaaccaaattcaccctaaaccctataattcaaaactacttaacacacccggtcacattttacccaaatttccaaaacccaccaaccccaataccaaaaaaaaattgaaactttccccactcaaacaattttaacaaaaaacccattattccaaaatattactaaatattgttaaaaaactttttttttttattttt

SEQ ID NO: 84714 - DNA, 56 bp, Glycine max
aattaatttttagaaataaccaaccatttataaaaaaggggaggcgtaaataaaaa

SEQ ID NO: 84715 - DNA, 483 bp, Glycine max
gagtggatccaatatgcaaccattaaaatagatgtagtgaattttgatgtgtatattaataaataaaaagataaataatttatttttttaatttagttctttatttttttaaaagtttattttaattttttatgtttgaaaaagacaaaaaatacaaaaccaaatgtaactttttattcccttcgtcttcctcctcttcttctccttcttcctccctgatcttcttccatcccaatttcgtctgaaattttattgtgaaacctcatgaaaccaaatcaacttatcatgcttcatctcaattcccctcaccaggtgacaccaaagttgcaaaactccatcaacccaaaaccataaaaattaaaataaaacaacaaaattcaccgtaaaaccccataaatccaaagcagcttaacacacccggtcacatgataccaaagctccagaacccaccaacccaaaaccaaaaaagattgaaacttgcac

SEQ ID NO: 84716 - DNA, 246 bp, Glycine max
aatagaccatatatcacaaataaatccccaaataaacgagcacatttataaaatctgaaaaacacatactagcttcaaatcgttaaaacatcccaatagctaatcacttttttcaagagatatcaacgaatatacccaatgctcacctattcatcaatcttcaaatagatcccaactttcagcaaaatgggatcaaaccaattgttacaaatcatcaacacattttttttacctattctttcttca

SEQ ID NO: 84717 - DNA, 239 bp, Glycine max
ccaaacaggacagaataaatgcaaggcaaaacatgcgttttttgataacctgacaaaggtaatctctacacggaccctaaaaacacccaacgagtcatataggggttcaaagaggtacacagaatgacatccagaaacctaaatatccgccgtgtaatatcacagggctcacaatatagactagaactgtcatacataaaatatctcaggcaataatctctggaaagggtatggaagat

SEQ ID NO: 84718 - DNA, 583 bp, Glycine max
  unsure (1)..(583): unsure at all n locations
gccgccttttttttttttttttttttttccgaattcacaaattctaaaccaacccacctcaggattccccctggcttaatctgtgcttaacgcataataaatattcatggagtaccgaaccccatatctaaggagtttctacaagaaaaagcttgacacattcccaatgctaaactatggtacaatcttcagctagatcccaactgagagcagtctgggatcaaaccaatgttaacaaagcatcaacacattttttttgcctattctttcttcacgcagtataatccaacatcaggctgacttgaaatcaccaaaaccaaacattgtgaatttagctccatacagatagctatacaagaagcttggagaccacgatataaattatgggactccatttgctacatgttgaaggcaacccgcaatcttacatcctgtcagcttaagatcaagaaaccaaagtggtgtgtacatcactctacaacccctgcctgcatctccaacactctgttcganaccaccacttaccaacaagataagcgattagactcactttagccatgaattttttgaacagcaaagtgcg

SEQ ID NO: 84719 - DNA, 285 bp, Glycine max
aatttattgttactcggaaattttctaaacacccttgtacaccactagattcaaaaaaaaaataaacataacggtttatcttagcctttttaggatatttactaggcctcggattgagactaaagatcttattcaagactttactttttcttagacaacaaaacaaggttaatgtttcgaaacacaccaacattttcaatggtcacaccagcaagcaattttctaaacttcttatctttccataaattcaataacacatttctcgaaataccctcttttcttttt

SEQ ID NO: 84720 - DNA, 370 bp, Glycine max
  unsure (1)..(370): unsure at all n locations
tcccccagagcggccgctttttttttttatttntnttttttttnnccgctttatgtcaacaaaaaggacaaatgcaacctgggatttttcatccaccgtataacctccaatttagtaccaccattattcatgctacattacactttcattttccccaaaaattcaaaagaaaaatacatatcaaacatcaacaaataaaccaataataagcctcccaaaattccaaaagacttggaaaccaagttaacaaattaagccaaaatatattttttaagaccctaatgaagattcaaattttaatgttaagagaggtaggaagcacttggaaacataatatttatatatatatatatataaacctcttttgaaa

SEQ ID NO: 84721 - DNA, 172 bp, Glycine max
aaatatggttaaatttaaaaataattttgaagtttttattttaaaaatggagtaaatgaaatttgaatatgttaaaggtataatagaattttatatagaaaaaatgtaaattttgaatttttaaaagttggttaaaagccattcaagttgtaaaactatatatagcaaatta

SEQ ID NO: 84722 - DNA, 201 bp, Glycine max
atccacccctgggcccaccccccaaaacccgcccgaccctgaaacccccaaacttccccaaaagggaggcaaataaaactggcctacaaaggccaaaccttttccctgggaaaaaaaattccccccaaaaaatcccccaaacaaacgggccgtgagcaaaaagtcgaaaacccgggggccccaaaaagcgacctaactcac

SEQ ID NO: 84723 - DNA, 372 bp, Glycine max
  unsure (1)..(372): unsure at all n locations
aaaantnaaaaaaatgaggggattttaaaattgaaaaattttaaatttttaaattaagtttgggaaaagtgggaaagtttaaatgtttaagttaaaaaaaaaaaaagggatttagggtttttaataatttaatactaatattagtatgtaacataaaaacataaaaagacgcaaaggcgaaactcccaccttcatacttgaattgatgtggtataagggcacacattccccctttgcggatttttcgtccacatattcacaaatttaattcctggcctgaaaggctacaagccctcttaccctggctcccttactaaataactaattaacttttttacttcttccacaccccaacaatttgactttttaacc

SEQ ID NO: 84724 - DNA, 456 bp, Glycine max
aaaaaaaaaaaaaaaaaaaaaaaaaaaaaaaaaaaaaaaaaaaaaaaaaaaagaggaaattttaaaaaaaaaaaaaaaaaaaaaaaaaaaaaaaaaaaaaaaaaaaaaaaaaaaaaaaaaaaaaaaaaatggggatgcaaaattaaaaagttaataatataattaaataaaaaaaaaaaaatttaaaataaaaataattaaaaaaaaaaaaaaataatttttttaaatttatataaaataaatataaattttttaaatataaaaatatatagatttaaaatataaatttaaaaattaaaaagtattttttatatgaaaaatataaaatattttataaaataattaatttataaaatttttaatttttttatattaaaatataaataataaatttttagaaattataaaaaaaatttatatatttttaaataaaaatagagatattatatttaatat

SEQ ID NO: 84725 - DNA, 137 bp, Glycine max
gtaatgattgctcttctttattataatttattattgatgaagggggacacttatatatcataagtctcacgattatatgggaaaaggaaagaagaatggaaagactggatacattgtaaggcaccttaagttgagca

SEQ ID NO: 84726 - DNA, 243 bp, Glycine max
aaaacacattaaatatttttttataaggggggtttttaaaaactgtaataccgcacttgttggaaattgcaaccaccaaagctccaaaaaacggtccaaccttttaaaattccttcaaaaaacaagtcacctcatattcttttggtgttaacaaatatttttattttttcatgtaaaaaataaaccttaaattgtccaaaagttaaggtttacttacttggtcgtcccaagctttgtcgtttt

SEQ ID NO: 84727 - DNA, 340 bp, Glycine max
aaaaaaaaaattttacttttcccggtttttttttttgaatattttttcccccctaaaatggtttaattcaatcaagggaaagttttttttttcccctttttttttcttttaagaaaaaaaattttttgggaaaaaaaagtgggtttaatggttttttggaacaaaaaatttgttttttgcccaatttttaaattttttatccggggggggtttttttaaaaacccttttgggaattggcatttaactaaattttttaaaattaaaaaaatttttaaaataaataaacttttgggttgaaaaaggggttttttccccgggccaaaaattttccacggcccc

SEQ ID NO: 84728 - DNA, 245 bp, Glycine max
gaagctaaaattattttttaaagattataaacaaacatttctacgggttgtttttaaaaaagggtaagcccctacaacttgcacatatgtttcaccatctttacataaaatccttgtttcatgttcactttctcaacaaagagaaacaacaaaatgaatcacacaagggtaaaattaagagactttttcttttctcttctctcaagcaacaaactcacaattaaccctgtgatagtatatccaaa

SEQ ID NO: 84729 - DNA, 265 bp, Glycine max
tgagttacagcgacttgtcactgcattcctgaagatgaaaataaggggtttttaaccttaatgtactggcaaacttcagacggacaaaagccctaaagatgcagagttctaaagttttcagcttaaaacagcattaccgcaatacaataactacaccacctatgcacgggcaaaaaatctttgacatcttgaatgtgtatcaagggtatcaagacattccattgaaatatctcgtgtatatagtaggccatattttcagtttctt

SEQ ID NO: 84730 - DNA, 215 bp, Glycine max
aaattaaaaatgatggtgtgaataatatcagctataaaacacatggtgcttttatgcaatgttggaacatcttatacatcaactattacaattattctccggtgacacgtttgtgtctgttctacacattactcgcggcggaaattaatatcaccaattgacacaacagtgcttgttttatgatcccagcaacttcttccaatttgcatattcta

SEQ ID NO: 84731 - DNA, 189 bp, Glycine max
ttacaaagtgattcatatctaaaaccaatgtgaaacgacctacaaggggccttttcaaacggttttctccaataaacctaaccaaagccaccattttctaaggggtgggaagttttctttaataactgcaacattcctgaaattattataccatgaatgcaagtgagggaatttcctaattttcaagac

SEQ ID NO: 84732 - DNA, 141 bp, Glycine max
gaccaaacttccttgttttcataccaattataaaggactacacaagggcaattttaaacctttggaacattggttcattaaacaacaccttcttaacaatttcatttgtattaaattaaacaagattaaatatctcacact

SEQ ID NO: 84733 - DNA, 251 bp, Glycine max
  unsure (1)..(251): unsure at all n locations
tnnnntnntnnnntttttttttgggcacattcaatacaaaacggtcgtttttagccttaaattttggggacttcggatacacaacatgcaggttcattaaaaattgttttaacatgtaagactaataaattttaattccttgaaaaacatggcataaactttttttttttttgggcacaattcctcgttttttacattggcttgaaaaatttggccgtaattttaccccaaatattggttccaaccaagtg

SEQ ID NO: 84734 - DNA, 358 bp, Glycine max
ggggtcaaggaatccttctttattcatgtcaatcttagatccatctgtgacaccttttggtaatttagagttcccttctccaagaagactgaacctctcaacatcacccatgaccattgcagctctgacctcaccaggtaaagcttgacttacagatggagaccaaagggaatgtatacagcgaagtagctggaaaataagaacatgctacacttattaatacaaagtacttagagagcaagattacaagcacaatgatccttttgttgaaaatactacaggaaacataacatggccagtctcttaatgccagtatacatactttcaagagaggagtcaccatccatgatatgcgaga

SEQ ID NO: 84735 - DNA, 307 bp, Glycine max
aaaaagagataaattattatttaatgggggtttttaaaaaaataaatgccccccacaaaacccaaatataaaaaccctaaatacacccaacttaccaaccagcttacataaaacgcaaaaaaaaaaccaccataaactttaaataaaaaaatatcctcctaattcacatatataaaatattaacatcttcacaaaaaaaataaaaaattaatttataaaaatttaaatatcttcaaaaaatccactaaatttcccaaaaaaaaatacaataaaatccatacaaataaacatcttaaatctccctcaa

SEQ ID NO: 84736 - DNA, 154 bp, Glycine max
  unsure (1)..(154): unsure at all n locations
ggttttaannnttnttaatttttttttannaanaaaattttaggggaaaatttttaaaaagggtgggacccataattgattgattgaaaaggttttaatttaaagcaaagagcagccagtattattatttttttgaaaaaaacatatttttttt

SEQ ID NO: 84737 - DNA, 145 bp, Glycine max
acactattcatcaattacttctggaatctttattaataatccaacttattttgcctgattacgattctttctctagatggaagctatatctaactcatgcgtatttctactttttcttctattggctgcatttctcattcaatca

SEQ ID NO: 84738 - DNA, 222 bp, Glycine max
gaaaaaaaaaaaaaaaaaaaagtggtgaaaaatttaattattaataaataaagataaaataattattgaaataaaaaaaaattttattatatttaaaaaaaaaattaaaaaaaaaaaatattattatattaaaaaaaataatagatgaaaaaaaaattattttattttataatataatattatatgatgatataaaaattataaattattattttaataata

SEQ ID NO: 84739 - DNA, 360 bp, Glycine max
gaagctttgttagtgtcccaggagagaaagagaaagagaaagcagagagtgatgataccagagagacaacaaggtggaggtgcgccacacgggatcctcctggctctggtggtggcaatcgtgctcatagtgcccttcttccttggggatcagggccaggccataacgcatgcattatctgacctgctaagcccattcggcctactccttctgcccatccttctccttctcaccattcagttcctctcctccgatcggggctccttcgtctccgccctcttctccaccggcgaacccgacaccatccaccgcctcagcggctccccctttggcgtcgcactcttcctcatcctcattctc

SEQ ID NO: 84740 - DNA, 250 bp, Glycine max
  unsure (1)..(250): unsure at all n locations
cccacgcgtccgaaaaaaaaaaaaaaaaaattaatntaaaaaaaaaaaaaaaaaaaaaaaggggggaattttatatggtgtgcgatttaataaaaaaataacttcaattctcttgcattctattttatttaatgttctattgtattacctaacccaattttaattacgcttccttctacaaaaacccttctttttaaccccttaatttacccaccttacttccctttttttacatccatttttattaaaa

SEQ ID NO: 84741 - DNA, 264 bp, Glycine max
aggcgttagtacactacagaaagacatcctaagaaaagcaagctaactacagctggtggaaccaatacgtccaatgtggcttcttctgctactgctgactaccaaaccaacgcaacaccattgcgatctgaatatactatctgctcaaataatttggtaaacacataatttttaccacttgatactaataattcgagaaagccttaaaatacgatttttcggatatcatctcattccatggtttctcaaaagaatgaccccaaa

SEQ ID NO: 84742 - DNA, 176 bp, Glycine max
aaaaaaaaaaaaaaaaaaaaaaaaaaattttttaaaaaaaaaaaaaaaaaaaaaaaagggagaagttttttaaaaaatataaaaaaaaatatgggcgccctctctaaatgttccaatctttcttactcttccatgcaacttcttagcttttttattttgcaacctaaattcaatta

SEQ ID NO: 84743 - DNA, 430 bp, Glycine max
cccacgcgtgcgaatacgcataggaagtgtgaaagatagagagcccgctatataccctgtgatgggcttttacaagggcctctatgaaagccaatatagttcataatagattggaagacgtagtgtgagacttaatattgctaagaattatggcttcgataaaagcctctatgaaagcctaactgctcatgaatagatgaatgtatgtgagactcaaaatctgtggggaaaattgactactgggtggactactcattgagctagacatcgagctatatcgatgttgattaagattgaggctcataatgaggcatataagatgtcatccatgaaaactccatgtggaatcctacgttggccttgacatatgctatatctatgacttaatttcttgcctctgtctatttctcaaaaaaaaaaaaaagggcgg

SEQ ID NO: 84744 - DNA, 55 bp, Glycine max
ggccagtaaaggcgtaaacataaagtatgagatcagagagaacagaaatggttac

SEQ ID NO: 84745 - DNA, 148 bp, Glycine max
tagattttcttgatacaacaaactttacacatacccatggtctgtctttccatcagaggatatgcaataaccctcatcaaaatccaaacccttatcttcattttaaggattttacacaattttttccaaaaacattccaatcccttta

SEQ ID NO: 84746 - DNA, 153 bp, Glycine max
aaaaaaataaaaaaatttaaaaaaaaacttttaaaataaaaacaaaaaaaaaaattaaaagtagaatttttaaaaaatgggggctctctcttctccttttctctttttccatactctcccacccgtatattcaaccttttaatttttttatat

SEQ ID NO: 84747 - DNA, 341 bp, Glycine max
agggatcctcgcatttgtgattcagcacgtacagagaaccgtatggtgcatatcacagaagaagattatcccagaccactgcctaaccctatacattgtcctttctgcaatcattctagcgcacttgatgattgaagacttaaagatatagacatggctaatggagtgacagtggagggaaactataagcatgtataaaaagagtaaggtacatatatatgggaacagatatgaaatcaaaatgtataaatgtctctctctaaggattgtaataaacacatatgattaggacttgacataaaatgatcagatggtgactctatatatttatttgtacctct

SEQ ID NO: 84748 - DNA, 453 bp, Glycine max
  unsure (1)..(453): unsure at all n locations
ggaagccacaatcaagagcttgggcacagaataaacatgattttgaaaagaagaaaaaggatgctgctgatgatgatattgatgattgggaacttccacatggtattgctgatacaatgggatgtttgcaaagggagggtcatttgcttcagggagagcataatcttttaggcgaagcatttcttgttatgtcttcttctgctgggtaaggatcaaacaaaagagataattctgttaatttttgtttaatactctgttgatatttgtaagtaaccttttcttgttattgctataaatggctcangatccaacaacaacaagatgttttaaggtggttactagaacctttaagcgttcagtggacacaattggagtggcaggataagtatttgtcaggtccacacggtttggttcagttgtgctcagatgtgcctgttatgtggtcaatttttt

SEQ ID NO: 84749 - DNA, 448 bp, Glycine max
tttgcattcttctgttattaaaatcctttccttcggattatgatgcacaaaaatttgtccagaataactaattaccatggtgctatcctgacccctcttcccccctccaaacagaaaaaatgcgtggtcgcaataaaaccaaaaaggcgggaagaaatcaaacaaaagcatcatggttttctagtaagccctcaggagactaattaaaactccataacatcaaaaccctttattgttagcccgtgtagctgtccgtgcatgatcactgctcatcttgttggcttagtccatgttgtctccgacgttacagtgttaccataataaatctgctttgtgctatcgtcccagtaagcctgccaattagttgggagaccctttgagtgttcactcggatcaggttgctggtggttatgctcaattgcatcctgcggtgtactaacagattctt

SEQ ID NO: 84750 - DNA, 51 bp, Glycine max
aatccaacaccccccgagaagaggctttcttatttttcgccaccgtggttt

SEQ ID NO: 84751 - DNA, 255 bp, Glycine max
  unsure (1)..(255): unsure at all n locations
ctttcttttttttttttttttttttttttttttgaaaaanatggggggggccatttttacttccttcaaaacacctacaatgtcacattttcacaccatacaacccacaaccatcctatttataaacccaaaacccccccaatccgctaaaacacaaaaaaaaataaaccctcccaacccccccttttttaaaggccaaaccttttccaacttccttaattaaacattcccacacccaaatagaaaaggcttttt

SEQ ID NO: 84752 - DNA, 119 bp, Glycine max
  unsure (1)..(119): unsure at all n locations
ggaanncggctcgagctcaaaaggtgaggtcgaagtcctctgttccttttccttctaacaccattgggaaggtgaaaaaaagggttcccttcttaaactttgccccatgaaaagagatc

SEQ ID NO: 84753 - DNA, 305 bp, Glycine max
atttcatctcttaccaagtaagatcgcttaaacaccaatccgccggtgggtacaaccaattttgcatggacaaacatatctattttcagatatatgcctcttgtaacataataataaaatagctgtcaccaacgggctgatttaagcttaattcacattagtgtgtgactatgacagaaactttataaatggtgaataaaagaaagtgccaaagactccaactgagtttttatgaaagatggtggggtacatcccttgaacaatttttgatttctaaaaacacaaaagaaggttttattcataaa

SEQ ID NO: 84754 - DNA, 239 bp, Glycine max
cggggtcaaaaccattgggggctgggaatataatagctttagttatttcaggttttgccataatgttaatccaactgtcccctaaccaatctttagatattcttaaatcctccttgcacactttcatcagcatgcattcaccggtaaagtaaacttgagcactatcatcaccacagtcggcatttctagttactaccccctgccaccccccatgactccaccatgcatcaactgttttt

SEQ ID NO: 84755 - DNA, 238 bp, Glycine max
atcttaaaaatatttttttatatcccaacctaatcataattaagtagctttttttaaaaataatcattccccaacaacaaaatactcttaaatattaaaaaataaaactcaaatattttataacaaaaattattcatacattttaacccctaccaccactataaattaaaaatacattataattccttatcttaaaaaaaaaacattcaactacatcatttcaatttctttaattacc

SEQ ID NO: 84756 - DNA, 366 bp, Glycine max
aactatgataaacgttttatcctaagtatatttatttcaaccagtaagttttaccaaccaaaaacagacagtcacttcttttgctacactatcctccctaaacatcaaaacaaatcacctatatcaatatatcaccctaaaaacaatttaaaagaactcaaattacgctctacttcttaaacaatatttgcacttgcacccttaatgtaaaatctcgttagtatcaacatattgtttcttcaaccattatattcacttcctttaatacctaatataactcccatataaacaatcattcccttcaatattctacctgcccactccccattataacccctttcatctttaaacccaccaggtattttc

SEQ ID NO: 84757 - DNA, 215 bp, Glycine max
  unsure (1)..(215): unsure at all n locations
cgtangtaagcttggatcctctacacccgcgtccctttaaatttttctttttattttattttttttttctattttctttttcatacacttgggtgacttttttttaatctccaaaacaaaaataaacaaacccccaccccaaaaaaactcaacatcattaaaaacacatcaaaataaaacaatactctcttcatattcaaaaaaatccaaaaatc

SEQ ID NO: 84758 - DNA, 246 bp, Glycine max
  unsure (1)..(246): unsure at all n locations
gtatgttttttanggtacaaatttatgtttttgtaaattatggagcaggggatttttgttgaaatattgggaaagaccaacctagaaacacaccgcccacacccggtgttcacaacccgtccccctgaggaaaaccggtaatgctcacatgaaccgacatttcctgaccaatttatataaaaatttgacacccctgacacctaatgggaaccattttacacttccacacttaacaaaagcctggac

SEQ ID NO: 84759 - DNA, 140 bp, Glycine max
  unsure (1)..(140): unsure at all n locations
tttaacagaactcaattttattatttaataaaacagtngaaatacgtgacgagcgacaagaaagaaaggagaaaaacaagaatatttgaaaaaggtaaagttgatccttctcatttctcagactataatgccgggggtta

SEQ ID NO: 84760 - DNA, 507 bp, Glycine max
tttattctttttttttttttttaataataatcttacttgagcggggtgtattctatttcaaaaacagctaataaatcatactaagacatatcaacaggcccatgcaagggatttaatatttacttcacagaatcaagcacgagggttacattaacattgtacttttttaaaaagtagttcgaccatggtgttttggaagtaattcttccactcgcccacgtttgaactttgaacaatctctctgaagagaactttttcagcggaaaaaaatatcacaccaataaaaatgcttcactcaggaattgtgacaatgtttgttgtaaacaagaatatcatttatattaggcacacgggaaagattttttcatatactattaggggatatgaactatctccgacctttcttttcttttttattcctgtgcggggtggagagattttaaaaaaattaaacactttttttcatgcgctaaacaactagctaattatggattttatttcacacca

SEQ ID NO: 84761 - DNA, 415 bp, Glycine max
gaaattttcaccaagttatgggtttccttgccaaattctttaccacctaaaacaactttctcggggcatcttcgtaaactcacattgaaccaaaaagaaacttgaccttaccaacttgcctctccaacacaattgagtacactgcacaaactgtcctgctatgatcgttactactagtgccctaaccttatactacattacaaccgattaatctaaaaaatgaaatacctgacactatttgataaacattaaactcaatacaaaaatccccatatcttaccaccaacatttttaccactatccttttcatgattcatgatgacttcagaagtaattacttccatattcccaaacttttttgaggggaaaagactatcgcccccaccttaaatatctttgacccccacattaaaac

SEQ ID NO: 84762 - DNA, 138 bp, Glycine max
gcgtacgtaagctcggaattcggctcgagtgtcagttgattcatgcacagggtgttgcaagtgtgtttgttgtacatgtaaactataatgtagtttgttattttcctgcactgtgtatgaaatgtttgttttgccaaa

SEQ ID NO: 84763 - DNA, 464 bp, Glycine max
  unsure (1)..(464): unsure at all n locations
cgtacgtaagctacgaattcagctcgaagcatgttccatgctatggaattttcgctttgttaatgaagcngaaccaccangccatcaccccgcgggggcttttcatatactcacagcgacatgaacaattcgccaaaaaaattaatataaaagtcctgccatcagaaagctcatttaacaaccctacaattacttcccaaccactacctctgctcttaccacttaccattataaccagttgaaatactgtttcccactaatactctcaaagatatcctctaagcttactggatctcatcatataactgcactccacatacaaaccaccaagcataaaatctacaaatcccaaaccctaactcataatctaactcacattaataacctcagcctaactcttctatacacataaagaaaaccagtctcgcctaaaaagattattaatagtccaacacgcccaaagt

SEQ ID NO: 84764 - DNA, 130 bp, Glycine max
ggtgagaaaattataatcccacttgattattttttattttatttcagaaaccgcttataaatcattctaagacatatcaaccgccctgccggggattttatagttacttcacaaaatcttttttaaagag

SEQ ID NO: 84765 - DNA, 454 bp, Glycine max
ggagtcaactttccactggtcgtttttctttattaaatggaatggtcaagtggacaaaataatttcacattattaaacggcagtctttttccggttttcccgtattaaacgacacggcagtccttttcctttattcaatggtcaattaaagagacttgacagtaacaaaagaagctgttggagttttgaacgtattaaacgacgtagggtcgtgtgactggtgaagtattaaacgattcgtctgcgtttctgatctgagaatcttagcgttttaaacgtacgcgcaattccaaaaagggaggtgcgtatccgttggacaaactacaaagtattcctcgagcaccacatgtccttgaataccataactttaggaaattgcttggcagttggcaatgacttttaatacgaaaagtcaaggaaactgcaattcaaattattcatcatttcaattttc

SEQ ID NO: 84766 - DNA, 223 bp, Glycine max
attgttattgagggggggacttttagacagaacacgggggcaacaccgtggctaacaacatgaattaaggacagctacaggaaaggatgcgaaaaaggactatagagaccccattaagagcttcgttaaaatcttggaaaaacatttacatgtgtgaaacttgtaagaaaaagatttccacaaacataccaaaaagagtctttaattgaaaaaactggggcac

SEQ ID NO: 84767 - DNA, 167 bp, Glycine max
ttaattcttttatttttttttttttttttccgaccccttggtgggggggggaataaccgaccggtccctccaggaataccaactttgcctataaagagtggcataaaattctcgtatataaaataggaataaatctttcctgtatgaaatatatatccgctcccaat

SEQ ID NO: 84768 - DNA, 450 bp, Glycine max
  unsure (1)..(450): unsure at all n locations
ggagatggcccccccaaaattaaaaaaaaaangaaaatattccaaaaaaaaacaaaaaataccacctggccccgttaaaaaacttaaaaaaaaaaaaaaaaaccccaaaaagtttttgttaaaaagataaaaactttaaaaaaaaatcttgccaaaaaaaatataaaatgcccactttaaaaaaatgtggaacgaaaacaaaatcccttaaaataatcaccccaacaaagaaaataaaaatccccaattccccatccggtaaaaaaaaaaaaagaacaaaaattttgcaaaaaggctgggcttctgcccaaaaaaaaaaaatgctcttttgatggaaaaaaaaaaaaaaaagcgttgaaaaaaaaaaataaaaattggtccccaaaatttttttttttttcataaaacaatgttttaaaaaagaaaaagcctttttttcaaaacccaaaa

SEQ ID NO: 84769 - DNA, 402 bp, Glycine max
tttttttttttttttttagtttttttttttttttttttttttttgggggggttttttttttttttttttctttcaccccccaaccttaaaaaaaaaaaaattaaaagcccaaaaaaataaaaaaaccccccccgggccaatttaaaatcctgaaaaaaaaaaaacaaaaccaaaaaagttttggaaaaaaaaaaaaaacacttggccaaaaaaaaccccaaaaaatggggccacaaaaaaaaaaaaaaactgtgaaacaaaaaaaaaaaaccgggagggaaccaacccaaccgggggaaaaaaaacacaaaatgcacccccggaaaaaaaaaaaaaaactcccaaaattaaaaaatggctcaaacctgtgccccaaaaaacaccccccctctcacccgggag

SEQ ID NO: 84770 - DNA, 353 bp, Glycine max
  unsure (1)..(353): unsure at all n locations
cccccccccccaaaaaaaaaaaaaggagcaaaggccaaaaaaaggcaaaaagaaccaccggggcccgggggaaaacccaaaaaaaaaccaacaaaccccaaaagggggggggaaaaagggaacaaccccgagccaaaaggggggcccaaaaaaaaggacaaggcccacctaaggaaatggggggaggaaaaaaaaaacctgggggggatccacctgaacaggggggaataaatgccccaattgcacccccgggaaaaaaaaaaaaagggcccacttgtttgccaggggttgggctttggccccaaaaaaaaccnggttttgtggggggggggggaagaaaaaaggggggggat

SEQ ID NO: 84771 - DNA, 321 bp, Glycine max
  unsure (1)..(321): unsure at all n locations
gaatagagagagcgaacaagattaaagattttttcaactaaaaaaaaaaaattttaaaaaaaaaattttatttaaaaagggaagaaggaaaaaaaaaaaatataatttaattttttttttttatatatatattannannnggaaaaaaaaaaaaaaaaggtaaattgtgttnaaaaaaaaaatttaaaaaaaaaataaaaaaaggaaaaagggtttgggtaaaataaaaaaaaattggaaaaaaaaaaaaaaaaaaaaaattttgtaatagaaataaaaagaaaatgttgtaaaaaaaaaaataaataatttaaagaaaaa

SEQ ID NO: 84772 - DNA, 421 bp, Glycine max
atatgtactagtgttttgttagttcacacactaagttctgaaaaatgagttccaaagtttttcttattctacttatgttcatggccactatacttttgatctcctctgaggttgcacccgatgatgcataccagaattttgacaaaacagatgggaagcgtagtgcaaatggggtagatgaaagcaaatattggcgtggtggctacggaggttggggtggtggctttggccctaacgaacataatgaggctgggattgatgctagccctcacaactaagaaggaaacttgctaaagcttatataggatttaagttatcgtaataaataaaacttcattggaagggtagttataatagatgtggaggatctttcttcgctctggtcatataaaggaataatactttttctatttaatttcct

SEQ ID NO: 84773 - DNA, 528 bp, Glycine max
  unsure (1)..(528): unsure at all n locations
ttaattacatgtataaccaccaactaacttgtggggcagcccaagtgtcttgctagttaaacctaaatgtactttacatttatgtcaatctctaaaaaaatgcatatagtgccaaattacataatccttgtcacagcataaatcaacaattaaaaaaatgttacattgattagcaccttgtaacgtccatctcaaacacaccaatagggtcacaaaaccaaatcattcattctcgattttctaatctctcttcccatatattccaatgaaatagataaaaacaataaccccattggtaagattgcttatattttttattttaccttcccagcacatgtttgaaattagcaaaaaggttgtgacttaattatgtcataagggtcatccaaagctagttgagatattgtccgattttgatttagcaatctgaagttgttgtacaacctgngcttaggatttctaatgataacccatctccttactggaaagctcactgctggtcgttaaattcttggcttgacattattg

SEQ ID NO: 84774 - DNA, 472 bp, Glycine max
ggtacataacaatgtcgtctttcaaattcataatatagttctagctgttgaaaaaatacatgctgatctaaatggcaatattgtttacaggcaggtgaatataaacctattcagtataagaaataaaattaaggtcacaataataatacagagaaacgagttaaaatctaataggaaatacaaccaagttgagaatacctatcatggaaaaagatcacaactcaaaccaaatatccattgaaacctattatagcaagaatcaaggtgagaaaaatatagctgtggaatgaaccacatgcatctaatttctgcaatggcctaagcttatttacccataaataaataattctacaatcatgcatcatcttcatcatcatccccaacattttctgcttcctctccatcgtcatcagacatgttattaattacatctgtaattatatccttcacctctgcttttctatgcattaaa

SEQ ID NO: 84775 - DNA, 362 bp, Glycine max
atttaagctaaattttattaagcacttttcaaagttttaagacataactgttctatctttgttaattataacttaaattattggcaaggtctttatcacaccaagactaatgtttatcaattattcttaaaaatcacaccaaaaaccgtgcacacaaaactcaatgctcaaactggagtggaccccccggtttaatccacttgaaaacttttgtggggttcaacgggggtacggtagtaggctccggtaaaaactgcttcaaaacaaagctttttctaaatttttaagagcagggaatatttatcaagacgctcagaaatggatggagccccccccttaatttttcccgtggccccccccac

SEQ ID NO: 84776 - DNA, 319 bp, Glycine max
cgagccccaaatttttttgagaaagctcattcactttagagttagaacttaggttttcttatgcatattcaagattcattactccctacattgggatacactttgagaaagatttttttgaacaacctcatgtgtttcataatgcttccaggagcattttgaaacatggccattttcatagaggttttttccatggaacatttttttgggctaagtttaatttcccgtttcgcttagtttttatttgatgactttcatttacccccggggagaagtatgttcaggttctcaaagcttggctttttgtagttctaacttg

SEQ ID NO: 84777 - DNA, 327 bp, Glycine max
ctttcttttttttttttttgggggtttttttttatatgtggaaccgacttcataagcttcgacgaacatagacaaaaaaaagactaaagttcacagaaaactagaaacaaatagacgaaacaaacaatagaaccatgactgcctcggcaacacatgcgggcgtaaactaaatgcagctccccatccaacgaaaaaacccaaacgcaaattacccgaacaaaaaccgattaccactccaagataaaccgcaaaaaccattttttgcaggagggcattagaacaaagcactagggccaaatattcataagcaacttcctgcccacaaaa

SEQ ID NO: 84778 - DNA, 272 bp, Glycine max
  unsure (1)..(272): unsure at all n locations
aaaataggaaatttaaaaactaatgcaattccaagtaaatttagcagcaaatacaattgctgtgcatatcagaagcagtgtcttggatcaatctgcatcaacacattatacccaatatacataagcaaaattttactgccactatactatcttttaagcaagcttataatgataaatttgaatgttctccacattttgattcttgaaattggtattctttctatgggtaataaaacttgccccattgtatggnctatattttgaaagatttt

SEQ ID NO: 84779 - DNA, 298 bp, Glycine max
aaccaagattttttgcttaataattcatgattaattacattgcttttttttgaagagggttagaataagaaacaaactgttgttgcttatttttcaaaggaagacaaaaaatacactttggtttttatttggtcaaaatgtgaattcttactgctaaatagtaaataattttttgtaacacacttttttgctcttttccttatcggtcttttttcccgggtaatcataagattgaagatagtagtttactccaaattaagttgaattcatctatcacattgatttgagtctgggtacc

SEQ ID NO: 84780 - DNA, 132 bp, Glycine max
cttccgtttttaaaaaaaaattctgtgaagtaactttgaaatcccttgcatggctgttgatatgtcttagtatgatttattagctgtttctgaaataaaataaaatataatcaagtgagattataatttttt

SEQ ID NO: 84781 - DNA, 414 bp, Glycine max
ttttccttgtttctttttctgagggcccctcttgaacactgctagaacttcaatgctctgggtgccaggaaagaaattaaaaccatgagctttttccaaataccatgccttactagacaacaatgacttgcagtcctctttaaaactttcccatccgcaacttatataaataagggtttgtggcactgattgagctatgttagttggaggtttgcttccaatttggactgaatcttctttagcacgtaaaacccaaggtctcttctcttcctgggatgagtttgagcttccagaagatgaaaaggctttacgctcgactgatgatatattcttcaatgcatcaataagagatgcatctagtcctttcctgggaggatcaatgacgacaacatctgaacccaaaagccacaaaaa

SEQ ID NO: 84782 - DNA, 60 bp, Glycine max
tcggaaaaatcgtggatcccgggtttgggatttggaccttggagctgacaaggagcaagg

SEQ ID NO: 84783 - DNA, 69 bp, Glycine max
aggatccgggcttacgttctcgagcatccaacctcacatccgttttattgcgacacctaaattcaatta

SEQ ID NO: 84784 - DNA, 296 bp, Glycine max
gggaaaacccaggggggaacaccggaggttttttttccgagtttacgtccccgggcttgcaaagtaatattttttttttggggcccccaaaattaaattcccgggccgggttttaaaaacgttgggatgggaaaaaccctggggttccccaatttaatggctttggaaaaaatccccttttcgccagggggggtaaaaaaaaaaaggcccccaccgattgcctttccaaaaatttgcccacccttattgggaaatgggcccccccctttaccggcccattaagcgcgggggggggg

SEQ ID NO: 84785 - DNA, 327 bp, Glycine max
ccccacgttcgcgaacacgtgggggataaatgggttcttttaagggtttttcacaaaaacacaggggggacaaaatcttcaaaggtagtcccttcttgataaaatcccctaataccgcgtaaacctttttctatattactaccacctttcatgggtcctccttatgggaccaccaccgcctccaagattcttttccaaatattttttttagcctaaaatcatgtgctggttttttctctaacccatgttctaagaaaacaaaagggaatggcctttaatcacaagtttgaaaaattggcccctttttaaaaccctaaaaggtctccc

SEQ ID NO: 84786 - DNA, 261 bp, Glycine max
aaaaacttactcaccgccgaccaaacccacaaaaccaccccacacccccgcaaaaagggcaccaaaattcaaacaaatggccaccaaaaaacaacgcaatgacccgaaaaacacaggggaaaaacaagaaaaaccccgggcaaaaaaaaaaaaataaaaaggcggaaaaaaaacgaagaaacccggaaaaaaccccctaaacaccaataagaagcaccttctgaaaaacggaaaaaccccataaaggaaacataaaacgcc

SEQ ID NO: 84787 - DNA, 377 bp, Glycine max
aaaaacataaaatcactttgatacacataatacctgataaaaccatttaatttctaggaacaagaaaagccccctccaaagaaagcaacccaacaaattcaagaaaaaatgttaatcgctagagtaatcattatcacccccctttttatgatcagcaacaactttttttataaaccgtttgcggactccttcaatgatagcctcatttccattatggccatcattaagtacaggatctgattggcacaacactaatgcaacaccttcaggagtgcatttttgcccgaaactatgcaaacccacataatttcctttgactgctccattggtggacaccaacaaagtgggaagattccgatccgggtagttcggtttgc

SEQ ID NO: 84788 - DNA, 430 bp, Glycine max
gcctctacagcagcacgccctcctttatccactcctgatctcaaaacttcttttctctctaactgaaacccttgcaagacggcgagaacactgaactttattgctacacactaaaaagtaaaattcttatccttcaccagaaagcaggatatttcagtactaaatttcacaactacttcctggtgttttatcatacaaaaccctacgcaggttcaagatactctcttccatatcaatcgaaaagtgtagagagcaactcaactttacaaattgtttatttacaaattcttgtttgacttgcttgacacaaactgactataagcacttccctgtcgccattcatctgttgaaacatcagaaattttatacccaacttcaactttaggagccctttttctttatttagataggtactgcctttgggcaaaaa

SEQ ID NO: 84789 - DNA, 352 bp, Glycine max
tctaaacataaatttttctttttcgagccatcaaatactcgttgtatcatacaatacaaaatacaacaccacctacaaattaaataaatatcaagccacgattatacctcaataaaaaaaacccactattaaaaagacattctcttgggaaacaaaaataaatttgatgcacattaaaacccccacaagataacaattccactgtgaatattctcttcccactatgtcaacgatagtacataagctgctgtctccattaattaccggtatatccatcatacatagcttgagatgccccacaaattacgcccatctaatcttgagctaagccatgttgcccaatcattttcat

SEQ ID NO: 84790 - DNA, 232 bp, Glycine max
accaccttctttgggggttttttctacttcttcttcttcttcttctttttttttttcgcaccaaccacttccttttttttataaaaaacccacctttgtcccttttttcctcaaccatgttcaacggcccctccttcacatacatcccttttttttttgttaacaagccctcccttttttttttgctcaccaaaagaacaccttttttccccatattggggcaaagaaaacc

SEQ ID NO: 84791 - DNA, 129 bp, Glycine max
tttattaaaaaaaacatttttaacgggcgctcgcccacttgtgtgcgggggtatccgtgcaataattccaccccggcccctgcaatcctaccacctttccctatacttagtcatcttaaatcttggccc

SEQ ID NO: 84792 - DNA, 96 bp, Glycine max
  unsure (1)..(96): unsure at all n locations
agagagagagagagagagagaatgagaggggttcaaaaccagttacgaacataatcatgtngccgttcaataagtttatttttccatcactgggca

SEQ ID NO: 84793 - DNA, 254 bp, Glycine max
ggccacccaatcgtcacttaggggaatcaaaagggggaattctaattcttagtaatacacactactgccaaacatgggacccacgatatgttatcaaaacaaaaatttcataaaaactgttaccaacgcctaaagcaaaaagtttaatttcagaactgaacaatcggaaaaaaaaaaactagaacaaagttatattatatttcctaaactctaaatcctatgttaatcctccttactctagccctgtccaactt

SEQ ID NO: 84794 - DNA, 97 bp, Glycine max
gagagagagagagagagagagaatgagaggggttctaatccagttacgaacataatcatgtagccgttcaataggtttatttttccatcactgggca

SEQ ID NO: 84795 - DNA, 68 bp, Glycine max
aaaaaaaatataaaaaaaattttttaaaggggcggccgccgactaatgaggtgtgggtcccgggaatt

SEQ ID NO: 84796 - DNA, 392 bp, Glycine max
cacaactggcctattcatataagtacttgtgtgggggcatgtgggtttttaaagaagggggtttgctgaagctacatttcatccttcatgaagctggtcacgattttgactcgcatataagcgcttggctctttcttctgttctagtgagtgtgagaccttgcaatgtatcttcatcctatgcaagtgaactttcccctgattttggaggggaggagggggaggggctcactcgttttagctctttttttacagaccacacagaatgcagttgtcttgacctcacgtctgtctcttctgttgccaagtaatgcagtactgttctgatctgccgctattaaaacgcatagggaaacgactggagtgtgattaaacaagctgttcctccaatgc

SEQ ID NO: 84797 - DNA, 339 bp, Glycine max
gaccgaggcgtccgcacaactttcctattcatataagtacttgttgtctggcatgttcattattaaagaatttcgtttttttaagctacatttcatcccccattaaactattcacgattttcactcacatataatcacttcgctctatcttctgctctaatgagttttagacctttcaatatatcatcatactattcaagtaaactttcccctaattctttatgacaggattgggaatgactctacttatttaagcttcatttttacacaccacacattaatacatatttttattacctcacatctttcttttctgataccaagtaatgcacaactttt

SEQ ID NO: 84798 - DNA, 258 bp, Glycine max
cccccccatataagcaataaaaaaaaattttttttttattttattcaataccccaaaaaaaatccccaaaaattttaactcaactaaaatttttttttccacaccacttttgggaaaaatatcccttatttttctccccaaacaacattttatactccacccaacctcaggcccctttttttttaaactaaatataaaaacccaccaccctcaccccttttttttcaaaaaaaaaatccccttattttttttataaaa

SEQ ID NO: 84799 - DNA, 499 bp, Glycine max
aaaaaaaaatttttttttttttttatgttttcccccttttagggaaaaaaaaaaaaaggggttttttttttaaaacctccccaaaaaaaaattcaaaaaattttaaacccaaaaaaaatttttttttgaacaaaacctttgggggaaaaaccctaaattttttcccaaaaaaaaatttttaaggcccaaaaaaccaagggccagtttttggaaaataaaaaaaaaaaacccccccgatggaccaatttttttttaaaaaaaaaaggccaaatttttttttaaaaaaggttaataaaaaaccttggtgaaaaaaaaaaaaaattttttaaaagggaaaaaaaacctttaattttttttttatttaaaaaataaattttttaaaaaaatttttttttggaaaaaaatataaaacacgtatttttggggcccggtaaaaccggtttttaaaaaaactggaaattttttggtttttttttaaaagggaaaccatttttttttt

SEQ ID NO: 84800 - DNA, 506 bp, Glycine max
acagataaaacaacaaaacaaaatgatttatgcattttatagttctgcattcaacatcaaatcgggcaacatattcatgtctgcaacagagagtgaaagcattccctaaatatgtccagcaaaatcttgctaagaaaactagtaccggtgcataaaaaattatgatgagccagcctatccaatcagatcagaatataccaaagttcttctgatttcccaaagatgttaagagaagaagatcaattgcccaactgttgagtataatcacaagtactagtatagttgtttgtatgagaacccttttgactccgcttgaataagatgtaatagttcaactctgtcttttgttttgaatggattgttcagcaagatactttccagtaaagaagccagcagaataccaagcattcaaaacagcagcaagatctgttcctgagccattaatttcttcaagttcagaattgattctctctttcccttcattcacattaaaatcaccagatatg

SEQ ID NO: 84801 - DNA, 536 bp, Glycine max
ggaataatagtaacattaattggggagaataaagtaacaggaaaaagaacaccagcaacccgtccaaggtttttgaacataaattttatcaaaagaactcaaggttattacaaatgcagcgtctctattctcttcttcaagacatttaaatctgtatctatgttggtgaatgtccctgaggtcaatgtgctgcggtaaaaactcgtcctcagcaacttgcgggcatggagccgaaatcgcctttggggggattgcgggttatgacagcgatgccgttttgatgaacaaagccattcacaaattctgaggtcaatgtgctgcggtaaaaactcatcctcagcaacttgcgggcatggagccggaatcgcctttggggggattgcgggttatgacagcgatgccgttttgatgaacaaagccattcacaaattctttggccatagcggaaaatactgaggtccatgtgctgcggtaaaaactcgtcctcaacaacttgcgggcatggagccggaatcgcctttggggggattgcggga

SEQ ID NO: 84802 - DNA, 471 bp, Glycine max
gctcaatactttttccgtctttaattaacttgagtcgcgggcagcataaattcaagtactgataatacatcccatccagaaatgtaagcaccaccagaaatgtaagcaccaccagaaatgtaagctagattttgtgataatttccaaaaaacaaactataaatagcaatcctttgtctccaaattgtaggcatcatgcttcaacagtcatcctacagcagccactttatcatatcagatctcaataataagatcctgatccgccaccacccatataactgctaccaccacccacaccccttccagaatacattgatgaatatgagctgccaccaacatcactttcacgagaaatgtaatcaccaccataacttgatgaatacatgccaccaacatcaccactaccaaaagaaccttctccataactcatgccctgccgactgctatacaacccatgtgaatcttgactgga

SEQ ID NO: 84803 - DNA, 289 bp, Glycine max
  unsure (1)..(289): unsure at all n locations
ggatcctctagagcgggcgcgngnnttttttttttttttttttttttttggctctccctctgctggggtccaaaccaaaacggggggcttggaaaaaacttttcaaaccactaaatcctctacagaaaacaaacccctctttactattctcgcagacttagaacgcctgattaaaacctgcattttttaaactattcctgttttggtaacaccttctcctatagggaggcgcattaaaactttttttagaaacaagaattatgtgtttcatgagaaaaccagttccccc

SEQ ID NO: 84804 - DNA, 330 bp, Glycine max
gggaggggggggaggatgctaactcaaataccccaaattttatcctccacaacatctacaaccatcggtgttttttaacattctcacacccccccaaaataccaacaatacttatctccaaaactactattatcttttcacatttctacacccaattaaaattttctaattaataacccttcaaaaccatatctttaaaaataccaaccaattatctacaattttttcacaacatcatctaattaacattcattcatataccattcttacttctcaataacaacccatcttctctataaatattttatatactttaaataaatcatacct

SEQ ID NO: 84805 - DNA, 161 bp, Glycine max
gggggcgaactttttttttttttttaacatttttcaaatttctattataacaaaacaatcaaaatacatgcgccgttttttataaaaatattttccccccacaaataatacaaaaaattcacaattactctatcaaaaaaaaaaataataatcctcttctc

SEQ ID NO: 84806 - DNA, 452 bp, Glycine max
atatcatccatcactctaaatacaacgctttctactatccatacgacctcatactactcaagactatctctacatccaccctccactctctagagtctcccatcgctctcacaaatttctaatccgatccttactcacatcccctaatatctggctgggtacatacccataccatcaatcaaaactatcctaataatcaccattcactaccttctcccatactataccaccccattagctacaattcatacacatgaccgatcattcacaacatattcaaatacatctacactcagtgtaacaatgtactctgtctatatttatctctatgctcccattaatcatatacgtagaaatgctgtgagtgcactaacaagcagcactctttgaagatacttcaacccttgaaacatacattttccagcggacccattctctctttgtgattttaa

SEQ ID NO: 84807 - DNA, 540 bp, Glycine max
ttttttttttcttttttttttttttttttttttttttttttttgtgggtttttttttatatttttttttcctttttttttttttttttttttttttttttttttgggaaaaaaaaaaaatttttttttttttccccaaattttaaaaaaaaaaaaattttcctaaaaaagaaccctaaaaaaatgtcttaaaaattcccaaaatttttaaaaccccaaaatggggtttttttaacccatggtaaaaaattaatttttttgcccctaaaccccgaaaaaaaaaaagtttaaatttttttcacaattaacattgttaaaaaaaaaaaaaaaaatttttttaaaaaaaaatttttaaaaaccccggaaattttttggggggtttttttttttaaaaaaccccccctttaaatatttttttggtttgccctttaaaaaaaaaaaacaccttttttccacacctcttttttttttttttagaggcctagggatgtttaatcccccccttttttatattataaaaacccttttttttttttttttt

SEQ ID NO: 84808 - DNA, 294 bp, Glycine max
gaccgaggcggccgctgctacctataccttctgtccccatcctttattttaatgatcctcgaccttcatcacgtgtcgcttttttacaattactccattcctaaccctcacaatatcaataatcacttctataacacataactctttcttaccaccccccaactcaaaaacaaactctatcacacctctcatctttcataaacaaaccctccatgcatccttttccagctagaacaaatagatccatttcaagactctttattgaccaacaacaaaaatccctcctatctattc

SEQ ID NO: 84809 - DNA, 137 bp, Glycine max
atttcccaactttccctataacagtcctattttacctttaggtaatcatattaataccttgcttcattataaaattagcttcctcctacaattaaacacaatcccctaaccatttcacataaaattataaaacctga

SEQ ID NO: 84810 - DNA, 418 bp, Glycine max
ggggaaaaaaaaaattttttttttttttccccaattgtttttaaaaaaaaaatttttctttaaagggacccccaaaaaggtgccttaaaattttgaaaatttggcaaccccccaaagggggttttttttcccccggggaaaaattttttttttttttcccttaacccggaaaaacaagggggttaatcctttttcaaatttaaactgggttaaaaaacaaaaaaaaatttttttaaaaaaaatttttttgggccccgggaaattttttggggggtttttttttgaaaaacccccccctttaaaatttttttgttttggcctttaaaaataaaaaaaccttttttccccgggctttttttttttttggggggttggaggggttttccccccttttttttattaagcacttttttttttt

SEQ ID NO: 84811 - DNA, 343 bp, Glycine max
tcggattctgttatatctggacacatatcactgtcttctgtgtagcagatagtagagaaaagaagtcggcggttctattacttgacatgtcattattttatgacttccccatgggcatggaattgttccatagacccatccaaaaaattgctcccgcgccccaattgatatcaataccctcttactcctatacactttctaaaacacagatgactgcctatatcttactgtggagtgaacagaatcattaaacacattttgatgacacatcgaagaaaaagcttcattattcatgctttcataaacaagtctttagaattccggtggtcctacatgctcacaa

SEQ ID NO: 84812 - DNA, 205 bp, Glycine max
gcggacgcgctcggatgctgctaatctggacactatcacttttttttttatcactattattaaaataagtcggcttttttataaaatctgtcctacccaccactccccatagtcattacattgtgagagacgggaaaaaaaaaaatttttttcttcttcccccacaggacccgcaaacaaaaattctctaacaagaacccacata

SEQ ID NO: 84813 - DNA, 126 bp, Glycine max
gttggggtgtttttttttctttccttctttcctagattcctctttgttccttttttttatgcacaaaaacaaggaaggcggccctttaaaaaaattatataggccactcggacaagaaaaatcttc

SEQ ID NO: 84814 - DNA, 196 bp, Glycine max
tttttacaatcatgagcctaaaatgggaccggcctttttggcgattggagtaataaaggttcaaatttacatccacttttaaatttttggcgtatatgaaagtgactgggaattgctctctcagctttatgcatgaaagacataagcggagagccttaaatggttacaggagagtacaaaatttggaacaaaactt

SEQ ID NO: 84815 - DNA, 385 bp, Glycine max
  unsure (1)..(385): unsure at all n locations
cacgcgtccgcccacgcgtccgcttactgttacgttatgtacgagtatccgaaggtgtacgaggattgtactttgcggtgccagaattgtcggagggggtttcatgcgatggttgtacgttctccgccaaaagatggtacttttggctcgttttgcagttggggtttttttccctgtgggtttttctggggattttaaggacattaacgggtcttcttccaagtggaaccctttctcccctttgtttccttgcgccttgaagggggccgagcagaatagtaggtaccagaaggggccttgggttttttacgatgatgacgcgtctgcggagttcgtcgaggctggtttccgacacgancggaagatgattctcgatgatgatgac

SEQ ID NO: 84816 - DNA, 235 bp, Glycine max
gggggccccggggtttccctcccggggttttttttccaaaggaaaaattccccttttcgggggtttttcttcctctaagcccaatttggtccctaaaataggggttcccccccccccctttttttggctgggtaacaatttgttttatcacaagggggggttccccccacgcgaaacccctatttttgggtggctggcggggccctaccaaaggggtgtaaagggggggtttttt

SEQ ID NO: 84817 - DNA, 256 bp, Glycine max
  unsure (1)..(256): unsure at all n locations
cctgaacttatgtttctccaattccatgcaaccgttcacacccaaatctcctccgacaatccccaccgccacttnctcgaccgttgatcacaatcacaaccgtccatcaccagccgccatgtcatcaaccccgaactttgacaatgatcgcagtaccgtgaccccacaaaacccatttccgagccttggacccgaacccgaacctgccgacctagccaccgcttttgccttccaacgtttcttcttcaccttcccc

SEQ ID NO: 84818 - DNA, 406 bp, Glycine max
tttttttttttttttttttttttttttttttttttttttttttttttttttttttttttttttttttttttttgttttttttttttttttttttttttttttttttggggggggcaaatcctttcgggggaaaaccccggggaaggggggtaatccccacccccttttaaaaaacatgcttttcgggggggccctttaaaaaatttccccctctttaaaaatttcttttttgggccaaaactaaggtgccttcccaaaaaaaaaaaaaaaaaaaaaacacccccccttggggtgtgttggggggggaaaaaaacctcttccccttttcccggaaagggaaagccccacccgggtgggccccccccccctttttttttaaaacaacacgggtcgggggttttttttt

SEQ ID NO: 84819 - DNA, 78 bp, Glycine max
gtttcctttcctttcccttcccctttcctcccttattaaaaccccccccctgcccaaagaaacgccccttattaaggg

SEQ ID NO: 84820 - DNA, 329 bp, Glycine max
  unsure (1)..(329): unsure at all n locations
cgcgtccgcccacgcgtccgcccacgcgtncgtgcaatttctcaattactacatcgtattctgcaaattcaaactgggtcttggttttctgaaagatgggaggtggcaaggacaagcaccatgatgaatctgacaaaggaattttttcacagcttgctcatggggtagctggtgcagcacatggtggacatgggtacccacctggggcttacccaccaccacctgnggcataccctccgcaccaagggtaccctccacaacatgggtatcctccggctgggtaccctccacatcaaggttctcatgggcacggcggcatgggagcaatg

SEQ ID NO: 84821 - DNA, 92 bp, Glycine max
cgtcccgaaaaaaaagaagaaaattgaatgcaagtggattcaacatgcgcacaaatgggagggctacacaaaggggacattgcatcaactac

SEQ ID NO: 84822 - DNA, 371 bp, Glycine max
tttttgcaaaatgtgtcatgatatatgaattttgctacatcatactggggacatccttacaactaattcaggttttaaacttcatcatgtcaagagaaaaccacctaagttagctagagcatctatagctcatgctttctctaatatattcctggttgtatttatcatactgttgaaatggaaatgatttgatattctttgcaagatacattaaattaaaaagttagaataattctatatgaattgatgtctctcagcaaaccctattatcccttggcaacaaaacggtaaacaacaacaccaaccctagacccatcacaaggcgtgtcagtgtgcaaaacgtcgacgttgaaatgctttcttcgcttctt

SEQ ID NO: 84823 - DNA, 324 bp, Glycine max
gaaaacaaataattccaattcatatatgaacatttttgcctccttatttcttgaaaatgtggaattggaattccccgaggaattccgatctcatttcctttggcttcaggataggcctaataagaaaacaaataattccaattcatatatgaacatttttgcctccttatttcttgaaaatgtggaattggaattccccgaggaattccgatctcatttcctttggcttcaggataggcctaataagaaaacaaataattccaattcatatatgaacatttttgcctccttatttcttgaaaatgtggaattggaattccccga

SEQ ID NO: 84824 - DNA, 136 bp, Glycine max
tgactgcggggcgcgtttgtttttggttttttgaaacaccaatagatgtgaatgggcataacttcagcacagtggaggcatatctctgtcggtgacgagatacttgatttctcttcacgtcctcctctcgtggatc

SEQ ID NO: 84825 - DNA, 385 bp, Glycine max
attcttaaaaaaggggtttatttttttggaagccagccttacaattggcaattttgggattctatttaacttttttggggccccggtgttttgaaaccaattaggaaaaattttttttttcaccgaataagccccttttttttgttcatcccaaaaccattttacgttagtattttgggccacctaaataacgcgccgttcaccggttacattaaaaaccagaaacgtttttttttccccacggcgggcgcaaaaaaccaaatttttttcttttctaaaaagggccctgttagccccccgggtacccgctttatggggtttctttttggtacacctggttcgggggggggtttttaatttctccccctcggaaaaaaaaggggga

SEQ ID NO: 84826 - DNA, 56 bp, Glycine max
attgggggggtttcttttttgggggggggggctcttctcttttttctcgcttttca

SEQ ID NO: 84827 - DNA, 274 bp, Glycine max
aaaacagagacaattttctcttaattgcaactttgtaaacaacaggggatttattcactaatgtggataaaggcataaaacactagccctcatgacaaaaaaacacggggaactggctatgacaaatggggaacaccctaaataaaccttttactgtatgcaccttaaaagaatctcaattttgcttcaggaaccccaattattaaaggtcctttaaaaaaattaaaaccaatttcattaacatacctttttcatacttgggacgggcctttgc

SEQ ID NO: 84828 - DNA, 320 bp, Glycine max
acttatatgttggttcttagtttatgaatagtctgatttatcatacggggtatgtaaaaaatggcgggggatgcaaataatcccgatcctaccccgaattcaaaatcctgataggcatggttgcgttataccactctttgttggcctggatccttccattttattttgggtaaggctttgggccgaaccttttaaattttgaaaatggacacgcaaatctttttcttagggttgccccaaacccctcaaaaatagtaaaggggagggaaaaaacggaactttgtccacaggccccactctgcattcattaaattgtggaa

SEQ ID NO: 84829 - DNA, 355 bp, Glycine max
acgtaagctcggatcctctagagcggacggccttctttgtgtcatacgctatccagaccatgttgatatcgcacatcccttactgaaactggagcgttatcgtacgagaggagcatataccaatcccttttgccagaccacggtgaaaagatataaacactgtgggcgacactatacactgggccttatatgaaagagaccattggcataggactgaatgactactgcttcatgcaactgaccgcatatcacaataaattatgagctccagtactttatgagaaggaaactcggatattatccgaatgcattatgcctatcttaatatcaggccattgtacattgacttctaaaa

SEQ ID NO: 84830 - DNA, 270 bp, Glycine max
aagggggatttttttaattttttttggggcacaaacatacccctaaattaaaaaaaaaccatttttcaaccccagctttttttttttttttctaaaaaaacaaaacggggagaaaacaaggggttttttaaacccacactgaaggtttcataaaaaatcctaaagtggttccaaagaaaaaatatccccttaaagttcctatccattggctgagggaaattgggattctgccacatttataaacaacaaaagggggggggggataaaatt

SEQ ID NO: 84831 - DNA, 107 bp, Glycine max
ggcatataaaaggggatttttttaacttttttttatgcaatgacaacaacagattttgaatttaaaacattttacaaggccaactctagttggtttattatattaat

SEQ ID NO: 84832 - DNA, 196 bp, Glycine max
atattatctcattttatgggcataacaaaaaaccgtgtgattttgcaaattaaaccaaaatcacacaacatactagcccgaaacattttgtttcctgcctggggcgcctaattaaacaacaaactggcattcatcccgatgcgctcacaggccgctttttaaaatggagacctatcgtgactttttggtaaatgaa

SEQ ID NO: 84833 - DNA, 258 bp, Glycine max
aagaacaaattttttaacaaagccacacacggctttttgtggtgtcttttcaaccaaaagcgggatggtatcattaacctctgtcgttattaaaaattttttcgccctggcgaatctgaaggctaaatctccactgccacccctataggaccacgtacaactcctccaaaaaaaacttttttaacaccaaaaaaatttccccccacgcgttgcgccaacgtactttttccacctaaatcacaatggtattggttttac

SEQ ID NO: 84834 - DNA, 224 bp, Glycine max
cggccgagatattgagaaagatgaatttggcaaagttacaagcatgaagacgcataatcttgatcatgagcttgcacgatctgttacataagatgtaaaatgtgtggcacagtgcattgatggatctacttgcactgaactattacaccatctatgagatcataggctgaggcccgatacaatccagatgcatcaagtgaaatctttgaagacctatgtattgc

SEQ ID NO: 84835 - DNA, 424 bp, Glycine max
tttattaaattttttactaagggaggacaaatattaccaccggctgtattacaaagtctgcctggagctgtactcaacagatttactcacaaagcatcatgtatccatttccgctccccccgttacagatagatgacatccaacatttaccgatgaataaataaacatatcatttgtcgaaccaagtttcttaaacaaactaaaatatttctcaacaagattttaaagcataaaacaacataaaacttgcatgtgatgcatctaattattaatgcccttctttcttacccgggatgcaagaggattgttcaccaactcaatatcaagcttcttttgctcagatggtgtaactacactatcactctgatgataatccattcgtttagcctcctcatcacctgaaacatcatctgatttactcttc

SEQ ID NO: 84836 - DNA, 217 bp, Glycine max
agcgaggatcctgtggggcggacgacctacaacttataccactcaaacaaggtatttatttgagaacacatgcaatgtgatatcgtggacatcataaggggaacctctttaataactggtttagctgtccttgtcaaaaacaccgtaactctttagctcggtctttgcgtcacatctacggcagctctacatgagaagagaactgaccatgctggtg

SEQ ID NO: 84837 - DNA, 298 bp, Glycine max
aaaaaaaaaattttttttttttaatttataattttggggaaaaaaaaaaattttaaaaaaaaaaaaaaaaaggctttaaaaaaaaaaaaaaaggaaaaaaaaaaaaccttttttttaccacaaaaaaaaaacccgttaaaaaaaaaaaaaaaatttaaaaaaaaatgggcccccaaaaaaaaaaaaacccccttttaaataaaaaaaaaaaacccccaaaaaaaaggggaaaaaaaacccccccgaaaaaaaaaaaatccccccccccctttttaccccccaaagggaaaaggggggg

SEQ ID NO: 84838 - DNA, 424 bp, Glycine max
aaaaaaaaatatttcccttttacaaaaaaaatgggtcacccccctgcctgggggggggaaaaattttaaccttttcccccccaaacccgggtagaggccccccctttttttttttttttttccccatttcccaggttttgccggggccccccccaactttttggggggggtccaaacatttttttggggtttttcccctaaaaacatttgggcccctttttacccgacaaattgctttctcccactttttttccaaagggttcttctctcggaatttctctaccgggttctcttcccccatgcccccagggtccaacgggttccccgggttttttatccccccactttcacccttttccccaaaaattgggtggggctttggggttttctggttgaggcgaatttttggggggcccaccccccc

SEQ ID NO: 84839 - DNA, 451 bp, Glycine max
gggaaaaaacttttcatttttcaaattaacgatgggaaaaggggggctacaaaaaaggggggaaaccccccaaccctttttttggggcctttgggaaaaaaaaaaactgcccccccaattaaaaattgttttcctttttgttcaccccaaaaaacttggggtttttttttacaatgggggcaaattaagggcaggggctttttttttttaaaaagggcccaatttttcccaaaatgcccccctgtttgtttttgtagatgggggcccccccctgagggggttttgactcttggccccaagaaaatgccccttgcctaattttgtttgggcatttgaaccttttttttttaaaaaagggctccaagaagacaaaaccaaataagggtttaattaggggggatttttacaaggggaaaagggggaatttttgcccccattcccattggttttt

SEQ ID NO: 84840 - DNA, 314 bp, Glycine max
  unsure (1)..(314): unsure at all n locations
anatattaatcttctttttcacattataaccttatcatttaatgggggattttatatacccgccggttacaaaaaaaaataatttcatttttacataaatagttttgacacatcttttactacacaggggataataatacacaaccttacttccaaccatcctaagaaaaacaccaaaactttgtcacttccctccttttccctttttttccccatcaaacccatgagacttgagcttctttttcccaattatttttgcttttccacttacatatattaagggcctatttataataaccaacaattttttttct

SEQ ID NO: 84841 - DNA, 279 bp, Glycine max
gaaaagaaaaaaaacccctcaacaaaatcttttgaaaaagggggtttttaaaattatgagagatccaacctaaatttacaaaagcgaatgtttttacactacaaaacgcatgtttataactcctaaaccaatctgtttccacgaggacacttctactaattgatgctaacccatgaaagaccaagtaattccacctccaccataccaaacgcgaaaccagcataacttgggcttaccttaacattgctagttaaaggacctgaaaacacttagcacact

SEQ ID NO: 84842 - DNA, 356 bp, Glycine max
ttgctatataaatcgggaatttcattcatatacaatgataaatgagatagaagcgctaacaaataaaacaatttctgtaaacaatataaggaaacaaggaatggaaatgctgaactaaaaataggtgttggccatgttagcttgttcctccaatatcctttccttggtcaacccatcccactagttataatacatttgacggtcaactcttcccatggaataatgtttcctcataaaagcaatttcatataaggaaacaatgaacgaagccagactaaaatttctggactactgcaacaatggatcctcctccctttgtaactcatcaagccgtctcctagcataagctgtgaaaa

SEQ ID NO: 84843 - DNA, 122 bp, Glycine max
gcgtacgtaagctcggaattcggctcgagcttttactttgtttaaaagtaaaagagcatataatatttagggcaaacaaaaaagggcggacgacggctagagagctccatgacccgggaata

SEQ ID NO: 84844 - DNA, 210 bp, Glycine max
gaatctcgggtcgagcttttactttgtttaaaagtaaaagagcatataatatttttggcaaacaaaaaacggcggacctctgctggttattcttctttcgcgggactaaatttcggacctttacctaatgccaacccacgtttccgtctactaagtttgcttctacctggaccacctcatagctctagcttgtttctctgagaacatgaa

SEQ ID NO: 84845 - DNA, 475 bp, Glycine max
ctacttaaccatttttttttttcttttaaaaaaaaaataccaccttgaaacccacatcaatctattcaaaaaacccaccaacaaatacataaaatcatttcccctccccccaacactgttttttattttcttctcccaaccaacaacaacaatttccttcccgtttttcattccaaaaaaaacaacctccccaccagttccaaaacaaaattctccacccccaactatcctttatctttaaaaaatttttttttcaaaataaattttacaccaaaaaaaagttcccccccataaaaatcccaaacacctattttttcaccaacaccagctgaacaaacaattcatcatcatatttctgtttctaaaaaaacaacctcttttttacttttttataacataaacatatttcctccacccacaatttttttttttattattctcccccccccccccccttttcttcttcttctttaaa

SEQ ID NO: 84846 - DNA, 338 bp, Glycine max
aaaacagcctttactcccacccgggagcgggcttttttttctacccggcaattccacacctgttccttgagtggtaccagattttcctatattgaattctattataaattggcgcatttaaggcaataactggttcatcaggtaaattgttatgcagatgaacattcatacatgatatcagccgggagcctaatactacaatcctcgggcccctaaacagggcaataattacaattaatggtgctgcgctatttcgacgtgtatgagctgaaaaatccttttttctaaaatttttttattaatcatgtcaactcgccaatgagaggcgttgttgttta

SEQ ID NO: 84847 - DNA, 441 bp, Glycine max
aaaaaaaaaaaactttttaaaattaattttttttttttaaaaaaactgtaaaaaaataaaaaaaaaaaattacacgttccttaaaaagggttttttttttttttttaaaaaaaaaaaaaaaaattttttataaaaatttttttttttaaaaaaaaatttccaaaaaattttttaaaaaaaatttttttttttcaccaattttttaataaaaaaaaatttttttaaaaaaattttttttggaaaaaaaaaattcccccccaaaaaattttttcttctcgggtttggacaagggggggggaaaaacacctttaaaaatttttgggggtcgagaaaaaataatttttttttattaatttgggaaaaaaaaaaaaaacccaagtttttttttttttttatattttttgggggtgttgaaaaaaaaaaaaaaaaaaaaattttttt

SEQ ID NO: 84848 - DNA, 587 bp, Glycine max
cccgcgtacgtaagctcggaattcgggtcgaggttggagatctcgtctttgaagtttctaagatgacttctccctacattaaatgtacagtctctttgttcatagcatttggaaatttggctgatgacaccatcaattttgaggcttttccccacaagctggtgcagtttggagagattcaggaaaaagttgtattgaaattttcacaagaggaatttcttacagcttggtcaactcaggtgcgtcctgcaacaactctgttggctgatgggtgtccatatttgtatgctatggtgcatgatagttcagtgtctacaataccaggtgattttgtcattggtgttaagttgacaaccataaacaatatgtgtgcatatgggctcaatcctggtatttcaggttctcgtcttttgggcaccattcctcagtctatttcacagcaaactgtttggaatcaaatggcaacagtgagaacaccattgaattttgattctagcaagcagagcttttgtcaattttctattgaccttctcggtggaggaattttagtggacaaaactggagatgggatcacacttatacaaaat

SEQ ID NO: 84849 - DNA, 451 bp, Glycine max
gcgtacgtaagctcggaattcgggtcgaggatgctcattagatatagctatgaaaaattattgcgccaggctaaagctccaagtatgtttttacagtccttcaaaaattttgtttctttgtgtgtgtatggtgatgataacttaattagtgttcatgaatatgtcaagccttactttagtggttctaaattgaaaagctttctagctggtcataatatcaccattactgatggtattgacaaaactagtgcaactttgcaatttagaaagttagcagattgtgattttctcaagagaaactttaagcagatgtctaatgttttgggggtggctcctgaggacaaagcgagtttatggtcacaacttcattatgtttcgcgtcataatctggaaatgcaagaagcttatcttgccaatctcgtaaatgtgttacgagaactgtatttgcaca

SEQ ID NO: 84850 - DNA, 423 bp, Glycine max
tagaaaaatcataaaatttgttttctataaagattttttacaaacactttataaactaacaataatcaagacttaaccactcatgacagaagctaacgaatgaataatgtttgatcaccacaacaacgccttatctcactaggtggggtcggctacatggatcaacttccgccataatgtttgatcaccacacatgagagaaactaaaatcctcaaaacaagtcaaacaataagccaaaatctccataaacatttaatcaaacactagataaacaaaatctagacactagacatgaagaaagttacacaaatttcatttgcagtcatcacaggaaacaaaatccaaagcagcaccagttttctgctgttatgttatacaacccctgtagcgcggatcagcatgaccaacacttgcgtcaatta

SEQ ID NO: 84851 - DNA, 157 bp, Glycine max
ttttgttctccttttttttttcatttgtgtctgggggggggaacaaccatagggttaggggttttcccattttagagccgggtggtgtgggacaaaatttttttttcccgttagtagggggccttgtacctttgcttcctttggatggggccccccc

SEQ ID NO: 84852 - DNA, 341 bp, Glycine max
atgtcgattagactcctttaaaaaactcattcagatgacgtattcaagagattcgaatgctttgcatgcattctactatggacacatcttattcatgagggcatctaggtagtactgaaagtgtcagtgcaggcatgacactaacatgtataataacaatgtgtaattaacagattatacaaattatcaaaatacgactgctaaactctaattttattgggggaataaagcatatgagaaagactattgtgtaaaatgtttctttcccttcaattatttggcactattatcatctgagtctctatgatataacttcacatatgggtctcttgcggacacgt

SEQ ID NO: 84853 - DNA, 276 bp, Glycine max
cttctctctccccctaacttctaatttcctctttttcccttccccacacccaaccctaaccctaatcacaaaaattcacaatcccttccattttccaaccctattaacaacaacgccctcgcttaaaaccctaactccgacactccccaagatctcaagctcctcttctcgattccgcaaaccctaacaatggactcgcagcagaacaatctattcgagaccgcttcgcaacccgacaccggcaacgacgcctacacctttcttgaattcaacacg

SEQ ID NO: 84854 - DNA, 143 bp, Glycine max
ccggccggattcccggtcgaccacgcctccgattaatataataaacaaacttagagttggccttgtaaaatgttttaaattcaaaatctggttgttgtaattgcataaaaaaaagttaatataatcatcttttatatgcccaa

SEQ ID NO: 84855 - DNA, 74 bp, Glycine max
tttttacgtcttattctgctaccataagagattgctaacaatacaagtggccattttattccattagcatccct

SEQ ID NO: 84856 - DNA, 146 bp, Glycine max
gggggcggcctttttttttttttttagtctgaacgatgcaatgtcgctattggagaagtcaatacaatttggaaacaaaccaaaatggatgggccacaagcaccggagacagatgggacattctcgtgctcaaattaatgccaaaa

SEQ ID NO: 84857 - DNA, 509 bp, Glycine max
acaggggtcaaaagatgaaacccactagatcttaattatgattatgacatacccatgatacacaaccaacttagctaccatttccatcgaaacacttaacttcgatattgatacgtagccaaggtatgagaccaacattgccatccccacatcaacaggagcaataactaagaagaaaattaattcacttgtacaagtccatgtctaagagcaaatcaccccaatcccattggctgctactaccctccccattcatcattgctccaaatccttcgaactgaaaatccattgacaactcactaacaatgccctgttggtccaggcatgcatatatgttgttgtcttggtgtgaatcaagcatatggttctgtccatcagcagtatcaaacgtcagtgaggacatgctactctcttggtgaactcctttgtcagttggagactcattttgaccccttcttttcactgagcttgaaccaacaatgttcctaggctggggcctaatgacttga

SEQ ID NO: 84858 - DNA, 250 bp, Glycine max
  unsure (1)..(250): unsure at all n locations
ggcggaagtttttacgaagttttttttccacaaaagntgaaatttgctggggggggttatgcactgaaaccacaacacctctgcagagaaactgagaggctcacaagcgccaaatggacactttacaaccctcggaaacaacaaataacgtgttaagctgggccgagagccaactgtaacaacaacatttatccttatgaaaggtttcccgaaataaaaagcgaattccacaaacattttaataacagac

SEQ ID NO: 84859 - DNA, 164 bp, Glycine max
ccggagccggaaactggagcgccttttggggggagggggattcaaacacaccttgcccgggggagctgatggtgatgagcaacggagagggcgtggcgtgcaaaaccgcatgctaagctatccacgatccacagtacttgtgtgatggcgcttacacgacacct

SEQ ID NO: 84860 - DNA, 348 bp, Glycine max
accggttttgaataattccggccgacgagctcactattcgggccgcttttccagttttctatatacccaaacgggagaaaaagagggggctttgtattaaaagtaaaacgacacacgagattggatcgtggcatacaaacttatgccaacaaattccccctcacacatgtctaaatggaacccagggactttcacctatagattctcaacaccaatatgaaaaccaccaacgtatgcataacaccctgctcttaacatagttgatataaaaatgctaacaacacattatcttatacacacttttaaaaacattttttttaaagcttgaaattttttagaaatcacata

SEQ ID NO: 84861 - DNA, 501 bp, Glycine max
agcgtcgggaatatgcgattcattctgtactaaaagtacctagaacagattgctattaggtttggaatatatgctatcatgttgcaaattggctatattctttgtgacataatatgctatcatcaatcagacattatcttgtaacagaaaatgtttacttagaaaacattattctcctcctataagaacagtaggtaacattattctctgttatcctgaacttgtttcttcagaatccaaaagtgaaaggaaattttggccttctgttttgtctgtgtttttatcaaggtcgaagtcgttttcttttggataggctacgcttaccatttgtgtttaattttcaatgttactttaataaagagtgctctcatcaggaatttactaaacgagactatacgcatgtttagaagcacgatttacaacccacaacaattcacatcccagatgtgaaaaatctcaaaagctacagctagtagtgtttatcggatgtgaaaaatcatg

SEQ ID NO: 84862 - DNA, 387 bp, Glycine max
aactcccaatcaagcaacgctgcataactttggccaccaacacccccgtctctcatacattctacgaagtgaacgtcaatggcaagttgtgttggcacttcacctctatatttaccagttggtattggaaattttcctcatgctcatgttaagcttactagaccaaacattgttgggatgaaacccttaccatataacatcagaaaaggagaacttaagattgctacattgcaaaatccatcatcccatgtcagacatgctgctgctttgccaggaattggattggaagatgtgaaaattctgcggaaagagaattttaaatgtgctgctgcaactgcaagtgcaacccaaactgtaacacgcaattctcggtcaatgactactgac

SEQ ID NO: 84863 - DNA, 198 bp, Glycine max
aaaaaaatttcctttaattaacgacaacttttggggccggggttcaaaaaaccattgggaaagacatttgaagagagcgcattggcgaccccaaaaacaaacttgttgggcccatgatgatgctcgacccaaattccgagtttacttacccgtgcttgcaacgtaatagcttttttttaggggcacctaaattaaatt

SEQ ID NO: 84864 - DNA, 230 bp, Glycine max
caaacccttcatttcttttaaaatgccggtgggtgttttttcctgacagaaattccccatgaaatgaaacccagccgggggggcccgatctttattacttttaggacaatggccccctttaaaaaaaaaaaaaaagaattcccctttttgtttaacctgcgggcctgaaccccataaatttattaattttatgtcatgggtaattgggggacccacaaattttcctgatc

SEQ ID NO: 84865 - DNA, 305 bp, Glycine max
ctcatagcttcttcttttttttttttttactaaagatgggcaagttagtggaattgaaatatatggcctatcatacaacctatcgtaaagctattcatgctataattcttttttctcatagcttcttctttttttttttttttactaaagatgggcaagttagtggaattgaaatctatatggcctatcatacaacctagtaaagctattcatggaattgaaagggactgtgctatctatcatgaaaaaagaaacattgaaatgccacaaatttacactggatcaaatcttattttctgttttta

SEQ ID NO: 84866 - DNA, 493 bp, Glycine max
atattatatttataattaaaaaaggggggttttttttatttttttaaaataaaaaaataataaaatttttttttttatatttattatatttgaaaaaaataataaaaaaaatattatttccttttttaaattttatattaataaaaattttaaacaaaattttgttatataatttttaataattatataaaatattattaaatataatatatatttattctattttaatatataatttatatttatttaaatataattaaaaaattttattaatttctttaatgatattgataatattttatttactaaaagttatttataattaattaattataatatatatatttatatatatatataatattatttaaaatttatatttttataatatttattattatgttacatattatatatatataatatttgatataatattaacttatatattatatataataaattattatatatttatttttatatattatat

SEQ ID NO: 84867 - DNA, 333 bp, Glycine max
ttaagaaaaagtattaccattttcatttcacacagtttctgttcttgtgttccttctctcctaccatgtcatcctctttatcccttgtgataagctagggaaccttcaatgctggtcactgattttgctgagattggtcaaagggaggaagaggtgaccagggacaacagagtcaactgacatatataccatactattacagtgtgtgatccaactttttagtcatcaacattttaccggaattgtctcacacttttttcttctcaatattgaagagtgtgtatgctttcactatttcttttcctactgaaaagaaaaactaatttactgatc

SEQ ID NO: 84868 - DNA, 315 bp, Glycine max
cgtaagctcggaattcggcgtcgagattttctcaagagaaactttaagcagatgtctaatgttttgtgggtggctcctgaggacaaggcgggtttatgtttacaacttcattatgtctcgtgtaataatctggaaatgcaagaagcttatcttgtcaatctcgtaaatgtgttacgagaattgtatttgcacagtccataggaagctcgccaattgagaaggaaagctctctctcgtattgaatggcttcaaaaagcttatgtgcctaccatagtccatattgaagagtttcattttattcatatgattatttat

SEQ ID NO: 84869 - DNA, 227 bp, Glycine max
cgacgtaagctcggattcggctcgagaaacctgtcaatcttagtttgttattaaagcatcattacacggcccatccatcaccacaacgcgggctctttataataaaacctcatccctccacttcaaactaaaaacaaaaccatcataactttctccaataaaatcccaaattattcctccctatccaccaacaaaaacatctttacctaaatccaaaattcacaaac

SEQ ID NO: 84870 - DNA, 181 bp, Glycine max
tttattttttttttttttttttttttttaaaaaaaaataataatgggggtttttttaaaaatttttgaaaccaccatcactcttaatacaataaaaaaccacacccttgcaatataatattttttactaccccctaatccccatttcaaatttaaaatttaaaattcttcctctctctttc

SEQ ID NO: 84871 - DNA, 527 bp, Glycine max
gttggtcgaagaggatggaaggctcatcttcgacaaggtggaaacggcgtctctcagaaaagcaaagggtagagaaggatgaagtgtgtgagagagaggacaaggaaaaagtgcatggtaaatcaagaattaaagggacagaaaaaaaaaaaaagagaaaaaatcacacccatggattcaaaatttataaaatctaacgatgtacttctgcatggtgcgaaaggtgttatgcttgccgtctccaaagaacctaaaagttatgttaatttttttgccacctccatctttctaccctactcgcttctattttccctatcctaacttagggtacgtatgaaggaaaaagcgcaggtgaagaatcatgcatatatacaaattaattaatctatgacaatttgtttttcaacttcttaacgaaatgaccctttaatacttgttacaccttttaattaactaaagaattcttttcctatttacttaaatttgtgcatttactttaagatttattccctttgtcctcttttatt

SEQ ID NO: 84872 - DNA, 373 bp, Glycine max
acgcacgcgtggacgcatgcgtggatcgaccaattaattaccgaccggtgcatgcatgccaactatctttatatatagtgagatttgacatagcctgacacaatgacatagatacttgcttcgtgaattaaatagacattcactaacaattacacaatacataccagccgcatacataaagaataaagccttgcgtaactaatgagctaactaacatacattaatttggtctcactgactgctttctattcagtaaacaaacctgtccagctagattaattaatgaatcaaccaacgcgcagagagaggctgcttgtttatcgcgcgccagggttttttttttattaaccagactgacaacaaataattgatt

SEQ ID NO: 84873 - DNA, 115 bp, Glycine max
cgtaagctcggaatccggcgtcgcgaaaaaaaaaaatttaatatataaatataaaaaaaaaattataaaataatataaaaaaaaatatataaggggggaattttaaataatatat

SEQ ID NO: 84874 - DNA, 546 bp, Glycine max
aaatgaaatgatttgaataacttgatattaaaacaaatgagagaggaagactacatcgttgctgtaatttgctcaattgctttacacaatctatctgataacatgtcatgggtttccaagttccaactattgtctcaaagtacggaggaacggtggaaatctgtaattgtgaggttacttttgatgtgtcactctcaatgaatcctctaaaatgcaacagctcgttgttttgaaattgaaaacaaacgcacaaccatcagcagaaagatgtcaattttacactctaaacaatgatcttggttgctgacatctttagtacaaaaataatccttgagtttatttggaggaacaggagagattaagcaaccaaaaggtattcagctctgctttgttaacagctcaatgtcagatccgacttcagcaatcttggcttccttagaacccttggctgcttttgcaatgttcacaacatcaaaatccagtgctgtttttctgacaagacctttaagcatcaatgatccaacagcaacttaaagcacgaaattt

SEQ ID NO: 84875 - DNA, 76 bp, Glycine max
gcgacgtagctcggaattcggctcgagctcgagccgcgcgtggtgggctgggaggttagctactatgcttaattca

SEQ ID NO: 84876 - DNA, 71 bp, Glycine max
atatcttgtcttattcgttgtcttttatttttaactaaacataaaaaacatggggggttttttaaaataaa

SEQ ID NO: 84877 - DNA, 396 bp, Glycine max
gagccaaaaccagatttgatggccacttaatgttttccaaaggggctgcccacattccgtaaaaacataaacttttttaccgacagacccatttttccaaaaatcaatttcctgcccattttttgaaaggaaaaaaacacagtcatggacccttagcagtttttgcccgtttcacaattaatacctactccctaacaaccctttttttgaataaaaaagaaattttaataacaaaacacctttcgcagccccccatttttatttttaaaaccaccaccaccaccactaaattaagcccgctcaccacgaattctttttgccagctggatatttttgggcataataattacacccttagcgggaatggcccacaaattttttttctcaaagagtcca

SEQ ID NO: 84878 - DNA, 276 bp, Glycine max
cttgggaaaaaaaaaaaaaatttggggccggaatttcccttaaaaggaattaaactgggacccttataaaaggggccccaaaaaaaatgaacccctttttgccaaattgttaagtaaaaaaaaaaccgaactttaaccccggggggcccatttataactagggggccccccacaaatatcactccccccccccaaattatctttgtagaaaatggcccctttctctttccctgtgaaggggggcaatcggcccccccaaaataaaatttcccaggt

SEQ ID NO: 84879 - DNA, 55 bp, Glycine max
ctattattatattaattttatacaaatatcaaatcacacacagcttgccgttttt

SEQ ID NO: 84880 - DNA, 245 bp, Glycine max
taaaactacttttttttttttttcaagacaattttactcaacttgggggatttgtgattagccaaacgcaaccacagccatcactaatttaaggaacttcttgaaacggatttaatctatcccaacttttaccactctattttaactatactcactacgaaggttcatttattgcgattacctaaacccaactatgatctttaaaaaggtgccgtatcaattgatggggtaagctaaaacggaaa

SEQ ID NO: 84881 - DNA, 69 bp, Glycine max
atctatttttttccatatgtcaacaaccaccaagaactgtaccaaggggggctttttcaaggctcgcgc

SEQ ID NO: 84882 - DNA, 76 bp, Glycine max
ataaaaaaaaacccccgggggggggtttgcgaaccggggggccccccaccccacaagcttggaggggggggggggg

SEQ ID NO: 84883 - DNA, 240 bp, Glycine max
tgtggcatgcattagtctacattggatttacataccaattgaattgagtacatgcttgacatatatacatcgaactgtgaatgtagaatatcacgacatgctaagagccacgagatttactacatcaccattgatactggcaacagcctagctaagaacttatctacgccatctcctaacagcatagcaccttttataggattgaatcatgcaacgaacttgcttattgaagagcaagct

SEQ ID NO: 84884 - DNA, 147 bp, Glycine max
tgtggcatgcagtggaaataactgcattggtatcactaaagataatgataaataataagacactgaacgatgaaatgcacaggctacatcatgtgagcagtttaagagccaacaagatttttcacatcatcattgctactgggaaca

SEQ ID NO: 84885 - DNA, 404 bp, Glycine max
gttttcatttatttgttaacattgttcatactaaaattattattttagttgattatgccacatcacccaccatttgatgaatgatgagtaacaagaaagaccaaaaataaaaaaaattatcaaaatgactcttattatgttttaaagaaggaataaaaatcaaacgagatcatttttaaatggactaaaatgttaactttgattttattttctaacatttagcaatattctaggaaaggtaaagatttaaaccaacatgttgatcaattaatataaagctattttgggctaaccaaaagtctcaaatatgtctttaaagaatgcatttgtattaaaaacttaatagggagaatgttgtcatccttataattcttctcaactctaatttagaccaagcgatcttt

SEQ ID NO: 84886 - DNA, 430 bp, Glycine max
  unsure (1)..(430): unsure at all n locations
agaataatagtaatagtaataaacaagtaatattttttttttgaaaaaaacaaagagaacattgttaataattctaactgcttttgcttagaacaacaaaccctgttctctatctaattttctcttccaatttcaacctcctttccctaaaaaattgaacccaaagattacaaatccacaagatactaaccccaatagccataaccacaaccaagacccacgaagcccaagcccaaacgggcacaagcccacgcgcgcccccactcgcgtagaacacaaccatccggtacacaaagtaaggcccaacgagccccctcacgaccgaatacgccgcgtaaaacggcggcgagagggcgtcgtgcacgcgcctggctcgcgcgttctnacccttncgcgcccccgcgatggtccacgcgttctggcacgcgct

SEQ ID NO: 84887 - DNA, 352 bp, Glycine max
ggggggaagttaccctaagttatgatgatccattgcactgtttacactatcatttttttttatcaataggattctaagacagttagttaccaagaggtttccactatcaaattgaagctatacgattgatcacattccacatatatgaaaaatattaaaaatcaaaaagtaaaaaagaaactacaaaaaaaaaggttaaaaacccggaagttatattctaaatccattaacatgccttaaaaacaaaataccactggaaggcatggaacatgtaaattgtagcatgtacaaggacaaaaatattcagctctcaccagacttcattcactattatgtgtgcaatctgattttt

SEQ ID NO: 84888 - DNA, 459 bp, Glycine max
  unsure (1)..(459): unsure at all n locations
aattacttagtggcttcttgggcaggctcttgtttctccagcggtggaaaaactgctgcttgggatttgtggtttatggatacacacacacagacaactattaatatttttgttattaattaaagactttgaactctattatgcatgctagttgttgatagaataggaaagatcatatgcttttgacgttaatttattcaatccctaaacctaaggattaaggcatttaattttctattgttataaattcttgaggcttagagaagactttgcccaagtcattcacatcagaaaaactcttcaagtccagtaattgatacttatgtgcagaagacatggacacaattatgggatgagttttgtattcataatctgntattatcaattacttggtgtgggttctctgaaatttatgagctgcaaatcttggttttattttaagatgcgtactgagttctg

SEQ ID NO: 84889 - DNA, 302 bp, Glycine max
  unsure (1)..(302): unsure at all n locations
gcctttggccggtgatgtttttatagntttttattctgaggagcgtgctagaatgcataggtctggttggcaaaggaaatatgaggagtaccctcgttaatatttcttgctccatgtcaatccaactacttaccatgattccaaggaggttccaccgtgggttgaaatgccagtaatagtaaaagcagattttcattgcccccgtttatctgctattcttccctaaaaacttaactttgctcaagttttcgaaaatgtgtcaatgtggtgctggcctatttctaatctgatgtgacttgcac

SEQ ID NO: 84890 - DNA, 155 bp, Glycine max
atacaaaacacacaattaaataaaaaacagcttccaagatgatcagatatcaaatctatgatccaataacaaagcaacctcaagcaaaattgaaaggtagttcaatttggtataagtggcataaaaaatttcaaacactaacaaaaactactcaa

SEQ ID NO: 84891 - DNA, 122 bp, Glycine max
  unsure (1)..(122): unsure at all n locations
tttnnnnnaaactaaacaaaccaaattgcgtttaaagtcaaaaccacgtattttttttagtaaccaaagaatgggatcaaccaggatgaataagatcattatttacctgaaacaaacattac

SEQ ID NO: 84892 - DNA, 514 bp, Glycine max
cccacgcgtccgcccacgcgtccgctttctttctctttttccctcttcaactcaaaaatttattctcctctagaatttgcatgttgaaactcattcaatagtagcttgatttctcaggatcctagagattccttgttggaatttatcttagaacacaaactgaggaggtccactcagaattcaccaagtgcatcattgttcccatcttctacaagggcttagaaccctaggacattgatttgggtaaggaaagcttttactatataattgattgttcgtgttgagttttgatgttgtttttgtgatgcttggttgctaagtattgggtgtttaagttggttttgttgtttttaggtgttggtgtagattgaggcttggattactctttttttaggtcaattcgtgatctgcaaaattttaaagtctcattgagcgatacattctcgccaagcaagcaaatccctctgatttggaaaagttagaaatttcacaagtctcgttgagcaaaacattc

SEQ ID NO: 84893 - DNA, 240 bp, Glycine max
ggagccaaatttcaattttaattacgcttgatttcaaataaaaaatttttttatagtttaaaaaaaataaaattaactggccgttttttaaaaaatttgtgattgaaaaaaccttggttttaccaaattaaatagttttgaaaaaaattccttttttgcaagttggtttaaaaaaaaaaaggcccgaaattttttttttttaaaaaattttccaaattttaatggcaaatgggacccccc

SEQ ID NO: 84894 - DNA, 278 bp, Glycine max
gggaaaataaaaatcaggcatacttttaattcattcctttggttttacatttctatgactttcaaaatgtttttatttggcccaaactcccggttggttaagtccaaaaacaaatttttactttgaaacttttaataacagggctttttacatgttgggggtttggttcactcataaatgggacccgaaattctgaaaataaatgtaatttccaaaaccaactccaattttaattcccatttgcacccccaacattggttctcccccaaaaattaaaa

SEQ ID NO: 84895 - DNA, 161 bp, Glycine max
tctttggctttttttcatataaccccggggttttttcataggggggggcaaatttgcggccctcacacgtgttttattaattccgggcgggggctaccctctcgtataccaaaaagtctccacgcgggcccactttcttatgacgttggaataaacaaaaa

SEQ ID NO: 84896 - DNA, 245 bp, Glycine max
tcacacacaattttcttataataagatacacaatcttactgaacaacatgtttaagacaataataaaattaattatcttggtcaataaagttttctagctttgaaagcatttacctaatacctactggcattccccggtgaccaaatcaataccatcataacttggacccccaccgaacacttaccagccaaaagataaagaccgggtcttcattcgattacacccaacaactgctttacaaaat

SEQ ID NO: 84897 - DNA, 52 bp, Glycine max
ttttagtgggaagtaaacactatagtcctgattcgtgtattctcacggtcgc

SEQ ID NO: 84898 - DNA, 325 bp, Glycine max
ataacaatgatgttggtgacaacacggatgcagaaaaagcaagagatgatgatgatgtagtggatgaccatcacgaggaagcagagtacttaccatagggtgatggctcaactgcttcagaagagcgacaccacaaaggttaggtcacaaaagatgcatatgataagaatacgccttatacacgacatttcatcgatggatatcaattgatccaaggacagatgaatcatggaatggaagaccatatttttgctgaacacaggaatatcgaacgttatgactgacggttgtatgcaatatttgatggccactccggacatgaaga

SEQ ID NO: 84899 - DNA, 302 bp, Glycine max
gtaaaaaaaaattcattattttttaccccatttttaaagaactaaaaaaactaaacaattttaatttttcactttttggggctctttgacggtagaaaaagaaaaaaaggaaactaaaaaaaaataaaagaatatagaatataataatgaatagaaatcaaatagaaaaaagagatatgataaaaaaatacgatattactattatatttatattttaaattttctattttatcatttttattttattcgtttggtttctcgattgtagcttttttttgcattgtatttattccattacagtg

SEQ ID NO: 84900 - DNA, 234 bp, Glycine max
ttcaagttccgacccagccatccgagtagccatgggggaggactgggtggatttaggggctgacgaagtgaccacggatggcaaacatgcctcaactcgtggccgtcggaggataaaccgtattggctatgatcctaatgaacataactaggtagcacctgttactgatcctccttacggcaacagcaacaccatcaagctcactaatccgactaagttatcaactaaatacaa

SEQ ID NO: 84901 - DNA, 444 bp, Glycine max
cccccccgaggggcccccccgaaatttccggaccaatccctacaggcctcccttttttctttttagagggggtttttaaaccttggaatatccatggctttttctttttccgtaaaaaaatagttacccaataaaaatcccaaccaactttcaagccgaaaacttaaatgtaaaacccggggggcccaaataagaaaccccccccaatttattggcggggccctcccccccccttttccaagggaaaaacccggcgcccccgtttttttttttttaccccccccccccgggaaaagggggttttcctttaaagccccccaggtgttttttttttaccaaaggaaaacggcaaaaatttgtttgccccccccccccctaccctaaaaaagataaagaagggccccaccttttttttccccaaaaaaaaaaatctttttttttttt

SEQ ID NO: 84902 - DNA, 485 bp, Glycine max
ttaagattcattttatgattaactcatttttctgttatgctttttgagtttcaggtttttatttattttttatgtttaaccatattatttttttttttttttgggaaatcgcaaaaaaaaaaaaaattttataaaaaaaccccataaacatcttttgaaacctttaaaaaaaccaagagggctgagactaaacaaaaaaaaaaaaaaaacaacccttccaaaaggaccactcttttttacttaaaaaccccaaaaaagggcaaaaaaaaaaaaatcggaaacccccaactctggggggacacactctggactgcagaagcctggaaaaacaaaaaaaaaaattttgccgcccccttattatcaagaggggggggccaacataatgaaaagcgggcccccggcccttaaaccaaaaaaaacctaggttgggggctttgccgaaggctcaaaaagaacaaactttgaaaaaacaccccgcttgaacc

SEQ ID NO: 84903 - DNA, 499 bp, Glycine max
ccccaagaaaaacccttcttggaacgggttttttggccaccgtttctcagcccctcccccaaaaaccccggggaaatttttagtccccccctgttaaaaaaaaaaaaggggggccggtctttttttttcatcccaaacccacttttggcacaaaacagggcggtttaattgggggggccccccccgaaggcccatttttttattttcccccccacgggggggggcggggaacccgcttaaaaggggattggtcctttaaaacaggccccccccatggcccaaattattataagattttcccccccccaaaaaaaggcccggggccaaagaggggaattttttggggggaaccccggcggtttttgggaagagaaggcccccaacccagccggaaaaaaaccccccttggtggctgattggaaaccccccccctatgagggggaaaaagtttccccccccgcccttgaaccccttgcctagggcaaggattttttttttt

SEQ ID NO: 84904 - DNA, 281 bp, Glycine max
caaagtggttaaaccctttaattccatacctttcccttctatctttccattttttcttttagaaaacccattagacccccgcgtaatcataagcatagctttttcctaaaaaaaatttttatccattcaaaattccacacaaaatacgagccaaaaacataaatagtaaagcccgggagaaatataaaataagctaactaacattaataagattacgcccactacccaatttccaaaagggaaacctgcctaaccaactacattaataaattaaccaacgc

SEQ ID NO: 84905 - DNA, 320 bp, Glycine max
  unsure (1)..(320): unsure at all n locations
ggaattcggctcgtgctcgagccgattcgagctcgaggcagagagccgnttaccacagcgcgtgactaccacgcgcgcatctggtgtgtgaagtaccagatctctcacgcccagagactcctcctcaagagcggggcctcctccattttgctttcttcctcctcctctatcatattcacacacacacacatatatatacaaagatagggtaaatttttttcattttctggtcagagtcattgggattattagatgtatatgatgatgatcatgatcaagatgatccatatcagccgggatcgaatgtgttagaaaatttt

SEQ ID NO: 84906 - DNA, 561 bp, Glycine max
  unsure (1)..(561): unsure at all n locations
tacgttatctcggaattcggctcgagctcgagccgaatcggctcgagagcatttccacgacattcttctagagataaaagaaaatagagaacaggaagccactcaagtattctattctgagctgtaatctacaccgttgaagatttgatgtatgcaaaactctcacggatacaacagatggactgatgagttacaacttacaacaactttaaagtagtagacttgtatgaggaattattccatgtggagaagttggagtgtcatagtaaattcaagcattgatagaaacttcacctttgtagtttgtccaaatggttagttgagaaatggcagcttgtctattagagtaggacactatgttaggttaggggaggacaaatactagcagaaaccttgaaatgggacatatcagttcctgttgcatataagctagtccacagntttcatattgaatttactcattagggagatgtatgcaccaatcaatcagnctgttcccattgaaactgaaagntcaaatttatttttggtgaaatagcagacagnatgtctgaattgagc

SEQ ID NO: 84907 - DNA, 255 bp, Glycine max
  unsure (1)..(255): unsure at all n locations
aggagcaaaccaatnnctctattataaggacaaaagggcaaattcacagaaattggggggaaaaaatcagnnaaggccttaagggagtaattattggttttggtttgcaaaaatttgccaaaatcaacccagaagaattttgactctagcccactgggtcgcttcttacctactgagtgaataggctgnactgattaactattatgaaagacaatnaattactgacaaattacttnacaaaaatatacaaacatg

SEQ ID NO: 84908 - DNA, 265 bp, Glycine max
  unsure (1)..(265): unsure at all n locations
gcgnncgttagctaggaattcggctagagaaaactttaagagtctttaggtttcagttttgttttagctatttatcatcattccttcttatcagagtattcgtatgggacttagatgttgtatttttattttttttcaacttctagcaaatgagattttgaataaatagaaaatgctagaaataaaggttttcttggtaaaatggaagtaggggatttgtaaaaaaaatattaatatttttgggcggccgccgacttgtgagctc

SEQ ID NO: 84909 - DNA, 399 bp, Glycine max
  unsure (1)..(399): unsure at all n locations
ggcggagagaattaaagatgggcctttccttcttcccttttttggaccaaataccccatttttagacttttcaccctcaaaatcatctttaaattttttattgggatttattgttcctcctcaaacaaaaatctttgacccaagagtagtatctccttgaaatgacttttcaaactcagcattcaggcgagcaggctcattttctgctctttttttctttgcttcctcctctttttttttcttctggaacggggtctttttccgcgtgatagaaaaacaaactcatccttgcattaacaaacaaaaaattggtgttgggcttggatttttgttcacaccttccttccttttttccttccccggagtcgggggtaaaaactgaatgatgcccagnaacac

SEQ ID NO: 84910 - DNA, 512 bp, Glycine max
  unsure (1)..(512): unsure at all n locations
cccttttttttttttttttttttttttttttttttttttttttttttttttttttttttttttttttttttatttttttttttttttttttttttttttttnnnttttttttttttttttttttaaaaattttccccttaatttttaaaaaacaacctaaaagagagaggccccccaaaatttaaacccccctaaaaaatttttttttttaaaccaaaaaaaaacccccccccctttttaaaaaaaacccaaaaatcccaaaatccccaaaaaactttttaataaaaaaaaaaaaaaaggtttttccccccccttttccccttttttggttttaaaaattttaaaacccccgtttttaaaaaaattggggaaaaaaaacaaaaaagggggccccctttacccctcctttaaaaagggggggtttgttaaaaaccggaaaaggggttttttcccaaaacttgggaaactaatttaaattgccctttttttaaaaaaaaaaaaaaacgggcccc

SEQ ID NO: 84911 - DNA, 531 bp, Glycine max
  unsure (1)..(531): unsure at all n locations
tttttttttttttttttttttttttttttttttttttttttttttgttttttgtttttttttttttttttttttttttttttttttttttaaaaaaaaataaactttttttttcctttttttaatccctcccaaaatttttttaaaaaaaccccccaccctttttttttttttttaaaaaaaaaaatttttaaaaaaaaaaaggggncccctttttttaaaaaaaaaaaaaaaaaaaaggggcaaaaaaaaaaaaattattttgggaataaaaaaaattttcgggaaaaaaaaatttttttgccccttaattttttttttgggacaaaaattaaaaatttttttgggttaagaaaatttccccccaaaaatttttttaaaaacttaaaaataaaccctccgggggcccaaaaacaattaattttttaaaaacaaaaaagaaggggaacccccccgaaaaaggggtttttttttgccatccccctcttttttttttttatactgaaagaaccaaaagcgggncttgaccttt

SEQ ID NO: 84912 - DNA, 169 bp, Glycine max
aaaaaaaaaaaaaaaatttttttttttttgggcaagtatttttaaaaaaaaaaaatggaaaaaataaaaaaaaaaaaggggggggtttttttttttttttggggggggtgaaaatagaccccacatttaaaataatgaagtgggaaaaagggggttattttggggtttt

SEQ ID NO: 84913 - DNA, 439 bp, Glycine max
  unsure (1)..(439): unsure at all n locations
cgcgcgcgtgcgctgagtacgggtctagagaagacctacaccaggcccttatcaagacactaataatggtcctgctagccaacaccctagtactctataaagagcatccacatgcaccttagtcttcaccaaaattctcctctgggcatcttgagttgagtccctcttttaagctatttccttctcttaacacaatcggttgtgccaattgccatagtcaccaaccaattaacaaaggtatatatatcatcatatcatcaccaaatgaaaaatatagggtcgttttttcttgtggaggaggctactttcgaggaggcagccacagctggcagcttttaccaagactttgaaataacgaggggaggtgagcgtgccaaaatctatgagaattggaaccttctcacactctccctagacagagcctnttgctctggctttc

SEQ ID NO: 84914 - DNA, 282 bp, Glycine max
atcttcaaatttggacatgcaacccatcattttgacccaatcggaacagtaaaagggctaagatgttcatgggacattggacattgccacttcattacaccggaaactcttgagagaagattaattaaagaaattaaagatttcaacgaccgattaaaaaagggggttcatttgaaaatatatacaaggtattttgcacctatagattctgctttggttacagagagattgaactttgccttccttagcttttcctgagcctcatattaccagcctgtttat

SEQ ID NO: 84915 - DNA, 91 bp, Glycine max
aaccagaagaaaatagagtacatttttcattcccattattcaatttaaatacaattagcagtagaagaatcatgtaaaggagaaaacttgc

SEQ ID NO: 84916 - DNA, 411 bp, Glycine max
  unsure (1)..(411): unsure at all n locations
ggagcaaatacaatngatgccgctcctttttaaaatgcccaaaaaagttttttgtttttctaatatttctttttctaaattcccgtttggccaaaaatttttttccccttccccaatatcctttttttttttagtctttttctgtctggatctcacccattattatcctgtttctcacaactttgattcccaaaacttaagagctttccttttttcctttggtgccgccttttttttttccaacttttgaaaagagatccctcaggggaaccctgcccttgtacttctgtttttgcattaactttccgatctttttcgggttgaaaagctttttccaaaacatctgattgggggaggcccctttaatggaggaatttttcaaagaattcatgatcatgggctttttatccc

SEQ ID NO: 84917 - DNA, 455 bp, Glycine max
  unsure (1)..(455): unsure at all n locations
atgatgcatgcaaaatcatgttcggatctttataaagntattggggaggatcttcggtaggctacctggcgcaactgtactgcatttgaagggatgcagcttgattgaactagtattttcctcgtaaaaatgggagagcttggtttagactttgcaatcataacaccttgtacccctgcttgatgggaagattnagatattgcatccatgatcacctaaatctgtctctaaagccatggctagggtagctattgctacctccctatatataacgcggnngatatatatatatatatatatatatatatgnatatgaggactntctttttcatcctttcggcatctatatatataattgntttttctttttaaattaggataacttttagttataatctcttcgatcttcccaaaaggaaagacccttctgagtcgatcccaatgnttgctttcct

SEQ ID NO: 84918 - DNA, 342 bp, Glycine max
  unsure (1)..(342): unsure at all n locations
tttaacacaaaactcaaaattaattccttcaatngagtttgctattattgggagttgtcccttgctacttacgtgactgaacttnaacatctaactatggaattaacaatacatttcctataactacttgtcataacttatgtatctccattctgaggagtagattcctcactttggaccctatttatttctgaatgaagagaccatactttgagatatgactttcgtgtgctggtttgactctcccagcaaagtaaagctcttttcccatcaatattctcatgagttttgcaaaagtaaactngctcaacatgtaattacagcacaatgctatgcatgatt

SEQ ID NO: 84919 - DNA, 391 bp, Glycine max
  unsure (1)..(391): unsure at all n locations
tttnnnntttttnntttcttttnnatccccaaaaccnnannnnnaagggcaaagggccccccccaaagaaaaaggnnnccnnnngcaagaccaagnnacccggtgcccgcaagaaaacggaaaagaacaagccccccaaaacaaaataaaacacaaccaaaacgcccgagcaaaataccccgcccaacaaaatgaagccccaaaactaccccgcacacctaaacacccccaccaaataacaggaacccnccaccaaaaaatcccccaaaacagaaccactcaagtaagaggaaagagaaaaanccacccacaccaccccagaggacaaacaatgacccaccgaacccccctataaaacaaaaaacccccaccccacagnaaaacgggaaca

SEQ ID NO: 84920 - DNA, 563 bp, Glycine max
acaccccaaaatttgtcttattaacatttttttcatttttacctttcaattcttttttaattttttttcttttccttttaaaaaagcccaaaaaaaacccttttactttccacataaaaaaaagaaggaaaaaaaaaaatccccctgaaaaaaaaaaaaaaaaaaaataaaacccggaactgccaaaaaaaaacaaaattcccccccgagctaaaaaagggacaaataaaaaaaaccccccccaacaaaaaaaaaactccacaacctttgtgaacaaaaaaaccacccccaaaatgatgggtctcccccctcaaggaacaaacacataaaaaaaaaaaaaaaacaaccccccccccaaaaattttcaattttttcaaaccgagaagaaattttatatctccccccccaaaaaaaaaagaaaaaaatatccctttttggcaacaccctacataacaaaaaagagaggcgcccaaaagaaaaaaaaaaaaccccccaaaaataaaaaaaaatcctccccctcaatggaaaaaaaaaaaaaaattttttatatatattcccccccc

SEQ ID NO: 84921 - DNA, 146 bp, Glycine max
  unsure (1)..(146): unsure at all n locations
ttttttttttttttnnnnnaattttttgggggggtttttttttnttttnggggaaaaaaaattacccaaccaaattttttttaatttttaagaagtttttcccttcccatttgtgaattaaaggtcctttttttttttttatcttc

SEQ ID NO: 84922 - DNA, 284 bp, Glycine max
aaagaaaaaaaaaaaaaaaaaaaaaaaaattttataaaaaaaaaaaaaaaacaaaaaacagcagaaggtattttaacaaaaaaaaaacacacttacacacacataaatacaaaaaaccaaaaggccgcccgccttaaaataccaacacttacttccccttccttccaacaatatacttttttataatgccccccaaaatccaatccactgcccctatttttacaacttattaactgaaaaaccctttctttccccaacctaaatcccctttcaacaatatccct

SEQ ID NO: 84923 - DNA, 201 bp, Glycine max
tagagaacacacaaaacatcattggatagatagaaatatatttacatcaggtacctatccagggaaaatccaccaaaggttttggttttcataccaagaagccttctttacaacaaagagatagacaagatgaaagattgccaaaatacaagtggtgaggatgtctccttcacctctaggatctcacaatcactcacaaac

SEQ ID NO: 84924 - DNA, 120 bp, Glycine max
tgttcgtgaacctcaaagttaatcatgggagtaaacattattttttgcaggtaatccatttattgaacaccgtaaggaaagaaaactcaaaacttggaaacacaaaaaaagaataaaaat

SEQ ID NO: 84925 - DNA, 73 bp, Glycine max
tttttaaaaaccaaacttacctccccttccattcaacatcataacttttctatggtgccacctaaataaaatt

SEQ ID NO: 84926 - DNA, 77 bp, Glycine max
aaaccaattatttccatttattttttgaccattttggcctccttattggtggaaaatgtggaattggaattccccga

SEQ ID NO: 84927 - DNA, 379 bp, Glycine max
aaaacccgggtcgacgagctcactaattcgccgcccgttctcaaccaaaaacttttttttgtcctttcttctctctttctctgtcgttcaacgcatcccaaccctgtggcgctataccctcctagatctactctctaaccgctatacaggctggtactaagagctgtggttagtcatagatggcgctctcagcttcacgggcaatgtcaaagggtgtggtggtatctgtgcctgttctggttctatctgctttagtggctactgttttcctgttcttccttttgtcctctctttcatcctgctcctgccctactccttcagaaatctctgcctccaatgttaggagtgttggtgttggtattggtgttcctgagtctag

SEQ ID NO: 84928 - DNA, 101 bp, Glycine max
ccccccaccctacccacctaaacctactccctacccgctatgcatgccccttactaaaaggtgaggttagccatagacggcgctctacaactcacggacaa

SEQ ID NO: 84929 - DNA, 132 bp, Glycine max
  unsure (1)..(132): unsure at all n locations
aacccgggtcgacgagctcactatgtcggccgcccgccctttttttttttttttttttctgcnccatntttttttttttgggggggcttatcattttttccatcacccgtgtacaccacaaaaaaattttca

SEQ ID NO: 84930 - DNA, 358 bp, Glycine max
ataaataatattgcgaaaagcatgatgataggtttaaaataattttcctgtgaaacgaggttatacaatccgaccacaaacactgcacttgaaattgctatcaggagttaccatctgtttctccagtgaccatatttccagaatcctatgccactaaaatataaccgcatgcacgcataggaccgtgacatgtgcaaacatgtcttcaccataaagggaacagggctatttatcacacatacaattcagtcccaaaacacaatctaattcgtgaacttccaagaaacccagcattggtcaccaccattgaggtaattgtctgtttgcctatggtctttgagttgaatcatattaaaaa

SEQ ID NO: 84931 - DNA, 242 bp, Glycine max
aaaaattttcccccccaactaataattaatgccattagtctgtctcacacatatcacatcacacttatatactgagaacaatgtactgaatgtacaatctcaataaacttcactcaaccaatattctgacttttgaccttggtcctcctttccacacctcactgcaaactcccatatcttctcaaacatcttttgattctaagcaaaactctcaatcttttcaactcacatctatctatatc

SEQ ID NO: 84932 - DNA, 405 bp, Glycine max
  unsure (1)..(405): unsure at all n locations
ggccgacgaactcacgagtcnccnaccgccctttttctttttttaataaaccacaccacaacgcaacagagcggtattttttaaaaaaaattacacccccccaaccacccaaaaattatcaccaaacaaataaacatacaacaaatcaacccaaacaaaacaatcaaaaatctttctaataacaacaaaaccaccatcattctctacaccaaccaactaccaaaaaatcaatcctaaaatcaacaaatttccaacaacaaacaaacacaaaactcatcatataaagcccacaacctataaacaaacccaaaatactccccaaccaaactaaaaacaacccaaacaaacttaaaccaaacaaccacaacacccccaaaaaagcccacttttctctaccttcccact

SEQ ID NO: 84933 - DNA, 384 bp, Glycine max
accgttcgatcccggtcgacccaccgtcccttgtgtgatttggatcacattcttctttgcttcgggtggcgggggagatcccagttatttaatgtgaagtttctgttacattggtcataatagtcttgtaagtttattgtttttctgggttgtagtgagcatttttgggctgttggtctagctaaccataatttctgtattctaccattttcttgataaatgagttagtctagtttgccttcaataattttattgtttttttattttttatttttattgtctttctctttacttttttcattcttttttaatcttctcttttttctccatatttttttttatttttattctctctttcttttttcttttttatttgtttttttt

SEQ ID NO: 84934 - DNA, 315 bp, Glycine max
attacaaaaaaaacctttaccctgagggaatgtatttaaatctctaattatcccatacatatatatatttatttaaaaaagtttcaaaattaactattattacctattaccacacataacctatcattccaataacaaccgtccgaggcaaacttgcaaatctctcttttctctctctcacacacaaacccatattttatggtccttttatattgtttacactttacattcatctcacaccagtgtcttgcaggtggaggtgagtgggtcccacatcgccggggtcccgcactggttcatgcagaaatcctccac

SEQ ID NO: 84935 - DNA, 379 bp, Glycine max
gttttgttgtagtgctctaattcacaatgtcatttatgctttatgacttaatgatgatgagtagatggtatgcgatgtttaattttattatgaacgatgattagatagtatgtttataattgtgaaaagttaatgagtatattcattaatcaaattaaattctgaaagaacttaaaatggatctttatgttgttgtatatgttagtgtcatgtagcagcttctggatcattacagttatgagtataaatgatgagtatggcatattatagaaacagtctcaagagggttgaacctcattataagttttataaaattaaatgattttagtacccagaatggcttagtttaaagttttcaaaaaatcatttgtgggaatgt

SEQ ID NO: 84936 - DNA, 272 bp, Glycine max
gatgaatattgcgaacaaatgtgacttaaaaagaccataatttacccactcctaacaactgaataattaaagtgtggggtccatattcaataccctacaaggaaaaaaaagtacccaatcattttattttaaatattccaaatttagtaatagacatatattccaggccaaaaaataaaagtttgttgttactaaatttgtagtttttatatttttagtatgagtttttttagtaataagttttacaatttaattaataaattttattactt

SEQ ID NO: 84937 - DNA, 362 bp, Glycine max
gttggtaggcaatttatgatatgtgatgggagatccaaatggggatctcactcaatctcaagaacatatatatcatgtgatcgtatactacttacagacccaaaatacacattgttaaagctaagctttccctctacttgtgctgctcataacaaacaaaaatggaactacctttattacatatagactaatttcagcgatcacatgcaaaggtatatgacacctatactttctgatccgagcgtcactcctagagagcacattatttatcatacagcttagcgatcaaatattttactcactagagttcgacatctgcaatgctgtccaccaataaaagctcacggtcttgtcacttatgc

SEQ ID NO: 84938 - DNA, 240 bp, Glycine max
tgttttttttttttttttttttttttggtttttttttttttttttttttttttttttttttttttttaaccccaaaacccctaaaaaataaaaacctttcccaacaccaattaaaaaaaagcctttgaaaaaaataaaaaaaatcctgccaaattaatccaaacaaaaaaaaatgttttttaaaccaaaaaacttgaataaaagttcaaaataaaaagggggaaaaatttccatgtttta

SEQ ID NO: 84939 - DNA, 403 bp, Glycine max
gccccgcccattttctctgcatttttaatatcaatcaccaatcaattccctgttttttttattaatcatcagaacttcatttttttaactaaaacaaaattcctttattaaattatttttttttttttgggggggaaaaaaaaaaaaaaatttcccccccccaaaaaaacccctagggaaaaaaaactttgggacccaccaaaaaaggccctctcttttgggaaaacccaaaaatttttaaccaaacttttttcttttttaaaaaaaaaaaaaattttttttttttttttcccaaggggtaaaaaaaaaacccccccctcccccaattattttttaaactttcgtccaaaaccaaccccctttttttttgggggggcctataaacaaccccccccggtttttt

SEQ ID NO: 84940 - DNA, 91 bp, Glycine max
gcaagttttctcctttacatgattcttctactgctaattgtatttaaattgaataatgggaatgaaaaatgtacacaattttcttctggtt

SEQ ID NO: 84941 - DNA, 286 bp, Glycine max
gagcttaattatccgccgcccgcccttttttttttttttttaccacaaaaggttcagtttttgcaccactcacaacacgaaccaatctatctgacctcaaccaattacagaggggcctaatctattttaaaaaatgctgcgaagtgcaggtattctattttactcaaaacatagacagaaagaggacaagtgatgacatgaaagattctccaaacagcctgcaggtggtcttgcctctgaataaaccgttatctctgaccatcgagtcgcgccacacagtgtctag

SEQ ID NO: 84942 - DNA, 338 bp, Glycine max
ccagtgtacaagcccccagttgagaaaccttcagtttataagcccccagttgagaaaccgccagtgtacaagcccccagttgaaaaaccaccagtgtacaagcccccagttgaaaaacccccagtgtacaagcccccagttgaaaaaccaccagtgtacaagcccccagttgagaagcccccagtttacaagcccccagttgagaagccaccagtttacaagcccccagttgagaagccaccagtatacaagcccccagttgagaagccttcagtgtacaagccaccagtagagaagccttcagtttacaagccaccagtagagaaaccttcagttta

SEQ ID NO: 84943 - DNA, 107 bp, Glycine max
accgcgcgaccgggtcgtgcagctctcactttaataacagagacatcagatgaaatgacgcatgaagacttataatagactgctatacgtgcataatcgacggcaat

SEQ ID NO: 84944 - DNA, 245 bp, Glycine max
  unsure (1)..(245): unsure at all n locations
cggaaaaaaccccgggcgaccggcgtacttttttgggggcccgccctttttttttttttttttttttttttttttttttttttttttgggggttttttttttttttttttttttttttttnaaaaaagcaaagcaattgcattttcgagaaaggaaatttttttttttcctttccaagggggttaaaactttggaagttctgaaaaatacagcactttgcactttgtccccatttgcaatgtcag

SEQ ID NO: 84945 - DNA, 104 bp, Glycine max
cttgggcttcaggataggcctaataagaaaacaaataattccaattcatatatgaacatttttgcctccttatttcttgaaaatgtggaattggaattccccga

SEQ ID NO: 84946 - DNA, 195 bp, Glycine max
  unsure (1)..(195): unsure at all n locations
gaaaagaaattgcactttttatgatgggaaagcaagtgcacaacatgaagcaacttgaggaattgatatatcctgtcacttctctaatcaggcaaaactaatacaaattcaaaatgaacttaacacgaccttatccaagtagttgcccaaatgagagtccgactcttctcttaaagtctggattntggactttga

SEQ ID NO: 84947 - DNA, 287 bp, Glycine max
  unsure (1)..(287): unsure at all n locations
ggccccccttttttttttttttttttttttttttttttttttttgggttttttcccatnaaacagggcctaatcagttttaaataaaaacagggaaaatttttcacatccaaactttctagcttgattttttttcaacatagcttgatttgaaaacagtgttaccaaacaaaataatgccgcaaaacattgaagagagagagagacaagagatctatgggtctatgcccttaatgggctgcaaaaagacaacatatagntttttttttcattttattttcttggaat

SEQ ID NO: 84948 - DNA, 268 bp, Glycine max
gttgcttttcacttatagttaacaacttttatcactaccattacgtgcattacagatccatcattcatcccaagttggtggaaggcgttggcttcgatctttttgatatggatttagagtttgaatatcaagaagtaattaactcctcccttttctttcaacaatacactcctctctctctctctctctctctctctctctctatatatatatatatatatatatatatatatatatatatattcttctgggtatgggaacatatata

SEQ ID NO: 84949 - DNA, 537 bp, Glycine max
gcatgcacgcgtacgtagcttgatactgtacggccttcgttttttttttttttttttttttttttttttttttttttttttatttttttttttttggttttggtttttttttttttttttttttttttcccaaaaaacccaaaattaaatttccagcccaatggtgttttaaaaaaaaaggtgaaacaaaccccccccaatcccttttttttattgaaccaaaaccccccctttttgaagtttttaacccccccccctccataaaaaaaccttttgcaaactaaggtttggccccccccccccccccccgtttttttaaagtaaatcccctaaaggaccccggccttggcctaaaccccctttggacccccccctttttgcgggggtttttgggtgcaaaaaagaacctaaggtttgaccgccccctttcctttttccccctgggggaaatggccctgaaattccccctccccctggaaaaaagaaaaaaatttgcccccgccccttgggcgccccccggggtccccccggaaattc

SEQ ID NO: 84950 - DNA, 346 bp, Glycine max
  unsure (1)..(346): unsure at all n locations
gcgnacgtaagctcggatcccgtatagcggacgccctaaattaacttgttttactaccaaaatgcttctgtccactctcgtattctcaagggggggggtgctttagacactgcgatgaaatccgaaccggacactcccctgagaaagatcttctctgaagcccagccccttactaacatcaacgtttcctacgacgactattctcttgtcaactgaaacactatcctccaccaacgttgaaaaaaccatgagcaggccgacgcgttgtacaccaccgaactcgaacaagttactatacgcgggcaccaaactacagcaaatgtgccgctagctatactccaacgac

SEQ ID NO: 84951 - DNA, 71 bp, Glycine max
tcccccgcaagctaaccaatttttcctaaaaggagttatattaaaatttggctaaatcatggcaaaatacc

SEQ ID NO: 84952 - DNA, 446 bp, Glycine max
  unsure (1)..(446): unsure at all n locations
gagttcataaactaaaaagagcataggtttttgaagttagtttatgatagcttgaaactgttatgaaaattctaaaaactcaagagatttaattaaaaaaatatatgatcaaggattttatttatttttattttatttcacatatttgaaaattttcgaatagttcaagcattaatcgagtaatttaacttataaaatattctaaaatatttattacaaattttatgtataacaatttataattcgatgataacatccaaaatttgtatgagtacattatagttaaattctatttttatgactttttttatttgttcatcacatgcttttttttcttgttttgaatttattttttctaatcatgatattaatacaaaataatctccaataaaaataatgattaatgtttgtcgaagaatataaatgctgacaacatanatattttt

SEQ ID NO: 84953 - DNA, 387 bp, Glycine max
aatttattttttttttttttttaaaaaactttttctttttttttgttggggttttttttttttttattaatttttttttttaacgccccgcgggcggaaaccggggcccaccccaaaaacacacaccggtaccaacaagggccccatttttcacaatacgaagaataataaaaaatggggctaacaatgacaaaacagatcacccggcaaaaaccgaaaaacgacaaacatatcaaaaaaaaagcaaccccggaccaaaaaaagaaaaccctggggtgccaaaagagggaacgaaccaacataaaatgcgttgccaccaaagcccgttatgcaggaggaaaacatgacaggcccatcatcttaaaaaattggcaaacccgcggggaa

SEQ ID NO: 84954 - DNA, 341 bp, Glycine max
aaaaaaaaaaaaaattttcccccaggggcttggttttggttcccaaaggggttaaaaccctttttttggttttaaaaaggggggttttttaaaaaaaaacgggggggggggggggcttttggggtttttcaccctttgaaggggtttcccttttttttccccccccggaggggttccccttttttggtttcccggggggggttgggggggcaattccccccattttttgaaacctaaaaggtttttggggggggggggtcccctttttaaaaaggattggggcccaaaaacgcccccgggttttttgggaggggacaaaagggaaaggggggggttttttc

SEQ ID NO: 84955 - DNA, 435 bp, Glycine max
taagctcggaattcggctcgaggttttttctcctcctacttagagccattagatcgaattcgatcatttcggatttgatctgatggtttgggacgtgtaattagtctaagatggacaaggctaccaggttggcaacagacaggggtgtggagggtttcaccgggagacattgctccctccgatatgacccccaaggctctatagaagctgcctgtggagggcggcgccggcggtgaacggaacaacaacattttaaacacgttgagcggcgcgacatacaatatctacttattcaagggcctgaaacacgtccgccctgacttgtggttcttaagcatggccaacggaaacatatcggcttgatcaacctcctctgtttgtagcttggccatgtatgctctacacttgcccgttacatcatgatgccctccatca

SEQ ID NO: 84956 - DNA, 446 bp, Glycine max
aaaacaaatttttttcccctcgaccccaattaatttttttaactaaagggaaaaaattcctttaaagaggccctcatcatttaattccaaagggcaaaattttaaaagtaaacgggggaggggaaaaaaaaaaaaaaaattttttaaggaatggcccctcctattttttgtttaacaaccaattccttaggtttgttccaagaaacataaaaaacttttccttaaaagggaaaggtgtgttagggggaaaaaaaaaattattttgtccaagtttttttttttcctccaaaaaataggaaagcaacctttgaaattggaacttttttttgttttggggagaggagggtttttttttttaaaagggataccaggggggggccacccaaaaaccccaaaaaatatttgtgtgaaaacaaaaaattacccctaaaaaaaggctgttcaaa

SEQ ID NO: 84957 - DNA, 479 bp, Glycine max
gagggacaaccgattttttttttttattgcaaaaataaaaaccgagtaattgcggaaaatgcaagaagcgacccatgccaagcttccgagttcctatcacaatcaataatcattttctacaaagaaattaaagaaacttttttttaagaatatacacctgtaacttatttacgtacaatgtagatttcaatatggacaaaggcgaatttgaatccccattacccagtatgatgccctagttcagtttgttcagtcatcagcaaaatatcggcaagggcctcgtcattatctattttaggggaatcaagatgttcgggatctttccctaatagaaacttctgctgcataatggaggtgaactgattcatccggtcctccagttcttctgcagataaaggtgattctcctcactcactctgcctggatcaccctcattcaggtgtctctctacagggttggccattgctactatttcttct

SEQ ID NO: 84958 - DNA, 218 bp, Glycine max
gtagctgtatcctctagagcgcccccttttttttttttttttttttttttttttttttttttttttttttctctatttataacccccggggttttttaaaaatgggccggaaaaaaaaaccaatcaactcctaacatcaaaaactccccatccaaccccctaattctaaccaatcaatatcctaaacttcaaacaaaaactcaaccttcattttttaa

SEQ ID NO: 84959 - DNA, 543 bp, Glycine max
cactatcagaaaatttgtgcattagaaaagcatccgaaacagcaaaaatgttacaactctaggaaataataaaaaaaaaggtaacttatttggctattttcctacagtgaagctggtgggaaaactggtgaatgatgttactatggtaatgctacagggggctttccttggaggctagtgttacaattacattaatgtaatgttaaactatatattggccaatctaccagaatttgatcctttccttcgtctacgcctcttttggcgaatgcgccaaaaactcaaaagcaaaataccagttactgcaacaacaaatggaatcagccagtgaccaccaaccagcataggtgcatcaggctcatccccatagaacaggcctaaatacctgttccccagaaaatcatccttattacttctcacagtcaacctaggacgcctaatgttggaagcatcagaggttgaatttaaacccctccccaaatcaatggcaggatatccgggcaatcttctgtttcttcccctgacttgcaaattgtaaccctt

SEQ ID NO: 84960 - DNA, 282 bp, Glycine max
acttaaagttttatttggggtgggtttctgacacattggttcacgctcttaaaacattcctgaactaataaacgtacaatttttccttaaaatgggacgtatgagaacgaggctgaaacattcccttatacattaatcggggtaaatagagatctcccataaatccatcccaacctcaaaaaccgtagtggtaaaaataatgcccatatagtctgaattgtggaccaaatgatattaaaacagtgaaccctttcattcacaatgagatatgaaaaaagccaa

SEQ ID NO: 84961 - DNA, 81 bp, Glycine max
  unsure (1)..(81): unsure at all n locations
cncccccccccccaaattgagatttgaggcccttttaaaaatcacgggccaacaccaaaacattctaccctctattctttt

SEQ ID NO: 84962 - DNA, 438 bp, Glycine max
atagccacattttaatttttgggtgggggaatttaaaaaccacttattaattttcttggggctgcaaataacccccaaattaaacgtattcctatgtgcaaaaagtctttaaaattataacatatacacaatgtaccaggggccttctacttaaaaaaaaaaaaaaaattacctattcctgacagataattttcttttaaactgtatgaataacacgaaggaggtatcactgcaaaattgacctgtaacccaattttaccacccaaaggaaaatcttaccgaaattcaacaacacaaccccaggaacattgttcgggcccgtcacaaaccaatttgcattcacatttcgtggacacataaaaaccttaaaagttccccaataacttcaaggaggctattactgcaaaattgatctataatcccattttacctcccaaa

SEQ ID NO: 84963 - DNA, 247 bp, Glycine max
tattttaatttttaatttatttaaattaaaaaaaatgggaaggggttttttaaatatttaagggattaataaaatattttgaaaattataatatgttaaaaaaaaactgttttagggagaaaaaaaaaattttttttttataaaaattttgtataaaaatattaccatctttaaggaaaaactgtaaacaaaatataatttaaatatagtaaaaattataatttttaattttaaaaagcttaaaatt

SEQ ID NO: 84964 - DNA, 528 bp, Glycine max
ttttttttttttttttttttttttttttttttttttttttttttcggggtggttcttttttttttttttttttttttttttaatttaacttttttttttaatttttttttttatttttattacattttttaaaagggccggggcccaccaaaaaaaaaaaaaaattatcttaaaaaaaaaaaactttggcagaaaaaaaaaccccttccaaaaaaaaaaaaaatgaaaaaaaaaacagcaaacttccaaaaaaaaaaaaatccctttaaaaaaaaggttttttaattttaaaaaaaccccccccccaaccaaaaaaaaaccttttaaaccgaaacttaaaaatgccccttaactaaaacttaatacccaaaaaatattttaataacataaactcaaatcctttaaaaaaaagacaaacaccacttgacagactttaaaaatgccccccttcaaaaaaacaaggaccaggaaacacttggtgaaaaaacctccccaaaccagagaaaaaaactttaggccccaaccctc

SEQ ID NO: 84965 - DNA, 340 bp, Glycine max
tcatttatgatgcacaaatacaatatataatatattcgattcagcaatacgactactttttaaatatttaaacattttcaatggattattttgcctgcttctactttaattcaagagtcctcagattctatctcaccatgcaggcatcataattgtttaacaaatggtagaagaaagcattaccacaacaaaaaccaaccgctaaacacgtaaaataattcaaagataggaaaaatcaaaatctgaactaagaatggggttaaccttgctgtaaaaattaaatataataagacaacaaaaaaggaatggagcaaacaaaggatcaaaagtgaaccaaaaa

SEQ ID NO: 84966 - DNA, 310 bp, Glycine max
aaaaaaaaaaaaggggggggcagaaaacaaattgggaaaaaaaatttttttttgggggaatggaattttttccgcccccttgaaaaaaaaaaaaaaaattgggggccaaaattaacggggggaaaaggccccccccccaaaacctaaaaaataaattttttttacacccctttttttttttttccccaaaaaggggttttttctctttttttttcccggggttgggggcaattcccgaccccccaaatcccaaagggcccggggggggggctttttttctgggaaaaaaaacttgccccctttttggggg

SEQ ID NO: 84967 - DNA, 344 bp, Glycine max
gaaaaaaaaaaggccctttaaggggggtttttgttaatttttttaaaaaaagggttttttgtttttaaataaaaagggggaactggttccatgggaaaaaaaaaaaaaaaccccccttaaaaaaaaaaaaatggggggggcttttcaggttcccccccaaagaattttttttcccccctcttgaatttggggaaaccctggaaaaaaaaaaaagggggggaaggcctttcccatcccctggttaaattagttttacaaaatttagggggggggaccccccctttccggggggctttaatttgggggttgggcctttaaatcccttggggtttttacccaggggt

SEQ ID NO: 84968 - DNA, 117 bp, Glycine max
  unsure (1)..(117): unsure at all n locations
cgcatcgcaccgccgtacccgtaagctnntggatcctcgtagnnagcggccnnngccctttnnttttttttntnnttttaatgggctactanntcatctanntaccttatnngatga

SEQ ID NO: 84969 - DNA, 149 bp, Glycine max
tttaaattaaatcactatttaattttatttagggacacaacaataacaaaagaataaaaccaaaaaaaaaaaacctatgttaaatgttaatttaatcaatcatcatcttcttcctcatcatcatgctcttgcagatctgcaagagaaaa

SEQ ID NO: 84970 - DNA, 273 bp, Glycine max
aaaagaggggatataaccttataaaaagagattttggaaacaattggtgttcataaaatattcataaaatggaaatatatattcatagatagactcatttccagatgctgtatggctttatactgggaatagaatcgacaaaaaggttgaagtactgaccttactcatgtcacaaggtttatataataatttccacacactttttttcttctctctcaatcatgttacttatttttatcatcaatttcttcaattttcttttcttatttcttc

SEQ ID NO: 84971 - DNA, 253 bp, Glycine max
cccacgcgtccgaaaaaaaaaaaaaaaaaaaaataaaaaaaaaaaaaaaaaaaaatataaaaaaagaaaaattaaaaaaaaataaataaaaaaaaaataaatattgtgtggcgttttttaaattcaattcattggccgccgtttttcaacgttattacttttaaatccctgcccttacctaaattaatctgcttgtagtatttcaactttttgcctgttaaaatatttgctataatgacctaaattatctttt

SEQ ID NO: 84972 - DNA, 284 bp, Glycine max
tccttccgggtgtaaaaaaacaaactaatagagatttttttaataacaaacaacaacaacaaagattcgcagtttaaaaaaactaagcctgctccctccttcttacaacacttttcatataatctcttccttctcgaatgttttctatctgaggaatttatttgaagctacgaagcggtcttcatcaatgttcattttcaaaaaacccgcttcttccccaatttcaaagcttgacgggatatccactaatctcaactttacgttgactgcaaaaaaccagttca

SEQ ID NO: 84973 - DNA, 309 bp, Glycine max
gccactcttgccaaacctgcatacacacattctttcgccatcaggattgtgcatgggcgggggaatgtatggaaaaggctacgtgacaggtgctacggcaagatctactggtgcataggcttgtgaccaggagactgaccactggacgagaaactggcggatgattccacgtgtgtatgcatctgttaatgcgcctgctcatgcacctgcacttgatgaccaggtggatgaccaggagcatgcaaccgaccatgtgaccaacattgacagggaatgtgacaccggaagggacacctgaagggaatcagg

SEQ ID NO: 84974 - DNA, 285 bp, Glycine max
  unsure (1)..(285): unsure at all n locations
aaaaaaacgggagcccccccaaaaaacacaaaaaannnanntaaaacaaaacaaaacaaaaaacaaaaaaaaaaaaaaacaaaaatgcaaaaacacaaaaaaaaaaaaaaaaaaacaaaaaaaaaaaaaaaaaaaaaaaaaaacaaaaaaacaaaaattaaaaaacaaacaaaaaaaacaaaaacaaaaaaaataccaaaaaaaaaaaaaaaaaaaaaaaaaaaaaaaacaaaaaacaaaaaaaaaacaacaaaaaaccaaacaaaaggaagacaaatcaatttc

SEQ ID NO: 84975 - DNA, 254 bp, Glycine max
aaaaattttaagcccccacaaaacctcacaaaaccattggtaaaacaaatacccttttgattaaacactgataaaaaatccaaattattctgatattatgtcataaacaatcctttctatatcaaatacaaataatacatgctatataaaataatattctaaacatagtaaccacatcaaacattataaattcacaaacctctaaactcaaattaactttaatacaacccattacctaaaatcactattcctta

SEQ ID NO: 84976 - DNA, 202 bp, Glycine max
aattggttctgcacaaaagctcacatcaatgatcaagaagagttttacaaatttttttcttccaaatactcccacattcttattgcgcacctcccttttttccctttatatcatttattatgattatgtataattaagggataaaaagaaaattcaaagaggaaaaaaagaaagatccaagtgttttttttttatttttaaa

SEQ ID NO: 84977 - DNA, 227 bp, Glycine max
cccacgcgtccgaaaaaaaaaaaaaaaaaaatatataaaaaaaaaaaaaaaaaaaaaaaaaaagaggagaatttaaaaaaaaaaaaaaaaacaaaaaaaaaaaagggccggcctttttaaaggacccatgcttccttccccttccttccaacgtcaatactttttttattgtgtcaccaaatttcatttacctgcccgccttttaacaccgttgtgtttggaaaaac

SEQ ID NO: 84978 - DNA, 165 bp, Glycine max
aggaataatatacctcttttttttagcaacttattccatacaaagaaggatcaacaaatcccatatttttcacttacaaattgctttctccaaaaagaaaaaattaaccaaccctttaacataaaacatttttctaacaaaaacaccttaatccaaaccaaaggg

SEQ ID NO: 84979 - DNA, 297 bp, Glycine max
tttttttttttttttttgttttttttttttttttttttttttttttttttttttttttttttttttttttggaaaagttctttcaatctttaaacaacccatttcccaatccccccctaaagccccccctttaaaaaaaaattcctcgttttccatcccatcccccgaatcaaattgccccccccctttaacctttttttttcccccatacctccctccattttttcaatgtttttaaccccccccaacctaatgcccctttttacccctcccaaaaaagtcttcttacccaaattt

SEQ ID NO: 84980 - DNA, 238 bp, Glycine max
gttgtatccaatgcagagctagtcgctttctatgtgcatccctgcccgaatctctttcgggcagagtcccctctggtaatttcgccccctcgcgctgccccaagccgcaccgggcagcacctgcagcaacaacaagaaccgtgcttcaaaatgtttcacctctccgaaacaaacagaggagagagaaagctcctcgcgctataaataccctcgcaaacatttctctcgttgaaaatgc

SEQ ID NO: 84981 - DNA, 298 bp, Glycine max
cccacgcgtccggcagaagaaagagacggttaccaccaccaccagggaagaagccaaagggggactattatatgtttagagaatctctactttttgccccctcttgaattcaacgtcacttttcctttttaacccaaggccattttcaacgacctttttttaagaaacctttcttttttcttaaaaccattccggttcaaacttgcctgcaatgagcttaaccaattccattccataaaagaccgttattaagttaattggcacctgaagccgttaaagagcatatattagtcccaca

SEQ ID NO: 84982 - DNA, 224 bp, Glycine max
gcacccctgtagcaatgttatctctgaattttttgatttgccaaacaacaaaacatggttgataaatattacatataaatttcaaaaaaaaaaaaaaaaaaaaaaaaaaaaaaaaaaaaactaatataaaaatacaaaaaataaatataaaaaaaacaataaaaaaaaaaaaaactaaaaaaaaaaaaacaatacttattacatactcacaaacaactaccatt

SEQ ID NO: 84983 - DNA, 245 bp, Glycine max
  unsure (1)..(245): unsure at all n locations
ttttttttttttggtttggctaacttggacatgattatactctacatatgatgatacggngttcttttctttttttgggtttgtgaatacatatgatatgtagtcctatggggggttgccaccacatgtgacatgaccatttgcaccttattggaccaaccttacataagtatgtttagatagcttattcagaagggccacacaacacggtttattaaaccttccctgctgcaccaaacaatact

SEQ ID NO: 84984 - DNA, 276 bp, Glycine max
aaacatggaaaaaaaatccaattttcatttcattttcatgtccagtaaaaccattccaacaaaccaaatgcttccgtaatgacttttacaacatttttaattcaagtgccttggtgactcacccccccttaaacatttactaaattgcccttttttgccccccccactttttaaattttaaaccacttccccccaaaattcttttttaaccaaaagattaaaatttatttaggcctttcctttaaatttttgcagtttttaatcccccctcctttt

SEQ ID NO: 84985 - DNA, 363 bp, Glycine max
ttagataaagccacattatattgatggtttaagggctatatacaagtctaatttgatccataggtttcacaattcacaaggatgaagattcccacggtgtaaagctacagcaatcataaatgagttgtcctgtgttcagcaaacggggtgtacaacctccaaccctaaaagagaaaagatctatagatacaaccaaaggtaaccaagaacttttgttttgtcacttcatctcattttgttaacttgctagcattcattgatgttaaaagatacatcactaacgttacaagatgaatctactattcgcaaccagtcaaccactaatcccccgttaaaagaaaaaaaaaccacccttcattccat

SEQ ID NO: 84986 - DNA, 321 bp, Glycine max
aaaaaaaaaaaaaaaaaaaaaaaaaaaaaatttaaaaaaaaaaaaaaaaaaaaaaaaaaaggggaaaattgacaaccactaaaataaaaaccaaactaccatacccttgcttccggcggcttccctttcctatcctgtctcctgcctcctttccactggccttcctttttctacttcccgcctggtaaaaccctggcctttcccatcttaacccccttgcatcatttccccccccctccatcccccttatttaccgaaaggccccccccgatccccctcccaaacacttgcccaccctacatgccttttgggactctcctt

SEQ ID NO: 84987 - DNA, 235 bp, Glycine max
aaatgccaccaatttcgtattattgcgagagtagtgggaaaactcctttttagttaaataataacttcaagggccagactttaaaagacttttcattaagatagattgaacaaaatgaaattggcactttgaaaattaaacccaaaggcttataatccttttgttttccttttagacaaacaattttggcaattgaaaaatagttcctaacgccgtggtaacagatcattcaaaa

SEQ ID NO: 84988 - DNA, 288 bp, Glycine max
gacccaaaccctttttttttttaaaccccccaaaagggaaaaccccttttttcaagcccccccccttacttaataattatcccccggattttttttttttaaaatttaaggccccctttaagccttttttttgaacctttatttttttcccagggtttttcccccttaaaaacccttttccctttttttttttcccagaagtcccttccttttttttccacctttcccaatatttttttttccccctttttccactttttttttttaaattttttttttttcaaaaat

SEQ ID NO: 84989 - DNA, 243 bp, Glycine max
cccccaaaaaaaaaaaatttttttttctttgggttttttcccaacaaacctaccccccttttggggttttccaacccccccaaccccaattttttttccctttattttcccccccaatccccccccaattttttcctttttttttttccccccctaaaatcccccccccatgggggaaaagggaaaaagaactttttcaccaacattaaaaaatttccaacctttagattttttgcccccccc

SEQ ID NO: 84990 - DNA, 373 bp, Glycine max
  unsure (1)..(373): unsure at all n locations
ttaatcaaatttacatttatatcacaactaaggatcaagaatgaggaactttgaccagaatgatacttgtccttgattggggaagcacagaaaggattcggacagttcatttgtactatcatttgaccaacatgattcatgaatcgcatgtcttcccctcggggcaactagtgagaaagtaaacgaaaatacaaattgataaaaaaaagtaagtaaaacaattttcaccccaaatcaaaagcctccaagaaacgttnggatacacataaaaataaaataaataaatggaacactcaatttaaataaactctttttgctttatttcttcagtgatatattttcaatcctactttaaatgttttccatcctttta

SEQ ID NO: 84991 - DNA, 372 bp, Glycine max
  unsure (1)..(372): unsure at all n locations
acctcactacacacctcccccctttttttttttttttttatnnaaaannnnttttntataattttatttgaaattttttaaatttattttttcttttttatttntnaaaattaaatttnannnntaaaaaannnntttaaaaaaaaaaaactttaattttttaaaaaaaaaaaaacaacccaccaaaacacaaaacaatgttttaaaaacccacaaaaccccatattaattccccctaaattaacacccaaaaccccccccttttttttccccccaaaaaaaaaaaacccaatttgaaaaaaaaaaaaaaaaaaaacccccaaaaatatatcccccaaacccccaaaaaaaaaaaatttttaccccccccgg

SEQ ID NO: 84992 - DNA, 323 bp, Glycine max
  unsure (1)..(323): unsure at all n locations
cgaagcnggatcctctagagcgggcgccccttttttacattattcatttctcacctatctataagaagatgtctcctacaacgataatttttgcgcaagtgaagaatggaaagtattttttgacccatattgcaagtcataagttcattaaccaaccttttgtataaaatatctaggttttggtgcttcctcctggaatacaaaattcttaatgttaaaggttttgcaaatttctttggaacacacatgctgaaaaatgttcatgggtcataaaatacctacaaaatgcaactgtttgttgagtggctgagcatgttacttaa

SEQ ID NO: 84993 - DNA, 191 bp, Glycine max
gcacgcctacgacgctcggaactcggattgcggctcacgggaaaaactgaccatgggcaaacgtacttatttgattcggaatgctctgcagtttttttaatcagggaatggtatttttatatgtaaatttgtgaaaataatatattaacttttgtttggatacatcatacatagattaatatttttgtttt

SEQ ID NO: 84994 - DNA, 384 bp, Glycine max
  unsure (1)..(384): unsure at all n locations
ttttttttttttttttttttttttttttttttttttttggtttaaaaaggaaaaagaattgaaataaaaaatggggggggggaaataaaagaaaaaggaaaaaaaaagaagagagagggacaaaggaggaggaaaaaggggaaagagaaagggaaaaggaaagaaaaaaaaaacacggtcaagtaaaaaaaaaaaagaaacacccaaaaaaaaaaagggaatgaaaaaaaaagaaaatggacaaaaaaaaagcggggcccctatnaaaggtttttgcaactgaaaaaaaaatttttggtgaaaagtaagacatagggcatgggaaaaaggtcggaaaaaggacatatggattatgaataaataccgataggggggttcgcggag

SEQ ID NO: 84995 - DNA, 378 bp, Glycine max
agttataagaaccttaatttcccttgaacatatctgacacaactaggttaaataacataggataacaatgaaaataaaaatgtgaaaaagattgaagaaaagaaaaaacacaggaggaatcaagaatgaagggggggcatggtcctatattttaatcataagaaagatgccctacatatgaaaaattggtggggagcttcactccttggtttgagaaagaaaacttttccctaattgcctagccaactttgggtaaaactttcaaaaaggagaaattgtaaagtgtggtgtggacaacactcattgtacgccactccatttggcccagtctacgaactgcatgccaccatagatgttgtttccaaatcgcacacccac

SEQ ID NO: 84996 - DNA, 185 bp, Glycine max
ggttaattcatatgaagatgtttaaatgaaatcctgactgtaccattacagcaaacacatatttaactgagtacctaggggacgaacatcatctaaacggttaataatgtattctgcacaaactaaattactgaaaataaggctgagctcgattcggccggcaaaggtagtaatctttccttttg

SEQ ID NO: 84997 - DNA, 208 bp, Glycine max
  unsure (1)..(208): unsure at all n locations
tttttttttttttttttttttttttttttatttgttttggtttttttttttttttttttttttttttttttttttattaaaataaaaattaaattaaaaattattaaaaaaaaaaaaaaaaaaaataaaaaataaaaaaaaaaatttaaaaaaaaaaaataaaaataaaaaaaaaaattttaaaaaaaaaaaaatnttttttttntat

SEQ ID NO: 84998 - DNA, 423 bp, Glycine max
gaaaaagaaactaatttcctttctgcacaatcaaattttagaggaaaacttcaaatatacacgaggctgttagaccaaactcttatgcagacaaaactttaacacgcacgcacaattgtgtgtgtggggtggggggtggtttgacagcatataccttgggtccaatcttatatgcattattgaataatagtatttttaacaacataattccctaacataccaaaataatggagcatcccaccaacacagattagtttgccccttgtcttcgacttaccttcacaatcacatccaaggtataaagtgcaagaaaggagccgaaatcatatttccacagccattaacattctccaagaggagaaagaaggtcagtagtgttgaaagaacagcttgtatcaactcgttgattttctgagtcttttc

SEQ ID NO: 84999 - DNA, 531 bp, Glycine max
cgccgacgtaagctcggaattcggctcgagaaaaaaaaaaaaaaaaaaaaaaaaaaaaaaaaaaaaaaaaaaaaaaaaaaaaaaaaaaaaaaaaaaaaaaaaaaaaaaaaaaaaaaaaaaaaaaaaaaaaaaaaaaaaaaaaaaaaaaaaaaaaaaaaaaggggggggccgccaattagggggttcttaaaccgggaaataaattgggggcgggtcctggggggggaaaaatttttccttatgggggggggattaaaagttgggggaaaaaagggaaaaaggtgtttctggggaaaaattttattcggttaaaaattcaaaaaaaaaaaaaagcgggaagaaaaaagggaaaagcggggggggctaaagggggggccaaaccaaaataattgggggggggctaatggcccgttttaaagggggaaaactgggggggccagttgattaaaaaaatgggcaaacgcgcggggaaggggggttggttttttggccccacggggggttttttttttaaccagggaaacgggaaaa

SEQ ID NO: 85000 - DNA, 393 bp, Glycine max
tttttagtctctcaagtcaaaacaataacatagcataaaaatgataaaagaaatatgaaagaaaacatgaatctggggatctcccagtcacgtatctccactccctcccaagaagtcaagcaaatcggccatctcctcgtcctcgtgggcctcttctccaccgccgggagcttctgggggtgcctctcctgcttgggcctcgggccaatctccgggccatgcgacctctgccctgaactggtctggagtagggcatgaaaaagaagcgaagccctggctctgcatgctgaggctcatctggtacaaacaatcatgggtctgtacatgtgctcggtggttggccgcctgctggcgaaccaaatgccgtaaatactgctccatgtcaaatgcccc

SEQ ID NO: 85001 - DNA, 378 bp, Glycine max
cccaaaaagaaaaaaatttttattttccttaaggtcggaaacagggaaaataattcccccggttaaaagaaattaaacttttcccctttccccctttttttttttttaattttttcagggggggcccatgaaaaaaaaattggggaaaaaattgtttttccggaaccaaaacccaaagatcccctttttccccccccttaaaaggggggggtttttccaacatttccccaactttttttttattggggccctttaaaaaaaaaaagggccccccctggggcttcaaccggggacataaaaaaataaacttttttgaaccggttttccctttttttttaaaaacgttttttacttgggccggggggttcccccgggaat

SEQ ID NO: 85002 - DNA, 384 bp, Glycine max
accgaaattgaatcaacatttcatttccaaattttggcccacaatcaaataaaattgttgagagctgaattttccacccaaaaatttttttaaaaaccagaaacaaaacgttttgataaagaacttattgaaatgggtttcacaacaaaacaggggaatttactaaaagcaagttccactagaaataacagttcaaactgttgaaggccccctgacaagaacgaacacctttttacaacaagcaccagcaacttaatgtgcacgagttctactactttctgcatttctaactggattgaaatatggatgggcctgcatatcaataaatattttgtttaccaaaaattttgcaaaataagttcatattaccaaatactggggtgc

SEQ ID NO: 85003 - DNA, 433 bp, Glycine max
atctattagaactctaattctcattctttattatgaaaaataaacacataagagaataaataagaatcctaattaaaattttaaaataaaataataatatctttcattcttatattctaaaattatttatttaaaaaaaacaaatataatttagaataaatatagtgtataatctcctaaaaacttaaaaaagtgaaataattcaatagattatcacctaacaaatgctgcctttatttcttttgatcgtcatagatatttagataccatagatggcactacttatattagcaatttagcatgtcactatgcacctatcgatcaaatatattatttaggtaaagaatgaagaacgaggagaatatttgaagtgttggcggtggaagtgttctgccaccaataggtagaaaatccccattacgcctgtgtgccc

SEQ ID NO: 85004 - DNA, 327 bp, Glycine max
acgcgaacggaagctcggaattagggtatcgaccaccccgcagcgagaggccgtgtgcttattgctcgcgctgacgctgccgcggttgctggctaccatggctcggtcgctacgctgtagaaagctgattaccctaaataaaaggcggacttgctgaaccacacacaaactgggaatttcgcaggagacaacatagctgctaattgccatcaagacgcatggaaccccaagacggctgcgtcgtcatatatttatatacatgcataacctataaccctcattattgaaacaaactctgattcaagaggatgtgaaaatcaagaagac

SEQ ID NO: 85005 - DNA, 87 bp, Glycine max
acctgggaatttttgaacggaacctgggggggaaccaggttttcctacagggaatcttattaaagcttgtggaaatatggcaatatt

SEQ ID NO: 85006 - DNA, 477 bp, Glycine max
ttttttttttttttttttttttttttttttttttttttttttttttttttttttttttttttttttttttttttttttttggaaaaattattttaaggggggaatttttttatttccccccttgaaaaattgttaaaaaatacatttttaaaacttctggaaatttgggggaaacttttttttgggccccccaacctatttttaaaaaataaaaaaaatcttttttttaagttttttcaaaacccacctgtttaaaaaaaatttttggaacctttaatttaaaaaaaaaaatttttttttaggggggcactttttttttgggaattaaaaccaaaagggggccctttttaaaaggacttttttgtttttttaaaaaaaagttttttgaaaataaaaaaaaggtccataacttttaccaattttccttgggggggataacaacatggtaacaaggtttataaatttttttgtgttaac

SEQ ID NO: 85007 - DNA, 311 bp, Glycine max
ggggggaaaaaacaccttaatttattttctttttaatttaagggccattaacggtatgcgtgatgggggtagtggcaacgccaaaaaactaatgtggaagagatgcagtaaggaaatattggattgcttgccacaaatgctttaaaaaggtaaaaacccttaaagaagggcccaaggggaaaaaaaaggaaaaaacttgaaaataaccttatttttggggggaagattagaaaggatattttgggcccaaccaacccaggggtacaaattttttttttaaagaaagattttatataccacgttaatattcc

SEQ ID NO: 85008 - DNA, 370 bp, Glycine max
attaaagctttttttttttataattttttttttttttttttaaaaaaaattttttttttatttttttaatcaaaaaaaattaatttaaaaagaaaaaaaaaatttaaaatttgaaaaaatcaaaaaaaataaaaaaactttttaaaaaattggccaaaacaaaaaaacctaaaattcttactaaaaggccaaaacacttttttccttgctccctaaataaataattccattttaaaaacattttaaattaaaatcaaattaactggcgaataaaaagtcaaaaatctttaccaatttatcaaattgtagaaaaaaaaaaaaaactccaaaattgtaataaaatcaaaatttttttttttgtgtaaaaata

SEQ ID NO: 85009 - DNA, 208 bp, Glycine max
  unsure (1)..(208): unsure at all n locations
gcatgcacaagcacggaaaacggctcgaggttaaatacacactgtgtattttatatcctatttgaaagagaatgacatttagttaaatgttgtggtttaaggggcacatattatgatatggtctagtatgatttttgncattgaattgtttactcctgaaatgcaatgacataataagaagtgttgtgtctgagaattgtgggtgttt

SEQ ID NO: 85010 - DNA, 392 bp, Glycine max
gggggggggcaatggatttttattttaccaaaaaaattgaaacaatgcaatttttttcacccccattttttttttaaaaattaaccataaaaatggtttgaattttgggtttaaactaaaaaaaaaaattattttttttaggggtttgaaaatgggccctttttttaaaaaaatcctaaaaaacctttttttttaaactttaaaatttaaaaatttttaatggtttttccaaattaaaaaatatttccccatcctccaacttttttttttttttaaaaaaaaaattgtttttataccttaaaatttttttttttgtttgaagcctttttttaaaaaaaaaaaaaaattttatttttattaaaaaaggggaaaaatttttttttttttttggt

SEQ ID NO: 85011 - DNA, 51 bp, Glycine max
atcgtgccacctcgcctcgtgattgtacgatcagctcttttttacctgctg

SEQ ID NO: 85012 - DNA, 272 bp, Glycine max
  unsure (1)..(272): unsure at all n locations
ttttntnntttttattaagaataattgtaaattaaaataaagctaaataattcacaatgatcattatcaaatatatacttttccccttcattaatccaccctggtctaatatggatcaccaagcgacagcgcagatataaattcgatcgccgaactgaaactcagtccgagatcgtctcgcgccgaggtagatcacttagacattcgagctacatacagacatagagagtgtgtgtgtgtgctgacatatgtatatgtaatcttatgctcta

SEQ ID NO: 85013 - DNA, 235 bp, Glycine max
  unsure (1)..(235): unsure at all n locations
caggataggcctaataagaaaacaaataattccaattcatatatgacacattttgcctccttatttcttgaaaatgtggaattggaattccccgaggaattccgatctcatttcctttggcttcaggataggcctaataagaaaacanataattccaattcatatatgaaccattttgcctccttatttcttgaaaatgtggaattggaattccccgaggggatcctctagagtc

SEQ ID NO: 85014 - DNA, 168 bp, Glycine max
  unsure (1)..(168): unsure at all n locations
tcggaacctgatcagaacaataacagtttactacaaccatcaganacttcgtccatgcgcagaagaggagtattccaaagagaatcgcgcacatgatgtgtggctgcggagatgatcctaattcactttccggaagcgtggctcttatggaggacatcgttgtggagt

SEQ ID NO: 85015 - DNA, 274 bp, Glycine max
aagttaaaaatgttttaacatgaatactcgcggtttatttagagtattatgttaaactacaacaaatgcgggacatatatggttgatgaaaggaataccgatcggaacctgttataaggggatgtaaggacatatggtagtatgatacattaggaggcttatttaaggggaactctttcgtgtctaagtcattactgtgttatgcactttgtcaaataagcttgtaacgtaattatgtcacttatacaattctatgtatctacactatctctat

SEQ ID NO: 85016 - DNA, 62 bp, Glycine max
tcgtgccctcgccctcgccacgtttcttctataccatgttatctatagtagctgttttgatc

SEQ ID NO: 85017 - DNA, 289 bp, Glycine max
  unsure (1)..(289): unsure at all n locations
cttagagtatgcatgtatgtgaatntagcaaaggaaatgtgtgtgatgtaggtaacaaatacaccttggaagtacatgtaaataatctaggtaacgaaggtgccttgattgtatatgggtgcatttttcttagttataagaatgtcttgtgcaagtgaacgttcgtgaagaagtatgcgcataagcttgctctaaattacattgatgttgattattgagggggtgatgccatttgttaaggtacatttttgtaaactacttcaaagtgcttcagatgccagactgtaaa

SEQ ID NO: 85018 - DNA, 247 bp, Glycine max
gcattatttgtcatctgatacgaaattaattacaacgaaattataaatggaaaataatttcatattttcctataaaatctggtggatacaaaagaccctcttgcgcatgaaaattgtacaaagaatgaaccactagcacttaactacaaaaattaaacagtgaggagaaatggatagtgtcctagatcactaaaactatgtaaatgagtacacgtttacatatctctacaataaatctgtatttctc

SEQ ID NO: 85019 - DNA, 292 bp, Glycine max
  unsure (1)..(292): unsure at all n locations
ggcataaaaaatctgttgcacatggatttcattagaagggacattcttaatacaattgaccacagggattcgtgaaaatataaaataggaattgtctntatgcgagtaattggtaattttagcatgcatgaagcttatggatgaaacangttatttgtaaattctagaatattttatgagaactaccatatactaacagttttcagcaggcttcatgatggatacttcattcttgctttatctcatattctatcangttatgttcacccacctgtgccatagcttatcactc

SEQ ID NO: 85020 - DNA, 187 bp, Glycine max
  unsure (1)..(187): unsure at all n locations
cgtaactcccgcgggtgggtcattcattcaatcgttcgttgttccttttgtgaattgcattgannattgatttaattagtttaattcaacgctccttcgttggttggcttcaattttatttatgactttggaattatagctattatcaatgtggtttcttactgcgctgtgaaatgtgtgaagactg

SEQ ID NO: 85021 - DNA, 235 bp, Glycine max
tcgctactacctgtaccctcgcaacgctgtcactaccgtcgtcttctcgtgtttccattggcggagctccgattcgccaccaccgttctccgaaccggatcgggttggtgccgcctctcaaatgctcctctttggagccggaaaccgccccgcctcctcccttcgactggactcacagtgatcgcgggtcgcgggtcgattctcaaactgtcctactactaactacgccaaccct

SEQ ID NO: 85022 - DNA, 169 bp, Glycine max
tgaaatggtccaagttctatctactatgtctggcctatctttgactcttgagtgccccgtgatgcataccaatttgacaacagagggaggtggcaatgggaatgaagctattgcggggcttgcactatgggtggcggtggggtgcggggctatgagtgctggggtatgg

SEQ ID NO: 85023 - DNA, 137 bp, Glycine max
ataaaaaaaaatgtgttttttctatttcacacagaatataacacggccctaacatgttgcatccgatgaaaacctggctatgttgattaaactgcatgtgtggaatagcctacataaacgatgacattcaaatgaaa

SEQ ID NO: 85024 - DNA, 64 bp, Glycine max
gaccacgcgtcgccacgcgtcgccacgctcggttgcaaaatgaaaatggttatggtaatgggat

SEQ ID NO: 85025 - DNA, 92 bp, Glycine max
tacataatgtatatattctctgagtgtctgaacacaaaatttgctatttcgacatatatctgctacattttgacttactaagtatggaaaat

SEQ ID NO: 85026 - DNA, 185 bp, Glycine max
tattattacagggggaccaagcacgatagcttctctgatgatgaacatgatcgatcacggcatcatcgtcataaatatgatagctgctgctttgatgatgagcaccactatttcatacaacacgttggatgatactgtcaacatgacataacatttctatttaagaaatatttcattatatacat

SEQ ID NO: 85027 - DNA, 229 bp, Glycine max
  unsure (1)..(229): unsure at all n locations
acgcgtcgtgaaacaagatggaggatcacaagatcggaaaacatactctatgccttacacacatggacagctagcacagaagacttctctcaagacaattttacggggccagccatgctcttgtgtacatatgtaagatatgcataattgatgtctcttgtggagcaccatttcaacacctaggtatactgtaacatacatgacattgcattatgnatatgtattgtat

SEQ ID NO: 85028 - DNA, 343 bp, Glycine max
ttttttttttttttttttttttttttttttttttttttttttttttttttttttttttttttttttttttttttttttttttttttttttttttttttttaaaaaaacccccacctaaaaaaggggttaaaaaaaaaaaaacccaaaaaggtttttttttttaaaaaaaaaaaaaaaatttgccaaaaaaaattaaaaaaacttttttcccaaacccccccttttaaaaaaaagggggtaaaaaaaggaaaagttttaataaccccccaacccgggaaacccccaaaaaaaaaaaaaccctgttctttttgtttaaaaacccctccacccaaaagggtttttt

SEQ ID NO: 85029 - DNA, 286 bp, Glycine max
aaaaaaaaaatacccccctttttttcccccaaaatttaaaaaaaaaccccccgggggcacccccttttttataaaaggggttaaaaaaaaggggcaaaaaaaaagataaaaaaattttttttaaaaaaaaatcgtttccccaaaaaaaaccccaacaaaacaaaccggaattttaaaagttcaacccccgggttccaaaaaggaaaccccacaaaaaaaaattttgggggccccaccccccccttttaaagaaaaaaaaatttttgcccccccttttttttttaaa

SEQ ID NO: 85030 - DNA, 347 bp, Glycine max
tttttttttttttttttttttttttttttttttttttttgttttttttttttttttttttttttttttttgggggggaaccctcaaactaagggggaaggactttttgacctacccaaaaaaaaggagggggtcccttgttttaatttaaaaaacttacataccctggaaagggaaaaaaactaacaattctggggggccctttttatacaggttatcaacccattttttttacacataaaaaaaagcctttatttttgcccaccaaccataccaggtcccattgaccctgacaaggtggataaaaaacccctggggggaaattttacccttggatccgggtttccg

SEQ ID NO: 85031 - DNA, 306 bp, Glycine max
atactaaaaaactcctgaccaacatttatccgtgaggattaaacaaagaagattactaggaatgaacaaatccgccgaacaacacacacccgcacatataacaaatacggcagaacatactcttcgcgaaattaaaacgagacgaaatcacattgaacatggagagcgatcacaaggccaggaatacaaggacgattctattctatgggcacacaaattgggcgcggcgggtaaatactgaactgtacaaacacaacaactaattctcatggataattcaatcaccgagagctcgactcagccagc

SEQ ID NO: 85032 - DNA, 502 bp, Glycine max
aagtgacaaaatttaacatttactataatttgataaatattaccttcatagctttgggtttcaaaagaaaaaccactacacaacaaagttcaggtcatcgactttcaacagaagacaaccaaatagcctcttacatgtatcagataaatacaagttgcaaaaagtgaatgcgcttcacaaaggttccagatgtagaagaagatcatgcagtctccacctaccaatttcgttaaaacagcattactacattgagtatctttagaaggtcaaggatactttactggaatgcattgcagtgtgtttcctggctttcttttgattggaaatgctagagagaggaaaggtaaccaagagtaactgaaatatattcacagcaccagttttcctcgtgctgaaatgtctaaaatttgtcaaaagtggtcgtaataatcaggatgatcatcatcatattcagaaaagtcactcccacctgagaattcataatagtcataatcatcatcag

SEQ ID NO: 85033 - DNA, 277 bp, Glycine max
atggggggttttttaattttatgctcaacacggtgccccaacccagcaatataaaaccaaaacagaacgagcaaaaatcatgccaaatggggaaaattgtgagaactgaaattaacccacaaaataccacaccgaagaaaaaataaaaatccgataaatactaaggaagaataaaaagccaattaactaacataaattactggccttcaaaaaaaaggaaaaaacgcaaaaaacatgggatcaatgaagcccacaaaactaaaaaaaaaacccaacg

SEQ ID NO: 85034 - DNA, 336 bp, Glycine max
aaaaaaaaaaaaattgggggtaaattccggggggggggaaaaaaaaaaaaattttttttaaaaaaggggaaaatttttaaaaaaattttctttttaaaaaaaaaggggccccccggggaaccttaaaaaaaaagttaaaaacgttttttttttgttccaaaaaaaaatttttctaatttttaaggggggggaaaaaaggaaaaaaaaacgggggtttttccccaatttttttttcaaaaaaaaaaaaaaaaaatttttttaaaacttttttaaggttaaaaaatttaaggggtaagggcccttcttcccctttttttccaaaaaaaaattttcttt

SEQ ID NO: 85035 - DNA, 331 bp, Glycine max
ggaggcacaaccccgcaaaaaaaaaataatgaaaaaaagaaacaaaggccaaaatgaacacctacacacatatcatacccccacgtgcaaaaaagacgatagtacacccgaaacaggctggctacataggagggggggcacaagacggggcactgtgaccaaaataactattgtctggggattagggaaaaaaaactatgggttttgtgctgactaaaacactcgaaactcacatttaacctagcctgggaacgccctacacaggctactccagggggggccggggggacacaccggaatccccgaccggagcccggggggggccaaaacc

SEQ ID NO: 85036 - DNA, 79 bp, Glycine max
gaaaaaaaaaaaaaaaaaaaaaaaaaaaaaaaaatttaagggccggccgccgcctagtgagctcgtcaacccggaaatt

SEQ ID NO: 85037 - DNA, 546 bp, Glycine max
aaccgggccgtttggtggaccggaccaaatccagggctaggaccgtaccgtaaagataacggcgccatttttcagcgtaattggtagaaattccaacttcgtctcttctctcctaaatctaagacctaataaagattcgttcttagcacttgggtatgtccgattctgatgtcacacagtcaaaaatttatgtcaccgtgacacgaattgttgatattcaacactgttctgcatatatatcctatggagtaaaatttgtatattatgaaggcaacattttgaagctgaattattgttggtccgaaaggtactgtgacatatgcgtttggagaaattagtgcagatcaaagtaattggtgggtggtgcgggatcagttcttggcatcacagtgcggactacggattcctcgacatcaggttctgcttgtgaacgtgatgtgtgtattttttttttcttttcatttctactttaactacgctccttctattctattaggatctcccacgtatacaacgaggaatatgtatgagaaagctatgccatga

SEQ ID NO: 85038 - DNA, 128 bp, Glycine max
acgcgtacgtaagctcggaattcggctcgagggtataaattgtgggaactggggagggtttatgttctatgttgttttgtactccaatcttttatgaatgtactggggaaacttgttttgtttgatta

SEQ ID NO: 85039 - DNA, 65 bp, Glycine max
aattaaaggcctaaggtattttttttcttttttttaaaaattttttttggggttttttttttttt

SEQ ID NO: 85040 - DNA, 109 bp, Glycine max
actcttggacggaggggtggacgcatgggtggacccaccggggaatccgggaacgccgcctggaggcctaccagctttccctattgtgatatggattagagcttgacga

SEQ ID NO: 85041 - DNA, 201 bp, Glycine max
cgacgtaagctcggaattcggctcgaggatgtgtagttgtacttgtacacatcgtgaaagttattcaaaagtttgctgtttttctttaggtgggaaaaaaaaaactgtgctctatgtattttagatcttgagaaatttcagataaactcgtttgtaaaccattttataataatagagaaatgtttgcttattatcatcaaa

SEQ ID NO: 85042 - DNA, 293 bp, Glycine max
acgcgtacgtaagctcggaattcggctcgagcagacaagtgaggggtccaaaaccgacgcttactgactctgtggcttactactattgtgccactgaattctaactgtgcggtttatcataactctaccatgcatgggttccaaagctaaactctaataaggatccactaagatgcactgctctattaacattacacccaacttgatgtgcttgcctagaaagcgctgccttcacagaatctacaacgaagactgccaaacctcaacatcaacatcttcgtgctcgaaaccaa

SEQ ID NO: 85043 - DNA, 460 bp, Glycine max
  unsure (1)..(460): unsure at all n locations
ttttttttttttttttttttttttttttttttttttttgtttttttttttttttttttttttttatatttatttataaatttttaattaaaataaaataaaataaaaaataaaaaaaaaaaaattattatttttaattttaagaaaataaaaaaaaaaaaaaaaaaaaaaaaaaaaagatgttggggggggggaaaaaaaaattttttttttaaaaaaaaaaagggataaaaaaaaaaaaaagtttttttttaatataagggatggaataaaaaaaaaatatttttttttaaaaaaaaaaaaaaaaaaatttatgggggtggtgagaaaaaaaaaaaatagaaggagtgtttttaaaaaaaaaaaaaaaanggaaatatatttggataataaaaaaaaaaaaaaaaaaaaaaaaatantttttttggttgttttttatttgggnaaaaaaaattgaattt

SEQ ID NO: 85044 - DNA, 323 bp, Glycine max
actcgaaaacacattttttcaaacgaagcctccttatagggagaggcgttgaagccacatacaaagagtgcaactggctcaaaacttctgtggcgcatgcaaatgaaataggaaacactcgatgcattaataggacggcaagcgtttgctctatcacactcctcacacaccgttggcataaagccacacacattgtagcaaacctcttgcatataatatacatcacggacatctcttactgaatagtgactaaaaggagtcagggcaataaacataggccaacaggtctacctcaacggtctagaacagagcgtcagacctga

SEQ ID NO: 85045 - DNA, 398 bp, Glycine max
ttttttttttttttttttttttttttattttttttttggggtttttttttttgtttggttctttttggagacccaggtttcccacagggaaatttaaaacagcccggcgaagtcatcgacatttttttatacggaggaaactgaaagccgcccacaaaaaaaaacaaaatacgacccggaaggaaaaaatttaacccccggagagccaaaaaaaaaaacaaccggaaaaaaaaagggttgagctcacggcccccaaaaagggggggaaacaaaaaaatccagctgcagcaaaaagggggtaaaagggcgaaaaaaggggggtcgccaatggagaaaaaaagtggttaatgtggggggagagagggggggaatattggaacgaaaagaagtgctaatcc

SEQ ID NO: 85046 - DNA, 435 bp, Glycine max
tttttaagcccccgttgcacataaacaaaaaaacggggtaattgtttaactatatgaaccaaatagctacaagaaagcgtttcaatctctgcagattgttgtcgatcaaaaagtgttcagaaatatatctttgggccttaaatcccttttcttcaaaggattgtggttgaacaattaaacatgacaagtactatatagcaccctcgacaagtccttccactactagtttcggaggtcaagtgtaggaagaaacctaaaatttccaaatcaatgtaacacctcgtccaagatcaaccagcccaaatttatttccccaaatttattgaagttccaaccaaaatgtaacaagacaaagttaagtattcttttggaatattatcagtaatcttctagatcaccataccctcaagtcaatatataataccttgatgtttg

SEQ ID NO: 85047 - DNA, 96 bp, Glycine max
tctgggatttacatatagctagtatcattttacatgaaattcaaacagcaataactcaacaagacacaagttgttcaacaaatatccttaaataag

SEQ ID NO: 85048 - DNA, 327 bp, Glycine max
aatagaaaagttttattccttggtatgaccagagcgaataaagatcttcacatttattataactacccttgcggggaaacctttgttttaggatgaaaaaaattctgtgtgcgcggggggaaaagtctaacaaaacgtgagggcttgggtggagcccatcccccctttgaacccaaagaaaaaaaccgggacccttaggtttgttggggccaggcccaccaacaaaaacaccatttctgtggttgttttcaccaaaaccaaaccaacccctccaggttttacttccttgacaagagaattgggggggccactcccaccaccattttg

SEQ ID NO: 85049 - DNA, 268 bp, Glycine max
tttttttaaatttttttttaatagaaaatttttaatccttggtgttattataactaataattacctccacatttattataactacccttccaagaaaaccctttctttacaataaaaaaaatattcccccccctggacaaaaaactcttcaaaacacaaattcttttatgaaccctatcccccccttaaccccaaaaaaaaaaaaccccacccttacctttttattcaccacgcccaaaaacataaaaactattcaactttttaattc

SEQ ID NO: 85050 - DNA, 346 bp, Glycine max
agagcgggcggccgggttttttttttttttttttaaattttatttattagacaataaaatacaatacgcgtggtgttatttaaccaaatcagaaccataaacaacacaacactaatgaaatttattacacacatgaatattttacaaagttttccactactattacaactaaccttctcatgaagctttatttattgcgataacttaaacccatatataaactctagaaagcacccttcttaatagtgagggttggcaaccaccccacccttgatatgtttatatcgaccatattaattatgcccaacagcacgcccgtcgacatagccaccacacccgccaacat

SEQ ID NO: 85051 - DNA, 369 bp, Glycine max
  unsure (1)..(369): unsure at all n locations
aaaaacccttaccttgaaataaaaagccaaccaaagggaaaaagggaaaagggctgcccccaaaaaagaaaaaatatggtggggccccccctgggggcaacggaaagaaaaactgggaagaaagtgagggtaaaaaacctgggccctgaatttgacggggaaacaaggccctccgggaataggggggtttgggaacccccggggaacataatctgaagcattcctccgttcaaataaagagggggcttcccaaaaatcttgaaaaaaactggaatgaaaaaaacccttaaaaaaatttgggaaataaaaacccccccacacggcncagattttggggcccccgcaaattccccagggggggggcacaaa

SEQ ID NO: 85052 - DNA, 257 bp, Glycine max
ttacaatttttttttttctccaaaaataatgtccaggggggcatttataatatttatttactcacttaaaccattttttcttgaaaaaattaacaaacccaaaaacaaacatgtttaacattaataaatcaaaaaagtgaaaaccatcattaaaatccccctcgccccccccgaaatttcaaagaaaataaaaatttcccctactatctaatatccaacatacatgccatgagaaccttacataacccccatatttt

SEQ ID NO: 85053 - DNA, 289 bp, Glycine max
aaaaacgaaaaaatttattttttttttaacgggaaggggcaaaaaaaaaacaaaaacctggggttttttttttttttttttgggggtttacctttggctgggttttttttcccggaaattcaaaccggttttactcacccaggccccggttgttcaaaaaaattccttaaaaaaattttttttgaaacaaaaaaacttttttttggggcttttaaaaaagcaaaaagggggttttttgggggaagggcttttccccccaaagggggggtaaaggattttttgctccctt

SEQ ID NO: 85054 - DNA, 195 bp, Glycine max
ttataatttcttttcatagccaaaaaaaattatgagggggggtttctttatatttataatctcccctaccccaaaaaaataatttttcttttttaccaaatacgccccaacaaaaaaacaaccctccatatctttttttttttttttctggaatataacaaaacgtttactttttaaacatatgaaacggaaaat

SEQ ID NO: 85055 - DNA, 309 bp, Glycine max
  unsure (1)..(309): unsure at all n locations
ttantattattaattaaaacatnaactaaacactaatcgctgatttatttaattanataacccccccccccccacaaaaaaaaattatttttcaacaaacataccacacaaataataaaacaaccaacctaatacatttcttttaatttataccaaaaacaaaaaaatactccaattttttacaaaaaaaaaataaataattaccaattttaacaaaacaaacaaaatctattctttctacttataatatactctataaacataaaaaatcaatattttattctttacatcaaccacaaacccttttat

SEQ ID NO: 85056 - DNA, 383 bp, Glycine max
atgggcaagcgtcagataaatcatatttacttgcttagttaaatcatatttacttgataaatataaaatgacataaaacgaacatggtagacaaaataaattaaaaaatggaaaagaagattaaaatggccttggctcccccagaaatttcaaagaatgaataaattggccttactgtagagtataaaagataaaggccggaagagcattacattacgttcatatctgtgactgtgagcaagcaaggagttttaactaatggagcctcactttcaaatgaaacggcggcggcggcggcggcggcggcggcggcggcggcggcggcaatttcaagtcaaattgaaatataaaaaagacacctccgacaaatgtttatttaattt

SEQ ID NO: 85057 - DNA, 270 bp, Glycine max
ggggggaaaaaattcctttttttttaaaaaaaaaattttttttcccaacaaaacggggtttttttttttttttttaaaaccccttcccccccccgggtttttaaagttcccccccttatctcaaaaaattttttttttaaaaaaaaaaaaaaaatttttttcccaaagggtgttggggcccaaaaaaaaggggaaaattttttaaagggggggaaaaggggggggccccccttttaaaaaggcgggtccccggggtttttttttcccccg

SEQ ID NO: 85058 - DNA, 306 bp, Glycine max
tttacgcatttttaaaataaatttatttgaaaaaatgggtgcattgacacacattaattattatgacaacattatgttgatttgctactactacaaatatttgtttcatgaatatgtgaagaacgggaccaagttggtccctacataactaggttgctgataaacatctttgttatgacggatttgctactcataaatagcaccttgtttttcttcctacagttgtgccgccaataagagcactttagttaaatgaatattgtttgctaatggaccctcctgtgcgattacacgtcctaatagaat

SEQ ID NO: 85059 - DNA, 214 bp, Glycine max
ggggggaaaacaggagaagggtccccgtctttttttttaaataaaagttgaaatatactggaatttttttaacagcaattttgtcccaacaaccccttcaaattttaacttgagaaacaaactttttgaaatgggttacccagcccttttttggtaagggactttttgatgtactgggaaacccatttgaaacccttcccattggacccgtggg

SEQ ID NO: 85060 - DNA, 368 bp, Glycine max
atgacaaggtacaaaaggaatttatttataatacacagtagagctacaaatcataacttttctatcatggacattatagaggaactgtgatacatgagtaaatgtaccaaaaagaatgaagaaactagggccaatgacttccagagtccagaaatgatgaacctctaaaaggcaccaaagaaaaaataaccctgaaatagcaatgcccttgtcatggcactatgtttcaagaatcaagatgaacatttttggtagagcctgcctgcctgaagattatcagacaaatgaataagaaaaatcaaatcacaaatagaataatgggttctataatctataactttgtgtattcatcagcagtatggaaatct

SEQ ID NO: 85061 - DNA, 421 bp, Glycine max
atgactaattttccatctaaccatttttcatgttgattttgctgcacttgaatatagtacattttgccctacgtgtatgtaacatacgtggataaaatttgctacaatgtcagcagggaatggaatatgatacacggagaagacaacattctttgacagcatgagctgctaaagaaaataaattacaaaacagcccaactaacgctgattttgttaacgcaaaatgctattattggttgtatggtgctaatgtggggatcttgcgtgaacctgtccctccattagtgccaacgggcttgttagatagcctccgcttgtaccgtttgagaacagacgccaaattttccttccccatagggaaagccacatcgcctgcggcagttccggtacgtcctttcctgccagagatggcaagctccac

SEQ ID NO: 85062 - DNA, 267 bp, Glycine max
cccaggggggaccctttatataattaaagaaacaatgttttttttgttaaaattgaattttttttaactaaaaaacaatttcagaatttttaaaattaaaagacccttacttttgtttaaaaaaaaatgttgaaaaaaatgcctaattgacaaggttgggcccgaaaaaatactttttccaaacgggggaaaaaaacccaggtttttgggggttgggtttggttgtgttaccgcccaaaacctgaatccaaaatttcctttctagga

SEQ ID NO: 85063 - DNA, 308 bp, Glycine max
aaaagaacaccgggcccgcccgggggcccaccccgctaatcccgaacccggtcatagatgccaacaagtataaacaaaagtgagacaagaaaaacattggaaaacccttcacaaaacctatatcccggaacaaagggggataaaggaaaaagcccacacacaataatggcagaaaaactaaagactaaaggcgggggggccaaaggggggagccaacataaaaaaatgggcgtcccccccccccccatataccgacaaaaaaaccgggagagcgcgtttaattaatgaaaccaccaacgcccggaaaa

SEQ ID NO: 85064 - DNA, 353 bp, Glycine max
agaggacgcggggtttaaccgggaaattccggcccggaccctaacggcttacaatttttccctatagaaaggcgaacaaaagcggggcaaaaaaatggccaaaaagtgttaccggggaaaaatttttcccccctaaaaagcccaaaaaaaatacgacccgaaaaaaaaaagctaaaaccctgggggaacaaaagagggaccactcaaaatttaatggcggtggccccactgccaaataaaaaacaaaaaaacccttttagacaagtgaaaaaaaaaaacccccaacgcggggggaaagggtttttgactaatgggcccaaagggtttttttctttaaaaaaagaaacgggcaa

SEQ ID NO: 85065 - DNA, 444 bp, Glycine max
caatataggttattgatttgttgggggggaaaaacggccttaaccacaacaacatcttccaatgggcatttcatccacctcaatttttaaataaaactaacacggtctaaaaaaaaccagcatttctgcaaaaaaaacactacccatgtaactcgggttcccagccaaaaaaaaaattaattccccttcctttcaatttcccaaaaggtcgcttttttaatttttttaaagcttggcccggcagggatcctattgcgaatggaccactgggggctgttgatggtttctttccagggccttgaaccaaacccttttctttcctagcatttttcctttccctgctagccttgtttttggccccctttgcctcaaactgggcagacagggtttttttttttgccttttaagccttggacttgggtttgctctccaaaaaaacttttt

SEQ ID NO: 85066 - DNA, 229 bp, Glycine max
  unsure (1)..(229): unsure at all n locations
ataatttttttatanttataaaaaaaaaccaacataggcggaggattttaaaacaaaaccaccaccccatcccccaaataccacacaaccaacccaaaattcaacaaaaacaaaccccccctaaaaaaaacaccccaccataaaaaaaaaaacactccctttaaaactaccacccaaaaaaaaaaaaaaattaaaacccctaccacccaatctccaaaaaaaccattaa

SEQ ID NO: 85067 - DNA, 437 bp, Glycine max
ttttttttttttttttttttttttttttttttttttttggtgttttttaaaataaattttaattttaaatttaaaatttaaaaaattaaaaaaataaaaaaaaaataaaaaaaaaaattttaattttttttaaaaaaaaaagggggggacctgatttttttgtcgccgggcctaaaaaattatttttttaaaaaaaaaaaaaaattaaaaattttttttagaaagggggggggggataattttttttttgggggggggggtttttttaaaagtaaaaaaaaaaaaaaatgttccaaaaaaaaacccaaatgggggaagggggtaaaatggaacatttgggggtggccctccctcaaaaatcgaaaaaaagcccaggggcacaaaaaaaaaaacgcgcttggcaatcaatccaaaaaaaaaaaaaagtttgaagcctt

SEQ ID NO: 85068 - DNA, 381 bp, Glycine max
ccattaaagacaactaatataacttttattcgggggaggggggattctgagctttgaatggcttaattctaaactttcactacaagaaaattgcggaatacacaaaactagtttaaactctacactttttctaaccaagcacaatcctagtgcctcattctacaaactatttcgttactttcctgtaatcacaaatcatcttattttgtgttacaaagcatgctaaccttgcatgaatttctcaactttaaggcgaataatcaaacaaatttctcccagtaggatgcttgattcatgaggaggcacaaacctctcccttttatttggtttgcttccatcatgagtctatatgcatgccccgaatgcagcagtgacatgcaa

SEQ ID NO: 85069 - DNA, 504 bp, Glycine max
cgtaagcttggatcctctaaaacgggcggccctttttttttttttttggaatacaatactcatgaaaagaatattaatataacaatcaaacagaaaagaaaagtaatagttacattggtagcaaaaacaaagtataaaaacaaaaaatattacctctcattgtgtgacttcttcctaaagaagaaacattcttttgagctcatattatttgccacatgaaaaaaaggtgaacatggaggagaatcataaaatgatggagatatttaataatcccagagcttcagacaataagccatgttgtgctgaggaactctgatctcaactcatttgtagtggtttcctgatggaagttcgaacaacatgaacaacaacccaatcatgtccaatattttttcctctccaggcagtgttgcctttgccacaaattccttatcaaaagcttaattgtagttgtttcatccaatacatcatttgttgtcacttagaaaagcatggaacttttta

SEQ ID NO: 85070 - DNA, 291 bp, Glycine max
gcccgccctctttttttttttttttttttcaattcatattaaaagaaaaccaacaaaacaatccggcctattttacaattattacttccccccaaaacaaattcaaacctaaatcacacaaaatttacctccacataataatttatatatcaagacaaaccattcccacaatcattttttacttccctatttaaaaaatacaaaacttcacccaaaaaaaaacaatgatctctttatctaatcaaactttaacttcctacaaaaaaccatcctcctcccataaactattat

SEQ ID NO: 85071 - DNA, 493 bp, Glycine max
ggcatccaaatatattattattttatggttttggtaacagagtgagaacaccaatttatacttattgagcaatccaaaatccaaatacacgagatacattaagaacttttcagggcatatattaacttatgatacatattgctacttgtccttcgaaggcaccggacagattccctatgtcctgcacaaaagaacagaaggacaaaacataagctgatgtagctttcttaagactaacagttgtcgtggaaacacttcaattaaggggaaaaaagttccaaatacataaatagggaaagagcattactttcaaataaagggtggattaagggcaatcacgaccttctgaaagaattctaaggtagacttgctagctggattagtaactaaattttgtgcagtaaaccaataagaaaatccaatttgatgggactcaaatttaaaaacgtaaaaccatttgtcattttatgttcttaacacagaaagtacttta

SEQ ID NO: 85072 - DNA, 342 bp, Glycine max
gtaaaaccattttgtttaaattggtgttttttttggggggaccggaggcggagaaaaaaaggagccccgggggcgcccccaacccaattaaataaccggccccttgggcgggcagaaaaaaaaagtcgccacccgaccaacggggccgggccccacaatgcccaatgcttaaataaccaaagaaaggggggcaaaggggggggctaaagaaccgtaaaaaaaggggggggaggaccaccgcggtttatatgaaatagggggggggggccccccccgccctcccatcaagaaggccaaaagggggggaaaaggccgctgacaacggagcctggggaggggggg

SEQ ID NO: 85073 - DNA, 296 bp, Glycine max
tttttgttttttttttttgcagccgttattaattctggggggtagtaaaaaaatccgtgcgaacccttggatagaacctgaaatttcggacctggtcccgtggggttactaggttgccctataggatatggatttacaggtgggggccttggaggaaatacttatgtcgtggggaaaatgataatccgttttcaattcccatcaaaaaatgtgctccaggcttaaatctgaaaggtcgggtgtcctaatgtgtgagccaatccacattattgtgggtgctctaactatcatctttt

SEQ ID NO: 85074 - DNA, 516 bp, Glycine max
gtacgtaagcttggatcctctaaaaccgcccgccctttttttttttttttaaaaaataaatacattccattgaattctaacaaccaaaataagacaaaacttagatgtaattctttaggtgttgttttccaattaaaattagagtttcatctcaataagatgataacctatgttgacctttaatttaaacctttatttggtatattattgatgtaaaactccaattctgattggaaaacaacaccaaaagcatctaaataactgcatttaagttttgtcccaaaaattttagtctcaatctgacaaggtccatgtgtgatacctgagtccgctagtgtggctcagaagccttccttgcgacttctctaactttgggatttcatacaaaagagtaggatttgaaggacaagacaaattccttttcctaattgctgcaactaaaacctgtaaaattggcctaaaagggtttcctgctggctgcttgtacctataaaaaggtctccctgcatataaagc

SEQ ID NO: 85075 - DNA, 383 bp, Glycine max
aaaaaaaaaacccaaatttcccggaaccttttttatttttccaaaaaagggttttttttttttttttttcaaaaggggaaccccttaatcggggtttacccggttttttttttttttttttttttaagccaaaaaaaaagccccccccttttttttaaaacttttcccccccccccttggggggggccccccccccaatgttttggcctttttccttttggaaataaaaagaaaaaaattgggtttgtttttgggccccccccccaatttaaattttggggaggggttttttttcccaggggggggcccgaaccctaaggggttttccccctgttttattggaccggtggcccctttttttttaacttttttaaccccccccc

SEQ ID NO: 85076 - DNA, 325 bp, Glycine max
  unsure (1)..(325): unsure at all n locations
tttttttttttttttttttttttttttttttttttggggggtttttttataaggaaaggttggacccgggatttnaggattggtatttttagggggacccgggggggaaaacggaagcccataaaagggcgccgaaaacaccccaataaatctttatcggggcaaattgtcagccgggaaaaaaaccggaaaaataagaccacaaagcaaaaggggcaaaccactaaaataaaaaacagggggcgcaacgagattaatggcggttaacacaggggggccctgaagtgcaaaaacttaaaaaaaaacccccacccccgaatcgacc

SEQ ID NO: 85077 - DNA, 414 bp, Glycine max
aagagcaatagatcgacaccaacccttttgttagctagttccaacaccaatggattttttttggtaatattttcattttgtttttaaatacttcaacatcaactcaaccagagtatttactactggattggtttagaaatttcaaaactcgaaccaacccagcccatgaatgcatttaatgtattgaagagcgcagtaatcttggattcaactatcactcatacaatacaaaatttaagctataactttaatctattgggccacataaaatcatatactatatttttagtcgaatagtgtggaaacaaattgaaggttgattcacctttggactttcaagtccacatattgtaaattgtaaataagcagaaaaatcacatatcataatgagaaaatccaaaaatattagaattt

SEQ ID NO: 85078 - DNA, 92 bp, Glycine max
cccttaccttttaacctctgggaaaaccccaaaaataaaaaagaattgggttacttaaagggctactttaacttttaaaattctaaagaaaa

SEQ ID NO: 85079 - DNA, 274 bp, Glycine max
aaaaaccaagggaaatttactgcctcattgaatttggcgtcctatacatgattgatgaaatggggtaaaaaaaacttgtttaaaatccccaagcccatttttggcccccttttttttaccaatacaaaacttgccaaatttttttgataaaaccccctccgatttattttctccacttatttgtccaagggacaatgcagcatccctcaaattaattgtccaaaaatccaaaggccggtcgccctttttggatgattggaaccttacaagggct

SEQ ID NO: 85080 - DNA, 343 bp, Glycine max
ttatccaaaacaggacaagaaccctgtttaatgcatttataatcatatatattataattaaagctaggagaagacagcaactttagtttcacatcacggcaaattactaaggatccacataaacaccacctgtttctttcacgccagagtagacatggcaacatggttccaagaagataacacatgatgaaatagcccaaatcagaagataacaacaaggtctgtaagcaccggaactcacaaaagtgaaggagcattttcaaccattcattctagttctctaaacctacaatttcattaaaacaactctgttcatgtcccaacattagaaaacatctgacta

SEQ ID NO: 85081 - DNA, 440 bp, Glycine max
  unsure (1)..(440): unsure at all n locations
cgttagcttggatcctcttgagggggcggccctnntttttttttttttttttttttttttttttttttttttgttttttttttttgttggggttgggggaaaaacttttttccttaaaataaagggggcctcagggcaaccaaattgcaaatacacccgggggctcaaagacttatccattaagtttaacttatgggcttatccattatcctgggctttttaatggaaaaaaaaataattgggtggctttatttgggggtccggcagctttaaaggggtggccaaaataggggggggtttatttttttttctgccactcgaaattaataccttttgggggtcaggacatacattttacaagcttgtgaattttgttcagcggatttttttcttgaaaccgaggtttgcgtggagggctcccataaatcttttgcatcaac

SEQ ID NO: 85082 - DNA, 423 bp, Glycine max
  unsure (1)..(423): unsure at all n locations
ggggggggttttttgaaaaacttatttccttaaaattaattttttnnaaacccccccaaatccccacgcgcccccccccgggcccccctcttggttaaccccaaaaaattcccccccccccccgaagggcccccccattttcaaaaaaaaaaaccttttaaatttgggggggaaccccccaaatttaaatttccgggaaaaaaaattgccccccaaaaatttccccccccccaccaaccgcaaacctattggggaaccccccgggccccctaaaagggcgcccacccccaaaaaggggggtttccccccaccccccttttccgggaagaaaccttcccccccccccttaaaaaaaaaatcccccccccccgcgaaaaagggctttaccaatatgcccccccggtggttttttttttccccggg

SEQ ID NO: 85083 - DNA, 95 bp, Glycine max
aactggtgggggagcccaaaaataaaaaaagaattttgtttcttagaggactacttaaacttttaaaatttaaagaaaaaccaattttttggaaa

SEQ ID NO: 85084 - DNA, 375 bp, Glycine max
aaaaaaaaaaaccccaaatggtttttttttggggctttaaaaggggttcccccccccgggtttttaaaaaaaaacttaccttaagggcccccccttttttttggggcccaaaaaaaaattgccccggggtttttttttttttgaaaataaatttttaacccagggcccggggcaaaaaagggggcctaaattttttttaaaaacttcccttaattttgggcggtttttaaaaaaaaaagttttttttccccattttcggggggggtttttggggcaaaacccacccttttttttttttgtggaaaaaaattggggggggttttattttttttaaaaggggggggttttaaattgccctttttaaaaaaagggggg

SEQ ID NO: 85085 - DNA, 433 bp, Glycine max
gggaacgggaggcacactcattacaaacatgttactgcactttataacagtgctctttaaaaacgaaacatagcaggaaatatcacagtaacatctcttcaagacttgctctgctaaccatttttattcagcaactaaaacactatggctttgtccaagacgcttacctcagttaatattggcggaatattaactgaggtaagctgttcaagacttgctctgctaaccatttattccgctaatattcttccttgcagaaatggtttacggaaatttcctcagttctctgctaactcatataatgaagggtaacgtgccgtgtagtatagtatacaattgatcatactcttcattcaattccttgaaaaataaatccgtctaatacaacacatgaaaaggaacaatttctaatcgagttaattgcacgggactg

SEQ ID NO: 85086 - DNA, 234 bp, Glycine max
aaaaaaacccaaccttttttaatggggggggaattcaaaaaacccaccccccaaatcccggggtttttttttccacccttaaaaccctgggggggggaaaagtttttgggtttcccctttttttaaacgggggggtttttaccccattagggggttccctcccctggggaccccttcaggggcaaaagggggtggcaaaaaccgcccctttggaccaaaaaaaaattctttttt

SEQ ID NO: 85087 - DNA, 447 bp, Glycine max
ttttttttttttttttttatttttttttttttttttttggttattttttttttttttcttttttcctttccttttatataattataaacccttttttttttttttttatcccccccacaccccccccccctaaaaaagaaaaacagcccccaaaccccaccaccccccaaaaaatagaaaaaaaaaaaaaatccaaaaaaccccaacaaaaaacaaaacccaaaaaaaaaagaaaccccttaaaaacactcaaaaaaccaaaaacccaaaaccaaaaaaaaaaaacataaagcccccaaagcccaaaaaaaccaaaaaaaaaatttgtgcccccccccccccattcccgaaaaaaaaaccggaaaaccgccaaaaaaaaaaaaccctaaaccccccaaacaaccgaaaaaagcaaattccccccaaggccccttttttttatttttt

SEQ ID NO: 85088 - DNA, 330 bp, Glycine max
gccaaccgaatgctgtgattaaggccgtgttgtgtagatccaaaatttcccagggcctaagaaaaaaaaaattatttaactcctaaacgctacacatgtacaaaacacaaccccacttatgggttggagggggagggggagggaccctctgctttttttttcgcatttaaaggcaaacgccatctgtcgcatttatattttcgccaacagccatattttctattgtttggcgaattataactcatcttcccacatgaggttggacacggacataaaaagtatctcttacaaactcatttttacatatgatattgcccaccataatgaaag

SEQ ID NO: 85089 - DNA, 398 bp, Glycine max
  unsure (1)..(398): unsure at all n locations
gttaaaaaaaaactttgaatatgtaagctatattgtgataaccaattctatacgctacattattctgcttttccgnggacaagctaatgaagcaaaacaaaatctagaagacctgaagtctaaatcaatgtatattatatgtacaataacaaactagaatagcataaccatcattaatttgacatgcaactacgtattatatcaatatcatacccagttgctggacaaggcaaaatcgtggaatctaaaagacaattccccagcagtgtctctctcaagccgggagtgcgaaatttcacttgtaatatcacttggttccgaaggtggagggggcaatggcagcacatgagtttcatctggaagcgtgcaagtgaacttagatgcatgtgatggaacac

SEQ ID NO: 85090 - DNA, 328 bp, Glycine max
ttaatgaatcaagtcaatggtatttgatctaagtaccaaccaaagcaaagcactttgtacacaaggattagatttagggtggtatttgatctagcctggctagtagctactacattacatatagatacagagagatacgtccaggagaaacaagcacggaaaagctctgattcttctttggctttatcggaaagagctttacagtttacactaccaaggaagaaaaagaaaaaaaaagagtcactaagctaaatggatgacgagcttcattcactcatctgaactgaacaaatcatgctggcccacgactctactttttactattttt

SEQ ID NO: 85091 - DNA, 254 bp, Glycine max
gctagccgaccgaatgctgtgattaaggccatgtcgtgtagtttgaaaatttcccagggcctaagaaaaaaaaaattctttaacttctgaacgctacacatgtacgaaagagaaccccacttatgggttggagggggagggggagggaccctcggcttttgtgttcgcatttaaaggcaaacgccattggtcgcattgttattttcgccaacagccatattttgtattgtttggagaattataactcatcttcc

SEQ ID NO: 85092 - DNA, 345 bp, Glycine max
ccacgggagtttggagcaaaaccatttattatcccactaaataagtaagcagggggggcttaggggcatctgcatgggaaaataattggctctcacctaaacctacttttaatgaaagcgcatttgatcattacacacgcgagggagcctcttcatttttcggagcatgactcttttttttttttttctaaaaaaaagattctcttttcttagctctattatatttcaatggctaggaataaatggcgcgctgatccactccgttgtatgctagctagctagggcaagaatacaaagtttacaaccaccgaagcataatattatggctcgaaaatatatattttg

SEQ ID NO: 85093 - DNA, 96 bp, Glycine max
cttatttaaggatatttgttgaacaacttgtgtcttgttgagttattgctgtttgaatttcatgtaaaatgatactagctatatgtaaatcccaga

SEQ ID NO: 85094 - DNA, 107 bp, Glycine max
cccaaacatacgcctcagatccgctgctttttcttcaaggaaaggaagagctcaaagttgggggctctgtttttcagatgcacaaacctcacacttcagtattataa

SEQ ID NO: 85095 - DNA, 298 bp, Glycine max
gggtcgccacgcgtccggccaggcgtcaattatcaatactattttgttacattataacaaggtattctcccaatttgagagagaaatacaataggctgggctgcttatacactaacatgcaggcctaaaacgtacactatgcaaaccttatctttaaaaactcgcgctgagcttgctcaactatttcgttcaactaccatttcatggcttatttcaaaattgaagttcaaatactgaaacattcatcgtactaactttcatgcccatgataatgcttgatgctatgcttgcactatat

SEQ ID NO: 85096 - DNA, 218 bp, Glycine max
cccacgcgttcgtccacgcgttcgaccactcgtccgaaaaactaaaaaattcaaaaacatacatgggtaattcacacaaatatgcattcatatatacataatatatagtactatatggcaataaacaaagatggggtcggtctcgttcaatatttgttgtgttgaatgcgagtgcctctgatgccacttgcttattgctgaacaaaactgcaacaggt

SEQ ID NO: 85097 - DNA, 164 bp, Glycine max
gttctttctattgctttgagacatcgggttctgctcttctcattatgccccatataccaagagatggaccgacatgtattgtccatcttcgtgagttgcgctggccttgacatcgatcttgaatgcgaacgatacttagctccaataggattctgaggggttca

SEQ ID NO: 85098 - DNA, 250 bp, Glycine max
ctcgttagtacacgatggattggtccggctgccattgggcgacaagcggccatagctgcgattagacgcctgatgggtccttttgcctgaccacgatccatggcttcgctcctcttctgcgaagcggacccactttgtcacttccctcaagacatagcctaaactgatacggtctacccctcattacatcgttgaacaactcgttgcagctctgtcatgtgctgggaactgataaaaccattcccttttt

SEQ ID NO: 85099 - DNA, 327 bp, Glycine max
cacttgtactgttctattagttcatactaagttctgaaaatgagttccaaggttttgcttgttctacttatgttcttggccactatacttctgatctcctctgaggttgcacccgatgatgcatacgagaattttgacaaaatagatgggaagcctagtgcagatggggtagatgaaagcatgtattggcgcggcggctatggtggcggctatggtggtggttatggaagtggacaccgaggctatgcacgcgggcgtagcggctatacgaggagacacgtactctgtcgaagagtactatgatatacatgtgggcatcatatgtcc

SEQ ID NO: 85100 - DNA, 381 bp, Glycine max
cccacgcgtccgcccacgcgtccgcccacgcgtccgcccacgcgtccgaatttaccagctatacttgttccttttgaaggttagaagtgctacaatacaaacaatggcagctactcaggaagatgtgaagcttttgggtattgtgggaagcccatttgtgtgcagggtccagattgcccttaagttgaagggagttgaatacaaatttttggaagaaaatttgggcaacaagagtgatttgcttctcaaatacaaccctgttcacaagaaggttccagtgtttgttcacaatgagcagcccatagcagagtctcttgtgattgttgaatacattgatgagacatggaagaacaaccccatcttaccttctgatccttacca

SEQ ID NO: 85101 - DNA, 354 bp, Glycine max
acgcccacgcgtccgaccacgagtatgtccactacgtaccaccacgcgaactagttttccaggtctacttgttcattaagaatgttccaaatgctccaatgcaccctattgcagcgtcggatgcagatgagaaccttttggggtactgacacgctccacgtgtgcaagaagcacagtgctctaatgtagttggctcttgcatacaaaatttctatgaatatattgggcgccctgagagatacggttattagatacgaccctgcatactagaaggctccagtgattgctcacagggagcatgcaatagcgaactcactgcggagggctgaatacatccatgagacatggaataac

SEQ ID NO: 85102 - DNA, 361 bp, Glycine max
cgggccggaactgccccggagacccaggcgtgcgccacgccttccgatggggatggtttccaatggggggaccagtccatcaaatagtcccttagcaagagatggcttggtaactcatttttaaaaaatgggttatctacttgagatttgaaggagttgttgggacaaaatagctgttaaagaaattgcactatatttcaacttttatctatattaaatgactgggaaccttcacctgttttccccgtatgtgaaataaaattgcgccaacttgatttttttggtgattgtgtccttaacttttgaaaaaagaatggggtgccgttttaaaggatccaaatttattttccctggctgggca

SEQ ID NO: 85103 - DNA, 412 bp, Glycine max
cgccaagccgtcggaaaaaaaaaaaaaaaggctagtggccgtaatattataaaaaagggggagtttcaaaaccaagcctgaacattagatacctgggcggggggcttaaaaagtcctaatttccgtgcgcataattggcctcggcttgaattttattttatccctccgctaactcatatacctgtgcggttacccaaatttctgttattgaaataccgcagaccctccctaatttaatagcttggcatcaaagcccattttagcaccctgtttatttttcaaggaggcctatacgggggggcattacgctcgttggccgacatggaatcatgaatggtggcgggtttagtggggaccttaacaggggcggctggaggaggttcctcccaactggttacactcacttcccaca

SEQ ID NO: 85104 - DNA, 302 bp, Glycine max
aaaaaaaaaaaaaaaaaaaaaaaaaaaaaaaaaaaaaaaaaaaaaaaaaaaaaaaaaaaaaaagaaatggggtggccggtttcaaggatccaggctaacgtgcccgagcgtgcacccatatcattatttttatcggggcccctatctacttttcttgaacccaggtgctgcaacttctgttcggggaaccctcttgggtgacccaagttattcttcttgcgccccatcccctttttgcccgctgccgtaatagactggtggccctcaccgttcttcctttcaaacatattcccatcttaaat

SEQ ID NO: 85105 - DNA, 62 bp, Glycine max
aaaaaaaaaaaaaaaaaaaaaaaaaaaaaaaaaaaaaaaaaaaaaaaaaaaaaaaaaaaaaa

SEQ ID NO: 85106 - DNA, 313 bp, Glycine max
gctagatctgatttgaacagatgtagagaatgagctgaaaagagtgattcatcataatgaagatttattaaaactacgccgatgtgaataagtaaagttactgaatgataatcaagacacactggcatctgtgcgaggggggtcacaaactcttaagttggctaaagagttattcgctgcagaaatggagatagacaagtcaagcctaactgaaaaagctcaaagtgtgaggtaccaaatacttctgtatttttagctccaaaaaaaggaacttgaatcttatatacagaatcagttttagctgaaggaaaaa

SEQ ID NO: 85107 - DNA, 235 bp, Glycine max
ctgcctactctcacactcactccactccattgagaaagtgggttgcaacggcatgctggtggatgaagaagaccagctgacgcttccagatctggtgaaggaactaggccaccgacttgtttactataacctcactgcgaattgccttcctgtaaaccctaactggagcaaattctgcaactccctactataatccgtccgaatgctatgaagtcgacttattgcctccgtaggc

SEQ ID NO: 85108 - DNA, 117 bp, Glycine max
acgttcggacgagattagtcatctagaggcagttggataatacagcatgtttgtggcaaaagaaaacctgctgcgtgttctgaaagtgcgaaaggaagtaggcatccgtcttcaatg

SEQ ID NO: 85109 - DNA, 309 bp, Glycine max
ctttcgaccaccatgatactgtgcttcacgcttactcttggatctaacacccaaatacaccttctatggccaccaccttttgattttcccatggatcccttttctattagcccacctgtagtgatcaatcatgggctccggtatactaaaatggagcaggctggtattgtgtggccactgtataaagctccgacagtggcttccattaacctagcctttcttatttgaagcagtatttcttctattgctaatggagcgcccaggacaatacatatatgtatgggccattggggtgtctctcttggggat

SEQ ID NO: 85110 - DNA, 307 bp, Glycine max
aaaaaaaaaaaaaagaaaaaaaaaaaaaaaaaaagaaaaagaaacaaaaataaaaagaacaaagactaatggggtcttaggggacccacgtgagacacggtgtatgtggggtgtttctgccaagagtgtgcacttctggggaggaccaccaaccgttgtagtctttggttgggagatttgaagccgatgcgctgactggtggatttaacatggtgatatgttcttacctcgcatactgagtgctaaatccaaaggtttttaataaccgtgcaccacgtttttgttataacttagatgcgcaagcttt

SEQ ID NO: 85111 - DNA, 101 bp, Glycine max
aagtaatatccataacttttgtttttctttagaatttaaaagtttaagtagtcctctaagtaacacatatcttcttttatttttgggctcttaatagagtt

SEQ ID NO: 85112 - DNA, 301 bp, Glycine max
cccacgcgttcgcccacgcgtccgcccacgcgtccgaaaaaaaaaataaaaaaaaaaaataaataatggagtaaaaataaaataaaaaaaaataaataaaattgatagaaattttgaaaaaaaaaaaaagattgtggggggggtttttgaatacaagctttttgatagcgacgtgtatgtaagaataagttttttttggtgtggctaaatgtaaatatccagtggcgttttatacacaagggatatatggtaaactctggggtgacacacattaagccgttgactaagaatgtccttttcg

SEQ ID NO: 85113 - DNA, 300 bp, Glycine max
aaaaaaaaaaaaaaaaaaaaaaaaaaaaaaaaaaaaaaaaaaaaaaaaaaaaaaaaaaaaaaggaaaaataaaaaaataaaaaaaaataaaatataatttatttaaattaaatatatattaaattgtctttcggttttgaggtttctattttttcttacctttgttgggtacatattaatttttttttttttcttttgtaatttttttatttttgtcctttttctacatttgtcaatcttgataaaaccttaacgcttcccatttttcactttttgaattttttcccctttttccctttt

SEQ ID NO: 85114 - DNA, 272 bp, Glycine max
cacgcgtcgccaaacatcttactcatgatcatgtgacatctaacgctcattcacactggagcccagggtatccataatgtctaaaggaagctccaaagcacagtggaccgcacatgctccaaaccgcattcggaggactcactcggatcacgcaactcacagatcggtccaggccgtcaagggcgagagcgctgcaaaatctcagagcgtaaaaagaagaactatcgcgtcgtctgaggtcgagactgcgactcagctgctggccacaatca

SEQ ID NO: 85115 - DNA, 292 bp, Glycine max
gtttttcttcacagaagcaccttctagcatgaggtctttggccacatcactctcttgggcctctttggctgtagggtattaccttagttcagcaattgtgtcaattgtaaatagtgtcactggcaacacctcacatagaccatggctctctgggacaaaccttaaccactaccacctagagaggttttactggctcatgtgtgtgctgagtgcgttgaatttcttgcattacttgttttgggctatcagatacaagtatagagggacaggaactacaaacaactgaaaatga

SEQ ID NO: 85116 - DNA, 154 bp, Glycine max
tttttattttttttttttctgtttttcaacagatagggaacccagaccctcccttggtaccccatttacaagaaagtggctggtcccttttataagtgcccgcagccataaactatagttttagatctctaacttgcctcccataattaaggaa

SEQ ID NO: 85117 - DNA, 255 bp, Glycine max
gatctaaattcctatttattgggcatacaaaacaagttatcgatacaatacttggttgcccactcccaagtagctcaacaagaacccgcaaactggcggactagatgacacacccaaggaaccctgacggccatatgaccgcagaccagcgtacccacatgtggcctctaaacacaaattggtcacctcgtgcgcataaattctatcttgttgacaaagacaaggccatacagaatgacaatgcttacaacccac

SEQ ID NO: 85118 - DNA, 536 bp, Glycine max
cgcgtacggaagggaggctccagagcggccgccgtccttttttttttttttttttttttttctctggcaacaaactaagattaaaacgtttttttataaaattttttttctgtttggttaaattttaaggcattgtatttgttttaaacaaaaaaaaacaatggcccaactccgatcaaagggggaaaagaaaattaatttacagggaagagtgggtctcttacttaaaccaaaacggtgttaacagagtaggatcacccaattctttttttttagcaaagccaagaaggggttaaaaaataatttcttttggtggggggaggagaaaaagaatatttaggttttttttgccaaccacagattggcgggggaaattttgatccgtttctcgccaaggatgaaagacaatttggtcgcgcgtgtgcttattgggaacattaatacaatcgatgccaaggggggggggattatcctttttttgcggggacttaacggcagttaacgattgaataaggtgtgggggtctatttttagca

SEQ ID NO: 85119 - DNA, 412 bp, Glycine max
aaaaggggggggggggcccccagggaaaaaacttttttttggcccaaaccctttttaaaaaaaaaatttaacaaaaaaccccgggaatcaaaccaaaaaaaaattggcaggcaacattccttagggattggaggggcccccgacctttgcacaccaaaaaagagggggtttaaggtcccccccatcccaagggaaaaaaaaaaacctttttgtcctagggcccaaaacgttttttccaactcccccaaaaaaaaaaaaaagggggttcaacaggaaaccccttttaaaaaaaccaaaaatgcccaaagcggggaattttaaacgggggggggaacaagactttagccccaacccttccattaaaaaggaaagggggcaaccctctggttttaaatcggaaaaattggaaaaa

SEQ ID NO: 85120 - DNA, 357 bp, Glycine max
aaaaccctaataaattccttttttgaccacaaaaacctttatttaaaaaactatttcttttacacaaacaacaaatacacatacctaagaacaaaaaacccaaaccgccaacctttgccacaaacctggaacaccatttccccaccggaaaacccggaaaaaaaaaaggtatccccccatggcccaaacccttgaaaaccccccttttttttaaaaacccacaaacccgtgcccccacacttggccagaaaaaagtcattccctggacccttgtaataaaaaactgaatttaacccccggcccccttaggggaaccgtttaaaacctcggggaaaactagaaaaaccttaactcctg

SEQ ID NO: 85121 - DNA, 406 bp, Glycine max
cggcccccgggggggcccccggaaaaatggcccgccgcccccggggggcccacctttttttataagggggggttttaaaaggggggggaaaaaaggggaaaaatgtttcctgggggaaaaaatttttcccccccaaaatcccacaaaaaaatacccgggggaaaaaaaaggaaaaccgggggggccccataagggggcccccccccaaaaataggggggggcccaccgcccccttttaaaaaggaaaaaaaccggggccccctgttttaaaaaaaaacccccccccccgggggggggggttttttttttttccccccccggggttttttttttttccaccgggacggccgacaactgttttcccccctccccccgcccccccaaaaaaagttgcaagcggcccccc

SEQ ID NO: 85122 - DNA, 368 bp, Glycine max
aatctaaattcatatttattgtgcatagaaaagtttttttcgatacatttatttgttttttttttcaatctatctaaaagagaaattcccaacttcttatcagggggggggggaaaggaaacctcccgcccttttgttcgactccagggaaacaacctacgccaatagggcggggtggttattacccccgccagaaaaataaaagcccctaaagaccaggccctctggcgggaaaaaagcttactacttccaaggcggggggtgggggataactaagaccagcaccccgcactatatgttaaaggtgcagctcccacattctaccttttttaggctaaaccctggacggggagggaaccactgttttt

SEQ ID NO: 85123 - DNA, 459 bp, Glycine max
ttcttctccttcttcccttcatcttccccatcatcttctttccccttgaccttctctacatcaattttgtcatccttttccttctttttctttttttttttctctttgtcttctttccccttgaccttctctacatcagttttgtcatccttgtctttcttttcctttttcttcttttctttcttctcttcagcatcctcgccttcgtcattttttcccttttcctttaatgtgtctgtttcttcatctttgtccttcttttcctttttcttctccttctctttcttttccttcttctcttcaccatcaccatttttttcctttccctttaatgtgtctgtttcttcatctttgtccttcttttcctttttcttcttctccttcttcccttcatcttccccatcatcttctttccccttgaccttctctacatcaattttgtcatccttttccttcttt

SEQ ID NO: 85124 - DNA, 91 bp, Glycine max
cggactcttggttttacctttgaattttgtaccggtacctgtatgcttaccatctttccctatttgatgtgtattatagcttggcgcaagg

SEQ ID NO: 85125 - DNA, 443 bp, Glycine max
gttattttttttttgttttaatttataaacaagccatggggggaacacaaaataatttaaaaaatttatttctcacagggataaaacctccttattttaccccaatctttaggaaaagcagccacaaattcaaatattatatattttttagtacagtctgaacaacaaaaataagggtttttaacacaaaaagttgtttaacatccaaaatgtatggccttacccaaccttaagaggaccatgttaacgactgtttctgaaataaatttgccaactgaaattcattatcattctcatttcctgctttttctgctctcaaaaacaaatcttcctccttagtgtataataacgccccccttaagagatgccttatgctttttaacagcagaagtatttttttttgtatgtacattagacatgccaaaataatttgaggtaaccaa

SEQ ID NO: 85126 - DNA, 269 bp, Glycine max
ttttttttttttttttttttttttttttttttttttttttttttttttttttttttaaaaaaattattttattaaaaaaaaaaattgtttaaaaaaaaatgtgggggtcacaaaaaagggaaaaaaattaaaaattaaaagaaataaattgcaatttagagtgaaaaaaaaaaatatttttgttgcaagaaaattttttttttaaacgtcaaaaattttgattgtgggaaaaaaacaaagttccaaaaggccaaaattgtttaaggaac

SEQ ID NO: 85127 - DNA, 175 bp, Glycine max
ttgaaatcataactgggaacaaaagctatactttttttgctggaataataaactggaaaaaaagggcgccttccttttttgccaatgtttgaatccacctttaataaaaacccatgtccgggaatctttttttttaaacccatttttaaccggtcaaaataaagtaccttaaaaa

SEQ ID NO: 85128 - DNA, 195 bp, Glycine max
gttaaaccaacataaaacatttttttgttgcatggtaaaaagatggttcaactattcactaaaaataaaaaagttgggtcaacttgatcgatgttccaacatttgcaaggttttttttgagggggtttggggtcataacatcctagttcccaccccaacccggtcttacacgcacccttcaaaaccttaatcaaa

SEQ ID NO: 85129 - DNA, 357 bp, Glycine max
ttttaaatttttttgcataatttttacaagttattgacattgttgcctttcttaaaaaatttaaaccaacgaagtttttttttttcccaaggaaaaaaaaaggaaaagaaattacctgtttaagttttgccttcctaaaaagaaaacaactttttagcactccagagaccatatttcatgatcgatgtttttccccaaactaagcgtaaccttaaggtaaaccccttattttggggaaacgggtgaccaaaagcgttacatgggttgaaagttgtttgcccttaggtttcctccctaaaagatttagattattgggaggggtaaaattttcgtgaatagcttgtccaaacaggggat

SEQ ID NO: 85130 - DNA, 346 bp, Glycine max
gaaaaaaagggccgctattttttttgacaatgtttggattccatttttattaaattccttggctgggaattcatactttttaaatgccatttttaaccggtcaaaataaggtaccataaaattttattcatcaattaaatggggttatcatcactccaattttgctgcttaggctgattttctgtcaagatttcctgccattgctatagctgaatgcaaaaatgcaacgcaaacaaatatattgaacctttacaccaccaaaaaaaggaagaaagcacaaaggtggagatgggtgaggaacacaaaagtcagaaaaccaaaaaaggcagcgaaagatttaaccttt

SEQ ID NO: 85131 - DNA, 271 bp, Glycine max
  unsure (1)..(271): unsure at all n locations
ttttttttttttccaaaaacccccccactatttttcctttttccccctccccttttaataaaaaaaaaaaatgagngtttttttctttttcccccctcaaaaaaatccccccattcaccctttaaccttttttttccccccccctttttctccccaacccaacctaacctcaaaaaaaacccctttttttttttaaaccgggccccactatcccaaaaaatttttaaaaaagtttttcccctttttctgccgctctccataaatttagtat

SEQ ID NO: 85132 - DNA, 84 bp, Glycine max
cccaaaagtagtaattacattaataatcaaaataaggctgtaagccttgaatggtttattttctgatatatgttaagatatacc

SEQ ID NO: 85133 - DNA, 338 bp, Glycine max
aagaaaagaggccaaattgggaccaaatgggggtttcctttgccccttgtgacaagaaaaaatcatggggagggaaacatggggggaaagaccgtatcccggggggggatcacaccatatacaaagggggagccttaaattacaggggaagggggggggggggagacacaaaaaaaaccgggggggcatgacgctcactgggggggggggagtcgattaagactgcaaaggcccctgcataaatgaatacggcaagggggggggagagcccccctgcgaatggggacgcccgttggattaaaggggggggggggacacccgccccactgattggggaa

SEQ ID NO: 85134 - DNA, 55 bp, Glycine max
ttttttttttttttttttttttttttttttttttttttttttttttttttttttt

SEQ ID NO: 85135 - DNA, 371 bp, Glycine max
cccaaaaaaaaaatttccgcccaaccaaatcttggacccccccccctttgccatttttccaattttcccttccccttccccgggaatttttaggggcccccccaaaaccttttgaagggcccccttttattgtttgggggtcttccccccctaactttttttttccccttgtttttttttttggtccccgggccccctgtaaaaaaaaaaaaaaccccccctttttgggggaaaaaaccccccaagggggaaccttaaaatttggggggcctttggccccccctgggggccccccccggccctcgggccccctaaaagggccccccccctttttggggttcccccatccccttaatccatgttaaactttt

SEQ ID NO: 85136 - DNA, 538 bp, Glycine max
ttaaatgcaatatgacttgaattgttatttcataaatgagtgtatgttacaatacatatcgtaatcagttcttgtcgacattcctcggctgtcttaccaaacattttgatacacgtcacatcccagaaatgaaagttagctttctccccattgtgttccattttcacaactaatttatacattttacttgggaaccatatgagtaacttggttctggcacgaacggcaggctgcccctatttttaatggatcaaatgttgtagtacagtagggacaactatcataacttcatggtgtatcaatcatgacttcatccaccgtagcaacggtcaaacaataacagtcctctctcagtctgcttatgtcacctaagctgaccatctgagcattatgcaagaactttgcctctgagtttctttgtgaatagttggtatactaggactacgaaccgctcccttcatctgttactccaccaacataaaatggcacacgtaaactattacggaatttcttgatttcggcaatatcggccttcaca

SEQ ID NO: 85137 - DNA, 314 bp, Glycine max
gtgttcgagtcttagcatcatccagagtttaagaggatattaaatccgaagccacagagatcctcttccgctgcaacatatatatgctcacttctaccactcggtcgaaagaccaaacgatgcttttgcagctgattttgagggaagggtaaaacaacagaaattggtccaacctcctcgttgtatgatgagctcacctaaaagacttgtggtctatgttttagaaaatacacatgccaaaaaggtgtctaaaatgttaaaggatatagtaccagctgctaactcaaataaaagaaaccatgggtttatgccga

SEQ ID NO: 85138 - DNA, 455 bp, Glycine max
cattgttttttttttatctttttttttttttttttttttttttttttttttttttttttttttgtttttttttttttttattttttttttttaaaaaaaaaaaaaaactttttttccaaaggggtttttgggggggaaaaaaaaaatagcccctatttaacaaaaaacctttttttcccaaattttctcggttttgaaaaaaaaaataaaaaaagcctgtttggaaaaaacaaccaaatgtcccggcataaactaaaaaagggggaaccttaaaggaccccctttttttttggccgcaccttggattcccccggaaaataaacaccggtcccgtgggggatccaatttttccttaagaggggggtgaaaaaaagttgggaaaaaaaagggcaaagttttttcccgtggaaaattttattccccccagatttccacccaacattcaaccccaaaaa

SEQ ID NO: 85139 - DNA, 410 bp, Glycine max
agactgaaaataaaagtaaccgaagctgcggatgacaacacaggctcgggacaaaacacacaacaaattgattagcctataggaatgaaaatggtataaaacctgcaacataagggggggttctaaattgacactgctctattcaaaggaaaataggtcatgttttgcatgaactaaaattattgggcgaaatgcaaaagcacctctcaaaacctagactaacgagagagagaaagatatggtgcaacactcatttattggtaatggaagaatattccctgaacgaaatgaatatacaagccactgagacgcaggtggaggcatcggattactgacaactattctatcttataaagaagctggcacggatgacagatgaccattatacgcgtgcccactatggttgcatg

SEQ ID NO: 85140 - DNA, 356 bp, Glycine max
gagacagaaacatcccatcattgtgtgttaaaaatgctctacaaacctattacctcataaatgcacgagagttacggactaggaatacaaaagcggcgtaacaacaatagcctacttccatgatactggttatgaaattaggatacgaccagataatcaaagggctatataccaacaacatcattgactgattagctgacttataacccacctgatacatgatacacgctagtcacaagccaattcggggtctaagctgttcaagcatcttgcagcagccaggaacgcagatcaagggtaccgatcagtgatggagaacatgtgcttcccaactttgccaaccggaataacgatct

SEQ ID NO: 85141 - DNA, 197 bp, Glycine max
aaataaaattttttaaaattaaaagaaaaaaaaaataaaaaaaaaaaaataaataaaaaaaaaaaggaagggaccacccaaaaagaaaaaaaaatccaactaaaattggataaggcgtggaaaaaaaaaaaaaaccttattaaaaaaaaaaaaacttttttttttaaaaaaaggaatgtgcaagaagctctgcgcgt

SEQ ID NO: 85142 - DNA, 230 bp, Glycine max
agcttcaattgctcgtattactggtaaacctttttagttcacaaccaattgtcatcatcgatttcaaaatttactcccagaccgaaccggaaactgtggtggaccccgaggccaccacccgtacatcccacaaaagagcgtacctatcgcggaaagagaacaggttctcctacagagaaaaaaactaacagaccgggaaggtatttgaaaacgcgatttgctgttcaaaa

SEQ ID NO: 85143 - DNA, 196 bp, Glycine max
tttaaattttttttatgtttttttaagatgcatatgaaaacaaagtctgatgcattacgacacctgttgagttacgacaagacaaatgaagttctatatatcaacaccggcttttgccatttcacgctagatgtatgtaattaacgacgcgagggtccaacctcatttaaaaaaatgctcatttcttcatcaagta

SEQ ID NO: 85144 - DNA, 343 bp, Glycine max
caaaaccccggggggggccccgggtttcccccccttatttttaacccgcccctggggggggccaaaatttttttaaaaaaaggggtttaaaaaagggggaaaaaaaggggaaaaatttttttccgtgaaaaaatttttttccccaaaaaaccaaaaaaaataaccagccggaaaaaaaaaattaaaaaccggggggggctaaggggggggcccaaccaaaatttttgggggggccccccccccccttttaaaggaaaaaaacttttgggcccttttttttaaaaaaaaccccaacccgcggggaaaagggtttttttatatttccccaaaggttttttttttt

SEQ ID NO: 85145 - DNA, 359 bp, Glycine max
gtaggattcgtcaacgtgctgcttaaaccaatgtttggtgttttacgacacattctgattttggcgggggcaaaaaactttgaaaacccaatttccccttttactaaaccccacaattgaaatggaatttaaagggcttgtttcccatcccctttaaaaaaggcccccatcctcccttccatgtaaaaccggggcctttaaccccgggggcttgtccgttcatttgggaaaaaatttatcccatttttttttcccgccgccccaagggcattggtaaacctcggcgtgggcccaaagggaacattttttttaattttggccgggcaaaaaagaaaccccctttttaaaaggggcccgtg

SEQ ID NO: 85146 - DNA, 120 bp, Glycine max
gccactcatccgtcattgagctttaacatttgctataaagaaatctatggcgagggatagcgaagtgaccctcacgactctcatgatgctattgttgaagaaactcaaaattataaaact

SEQ ID NO: 85147 - DNA, 284 bp, Glycine max
aaaaaaaaaaaaaaaaaaaaaaaaaaaaaaaaaaaaaaaaaaaaaaaaaaaaaaaaaaaagggaaaaaaaaaaaaaaaaaaagggggggccgcctttttggagccaccattttttcccccgccttcctacgacataattttttttttttggcgccacaaaaaaataatctggcggccgtttttcaacaccgtgactggtgaaacccccttgtttccccccttattaatcttgtagaacatcctccttttttcacctgttgtattaataaaaaggccccccccaa

SEQ ID NO: 85148 - DNA, 401 bp, Glycine max
aaagaaggaaaaggatgacaaaattgatgtatagaaggtcaaggggaaagaagatgatggggaagatgaagggaagaaggagaagaagaaaaaggaaaagaaggacaaagatgaagaaacagacacattaaagggaaaggaaaaaaatggtgatggtgaagagaagaaggaaaagaaagagaaggagaagaaaaaggaaaagaaggacaaagatgaagaaacagacacattaaaggaaaagggaaaaaatgacgaaggcgaggatgctgaagagaagaaagaaaagaagaaaaaggaaaagaaagacaaggatgacaaaactgatgtagagaaggtcaaggggaaagaagacaaagagaaaaaaaaaaagaaaaagaaggaaaaggatgacaaaattgatg

SEQ ID NO: 85149 - DNA, 198 bp, Glycine max
aaaccctaaaaacgaaaccaactatggcagcatagcaggcagaaagcgataaacgaaacaaagtagaagaagcaaaacaaagggacacagaagcaggaacgagggggggcactgtgtagaaaaaatggggaagaagcagaacgagatccaaaaaacggggctaggtcgagccctggtgaagcagcacaaccagatgat

SEQ ID NO: 85150 - DNA, 210 bp, Glycine max
aaaaaaaaaaaaaaaaaaaaaaaaaaaaatttgggcttttgatttgaatataaaaaattaaaaaggggtaaattaaaaaataataactattatataatataaaaaaaaaatcagttcttttttcaaatttttaaaatttataatactattaaaacaaaggcgttacctattttattggttaaagcaaaatataataaatttttcaagttt

SEQ ID NO: 85151 - DNA, 359 bp, Glycine max
ctctctgtgtatttccctacctctcccttcaagatgcagatcttcgtcaagaccctcaccggcaagaccatcacccttgaggtggaaagctctgacaccatcgacaacgtcaaggccaagatccaggacaaggaaggaatccccccggaccagcaacgtctcattttcgccggaaagcaacttgaggacggccgtacccttgctgactacaacattcacaaggagagtactcttcacctcgtcctccgtctacgtggtggcatgcatatcttcgataagacactcaccggcaagaccataaccctagaggttgaaagctccgacaccatctataacgttaaggccgagatccatgacaa

SEQ ID NO: 85152 - DNA, 339 bp, Glycine max
cttatttgcgagtcatgcagaactcgaatgtattagatactcgtggacatctgcggactgtattggtttatggattgcggcctcatatggtacttctaatataaaagatgtaatctttaatacatgcagaaacttgctacatttatggcgagatttttcttcagttgttaaacttgtattcgtttatgactcatgttattgtttaaagctagtattgttatatgaattttaattttttttttggccttataatttaaagcatattaaaatatacttttgttgatttgaaattttgatcaatttattcttttttatgtcaaaaagagaaagttttttatt

SEQ ID NO: 85153 - DNA, 348 bp, Glycine max
aactccctctctccctttcaattttcaattttctctttcctcccttatgtcttgcatcgcgttatttaaacaccctgcttcctatgactattccctaaaatcctattgcgagagcggtgtttccgcttgagacactccttcgtctttctcctaaaactccgacctcgttcggaccagattctttcgtggccttgatcctcacttctttaaaccctaggatctgacattttccataaactttttttctttccttatggacctggctcgtcaacatttctttcacatttttctagcgtgcctttgactatattgtcccgcttgtaaattcctactttgaatttcatctct

SEQ ID NO: 85154 - DNA, 393 bp, Glycine max
catgccttctattatggcagtagaagtgtcttcggtttgcatcattcattcggcatatggaacggggcaccacagtacatgcttcttggatctgtgaatctctaaaaactaaatgagtcacggttcataaacacacaacctttaagtagttacgtcctttttttagtgagtgaatggttcaatatattcattggattgttgtttgcatataatgtggattgaacacactttatctgctatttttatctttatcatttaaatgtgtgactttttatgtttatctttattagtcttgtgtaatttactattttttttttgttcatgtatgtattttatatgttgttattttatttgtaatataatttttatttgtatttttcattattttctttt

SEQ ID NO: 85155 - DNA, 425 bp, Glycine max
  unsure (1)..(425): unsure at all n locations
caaatagtctcatttggggaattttttttttatactgaacccacccattgtagcttcctttcttcttctttngtgaggaagattgatttttacattttttctttcttatatagttttactctttattttttacttttttttttttattttatttttttttttcttttattttttttattttttttttttttatttatatatttctatatcttttattttttttttttttttttttctttttttttttttttttttattctctttttatttttttttctgtggttattttttatttttcttttattttttttttttttttttattcttttattattttcttttttttctttttatattttttttttatatttttattttttttctaatatttttattttttttaattatttttttttttttttttt

SEQ ID NO: 85156 - DNA, 84 bp, Glycine max
ggtatatcttaacatatatcagaaaataaaccattcaaggcttacagccttattttgatgattaatgtaattactacttttggg

SEQ ID NO: 85157 - DNA, 227 bp, Glycine max
ctggattatagttgatggttgtcataaattcatgttgggggttgtgaggcctcatctgttggtcggtttcttttgaaatttgacctccctctcgaagctgaggatcgatgttacatgccaaactaacaaggggctactataaatacagtgtcatacgcacctattattcaagtgagatccgtagaggaaacttaaaataccacccaaggatcaggaaggctacaatg

SEQ ID NO: 85158 - DNA, 63 bp, Glycine max
cccacgcgtccgcccacgcgtccgcccacgcgtccgaaaaaaaaaaaaaaaaaagaaagagag

SEQ ID NO: 85159 - DNA, 297 bp, Glycine max
  unsure (1)..(297): unsure at all n locations
cccacgcgtccgcgctctgataacatcattatgtttttcttggacaantcttatgcatggcttctgtgttatatctataccactcattcttcactccatgctacttcaataattatcaaatactttttcttgcatatctttattaacattacatttttcaatttttatataatcctttttaaccattatattctataaattattactaatatattttttccttttcaatcaaatttttttccatcaattccgaaatttttaatatttcatcaatcgctttttttatttttaattttt

SEQ ID NO: 85160 - DNA, 211 bp, Glycine max
aacacattgactcaagaacagatgcgtgcttatgatgtaatgtctgactagaaacgtgagattctttgcatttcaatcgctgcgtgcatatagtcactggccatcgaggctcatatcatgctgattcatgtactggctgtgcagcaagatttaatcgacctggaacaaagggttgcacgtatatgaatactgaatgctttcatgttcatga

SEQ ID NO: 85161 - DNA, 214 bp, Glycine max
cccacgcgtacggctagtagtgattgtctgttgcagggcaatactgtatcgaggacgatgatagcatgatgtgacctttcgatcttaataacaatgcctccggattgcatgaacaggtggcctgcacgtgccttaatttgactgcacgactaatcagtagcgtctgcaaacacctcttaaatcattggtgatgcctaacgagctgctagcgcac

SEQ ID NO: 85162 - DNA, 261 bp, Glycine max
cccacgcgtacggccacgcgtctttgtctgatgctgagtgcttctctcacgacgacgatgataacttgctctgtacttacgaccttctcgataactgcgccggatggtactaatacgactcactgcatggactgaagtgtggctgaactaatattagctccgtgtacaaacacatgctaaaacatgggggcgcctccacgtcatgctcgcgaacatatgccatgtcaaatagttaggacaaagaacgagatgatcatacta

SEQ ID NO: 85163 - DNA, 401 bp, Glycine max
cgcgggcgggtaacgtaccgggagtcggtgaaagctttctgaatttgaccgaagggcctctttatgggctgctggatgtatataacaattccaactacttctttgttctagctctgctgttcttgaggattttgcctattgcaaagaaaaaatattctccatacctactgattgtgtttttacctatatatatttgagccggggtttatgtcttttcagtcacacaaagaataaaggcttgtctgaattattaccttaatttattttacaaactttaatttaatcatataatcttatttgaaacaaacacttgatctattcacacaccataaatattttttattttttattctatgacatttgaaatagtattttaaattttttattttcttaaatttttt

SEQ ID NO: 85164 - DNA, 292 bp, Glycine max
cccacgcgttcgaccacgcgttcgcccactcgtccgtaagaaacaaatgagaaaattggggcgtggggatgtttaagatcgaaaaatcacctactttagttgaagccttgaaagatagacatgtgaaaaataggggcgtgcggtttaaactactcaagtttccatatccctgcatgcgagggtatatgtttcttatcggtcccacgactttaaattctatacccgcctttttatacactagaaactggcaaaactgttataattcccaacttaatcactttcattcatatac

SEQ ID NO: 85165 - DNA, 353 bp, Glycine max
acccacgcgtccgcccacgcgttctaaaaaaaaaaaaaaaaataaaaaaattaaaaaaaaaaaaaaaaaaaaagggaaaaggaaaaattaaaaaaaaaaaaaaaaaaaaaaaaaaaaaaaaaaaaaaaaaaaaaaaaaaaaaaaaaaaaatataaaaaaaaaaaaaaaaaaaaaagggggggggttttttaaaaaaaaaaattttatttgggtttattaaaaaaataatattttttttttatggaaaaaaaaataaaatttaatgggggggtttttaaaaaaattttattttaaaaaaatttgttttataaaatttttattttttttaaaaaaaacgttttttttaaatttta

SEQ ID NO: 85166 - DNA, 400 bp, Glycine max
tcgcgaaaactatacgattcgatttcttgttttcaataaaaaaaaaaaaaaaaagggaaaaggaaaaaaataaaaaaaaaaaaaaaaaaaaaaaaaaaaaaaaaaaaaaaaaaaaaaaaagggggggggttttttaaaggataaaagtttattttcgcttgtttgaaaggtaaaattttttttatagggccacctaaattaaattaattggcggttttttaaaaacttggtgtttggaaaaactttggttttccaaaatttaatttttttgaaaaatattttattttaaaaaagtgttgaaataacaaaaaagcccaaaccattcgctttttaaaaaatttgttaaacttaaatggaaattgggactccccttttagggggacttaaaatccgggggttt

SEQ ID NO: 85167 - DNA, 365 bp, Glycine max
ttttctttttttttttcttaatttgaactgataaagtttgcttcacaaaacattattgcgcaccccaattattaatggcgaaccgtgcctttaggaggaataaaaaacttacccccaacccagggcatgcgagatgaccaaaagagggactttcaccgaatgggatcaaaacacgaagttttaacccagcgcgaactatttaaattacataaagcaacccaatgctttcatgaaagcattttctgcgagtgcaatactgaaccgactgtatccaagaattcccgtccacgaaccactattgatacataatccagtggctttgagaatgacatgcctaatattagagtgatggagctttattgcct

SEQ ID NO: 85168 - DNA, 222 bp, Glycine max
tgaaaggaatgaaagaacaatcatatatataatcaagattattataataaatatacttgctcatatattgaaatatgtttgaaaatttaagatcccttgctagtcgcctatagtttctaatattaatattaaattccaattacccaaggaaaaataatatataaaagttcatttatttataaagcaaaaaagatgtgtgatcatttataaagcgatagagat

SEQ ID NO: 85169 - DNA, 441 bp, Glycine max
aaaaaaaataaattttttttttttttaaaaaggggcatttaaaacagtttgatcccggtttttccaaaacacagggccaacctttgatcatccttaaacatttatttttaaaaccattacccatgatccctcgatttacctatgcgggtttttttctacgggggtctggatttactttcattccctcacgttagatttatcccctttttttttaccaaattccccaaaatttagggccccagtttaaaatttcccgtcaattcgggggtgactttttccattgaaatgtaaaggaaagcccttttttttacttctgggggctgctgctttgcattgaaaatgctgtcgttttaccctggacataccattttcattgacatttctttcacccattgtttcgggaacgtaaaaaaattctgacttttgctttcgcaggggaac

SEQ ID NO: 85170 - DNA, 507 bp, Glycine max
aaaaaaaaaaaaggcaatcaagaagtgaatgaaagtgaagatccaaaaattacaaaacctaatgaagtaatgaaaaacccaaatcgggaacaaaaaaaaaacacaatacacaacgaaggtgaaaggaaggaatcttcatcgccaccaaccctcgacttctgtgttcgcattcaaaggcaaactccatctgtcgcattgctattctcgccaacagccatattttctattgtttgcagatttataactcatcttcccacatgaggttgcacacagtaataaaaattatctcttacaaactcatcttcacatatgagattgcacacaataatgaaagtgacgtctcaccctccaaagcaggtgattgtctttggtttcatgtcaccgcaatggttgttccaatggctccgatgattgtgcttgcagcaaacaatggagaaaaagtaggagaaaagagtgggaataaaaaggaacataaaggaaaagtgagggagaaaacacatttaaagg

SEQ ID NO: 85171 - DNA, 229 bp, Glycine max
tcttgttttatgaaaaaaaaaggtcacagtgggtggaacttacatccactactcctttctaagaaggagaaaaaccatttctacaataatacacacctactgaacgctatgaaatattttatcagcacatatggttgatggcccaattactgcaaatcagtatcagatatgtttggcatcagcttttaccctaaagcagaagtgtatacctaattatcccacgaagttt

SEQ ID NO: 85172 - DNA, 318 bp, Glycine max
aattaaacacttgaaacatcaagctttaattcaaaaggtttaaaaggtttttgtcttcaatttccgtgttaaaggaaaaggtctcttaatgaaagaatttgtgaaaagcttgaaaacacttgtttcactacctaggaagtcattactgggaaataatgttaaaacaaccatttgggctataaatatgtaccgggaacacgattatccagacatttatttcccatgttctatgacataaattaaaaaatggaacccgtgatctcctcaaggggctggtccatgatttcggaaaccgcctccagaaatgtggctttactt

SEQ ID NO: 85173 - DNA, 347 bp, Glycine max
attgaaatgtttaaacccaaaaggggacctgaaagggttttgccttttaaacatatcgggaaataaatttgggaaaaaaaagggctaccaaaaattttgttttgttaacaaacttttaaaagacttgcccttaagttaaaattccgaacaaccaaaaaagggtttgtttttcaattagcggggggtggaggggaaaagggaatgaacaacaaaggccttggttttcctgtttgttaaaaaaagggtgccttaccctgcccaggtttgggactttccccatgatcaagatgaaaaaatgctcccttaattttgggcaaaaactcaagctttttttgggatgcttcccc

SEQ ID NO: 85174 - DNA, 402 bp, Glycine max
  unsure (1)..(402): unsure at all n locations
aaaaaaaaaaatttttttttttattaaaattttttttttaaaaaaaaattttttttttttttttttnaaaaaaaaaaaaaaaaaaggaaaaaaaaaaaagggggggggaaaaaaaaaagggggttttcaaaaaaaatgttttggtaaaaaaaaaaaaaaaaaaaaattgggggggggggaaaaaaaaaaaaaaaaaaggaaggggggggggattttttaaacttttttgaaaaaaaaaaagtgtttttaatttttttaagggggcttcttttttaaacccctgggggaaaaaaaaaaaaaggccccttaaaattttttttgacccttgggggggcccccccctggggggggggcacaaaaaaaataacccccccccctttttgaaaaaaacagggccggggg

SEQ ID NO: 85175 - DNA, 476 bp, Glycine max
gtgacaaccttcactgaaatccaaaacctagggtgtgtacaatgacagatttaccccatatggggaccaattccaactcaaatgataactctttcgcaaagcatggatgcaatgaattcatgaacattcattttgctctgacaagcaaacctgtattgccatcaaaccacccaagaatcaatctgttacacattaagcatgttacaatcaatatgccttaacagaaggtgatctaggaggagaagttgaacaagttgcaccatttttggcacattcttgttcaggcctcttggcaaacgctgtaccgacccgattgttcctcaaaccattaaaaacacaggctgctgaagaagctgtagctcctgtgctacaggcttgatcagtatggaaacgatgcttgaggcacaacttaatgagccaagttttacatgtgctggagttggaaaacgtcaaaacctccctgctacgctcgacgg

SEQ ID NO: 85176 - DNA, 425 bp, Glycine max
acaacatgtgtacaaacccaacataactgtgtgctagcataggtagagactagttacatatacagcctaagattattacactcattatttttgggctcagaaaagccctacttcacgaagtactacttattggggggggtcttctataccctttttcgtggtcggcatatccatagcaacaagaaaacctaatcgcatacaaaaaggatcaagggccccccaaccagagattacaaaaaaaaaaaatggatttctttagacaaaaatgtcgaaatggttctctgaccaaaaaaaaaaccagatagggcagtacctcaacccatctcacctagctatcaccccggggggaaccaatccccatcatcggaaatatcaaagcccatatcttcacttttactcagtgcatagaccaaatccattatgct

SEQ ID NO: 85177 - DNA, 377 bp, Glycine max
ggggagaccaaaatttttttttaaaaattttggggagattaaaatttttttttttttgaggggggttgcaaaaaatggaaaacaatggggcccgataactcaattaaattccatcaatttgaattttttttaaaaaaaataaaaccctttttgaagctaatttgtccattgaatttttccacaatagggacggtcccttggacacacgtttaagtgttttttttaaattgggagaacaaggttaaatgctcaacaacacgaacggggcatgttccatttttgcctgcaagggagttaagctccaagttcggtggcttaatctggtggatatgatggacttctaagcgttgaaagtttcctttgtaattaaagagttg

SEQ ID NO: 85178 - DNA, 249 bp, Glycine max
ttagcacggaaaagctctgattcttcaagggccaaatcggaaagagctttacagtctacactaccagggcagaaaaagaaaaaaaaatgagtcactaagctcaatggatgacgagcttcattcactcatatgggactgacaaatcatgctgggccacgactctactatggactatttttatcatcgtctttttcacaacagtggaatggaaaaaatagtccaataggcataacaaaaatttttcttttt

SEQ ID NO: 85179 - DNA, 513 bp, Glycine max
ggaatggcattattctgtcctttaccattcacactatctcaaaaaaagccaaactatctgaatctgaactatagtccatcaataggagtagtattacagcatgaactgggagtcacacagaaaaaaaaaaaaaaagaagaagaagaaaaaagtattacggcatgaacaataaagataaataaaaaaatgtagacaggaattaaagaaatgaaggaatcaaatcaattaacctgaaacttattttccaactatagtatttttttttcttgtgaattattgccaagaataagggaacaaaatgagatgcaagtgtgcttgggttaccgttcaattcaaagtaacccatgtttttatggattcaccaagtgttgttacttctccgttctgtgcattggaatgcgcaaacaaacatttagtgcctctcaaacaataattcaaatacacacttagtgtccttggccagggcttggacctgagtccttcatctcaccaagggtctcactgttggtaaat

SEQ ID NO: 85180 - DNA, 395 bp, Glycine max
aaaatgatcttcccttgatagacatttttgtctgtttttttattttttttttttggggatacctaaactgccttatttttttgattaaaaattccccgcccggaaaacctattttctttgaagaagcacaccagtttatttttcgcaaaaaatacatttcctatgcgctcatcaatataatcttatttaactgactcttagtaatcttgggctcaacaatccttggggcctcacgggggctctgaatttggctccagctttcacatgattgccaaccaagttcccccttaatccttaggaactggttgtacttggcaagcctttcatactgggagggagcctcagtcttgttctgaccagtctctaatacagctgagaggtcaacattgaagggc

SEQ ID NO: 85181 - DNA, 327 bp, Glycine max
  unsure (1)..(327): unsure at all n locations
aaaaaaaaaaaanttttaaaattttttttttttttttaaaaaaaaaaaaaaaaaaaataaaaaaaaatttaaaaaaaaaaaaaaattttttttttttaaaaaaaaaatttttttttttaaaagaaaaattttttaaaaaaaaatttttttttttattaaaaaaaaaanaaataaaanaataaaaaaanntnttttttataataaatttttttaatttaaaaaaatttttttatttttaattaatttaaaaaaaaaaaaaaanattttaaaaaaaaaaaaaaattaaaaatttttnaaaaaaaaattttttttaaaaaaaatattttt

SEQ ID NO: 85182 - DNA, 511 bp, Glycine max
cttattggactcttcgtcgactttttatttttatggtaaaaattgaaaaccgtacgaaaagatttataatactcacagactctttatcaactttctatttacttgtagcgttttgtcaaaaaggtccataagatgatgtagttttctttctacgcttcaaaattctgaagagaagccagccattgttccatgtaattcttcccagctgaagaaaattcattggagaggttcttgatgacacccaaaagcgccttgtttgatgcctcctccaccaccttgcagcagctaggtttatagcaaggaaccagcactgcaaaaccatcatcaccattgctccgaaaatcagaggctagaggctccaaccacccaatggaccaatctgagtcatcagattcagaaccagacaagcaacaatcacagttacaatcattatcacatggtaccaacacaacatcatcatcgtactctctatccactcttctctcttccttgttccttccaactttcctat

SEQ ID NO: 85183 - DNA, 406 bp, Glycine max
  unsure (1)..(406): unsure at all n locations
tttnnttttttttgctagcaaaacacggaatttaagtgggggacatttatttgagcatgcatgccttgttcttccaagaaagggatgttaatatgtgcatatatacacagggtattatggtttctcagcctgcatagcctctaaaaggcattagccacatttcatccggaagacatttaacacaatcgcgaagaaaaggagcaaagattattttgttcatttcgctctttttatgcacaactctattctattggttcccttctaaaaaaacagttttaataattaacgctcacaagttgatgatgttcaaaaaaatcagggcgaaaggtacataaaaaattttttggcctgaaagcatgttaaaccttcaaccatactcaaagagcactattttttttgcggttac
